United States Patent Application Publication US 2004/0214272 A1 - sequence listing, part 19

SEQ ID NO: 77795 - DNA, 841 bp, Zea mays
  Clone ID: MRT4577_170974C.1
acggcgtatacatcctaagggcgattgggttcctcgaggccggccgggatccaccaacacatccatcaacgaaacaagcgcacaagaaaaaatacctcgccgccaacaatggcctccatgtcctccatcctgctcgcaacggcgatgctggctgcgctgtttgcggttggtttgtgcaccaccccgctcaccttccaggttggcaagggatccaagcctggccacctgatcctcacccccaatgttgcaaccatatccgatgtggaaatcaaagagcacggtggcgatgacttctcctttacgctcaaggagggaccgaccggcacctggacgctcgacaccaaggcctcgctcaagtaccccctttgcatccggctttgctgtcaagtctggtggctaccgcatcgccgacgacgtcatccccgccgatttcaaggccggcaccacctacaagaccacactcagcatctaattagcctctcatgatgaattagatttcaaaagagctcatctggcgcacatgttagcaagacaatattattttttctatggttattttgtggcaccaaactacccaagaaataagtgatgctacatgccccttctgacgccttgttgtgttgggttgatattattacataaactagatacattatttatttaaggttttaggagaaatatgttgatgttgaccacattcattatcgagatggttgtacatttgattttccaatgttttcatacttatgaaatgctttgtttgtgtagtttctatgcctggattaataaagtctgttttatcatttttaacgaaaaaaaaaaaaaaaaaaattgcgggcct

SEQ ID NO: 77796 - DNA, 456 bp, Zea mays
  Clone ID: MRT4577_170975C.1
atgccgcgactcgaggcgacccagcgcacgacccagcagcgccagcctggcgcgacggtcaatgcggccaaaaatgggccgacagtaatgacggtggcaggcggcacctccggcaggagaagcgggcgacgcttcgccttcgccataatgaccgcgtcagtaaagggatcgggaaagggggataccccgaaaaggatccttccccgtgaaggaaccaggctccgagcctccctactgatcagaggttcgaaggctggcccctcggaagggttcgacagccgcctcagatcacgtgggccctacacccactactggtcagaggttcgaaggccggcccctcggaagggttcaacgaccgcctcaggctactcgggctccgcgcccactactgatcaggggttcgaaggctggcccccgaaggattcacagccgcctcagacacagagcgagggatga

SEQ ID NO: 77797 - DNA, 647 bp, Zea mays
  unsure (1)..(647): unsure at all n locations
  Clone ID: MRT4577_170976C.1
ccggccgggacacacacacatccatcaaagaaacaagcgcacaagatcaaatacctcgccgccaataatggcctccaggtcctccatcctgctcgccatggtgatgctggctgcgctattcgccgttggtttgtgcaccacccccctcaccttccaggtcggcaagggatccaagcctggccacccgatcctcacccccaatgttgccaccatatccgacgtggagatcaaagagcacggtggcgatgacttctcctttacgctcaaggagtgcccgactggcacctggacgctcgacaccaaggccccgctcaagtaccccctttgcatccgctttgctgtcaagtccggcggctaccgcatcgccgacgacgtcatccctgccgatttcaaggccggcaccacctataagaccacactcagcatctaatcaatctctggtgatgaattagatttcaaaagagctcacctggcgctcacgttagcaagacaatattttttctatggttattttgtggcgccaaaccacccaagaaatatgtgatgctacatgtcccttatgatgccttgttgtgttgggttgatattattacataaactanataaattattcataaaaaaaaaaaaaanaaaaaaagcggccctcn

SEQ ID NO: 77798 - DNA, 480 bp, Zea mays
  Clone ID: MRT4577_170977C.1
atgatgaccgcatcaaaaagagggaccgggaaaggggatactctgaaagggatccttctccgcaaaggaagcgggccccgaaccctcctactgatcaggggttcgaaggctggcccctcggaagggttcgacagccaccctagagcactcaggctccgcgcccactacttatcagaggttcgaaggctggcccctcggaagggttcgacagccgcctcagagcactcgggctccgcgcccactactgatcaggggttcgaaggctggccccccgaagggttcgacagccgccctagaacacacagagcgagggatgactctggaggctcgggggctgctcttgcaaacccggctccggtcaaaccgttgacagtgtcaacataccagcctgagaacttggaacctgaccatgcacccgggctacgatcagatcgcatgagggaacaaccagaccggccgaggcatcacgaaaggcagtaa

SEQ ID NO: 77799 - DNA, 290 bp, Zea mays
  Clone ID: MRT4577_170978C.1
attcgtctcgagaacaatcacaggcctaggttgtttgtgaccggttataactcttaaaatgggggggaggtatatctgtcgggggggaaaccaccaaccgaagggactggtgaggcgttgaaggccctctcgtgataaaaagccccgttttcttattgtattcagggtacgcgtgacatgtaccgcaatgcctttgtctgggattgtttgcaccagcatcatgcagatgccttttggagcaattacaccattttattatagcttagatcaagttcggtatctgtttgaat

SEQ ID NO: 77800 - DNA, 1214 bp, Zea mays
  unsure (1)..(1214): unsure at all n locations
  Clone ID: MRT4577_170979C.1
catgtgcgctagatgagctcttttgaaatctaattcatcaccagagattgattagatgctgagtgtggtctaataggtggtgtcggccttgaaatcggcagggatgacgtcgtcggcgatgcggtagccgccggacttgacagcaaagcggatgcaaagggggtacttgagcggggccttggtgtcgagcgtccaggtgccagtcgggccctccttgagcgtaaaggagaagtcatcgccaccgtgctctttgatctccacgtcggatatggtggcaacattgggggtgaggatcaggtggccaggcttggatcccttgccgacctggaacgtgaggggggtggtgcacaacccaacaacgaatagcgcagccagcatcacaatggcctccaggtcctccatcctgctcgccacggcgatgctggctgcgctattcgcggttggttcgtgcaccaccccgctcaccttccaggtcggcaagggatccaagcctggccacctgatcctcaccccgaatgttgcaaccatatccgacgtggagatcaaagagcacggtggcgatgacttctcctttacgctcaaggagggcccgaccggcacctggacgctcgacaccaaggccccgctcaagtatcccctttgcatccgctttgctgtcaagtctggcggctaccgcatcgccgatgacgtcatccccgccgatttcaaggccggcaccacctacaagaccacactcagcatctaatcagcctcttatgatgaattatatttcaaaagagctcatctggcgcacgtgttagcaagacaatannnnnnctatggttnnattctattttcaccaaaccacccaagaaataagttatgctacatgtcccttctgacgccttgttgtgttgggttgatatgcatgcttaaataaattactttttttctataagatctttggagaaatatgttgatgtggtccacattcattatcgagatgcttgtacatttgattttccaatgttttaatacttatggaatgctttgtttgtgttgtttcgaaagagctcgtccggtccacgtgccaacgagccaatatttaatttttttctatggttattttgtgacacaacaccatctcatcatgtgccttgttgtgtcggattgattttattacatgacctgaaatacactgtttattcaaaaaaaaaaaaaaaaaaggggcggcc

SEQ ID NO: 77801 - DNA, 473 bp, Zea mays
  Clone ID: MRT4577_17097C.1
aaaaaaaaaaaaaaaaaaaaaaaaaaaaaaaaaaaaaaaaaaaaaaaaaaaaaaaaaaaaaaaaaaaaaaaaaaaagtttttgcctctggccccgacccccctctgggggaaatttgtgaatatctctatcactgtggggggcgctttagcgtgtgtttttaggggccccttttccccttatgggggggcgttttaaattactgtgggcggttttttacagcggggggtggggaaaccccctggtgtccccaattttaatccttttggaaaatatccctttttccccatgtggtattatacaaaagggccccccccctatcccttttcaaaagttgtgcccaccctatgtggaaagggccccccctttttaggggcattttaagcgcggggggtggggggtttacgcacagggagccctatacttttgacagccctatagcccccttttttttggttttttcccttttttttt

SEQ ID NO: 77802 - DNA, 456 bp, Zea mays
  Clone ID: MRT4577_170980C.1
atgcaggcggcatgcaactgcaccaaggtggcgcaccctttcgactttgacgcatccagcatggaggcccaggcccacacgtcatgtaaccggtgcgccggttactacgtgcgagaaactgcaccgccactcgcgccagtaccgcgccttctcgactgcgggaccggtgccgcgactcgaggcgaccctgcgcatgacccgacagtgccaaccgagaacatcgttcacggggaccgggaaaggggatactccgaaagggatccttctccgcgaaggaagcgggccccgagccctcatactgatcagaggttcgaaggctggcccctcggaagggttcaacagccacctcagagcactcgggctccgcgcccactactggtcagaggttcgaaggctggcccctcggaagggttcaacggccgcctcaggccactcgggctccgcgcccactactga

SEQ ID NO: 77803 - DNA, 378 bp, Zea mays
  Clone ID: MRT4577_170981C.1
acatgtgggacaacaccacataacataattatgtttccaataaagatttaaaataatctccatataaatttgttactttattaaaatatatttatacttattcactaaagaaaagtacaaactacaaatgacatttttcaaatacctattctctattatatgattgggaatcatgtataaaagaattaaataagacaaatataatatatatatatatatatttgcattcaggctgaaaaatttgtgatgtacatgtagtttgtattggagtcttaaaaccaaatttgatttaatttggatttgtaaattgaaatgaaatttgaaaataaaaaaaagaagaaggggaagacctcacctgggccgaaatgttcaccagcg

SEQ ID NO: 77804 - DNA, 599 bp, Zea mays
  Clone ID: MRT4577_170982C.1
aagcagccgtggaaaagagatctcgcaacctagtatggaaggtcaccgcaccatcgaggggtcggtcatctgaagctggtgggcacgtaaactgacccgttttaccacatggtccggctgagagtagacctataggggaagggattactaaggcttgtggaatgaacctatgatcacgaaggtcctgcaggagagttccaatctaaccaacaaacatgcttgggtcctatttctggagcacgccccaacacactacatacttctgatgaagggatccatatacgaagcctagctgtgccttgtgcagcacataattgggcgctacaaaaagaacacacgcatggagctgctcttgtgtccaaatcttgaacctgaagccccaatacattgtggctacaacaccatataccggcaagctgagaggaggagtgctacctttacttcggaccagcaataatgctattaacaagctacaaggcgcgcatgtgcatttatgcgcaagtaaaaaactgttactgggctaagataaatgttacatcatacaggttaatcctatgctttataggcatacttaactgccttctacaggctgctggtag

SEQ ID NO: 77805 - DNA, 766 bp, Zea mays
  Clone ID: MRT4577_170983C.1
cggccaaaaaaaaaaaaaaaaaaaaaaaaaaaaaaaaaaaaaaaaaaaaaaaaaaaaaaaaacacacacacacacatccatcaaagaaacaggcacacaagaacaaatacctcgccaccaacaatggcctccaggtcctccatcctacttgcaacggcgatgctggttgcgctgtttgcggttggtttgtgcaccaccccgctcaccttccaggttggcaagggatccaagcctggccacctgatcctcacccccaatgttgcaaccatatctgacgtggagatcaaagagcacgggggcgatgacttctcctttacgctcaaggagggcccgaccggcacctggacgctcgacaccaaggccccgctcaagtaccccctttgcatccgctttgctgtcaagtccggtggctaccgcatcgccgacgacgtcatccccgccgatttcaaggccggcaccacctataagaccacactcagcatctaatcagcctctgatgatgaattatatttcaaaagagctcacctggcgctcacgttagcaagacaatattttttctatggttattttgtggcgccaaaccacccaagaaatatgtgatgctacatgtcccttatgatgccttgttgtgttgggttgatattattacataaactaaataaattattcatttaagattttaggagaaatatgttgatatggtctacctccaattaatcagctaagggcatcccattctaaaaaaaaaaaaaaaaaatttgcggcc

SEQ ID NO: 77806 - DNA, 678 bp, Zea mays
  Clone ID: MRT4577_170984C.1
atgcaggcggcatgcaaccgcgccaagtgggcgcaccccttcaactccaacgcgcccagcatggagacccaggcccacacatcatgcaaccggcgcgccggttgctacgtgcgagcaactgcaccgccactcgcgccactaccgcgcctcctcgactgcggaaccagtaccgtgactcgaggcaaccctgcgtatgacccaacagtgccagccaggcgcatcggtcacgggtcagtcagctgcgggaggaggcgcaatggtcgatacgaccaaaaatgggccggcagtaatggcagtggcaggcgagcggaagcagcggacatgcggcacctttggcaggagaagcgggcgacgcttcgccttcgccataatgaccgcgtcaaaaaagggaccgggaaaggggataccacgaaagggatccttctccgtgaaggaaacgggccccgagcccccctactgatcagaggttcgaaggctggcccctcgaaggggttcaacagccgcctcagagcgctcgggctccgcgcccgctactgttcagaggttcgaaggccggcccctcggaagggttcaacggccgccttaggccactcgggctccgcgcccactactgatcaggggttcgtaggctggccctcgaaggtttcacagccgcctcagacgaagagcgagggatga

SEQ ID NO: 77807 - DNA, 746 bp, Zea mays
  Clone ID: MRT4577_170985C.1
ctcctatagggcgattgggttcctcgaggccggccgggcacacacacacatccatcaaagaaacaggcacacaagaacaaatacctcgctaccaacaatggcctctaggtcctccatcctacttgcaacgtcgatgctggctgcgctgtttgcggttggtttgtgcaccaccccgctcaccttccaggttggcaagggatccaagcctggccacctgatcctcacccccaatgttgcaaccatatccgacgtggagatcaaagagcacgggggcgatgacttctcctttacgctcaaggagggcccgaccggcacctggacgctcgacaccaaggccccgctcaagtaccccctttgcatccgctttgctgtcaagtccggtggctaccgcatcgctgacgacgtcatccccgctgatttcaaggccggcaccacctataagaccacactcagcatctaatcagcctctgatgatgaattatatttcaaaagagctcacctggtgctcatgttagcaagacaatattttttctatggttattttgtggcaccaaaccacccaagaaatatgtgatgctacatgtcccttctgatgccttgttgtgttgggttgatattattacataaactaaataaattatttatttaagattttaggagaaatatgttgatatggtctacctccaattaatcagctaagggcatcccattcaacccccaaaaaaaaaaaaaaaaaatttgcggcc

SEQ ID NO: 77808 - DNA, 1438 bp, Zea mays
  Clone ID: MRT4577_170986C.1
tcatccctcgctcggcgtcttaggcggctgtgaacccttcgggggccagccttcgaacccctgatcagtaatgggcgcggagcccgagtagcctgaggcggccgtggaacccttcggggggggccggccttcgaacctctgaccagtagtgggtgtagggcccacgcgatctgaggcggctgtcgaacccttcggggggccagtctttgaacctctgatcagtagggaggctcggagcctggttccttcacggggaaggatccttttcagggtatccccctttcccggtccccgcctgccaccgtcattactgccggcccatttttgaccgcattgaccgtcgcgccaggctggcgctgttgggtcgtgcgctgggtcgcctcgagtcgcggtattggttccgcaatcgaggaggcgtggtggtggcgcaagtggcggtgcagtttcttgcatgaagcatccggcgcgccggttgcgtgacgcgtgggcctgggcctccatgctgggcgtgtcgggagtcggagaagcgtgtccacgtagcgcggttgcatgctgcccgcatggctgcccgcccctttcgcccgttggtctgggcaaaagtggagggtcacttgtaaccgctgggtggtcgtgtgtaccgcgcgcggcggtttggcttcttctgctctgagccggcttgtatgacatgtgggacccagcccccgcgccgcaggggagggccttggagcgtgttggagaagactcagcccgtgacggctgaggacgcgagtagggatagtcgcctttaaaaggagggtgacccccttggaaggcgaccatgtcttcgcgctcccttatgcatcgtgtctttccaccttccaagcccccggatgggggatacccgccgtcttttcgcctcatcgttggaggaacgcaactccgtgggagttggtacctttcagccatcgttcggcttcaaggattttcatcacacagcccggttgctcccctccgctggtggtcacccgagacggtgaccaccagctcctgggtggggaggagcaagccgggctgcgatcttggtcccacccttagcttcaaggatgttcatcatcctcgctggggtgggtgccgggctgagccggcgctctacctctcgcgcgggttcgtgggtcatcctctcccgcggcattcgagggagagggcgctcactggccctgcgggcggcccggacttcgacaacgcggggctagtcgacggcaggcgtcgtcacctccagcgtgtcgggttcgtcggcttggctcccggcggccccttctgcaggagggcggctgccatgccgtgtacacgggaggaccaccctagatgccgcgcgctgctagggcggcgttcgtgttctggggtggtcctacctttgcaccgggacggcgccttcacgcggaggccggcgccccactag

SEQ ID NO: 77809 - DNA, 207 bp, Zea mays
  Clone ID: MRT4577_170987C.1
tcgggcgtgcgcagacgcatgggcgcttgctccgctgtcaacaccttctgggggggcatatgccatgggggcgtacaactatgtagtcagaactatggacgaggaagcagtcagacgtgatgcgcttgatgcatagcgtgctccactggtagtacaggcagcacatcgtacatagtgctcctcaccaggcctacccttgacatcatg

SEQ ID NO: 77810 - DNA, 777 bp, Zea mays
  Clone ID: MRT4577_170988C.1
aaaaatgataaaacaaactttattaatccaggcatagaaacaacaaaaacaaagaatttcataagtattaaaacattggaaaatcaaatgtacaaccatctcgataatgaaggtggatcagatcaacatatttctcctaaaatcttaaataaataatgtatttagtttatgtaataatatcaacccaacacaacaaggcgtcagaagagacatgtagcataacttatttcttgggtggtctggtgccaaaaaaagccattgaaaaaataatattgtcttgtaacacatgcgctaggtgagctcttttgaaatataattcatcatgagaggttgattagatgctgagtgtggtcttataggtggtgccagccttgaaatcggcggggatgacgtcgtcggcgatgcggtagccgccagacttgacagcaaagcggatgcaaagggggtacttgagtggggccttggtgtcgagcgtccacgtgccagtcgggccctccttgagcgtaaaggagaagtcatcaccaccgtgctctttgatctccacatcggatatggtggcaacgttgggggtgaggatcaggtggccaggcttggatcccttgccgacctggaaggtgagcggggtggtgcagaaaccaaccgcgaacagcgcagccaacatcaccgtggcgagtacaatggaggacctggaggccattgttggtggcgaggtagttgttcgtgggcgcttgtttctttgatggatgtttgtgtgtccggccggcctcgagggtccca

SEQ ID NO: 77811 - DNA, 531 bp, Zea mays
  Clone ID: MRT4577_170989C.1
atgcaggcggcatgcaaccgtaccaagggggtgcaccctttcgactccgacgcgtccagcgtggaggcccgggcccacacgtcacgtaaccggcgcgccggttactacgtgcgagaaactgcaccgccacttgcgccagtaccgtgccttctcgactgtggaactggtgccgcgactcgaggcaaccctgcgcatggcccaacagtgctaaccgagcacatcggtcacgggtcgatcagccgcgggagaaggcgcgacagtcgatacggccagaaatgggccggcagtaatagcggcggcaggcgggcggaagcagcggtcaagtcgtctgcgggctcacgtcccctcctgggacagcgggagagccctctcccacggcgtgaagacgacacgcccgtgttccgttcctcgaacggctcgtgcacgcacaacggctgccccacgaaccatacgtcccgtcgcattaactctgcggcagggcaggcggcacctttggcaggcgaagcacgcgacgcttcacctccaccgtaa

SEQ ID NO: 77812 - DNA, 281 bp, Zea mays
  Clone ID: MRT4577_17098C.1
cccatgctgtcacccacgcgcacgaccacgcttccgagggcgcatgggtaagccacggggcggggctccccactccggtatcagcacgctgactgtacaggcaactgccaggcagagccgaaaaaccgcgagaacgctgacaggcagtaggcgcccacctgtgcaggacaggactacaggacactggcatagccatgccccggggtgagtcgcgtacaagaggcaagaacttcactcgcagtcatgaggatgccttgcggaccaggcgcaccgcgaggcgc

SEQ ID NO: 77813 - DNA, 338 bp, Zea mays
  Clone ID: MRT4577_170990C.1
acccacgcgtacgcggacgcgtgggcggacgcgtgggctttactcagagtctagaactagctttttgctttgctcaccacacaaacggcatcagatggcgtctaccatcatggtagctacctcccgcatcagtcgcggacaagacgccgtttcttggccagggtcgctccgccgcggccgcctccaatgccagccccctccgcgacgtcgccgccgccgctgctggcgggcggatcaccatgggcaacgacctgtggtacggcccggcccgcgtcaaggtacctgggctccttctccgcccagaccgccctctgtactgaccggcgagtttcccggcg

SEQ ID NO: 77814 - DNA, 367 bp, Zea mays
  unsure (1)..(367): unsure at all n locations
  Clone ID: MRT4577_170991C.1
gagggnttcgtcctttttcccaaaaaccactacagaaaataggaaacaaaaaatcccaaattccagttccgggcccccaccaggcccaaaaaaacacattttctttggatcagcaaatcattcctccttttgccgaatcctccgggttcattatcaatcatcaccaaagggggttttttttcctgcactgggagggccagcgctgtgcttgttaccaaagccacggccaccgggtcctgggccgccatccttaccaccacgtgggccaccgaatttgccgccaccatccctgccccaagatttttcaccaaatttaccaccaccacgcgggccaccagaacggtcaccaaatttcccaccagaacgg

SEQ ID NO: 77815 - DNA, 773 bp, Zea mays
  Clone ID: MRT4577_170992C.1
ccggccgggaattcaaatggtacttgcgctgctaccgcaaaaaaaaaaaaaaaaaaaaaaaaaaaaaaaaaaaacacccacacatccatcaaagaaacaagcgcacaagatcaaatacctcgccgccaataatggcctccaggtcctccatcctgctcgccatggtgatgctggctgcgctattcgccgttggtttgtgcaccacccccctcaccttccaggtcggcaagggatccaagcctggccacctgatcctcacccccaatgttgccaccatatccgacgtggagatcaaagagcacggtggcgatgacttctcctttacgctcaaggagggcccgactggcacctggacgctcgacaccaaggccccgctcaagtaccccctttgcatccgctttgctgtcaagtccggcggctaccgcatcgccgacgacgtcatccctgccgatttcaaggccggcaccacctataagaccacactcagcatctaatcaatctctggtgatgaattagatttcaaaagagctcatctagcgcacatgttagcaagacaatattattttttctatggttattttgtggaaccaaaccacccaagaaataagtgatgctagatgtaccttctgaccttgttgtattgggttgatattattacataaactaaatacattatttatttaagattttaggagaaatatgttgatctggtccaccttcattatcgagatggttgtaaattacattttcccaaaaaaaaaaaaaaaaagcgg

SEQ ID NO: 77816 - DNA, 1125 bp, Zea mays
  Clone ID: MRT4577_170993C.1
atgaggcgaaaagacggcgggtatcccccatccaggggcttggaaggtggaaagacacgatgcataagggagtgcgaagacatggtcgccttccgaagggggggtcaccctccttttaaaggcgactctccctacttgcgcccccaaccgtcgtgggctgagtcttctccaacacactccaaggtcccccctgtggcgcgggggctgggtcccacacgtcatacaaaccggctcagagcagaagaagccaaaccgccacgcgcggtgcgcacgaccacccagcggttacaagtgaccctccacttttgcccagaccagcgggcgaaaggggcgggcagccatgcaggcggcgtgcaaccgcgccaagtggactcccttctccgactcccaacacgcccagcctggaggcccaggtccacgcgtcatgcaaccggcgcgtcgaatgcttcgtgcatgcaactgcaccgccactcgcgccactaccgcgcctcctcgactgcggaaccaataccgcggctcgaggcgacccagcgcacgacccagcagcgccagcctggcgcgacggtcaatgcggccaaaaatgggccggccgtaatggcggtagcaggcgggcaggagcagcagtcacgtccacgtcccatccggggcagcgagagaaccctctctcacggcatgaagacaatgcgcccgtgttccgttcctcgaacggctcgcgcatgcgcaacgatcgccccgccaaccactcgccccgtcgcattaactccgcggcgggacaggcggcacctcaggcaggagaagcgggcgacgcttcgccttcgccataatgaccgcgtcagtaaaggaaagggggataccccgaaaaggatccttccccgtgaaggaaccaggctccgagcctccctactgatcagaggttcgaaggctggccccccggaagggttcgacagccgcctcagatcgcgtgggccctacacccactactggtcagaggttcgaaggccggcccctcggaagggtaccacggccgcctcaggctactcgggctccgcgcccattactgatcaggggttcgaaggctggcccccgaagggttcacagccgcctcagacgccgagcgagggatga

SEQ ID NO: 77817 - DNA, 532 bp, Zea mays
  Clone ID: MRT4577_170994C.1
ttacggcgaaggcgaagcgtcgcccgcttctcctgccataggtgccgcctgtcccgccgcggagttaatgcgacggggcgagtggttggcggggcggtcgtcgcgcgtgcgcgagccgttcgaggaacggatcacgggcgcgtcgtcttcacgccgtgagagggggttctcttgctgcccctggatgggacgtgagcttggctgacgacgtgaccgctgctcccgcccgcctgccaccgtcattactgccggcccatttttggccgcatcgaccgtcgcgccttctcccgcggctgactggcccgtgaccaatgcgcccgcctggcgctgttgggtcatgcgcagggttgcctcgagtcgcggtactggttccgcagtcgaggaggcgcggtagtggcgcgaggggcggtgcagttgctcgcacgtagcaaccggcgcgctggttgcatgacgtgtgggcctgggcctccatgctgggtgcgttggagtcggaggggtgcgcccacttggcgcggttgcatgccgactgcat

SEQ ID NO: 77818 - DNA, 1579 bp, Zea mays
  Clone ID: MRT4577_170995C.1
atgctggaagggggcagcagcaccctcggcatcgacgacaccttcggcgaggtccgacctagcctcggacggcgacgtggtccaaggatctccgctctaaaggacgacgtcatcaccacgctcgggcaatcgctgccagggtcttctccgggaatccggcccgagcaggcggctcggccggtcgccccggggcctcgccagccgtcctccaagggcgccagctcgacccgaggcctcggctggtcaactccagcgtcggtcccgctaacggacgacccggctgggctccggccaaccaggtttccttttcgagccaactctgcccctgttcatgctgatatcgctgcccctggcctcggctcatcgaagagcggccaaggggtccctttaactaagctagagaagcctcagacaacaaggccgaccgagccgagggactcctacgcctccgggatacggatacctcactcgtcaccttgacacggggcgactcatgcttggtgaagcggttcagataatcaacaggcgagacttagtgctcgaaaatgaggaaaaaccacggctccgtgccaaaattacatacatgttcaggcctcgacagccataatgaacaaaaaccctggcattcaaagtgccattacaagcggaactccggttccccctccgcaggcacgaacaaccccactccatgggggaaggcctgcggagcaacagaagactgatgagcggctcgccgccgcccgctctgactacgacgacaacgacccccgctccggatggtcgagctgcagcagcgcaggcctcagggtgggtgctgctgcaatcttgccctcgcccacaccgatgctcgaggggcgaggacaagtacaaagagccggaggcccgaagcgcggatggtggcggtgatcccgacggcgacagggacttctcgagccgcctccacctcggcaccgacgacaggggccatcagccctccggcagatccccactcaaatcctcccggacgagcggggcaccaacctccgcgcggaggcgccataccggtgcaaaggcaggaccgcccagaacacgaacgccgccctagcgtcgcacgacgtcttgggcggtcctcccgtgcacacggcgcggcagccgccttccggcaggaggggccaccgggagccaagccgacgagctcgacacgctggggctgacgacgcccgccgtcggccagccccgcgttgtcgaagtccgacccgcccgcagggccggcgagcgccctctccctcaaacgccgcaggagagggtaacccacgaacccgcgcgggaggtagagctccggctcagcccggcctccaccccagcaaggatgatgaacatccttgaagctgagggtgggaccaaaatcgcagcccggcttgcttctccccacccaggggctggtggtcgccgtcttgggtgaccgccgacggggggggggggggtacagccgggctggctgatgaaaatccttgaagccgaacgatggctgaaaggtaccaactcccgcggagttgcgttcctccaacgatgaggcggaaacacgacgggtatcccccat

SEQ ID NO: 77819 - DNA, 307 bp, Zea mays
  Clone ID: MRT4577_170996C.1
attcggctcgaggtgggtataatagacaaatatgtagggttccctcaatgatagtcaactctgggcttcagctatcctgccatgaccgatttagcatgggcctgggatgctgagaccaagacagtgtcatcacgagatgggtactgtactatatttgaactcgagagtgaggaactgggacagcatcacatactactgggatcaaaggaagttgataacgggaatctgacgcatgagaccaagacacctgtgtgcgcacagcgcaagaagggggacaatattctcaacaggctcaagatggacgcaa

SEQ ID NO: 77820 - DNA, 292 bp, Zea mays
  Clone ID: MRT4577_170997C.1
gaatctaggctttgctgctctccgaccccgagctccgaggcgcgtagcatcaggcgcggcccccctcgcgtgcgaccgagatggcgctgccgaatcaggggaccgccgattaccccagcttcgagctcgtcatcgtcggcgctggtggaactggcaaaactacgtttgtgacgaggcatctcactggggaggtgggggtgaggttgatccacccattggtgtgccggctcatccggtggatttcgccgctgcctgtggcggggtccggctcctctgctggcctgccgttcgg

SEQ ID NO: 77821 - DNA, 261 bp, Zea mays
  Clone ID: MRT4577_170998C.1
agcatccatatgcggagctctatacagactaagagagggcctatccgacagttttatgtgatctgagtcaaaatcagaatacacatccaaatgaacaaaatgcttggccacaccatcctgacgaaccttatgcgctaactttcacaaatgaacctcaattcacagattgattgagagatacttcaactcactcatacacaaaggcagccttgatatcttcatagaacgttgcctcctctagatacttagctccaaacatca

SEQ ID NO: 77822 - DNA, 278 bp, Zea mays
  Clone ID: MRT4577_170999C.1
gaggagcaattattccccagtgtgctagtccaagccatgagtcttgagaagctggttatagccccagaccttgcaattattagaaaacatatcaatgatggagtaaacggacttctgtttccaagaaagaatattggcatgttagctcaagttcttcttcgagcagtgtcaaatagtaaagtgtctctttcagggcaaaaaattgcttcagctgggaaggctcatgccaagaatcttatggcttctgagaccattgaaggctatgctagctattgaaa

SEQ ID NO: 77823 - DNA, 225 bp, Zea mays
  Clone ID: MRT4577_17099C.1
tgccagttcccctacaacttcactgggtgccaagacctcgccaagcagaagaaagtccccttcatcagcgacgacctccagattgagtgccaagggaacggagaagttcaagtgcggcgccaacgttttctggaaatggtgaaacagctagcaacaccgtctgatgggaatggatgagatcatcacctgtcctgtcgaccccagatatgtccaaactgcagggaa

SEQ ID NO: 77824 - DNA, 214 bp, Zea mays
  Clone ID: MRT4577_1709C.1
gttcaccattctatcttatggggggagggggtttattttttatcgtgtactccaaaaaccaaaaggaatggtcgcaacagaccatgactacgcctggtgagcggtcacaaactcatcatggcgaacacatagcatcagtggcgcacacagaaaaagggagaaacgtccctaagcttctccggcggataacatgggtttcacgtgacgagcatat

SEQ ID NO: 77825 - DNA, 553 bp, Zea mays
  Clone ID: MRT4577_170C.1
gctgcgtgcgtcgaatcgctcggttgcccgctgcccagcgtggcccattgcgcggtgctggcttcgatcgagcgcagcgtgtcatgcacgctcggtgccggcgtgatcggcgcggcgggtttttccgtccacgcatagagcggcgcgcgcgccggcgttggcggcgacgggcggcgtcgcgccgggtccggcgccgtgccggttgcgccggttcctgccaccggtcgcacgggcggacgaggcggctgcgtgccgaccggccgcggcgtgaccgtggcgcgcggcgtggcctgcttcaacgcagcggtagccggtcgcgcggcagtcggccgcggccggacgggttcgaatccggcaggaagcggggcaggatcggggcgcgttacttgcgcgttcgctgccgcgcgcgcgaggctggccgtgctgccggtcgtcggcggcggcatcgcgctggtcgggagcggcgcgggcggcggcaccggcatgcgcgggggcgcggtcggcttcagccagcccgacggcgcgacgggttccgcatgcggacgcggcggcg

SEQ ID NO: 77826 - DNA, 718 bp, Zea mays
  Clone ID: MRT4577_171000C.1
agacgctgcaggcaggtcggcactcggtgcgcacccgcaattcgcaaacccgcacaacctccccaccccccaaacccatccctcccgcgagatctctcaccggagtcaccgccccccagatccgcctcccctcgccggcgcgctcgcgtgttttccgctcgtccgccgccatgtcgcacaaccacggcgacacgatcccgctccacccctcgtcggcgcagtccgacatggacgagatcgagagcctcatccacgccgcgccatctccggccaccgttctccccgcgcggccaccgtctccgacgcgggcctccattcccgtatcctcctctccggcgttggcgccggcgcccgtccccacgaagccgcctctccccgccgcctccattccgatctccgtctctgtctcccccgttctaacgtccgtctccgttcccatcggcgctgacgggtttggacctccacccaacacgctcacagagccggtatgggacaccgtaaagcgagacttagcacgcatcgtcagcaatctcaagctcgtcgtcttccccaatcccttcttcttcatcgtcttccttggcctcacgctctcctggtcagcttccgctaagaagtctgaagtatttgctgttgcatttgctgtcctggcagctggggctataattctgaccctgaatggtctgcttctgggtggacacatcatcttcttccaagccct

SEQ ID NO: 77827 - DNA, 377 bp, Zea mays
  Clone ID: MRT4577_171001C.1
aaagatgtattcctgatggtaaaataaacaaaagcgtggccactaaatcctagtacaagtaaaagaaaaggcaaaacaatgaaataagagcagtcagtcccctaaataattcgaagcaggttcgatcactctattctcatttcccaggcacatgccatctcgcctgtatggctgtaccacttgctggcattactcgttaccctcaaatggtagtctgcgctctgcagcttcagaccatgcagtacaaaacagagcactaaaccttccctaccggtcccgatctgcaggaggaaaaggtgtagcggtttgcacttggttctgtaatgctagttacaacttacaacacgctgacatgcaaatgcagttcgcgagccccc

SEQ ID NO: 77828 - DNA, 1327 bp, Zea mays
  Clone ID: MRT4577_171002C.1
cgaggtccgccctcgactcgctccggggctagcgctagcgcaactcagacgctgcaggcaggtcggcactcggtgcgcacccgcaattcgcaaacccgcacaacctccccaccccccaaacccatccctcccgcgagatctctcaccggagtcaccgcccccccagatccgcctcccctcgccggcgcgctcgcgtgttttccgctcgtccgccgccatgtcgcacaaccacggcgacacgatcccgctccacccctcgtcggcgcagtccgacatggacgagatcgagagcctcatccacgccgcgccatctccggccaccgtgctccccgcgcggccaccgtctccgacgcgggcctccattcccgtatcctcctctccggcgttggcgccggcgcccgtccccacgaagccgcctctccccgccgcctccattccgatctccgtctccgtctcccccgttctaacgtccgtctccgttcccatcggcgctgacgggtttggacctccacccaacacgctcacagagccggtatgggacaccgtaaagcgagacttagcacgcatcgtcagcaatctcaagctcgtcgtcttccccaatccctaccgcgaggaccccggcaaggcgctcagggactgggacctgtggggtcccttcttcttcatcgtcttccttggcctcacgctctcctggtcagcttccgttaagaagtctgaagtatttgctgttgcatttgctgtcctggcagctggggctataattctgaccttgaatgttctgcttctgggtggacacatcatcttcttccaaagccttagtcttcttggttattgcctgtttccactggacgttggtgctctactttgcatgctgaaggacaacgtgatacttaagattgtcgtggtgacaatcacattggcatggagctcctgggctgcctatccattcatgagtgctgctgttaacccaaggagaaaagctctggccctatatcctgtcttcctcatgtatatctcagttggtttcctcataattgccattgattaacgggggggcaagcttcctagtaacatctgaatagttgtgactttcctcgtggatggttgaaccaccagaaaacatacaagtttgagtagacaatgcttctaccctgtagtctgaatcgtctcgtggggatttcggtctttacatgatccggaggcttaaggttgtaaaattagttgaaaatctatacctgttgtaaagggctgaacttttgaccactgaattgactgccaagcttcttatactgtgtgagagaaaaaaaaaaaaaaaaaagcggccgct

SEQ ID NO: 77829 - DNA, 1256 bp, Zea mays
  Clone ID: MRT4577_171003C.1
caagcccatccctcccgcccgccaggtcccgcgagatctctcacagccccctcagatccgcctcccctcgccgccggcgcgctcgcgcgctttccgcacgcccgccgccatgtcgcacaaccacggcgacacgatcccgctccacccctcgtcggcgcagtccgacatggacgagatcgagagcctcatccacgccgcgccatccccggccaccgtgctccccgcgcggccaccgtctccgacgcgggcctccatccccgtttcttcctctccggccccgtcgcccgtccccacgaagccgcctttccccgccgcttccatcccaatctccgtctccgtctcccccgttcccgttcccgcgtccgtctccgtccccatcggcgccgacgggtttgggtctccgcccaacacgctcacggagccggtatgggacaccatcaagcgagacttagcacgcatcgtcagcaatctcaagctcgtcgtcttccccaatccctaccgcgaggaccccggcaaggcgcttagggactgggacctgtggggtcccttcttcttcatcgtcttcctaggcctcacgctctcctggtcggcttccgtgaagaagtctgaagtatttgctgttgcattcgcggtcctggcagctggtgctataattctgaccttgaatgttctgcttctgggggggcacatcatcttcttccaaagcctgagtcttcttggctattgcctatttccattggatgttggtgctctagtttgcatgctgaaggacaatgtcatacttaagattgtcgtggtgacaatcacattggcttggagctcctgggctgcgtatccattcatgagcgctgctgttaacccaaggagaaaagctctggccctatatcctgtcttcctcatgtatatctcagttggtttcctcataattgccattgattaacggggttgagctttgtagtaacatctgaagagttgagagtttccttggatggttgaaccaccagaatacatacaagtttgagtagacaatgcttctatccttgtaccctcgtggagtctttgtgaattgcctcgtaggaattttggtttttacatgatcttgaggcataaggttgtaaaattagtcgaaaatctgtatctgttgtaaagggcatggactttggaccactgaaatggctgtcaagctttcgtatactgcaatgtatgctgttcaaaagtcaactattcaaatattcgattattccttgaatcgtctg

SEQ ID NO: 77830 - DNA, 512 bp, Zea mays
  Clone ID: MRT4577_171004C.1
acctgtggttccagaagccaagaaagctccactggggctggcagaatccagggtccacctaagctgcacagttcctgcagctttgccagccccacaaaactactgtgcaccccacctctgaagatgctgggggaggcagccaggatgggagccagccccatgcctgtctgtgaccccacagtgggtgagagcccgtcacagcccagggtgtggccgctctggaagaattaggaggcagacgtcataagagtctccagatgatgggaggggccagtgaggacaggaaccgagagtagatgtcccagaataaagaggcttctgggaggtgcccaggtacagatgtctgttcagcaggcgtgtgggcctagaggagacagcacagcccagaaatgtcttctgcaggccccacgtgcgacttgaagcctacatgcgcatgacaccattggggtttgcccttgcaaagacttcctacgtgctccaatggaccctctggacccagggaccccaactgc

SEQ ID NO: 77831 - DNA, 496 bp, Zea mays
  Clone ID: MRT4577_171005C.1
cccaaaaaggattttttaaaaaccaaaaggggggggggggggccaggggccggccggggggaaaaaaccccgacggaagccaaacaaaaacaaactgggggagaaaggggggggcccaccaaaaactttatgggggggcggggcccgggcccgggaacgtcccccccccccgggggatcctaaaaagggccctccttgggggcccccggggggtggtgttgcctgccccaccctgggaaaccccggggctttaaaaagtttgggaaaggggggcccccccccctaaaagacgtggaagggccgaaaaaattgggccaaaaaaaagccccccgggcccaccaccaccttttgggggggccactgtttgttcccgggcccgggttggcccttttccggcccggggaaacaaaaaagggggtgaaaaaaccgggccccctcttcgccgagaaagggttcgggaaaaaactcctggggccggtaaaaaactgggggcccc

SEQ ID NO: 77832 - DNA, 449 bp, Zea mays
  Clone ID: MRT4577_171006C.1
aacgcaccatcgttttatgttcttggaccagcgcagaatctgaatatagcacagttctgcgatccacaagggctggtatcaccggaacatttctccagggggcgggccagaaaagaaatgtttttcgccacggggccttgtccaacaagagatgccttggttcggcccccaacggagtgcgaccacgcaggttaacacggttatttgtggccctgcaccaagatacttcggggaggtgatcaccatatgccccaggtgccaaatgactgtgcgcacgaaggcttttctttgagcttgaaaaactcatcaattgccctaacagctcaacagggtccaaagaatctgccccgatgttttggaaggttaatgagccacagaccttattggcatcaggaagtttaagccactttttgtcatatattaaaaagcgggtccacaagcaccttttt

SEQ ID NO: 77833 - DNA, 821 bp, Zea mays
  unsure (1)..(821): unsure at all n locations
  Clone ID: MRT4577_171007C.1
gtgtttccgagaatcccgcgccgatctcgtcgttggcctcgaggagtagcagcccctgatggcgaccgccgtggcgtcgcagccgcgacacttcaccctcggcggcgagccgagggcagccatctgcgcagccagcacatcaaagatttgcaccctggacaaagtatacggattcaggttcgtatgcagaagtgttgttgatctaaggagtcaaaaattccattcccaaatttctaagagaaagtgctatttaacaagttcaccatcggaatttgagaagatcattttgagtgctagatggttagaatttaggagacagaggatagcctttcagagaactggaaggtgggttcacagtattccattggcttctcaagatgatggcagtggtgtgtctgttaatggagtaccacaagttgatccagcaagtcaaatgaaggaaataagggtgaaattggataaagcattgcaaaatgaagacataagcactggccttgtccaatcaatacatgatgctgcgagatctattgaattggctttccttgatcacagcaaatcatcaataaactcttggttcccaaagatgtggcttggtgtcgataacaatgcatggataaaatcgctgtcttaccaggctgctgttagctcgttactgcaagcagttatcgatgtttcatcaaggggggaacggcagagatagagatattaatgtatttgttcaaaggagtttatcccgnccttctcagctctctagatggtgttatacagaatgaattggctaaaaggaacccttcatatatcagtggtattcatctaatcaa

SEQ ID NO: 77834 - DNA, 653 bp, Zea mays
  Clone ID: MRT4577_171008C.1
gaatcaccttgaccccgtcatggcgcgcttacagcctccggttatctagataagagaatgtatggctgataaggaagagacaatccaaatgactctcgttcatcggcaacatctgctgtgcgctcaccctgccgacgacgaaattgtccatcctgttcatataccgctgcttgttcctttttcctgaccaagaagttcgggtttgctacggctgctgcgggagcgatcgtgctggggtggatgatttctgtagttctcgtccaaaaaacttcatctgttcgcccgtcgacgctgcctggatccccaccaaagccgaccactgcatcgatcaggaaaagttctactacgggaacgccatctcaaacttgttgacggatgtggtccagtgcggctgatctggcggctgcatgtgatgcgggagaagaaagttgggcgtgatgaccgtgttttgaaagggagagttggattttttggaaaccgatgcctcttccttctagtgcctcgtttctctgaatcttgctgacctccttatcccctcggcattatagcgtctgcctcagcagcatcgtccgtctggcttaccttatcgcaatagacaacaatgacatcatttgtgcgaccgcatgcattgctaccaaatgcgtgcttttctg

SEQ ID NO: 77835 - DNA, 292 bp, Zea mays
  Clone ID: MRT4577_171009C.1
aaattctggaatcgtatgactcaacataacaaggaatatgaagaaggaaaacatagttatactcttggaatcaatcaattcgctgatcgtaccgaagaagagatcaagcgtggtcgcattgttaaagattttagcaatagagccacaactgacaaaactgcttaaattggttcaaactcaattagcttaagttcaatttgtgagtttaattgttaattttctaattcaattgtaaactgcacttttttgtgcaattaaaacgtttaaatgttaataaaaattcattagaatt

SEQ ID NO: 77836 - DNA, 337 bp, Zea mays
  unsure (1)..(337): unsure at all n locations
  Clone ID: MRT4577_17100C.1
gccgacgcactcatacgcaactagcaacatanaaatcactttagtgtattaacaanggcagccaaaatatggggcttgctaattctaaatggtctttcggcaaatacaactaccncaaccattttcccacaatgctcacaaactcctataacttcctttcttcccccatacctctcaccatctttttcttcagtatgtgaaaacccaattctttaaccctacattatccaacatgcaatctctacaatcatcttacctttattacccttgttcctccaacaaccttcatccctattacaacaattaccttttgtgcattttttggctcaaaacattt

SEQ ID NO: 77837 - DNA, 317 bp, Zea mays
  Clone ID: MRT4577_171010C.1
attggtggctcctcgagccattcatgatgttgctaccattctcatagacatttcagcagaagtgatcgatatcttatcttgccttcggatagagaagtggatacagagacacatggattgagaacatgatactgaagccgatccggcatatgtcaaccatcatggatggtcaagtcgcgcaaaggcaaatcttgttgcctaccgacgtttaacacgtggcacacatcggtaggaatggtcctggctacaccatcaacattgacctcatcagcaactacaatagttgcagagcacctaactggatcaaggattaccac

SEQ ID NO: 77838 - DNA, 265 bp, Zea mays
  Clone ID: MRT4577_171011C.1
tctttatcgtgagcgccgtctcatcgcctcaccaagcgatactcgctggaggttaggtgtctgctgcctacagagcccatactctagagcaaccagccccgatactatggtgagctcggtttccaatgacactggggggattagtcccgtagggtgggattagagcatgcgccgagtggatatggcattcaggaaccaattggatctatttggagacgtcgagaacctacgaccactgaccagcttttcgcagctgtcgtgaaga

SEQ ID NO: 77839 - DNA, 334 bp, Zea mays
  Clone ID: MRT4577_171012C.1
gtctggcgcctatccatatggcacgggagcacggttgctgtgatagctgcgaatgtcccagccgtctatgaagctcacttagcagtaccaatgtcaggagctgcagctaactgtgtcaatatatcgctaaccaccgagacaatagcattcctccttgaacactgcgtgccacaagctgtgaaggtggaccaagaattctttaccctagccgatcaatagctgcaaatacttggcaacaagaagacatctgatgtcacgcgtgctccaaccttgatcgaaatcgacgacccaacctgtgatcccaattctgtacatcatgctctgggaaagggag

SEQ ID NO: 77840 - DNA, 881 bp, Zea mays
  Clone ID: MRT4577_171013C.1
accagatctgctccgctccgctccgggctgactaaccgagcccgccgtctctgtagctagctggtcgtccgtcgtcgccaccaacaggctaaccaccaaccgcccaaacgtctccaccgcgcgggcggagcgcagctgcccgccccggattaacctccctctcgccctccccacgcctccgagatcgcgagcgagaggacgccacgctgacatggcggcggcgaccgtcgctgccgcgggcacggcggcgccggcggcggccatgcacgccggcatccggcgctcgcgctccgagccgcaccttcgctgcccgcgccgcgcgggcgccgagctcaccaccagccgctccatcggcgtgttcccgttccagctcggcgcggcgccgctgcgcccgccgccgctgcccgacggcggcgccgacggctcccggctgctcaccgtcgccgacgacgacccgccggaggagcctgggccggaaatgccgcccgcccggaggcccgaggcgcactggctcggccgcctcctcgagctccgctcccgcttccacgacccgaccaagcgcgacgtactcgacgacgacgacgacgacctctaccgcctcgacgctgaccaccacgacggcgggtgcggcgtgagctacgacgacgaggaggaggatgccaggtgggaccgccactccttcgccaagctgctggcaagggcccgctcggagacgcgcggctgttcgcgcagctggccttcctctgcaacatggcttacgtcatccccgagatcaaggtcgaggagctgaagaagcactacgggttgcggttcgtgacgtcgtctctggagaagaaggcggaggccggcatcataagcgccaagctggacgcggactccac

SEQ ID NO: 77841 - DNA, 666 bp, Zea mays
  Clone ID: MRT4577_171014C.1
atggctgaaaggtcctccccctatggcgcgggggctgggtcccacgcctcatgcaagctggcccagggcagaagaagccaaaccgccgcgcatggtgcatgcaaccgcccagcggttaccagcgtccctccgctttcgccccgaccagcgggtgaaagggtggacagccgtgcaggcggcatgcaaccacgccaagtgggcgcgccccttcgacttccaacgcacccagcatggaggcccaggcccacgcgtcatgcaaccggcgcgccggttgctacgtgcaagcaactgcaccgccactcgcaccactaccacgcctcctcgactgcgaaactagtaccgcgactcgaggcgaccctgcgtacgacccagcagtgccagcctggcgcgacggtcaatacgaccaaaaatgggccggcagtaatggcggtggcaggcggccaggagcagcggtcacgtcgtcagccaagcttacgtcccatccagggacaacgagagaaacctctctcacggcgtgaagaaggcgcgcccgcgtttcgttcctcgaacggctcgcgcacgcgcaacggccgccccgtgaactactcgccccgtcgcattaactccgcggcgggacaggcggcgcctctggcaggagaagcaagcgacgcttcgccttcgccataa

SEQ ID NO: 77842 - DNA, 1240 bp, Zea mays
  Clone ID: MRT4577_171015C.1
tcacgccgtgagagagggttctctcgttgcccccggatgggacgtgagcttggctgacgacgtgaccgctgctcccgcccgcctgccaccgtcattactgccggcccctttttggccgcgctgaccgccgcgccaggctggcgctgctgggtcgtgcgctgggtcgcctcgagtcgcggtattggttccgcaatcgaggaggcgcggtggtggcgcaagtggcggtgcagttgcatgcacgaagcattcggtgcgccggttgcatgacacgtgggcctgggcctccatgctgggcgtgttgggagtcggagaagcgcgcccacttggcgtggttgcatgccgcttgcgtggctgcccgcccctttcgcccgttggtctgggcaaaagtggagggtcacttgtaaccgctgggcggttgtgcgcaccgcgcacggcggtttggcttcttctgctctgagccggcttgcatgacatgtgggacccagcccccgcaccgcgggggagggccttggagcgtgttggagaagactcagcccgtgacggctggggacgcaagtagggatagccgcctttaaaaggagggtgacccccttggaaggcgaccatgtcttcgcgctcccttatgcatcgtgtctttccaccttccaagcccccggatgggggatacccgccgtctttccgcctcttcgttggaggaacgcaactccgcgggagttggtacctttcagccatcgttcggcttcaaggattttcatcagccagcccggctgcacccccccgccgatggtcacccaagacggtgaccaccagcccctgggtggggagaagcaagccgggctacgaccttggccccaccctcagcttcaaggatgttcatcatccttgctggggtggaggccgggctgagccggagctctacctcccgcgcgggttcgtgggtcaccctctcctgcggtgttcgagggagagggcgctcgctggccctgtgggcgggtcggacttcgacaacgcggggctggtcgacggcgggcgtcgtcagccccagcgcgtcgagctcgtcggcttggcccccggtggcccctcctgccggaaggcggctgccgcgccgtgtgcacgggagaaccgcccgagatgtcgcgcgctgctagggcggcgttcgtgttctggggcggtcctgcctttgcaccggtatggcgcctccgcgcggaggtcggtgccccactcgtccgggaggatctga

SEQ ID NO: 77843 - DNA, 762 bp, Zea mays
  Clone ID: MRT4577_171016C.1
atgcaggcggcatgcaaccgcaccaagggggcgcaccctttcgacttcgacgcgtccagcatggaggcccaggcccacacgtcatgtaaccagcgcgccggttactacgtgcaagaaactgcaccgccactcgcacctgtaccgcgccttctcgactgtggaaccggtgccgcgactcgaggcgaccctgcgcatgacccaacggtgccaaccgagcacatcggtcatgggtcagacagctgcgggagaaggcgcgacggtcgatacggccagaaatgggccggcagtaatggcggtggcaggcgggcagaagcagcagtcaagtcgtcagcaagctcacgcccgctcctaggacagcgagagaaccctctcccacgggaccgggaaaggggatacttcgaaagggatccttctccgcgaaggaagcgggccccgagccccctactgatcagaggttcgaaggctggcccctcggaagggttcaacagccgcctcagagcactcgggctccgcgcccactactggtcagaggttcgaagtctggcccctcggaagggttcaacaaccgcctcaggccactcgggctccgcgcccactactgatcaggggttcgtaggctggcccccaaagggttctgacagtcgcctcagagcacgcagagcgagggatgaccctgggtacgttcgatacataaccaaggctcgggctacgctcctgaggtaccctaggacatttctgagacccacgggaacgattttgtaa

SEQ ID NO: 77844 - DNA, 591 bp, Zea mays
  Clone ID: MRT4577_171017C.1
attacaaagccttaaattttcgcggttggtattcatactttcagcaggagcacacttcgtttcctgtatcgaaatctcagtacgcttgttgtcaaccgaccagttaataattgctaatggcaatgctagtgattgaatataagtttgtagcgtaagtcatagcttccacaaatatgtagcatgtgacgaaaagtttaggtggcccggcgagcggcgtgggtccacgcccatgtccctgtgtaaggtggcgccgaccacgatctgttggaagcagtgcaccttttggtcattgtccacgtcgctggaagaatagagtggagcttgcccacccagcataccttcatcccgctgagcaagagctgcacccgccccggaactggtgcgtcctgactcctgatgaacaaatggcaccagcacatctgtgtagccgtgctacaggttgccggagaagccaccgttggagaagaggaagccagggacagagttgttcctggtgcacacgggcgccaccgccggctccgagagcggcttgaggatgtactcgcggatgtgggccatggccacggggtcgtggtagcacgcatatggcct

SEQ ID NO: 77845 - DNA, 732 bp, Zea mays
  Clone ID: MRT4577_171018C.1
atggctgaaaggtaccaacttcctcgaagttgcgttcctccgatgacaaggtggaaggattgcgggcgtcccccatccgggggctcagaaggtggaaagacacggtggataagggagcgcgaagacatggccgcctttcaagggggtcaccctccttttaaaggcgactctcccgactcacgtccccagccgtcgcgggctgagccttctccaacacgctccaaggtcctcccccttacggcgcgggggctgggtcccatgcgtcatgcaagccggtccagggcagaagaagccaaaccgccacgcgcagggcatgcaactgcccagcggttacaagcattcctccactttcgcccagaccagcgggtgaaagggtggacagccatgcagtcgacatgcaactgcgccaagtggacgcgccccttcgactccaacgcgcccagcatggaggcccaggcccacacgtcatgcaaccggctcgccgattgctacgtgcgagcaactgcaccgcccctcgcgccactaccgcgcctcctcgactgcgggaccagtaccgcgactcgaggcaaccctgcctgtgacccagcagcgccagccaggcgcgacggtcaatgcggccacaaatgggccggcagtaatggtggtggcaggcgggcaggagcagcggtcacgtcgtcagccaagcttacgtcccatccaggggcagcgagagaaccctctctcacggcatga

SEQ ID NO: 77846 - DNA, 468 bp, Zea mays
  Clone ID: MRT4577_171019C.1
ttgtttttttttttttttttttttttttttttttttttttttttttttttttttttttttttttttttttttagcaaaaaaaaaaaacctttttgttttttctttccacaggggggggcccatctaccaaaagggaaaacacccccctcctacccaatttgggggaaacaaattatttcccttggggaaaaacagctcccccgggaaaccggctccattaaaacctaacaggcccccttatttgggggaaaaaaaatggggggaaaaaaaatcgcctccggccccgggtttttaaaaagggcccgctgaaccaccaaaaaaagcattagttgccccaggcccagggccgggggccccctggtggttgaaaagggcccccccaatctgcatgacttcctgggtcaaccccctcagggggcccttcatgggggggggggagcccccaaaaaaagaatccttgagcttttg

SEQ ID NO: 77847 - DNA, 305 bp, Zea mays
  Clone ID: MRT4577_17101C.1
acgcccgagtggacgtaagaagggacgagtggtcttgacgccggccagccatggcggagggtctgctctcctattcgcacagtctcgccagccccacatttcaggccccagcacttcccatgagcagagatcctctagaaagtgaggcaaagcgtgtcctaccacctatgtggaggtcctaagtactcgcatagcgcacttacgagcctgccaattggaaccgaaggttggaggtgaatacaatgcgccatctcatgacgcagactttgtcttctttcacaatcaggctcaccattccctaagca

SEQ ID NO: 77848 - DNA, 645 bp, Zea mays
  Clone ID: MRT4577_171020C.1
atgcaggcggcatgcaaccgcaccacgaggatgcaccccttcgacttcgacgcgtccagcatggaggcccaggcccacacatcacgtaaccggcgtgccggttactacgtgcgaaaaactgcaccgccccttgcgccagtaccgcgccttctcggctacggaactggtgccgactcgaggcgaccctgcgcatggcccaacggtgccaaccaagcacatcggtcacgggtcagtcagccgcgggagaaggcgtcacgggaccgagaaaggggatacttcgaaagggatccttctccgcgaaggaagcgggccccgagccctcctactgatcagaggttcgaaggctggcccctcggaagggttcgacaaccgcctcagagcacgcgggccctgagcccccctactggtcagaggttcgaaggctggcccctcggaagggttcgacagccacctcaggccactcgggcttcacgcccactactgatcaggggttcgaaggctggcccccccgaagggctcgacagccgcctcagaacatgcagagcgagggatgactcttggtacgtccgatacatggccgaggctcgggctacgctcccgaggtaccctaggacatttccgagactagcaggagcgattctgtaa

SEQ ID NO: 77849 - DNA, 426 bp, Zea mays
  Clone ID: MRT4577_171021C.1
atggaggcccaggcccacgcgtcatgcaaccggcgcgccaaatgcttcgtgcatgcaactgcaccgccgcttgcgccactaccgcgtctcctcgactgcggaaccaacaccgcgactcgaggcgacccagcggaccgggaaagggggataccccgaaaaggatccttccccgagaaggaaccaggctccgagcccccccccctactgatcagaggttcgaaggctggcccctcggaagggttcgacagccacctcagatcgcgtgggccctacacccactactggtcagaggttcgaaggccggcccctcggaagggttccacggccgcctcaggctactcgggctccgcgcccactactgatcaggggttcgaaggctggcccccgaagggttcacagccgcctcagacgccgagcgagggatga

SEQ ID NO: 77850 - DNA, 669 bp, Zea mays
  Clone ID: MRT4577_171022C.1
atgcaggcgacatgcaaccgcaccaagggggcgcgccctttcgacttcgacgcgtccaacatggaggcccaggcccacacatcatgtaaccggcacgccggttactacgtgcgagaaactgcaccgccactcgcgccagtaccgcgcctcctcgactgtggaaccggtgccgcgactcgaggtgaccctgcgcatgacccgaaagtgccaaccgagcacatcggtcacgggtcggcgaagcacgcgacgcttcacctccgccataatgaccgcgacaaaaaagggaccgggaaaggggatactccgaaagggatccttctccgcgaaggaagcgggccccgagcccccctactgatcagatgttcgaaggctggccccttggaagggttcaacagacgcctcagagcactcgggctccgcgcccactactggtcagaggttcgaaggctggcccctcggaagggttcaacggtcgcctcagaccactcgggctccgcgcccactactgatcaggggttcgtaggctggcccccgaagggttctgatagccgcctcagagcacgtagagcgagggatgaccctgggtacgttcgatacataaccaaggctcgggctacgctcccgaggtaccctaggacatttccgagaccgacgggaacgattttgtaa

SEQ ID NO: 77851 - DNA, 447 bp, Zea mays
  Clone ID: MRT4577_171023C.1
atggctggaggacgtctcctccgcagagctggaggatggttgccaccaccagaagctggaagaagaggtggccagccggcccgcgcgggaggcggcgcccctggcaggagaagcgggcaacgcttcaccttcgccataatgaccgcgtcagaaaagggaccgggaaagggggataccccgaaaaggatccttccccgtgaaggaacctggctccgagcctccctactgatcagaggttcgaaggctggcccctcggaagggttcaacagccgcctcagagcgcgtgggctccacacccactactggtcagaggttcgaagaccggcccctcggaagggttcaacggtcgcctcaggctactcgggctccgcgcccactactgatcaggggttcgaaggctggcccccgaagggttcacagccgcctcagacacagagcgagggatga

SEQ ID NO: 77852 - DNA, 322 bp, Zea mays
  Clone ID: MRT4577_171024C.1
cgtaagctcggatcctgaatagcggccgccctccactctttcgttttttttttccggcagctaaatgaaacattacctcaaagcgcgatccaatacagcacgggcaacaaacatgcccatctttgtgcattgcgaagatcgccatggaaccaaccacccagcttaatccccaactaatactgaatgtacacgcggaaccgaccagaacaggcgtacttttgtgtgccctcacctgttcagcacggaagcacccgtgctggcacccaccaacataaggctatttgtcaaagatggacttgacccaccacattactgcgtgctt

SEQ ID NO: 77853 - DNA, 492 bp, Zea mays
  Clone ID: MRT4577_171025C.1
atgcaggcggcatgcaaccgcgccaagtgggcgcacccctccgactccaacgcgcccagcatgaaggcccaggcccacacgttatgcaaccggcgcgccggttgctacgtgcgagcaactgcaccgcctctcgcgccactaccgcgcctcctcgactgcggaaccagtaccgcgactcgaggcaaccctgcgtatgacccaacagtgccagctaggcgcgacagtcaatacggccaaaaatgggtcggcagtaatggcggtggcagggaccgggaaaggggataccccgaaagggatccttctccgcgaaggaaacgggccccgagcccccctactgatcagaggttcgaaggctggcccctcggaggggttcaacagccgcctcagagcgctcgggctccgcgcccactactggtcagaggttcgagggccgacccctcggaagggttcaacggccacctcaggccacttgggctccgcgcccactactga

SEQ ID NO: 77854 - DNA, 853 bp, Zea mays
  Clone ID: MRT4577_171026C.1
ggccgggaatacacttgtcgccccacacgcgccgggcgagtcagtggttacgacttacgagcacaaaccctcctcccccggcgctctccactccgccatgcttccgaggccgagccaaagaagcatcttctacctcggggaggagggtggcgacgaccacagcgtcgccgaggagcatgtgaagaacatcgatactaggcgcagccacggagcgcgccaagacgacggctgtcaatggcgaaagcgagacgccgccgtggacgcggtcggcgtcgggctacagatcctggtccagaaccgccaccacacgaaggtgccgccgtcgcactcgcatattgtcctgaagcaggtggtagtcctgacgacggtggcgccacaccgccgtgtgccgtgcagcagcttcttgagcgcctgctcccgctgcaggaaggagctcagcggcaaggacgacgtgttcatgtacagaggcgaccaggggttctgcagcgaggagtgccggtgtgagcagatcttggtagacgaggcgagggagcgtgaagccatgttcggcgggaagcagcgcatgcggcgtgggttgcctcgccgtctccaccacgggccacggtcggcgatgggggcgatcggcggtggtgcgtcgaggaggctagttgcgacagcctactaggatctagcatctgtctgtcgtctgtgtttatctgaggtcgatgcattgaagaaatggcaactaggactcattgcgcactggtgatgttatgaacctatgatatacttgcattcagaggaaccgccatgtatcttcctatagtctataatgatcgaattgagaaagaaaaaaaaaaaaaaaaaagcggcc

SEQ ID NO: 77855 - DNA, 253 bp, Zea mays
  Clone ID: MRT4577_171027C.1
cacaccatcagatctagcagacctctctcgacctcatcggcgttggcggacgcgtgtcgaccggacacggcgccgagcgggtgcacgacgacgccgcggcgcggtcgctggcgccggcacggttgccgtggtcgcgtcgctgcgcgactgacgctcgcacctaagacgactgacgacgtaccacaagtctattcgaatcgcactgacgaagctgacgcggatgcatgcgctttcggaactgtctagacgagag

SEQ ID NO: 77856 - DNA, 576 bp, Zea mays
  Clone ID: MRT4577_171028C.1
atgcagtcgacatgcaaccgcgccaagtgggcgcaccccttcgactccaacgcgcccagcatggaggccccggaccacacgtcatgcaaccggcgcgccggttgctacgtgcgagcaactgcaccgcccctcgcgccgctatcgcgcctcctcgactgcggaaccagtatcgtgactcgaggcaaccctgcgtatgacccaacagtgccagtcaggcgcatcggtcacgggccagtcagccgcgggagaaggcgcgacggtcgatgcggccaaaaatgggccggcaggacagggaaaggagataccccgaaagggatccttctccgcgaaggaaacgggccccgagcccccctactgatcagaggttcgaaggctggcccctcggaggggttcaacagccgcctcagagcgctcgggctccgcgcccactactggtcagaggttcgagggccagcccctcggaagggttcaacggccgcctcaggccactcgggctccacgcccactactgatcaagggttcgtaggctggccctcgaagggttcacagccgcctcagacgcagagcgagggatga

SEQ ID NO: 77857 - DNA, 324 bp, Zea mays
  unsure (1)..(324): unsure at all n locations
  Clone ID: MRT4577_171029C.1
ctcctcagcaactnccataccccaggctcttttttacctgagcgagccnaccaaccnntttncctttcttatcctcctccttcaatataaattactccnatgtatccaatcatatccatcatatttttcttttcatcctccattattcctactattaattccaactaaatctccctctccccctatgaagaattcaacatttataatttgcaccttttttaatcttataaaaaaaatatcaagcaatagtattaacgcaaagataatcatgtttaaatacacaagaaaatttattactctatacaatttaattcttctcccatc

SEQ ID NO: 77858 - DNA, 264 bp, Zea mays
  Clone ID: MRT4577_17102C.1
atgcaatcctctatagtgagtcgtattaaagctgacggctgtcagactcgagatgctggctcatctgcctcaggagctattattgtatgtgaccgtttgcgtgtcgcaaatgttgctgaggcaacagccgtgatttctattggaggacaagggattgcggtttcaacggattagaaagctgatcagacagattatacacagagatctgagcaggcatgagggccagctctgtggcctgcgatatggcgactgggtggtgttctt

SEQ ID NO: 77859 - DNA, 666 bp, Zea mays
  unsure (1)..(666): unsure at all n locations
  Clone ID: MRT4577_171030C.1
nttcaaaaaaagggggaaaaaaaaaaaaaggatgacaaaaaaaaaaaaagggggcccctaggctcctagggcccccaggtgctctcccccttccagggttttgttgcctggacggttggaataatcgtggtcttggctgactcctgggaaaaattgttatctgcgcaaaattccaaacaacctacgagtccgaataatatacaaaaccggcggggacgactaatgagcgggcttgcccacagtaggagcgaactcactgcagtccgtttaccagcacaagacagctgtcccgcctgcaaaattgatgagtccgccgcctcaaggaaagaggcaagctgcgtatagaggcgtcttccgcttcggcggttaatgcgttgcttcgctcagtgactcggtggcgacgggcgttatcttgccactagggggatctactacctttatcggcataatcgggttatcccccaaataacatgatgtcaccagaacgccaatgggagggcaaggcccgtaaaagggccgggatggtgaaattgccccatagccgccgccctcccgaagattaccaccacctgcgctgctttactaagaggtggggtcacccgagaggagtataaacccaccaggtgtttcccgatagaaggttcttcccgctgtatgctgctacga

SEQ ID NO: 77860 - DNA, 631 bp, Zea mays
  Clone ID: MRT4577_171031C.1
gaggtctcggccaaaaaaaaaaaaaaaaaaaaaaaaaaaaaaaaaaaaaaaaaaaaaaccaagttcaatcaaacagtaatcacaaaaccaacttactatacccgccgccatgcacttcacgcttcctcttctcgccctcgctgcttccgtcagcgccagcaaccccatcgaggccgcctggaacgtcacccgctcctacagggacatcagccagcaggtcgtagcgtatgaccttaccgcagtcttcgtttctgaggaataccccaagggtcttgagtccaagtgcaactggtcgcagaagggcatgcagttcaacgttgtatgcgacccaaataccttctcggttgagccccagacagacggcactctgaagatccaacaaaccatcgagaagcccaccgagcaggtcgtgtacggacagggcgacgttcccgctaagggtcacgtcgtcatccctgtcactgcgcgtgtcgcctaaacgccaggtacgcattggcaggcaagcaggatggaagataggacgaaatgtaccaggctgaagtgagttgcaaaaagctagagtagcaacatctcacgagcagggagcaaaatgaattgttttccaacgaaaaaaaaaaaaaaaaaagcggcc

SEQ ID NO: 77861 - DNA, 346 bp, Zea mays
  Clone ID: MRT4577_171032C.1
ataaagggagggtctttttttttttattttttttaatggtattttttataaaaaaaaaacaaaccccaaattaaaaaaaatatattaggggaaatttctattaatagcccctggcaatcaataacaaatgaaaaaaataaagggggtcccccttaaaccaaaaactggtggtaataaaaaaccgaaaaaattaaaggtgcctcctctcaggggtcaaagggctggaccatttaattcatgtaggattcctttccctttttaatgcctttaaaacgccttgatcaaattttcgaggaacaagttcatccccacttccaggattttgtggggtaggttttttaacaaa

SEQ ID NO: 77862 - DNA, 2710 bp, Zea mays
  Clone ID: MRT4577_171033C.1
atctacaggatcaaaagtttaaaactgcagagaccaaagggcgccctcgggcttgccagggaaacaaaagcttccacccaaacaaactcccctcgctgaaactcgccgccgtctcctcgccttccgcctcagcacaggccccgtcgcggtctcctaggccacgcttccgcctctcctcgtcggctgcccgcctccgcccggcggccggagcaggctaggttaccagcgccccccacttcgcggtcgagctggaggacacgcgtagcaacgccgggttcttctgcggcgacctgtggtgtggcctcatggagcccaagggcgagtcaggccagaagcctattgaagaagcaatcgacagcttgaagactgatgctagcatgaaggcaaacaatgtcaacttgcctgctaagaaagacgcaagttcttctgatgcagtatcttgcatttcctccggcgatgcagctagtactgtgaaggatagagaaatgaaccaagaaacttcttttggcgaccaagggatgcattactatggatattattatcctggtgcatacggaggatgggatgagaatggctactttgttggatataatggcctagaggtgcacccagcagtggttcaagctgacaatggttcatatctgtgttatcctctggggtatgaaaatggatatgcttcttatattccggttgttcctggaggcattgccagtgtggatggtcagtatgtcagcaaagaaccatattactccagtgcacttccaattcaggatcctagcacacctggcatttttgctcagccaattgcatatggaactgaactagtacctgcctactcatgggacccttttgttcttctggatggggttcagggacatccagttggtgtgcatcatacaaattatgctccaagaccaaaatattcttctaataagcatgttgttccttctttgaaagcttcccacagtgcaaaatccacagcagatactgtcaaaggatcatcatcagctctagaaactgtaccaaatgctgccaatagcagcacatcatcaaagggtgcaaataaggcacctggtgcttccataacaaaaggatatcttccatctagcaagtttgtgatgcacagtaataaccaagcaaaaagcagtgtttatcaaagcaaaggcatcaatctgaaagaaagtggtagaagctggcacagcagtgagaagcttaaagcgagaagtaagctaaatggacatggcgattctgaatctaatgagaacaaccacactgataactcgaaatatagtttgagctctcaatctgatgttgttggattgtcaagtgtaggggatgctaacgccagcataccttcacctgtcgtaataagaaaaactgcatacaatctttcagattttgttacaaagtatgagcaagctctattctttgtaattaagtcctacagtgaagatgatattcacaagagtattaagtacaatgtttgggcaagtactcctaatggaaataaaaggcttgacaatgcctataggcttgcacaggaaaggatggcagaaaaaggaaccaaatgtcctgttttccttttcttctcagttaatgcaagtggtcagttctgtggcgtggctgagatggttggcccagtagatttcaacaggaacatgaacttctggcaacaggacaagtggaatggtttcttctctgtaaaatggcacattattaaggatgttcccaatccacaatttcgccatataattttggagaataatgagaataaacctgtgacaaacagcagggacacgcaagaggtcaaattttcacaaggtacagagatgttgaacattttcaagaacttcacgtgtaaagcatcaatactggatgactttgacttctacgaaaatcggcagaaagtaatgcaggatagaagaggcaagccacttacatcgtttggtcacccattgccaaaagctgaaaaaactgcagaagttaaaaggcaaacacaattgataagtgccacggaagttggtagagccgatacaaccaaggaaaatgaggagaagagcagcagtgttccagaaatactcaacgcagcatgtagtaacaaggagaaacccaacaaaatcgcaacagacggatgatgccttggctagttgactgggaaaatgagatagcttctggaacggacttcaacttgaattcctgaaatcataagttcgatgtgcgcaatgtcaagaaaccacaattggtcatgggttctcttgcattttctcatggaagtgaagaaacgaaaaaagtgaagcaacggaactgtcttcccacgagaaatgttcaatgactgggaaaaaggttctaggacgcatttaggttgaggcccctggtgctaaggcattagagcgccctccttgtctgtttttcccccatattggagggtcgtttcttttcttttgtcgtgcccctttttcccctcttcttttgcctattattctgcagctgagattttgggaagcagtttgcacttaggtccaaagaaagggaatgtctgttgctttgtgggttgtcctctaggatgtggtaggtgttgactgttttttagaatctgtgcacgttctagaaactgacagaaaaaaagagaaaaaaggattgtgagggattagaaataaaaaggatcttaaaaagatacatggtatcttatgtttcccgtttagaagatcca

SEQ ID NO: 77863 - DNA, 373 bp, Zea mays
  Clone ID: MRT4577_171034C.1
attgtactattacttctcataaatctatcagagggcaccaccaatgatgggttgttggtagaacgctcacgggtgggccaaaccaagctagttgaatggcaacactggtagcgcttgtgagagggtgacaacgctacgcgcagcgtgctgttacaacggcaacagttgcggttgtgtcaagaaggctacagggctcacactaacacgatgtatcaatgtagaagtagttgctgctgcagctgcccctagagggagagctcactgcatgcatggagtcaagaaaaacagcccgcaggcagcaggcagcagcctgcaggctggatgctgtttctaatcagaaacaggaggcagagagctagctagcatgattgga

SEQ ID NO: 77864 - DNA, 291 bp, Zea mays
  Clone ID: MRT4577_171035C.1
cccacgcgggggggagttcgggatcgcaacgtactcaggggtttgtctacgtcaccgccccggtgagagtgtgcgtctcgagcatggggcgtccggtatcatacagagcaggcccttgcgtggaacgtcctcaacgacgacgagacgcagcgcttcgtcgccatcatcgtcatcaactggtccttcgtggtaatgaccagcggcctactagaacaaccaactagtaggaggcggccgccctactatcatcagcagctgttatttgacgtagtatgtatccaatgagtggtc

SEQ ID NO: 77865 - DNA, 393 bp, Zea mays
  Clone ID: MRT4577_171036C.1
ggcagaggctgcagaagcagaagtccaagccgcacaagcatttgctgaagcagcgtttttgacattgaagaacagaaatgctggaaaattggtaatagctctaattcatgcatccctttgttacatactaccatgttttatatcctatcacatttagaaccaggttttataaccccttatgcaactgattggttagttttgtatactgcaaaaacaaaatcccatcatgagcacgtttgcttagtctatccccccacccccatgaaggtagtgatttccaaaggcacccttatgccaacaatagcgtctgctgcaacagcaaagcttttagtcccaagaaactatagagtaggaaactcagtgagagccacagataaagttgatagaatagta

SEQ ID NO: 77866 - DNA, 299 bp, Zea mays
  Clone ID: MRT4577_171037C.1
tccgggaattcccgggggcctcgccacactgctcctccgcagggcatgaccctcggcctagccgaagcacgtcatgcccccacactagcttaaagcaagcgccaaccgccatcagctcgacagcaactcagaagaccgccctccatgaagagaaactcgggctggacacgaggacgccggccggccaccggagacgcagcggcccccggaggctgctgcaagacaacccgaggaccgccgacaagaacatcacaggcggaggtcaagaagccgctgggactatccttgggccagaaccc

SEQ ID NO: 77867 - DNA, 183 bp, Zea mays
  Clone ID: MRT4577_171038C.1
gggggacacgacagacctgtgggggttaattatttttatttccaagcagtttgcttgcgtgcacgcaataaggcaaacccccattggatggagaggacggacgggtcaaatggagatgctgttggggatgcccctccccatgactcccgggttggagaagggagctttgctttgacaaagcaa

SEQ ID NO: 77868 - DNA, 213 bp, Zea mays
  Clone ID: MRT4577_171039C.1
aagggcataacccattgcccaaatcaaatatatgtccccttgcccctgctttacacacccacccacactggctctgaaaaaatgcacacaggaaaagtccaacaaccatttttcttttcgagcttaaacttgaactggtcctggttcccccaaaaatataaaactatttatttcatttcccctccccccctcaaaattggggggaagagggtt

SEQ ID NO: 77869 - DNA, 2178 bp, Zea mays
  Clone ID: MRT4577_17103C.1
ttgggtacctcgaggccggccgggctcccctctagacagcttgtttggttgtattgtttttgagctagcaagcaccggcctcaacaccggtagtacgtagcgtaggtatcgtccactcgtccggccgtcgcgcgcgcagctcctgccttcttcctctcgctggatatattggcgacgcacttacgatcgaggccagcagctggggctggacttggatagctagatggccaagccactgaacctgactcctgccttcctctcgccgatgatggccaccagctgccgcttcagctccggcgggcatgcgcagtgcttcccctcgtcgctaccgtgccggaggaggacgccgacgccacggaccacatcgtcgtctacgcgccctgcggctcaggttagccctggcagaagcaagcaacacgatgaagcagcatcggagactacgataaggcagcagctccagcaagtcgatgtgcttgagaacatggggatttctcggcattttgctggtgaaatcaagtgtatccttgacaggacatacagatgttggttacagagacacgaggaaattatgcaggacacaacgacatgtgcgatggcatttcgtattctaaggatgaatggatacaatgtctcttctgatgagttgtatcatgttgttgaagcttccggactccataattcacttggaggatatctcaatgacacaagaaccttgttagaattacacaaggcctctacagttagtatctctgaagacgagtctatcctggatagcataggctcaaggtcaagtaccttactgagggaacaactagagtctggtggtgctctacgaaatccttcactctttaaagaggtggaacatgctctggacggtcccttctacaccacattggaccgtctacaccataggtggaacatcgaaaatttcaatattatagagcagcacatgctagagacaccatacttgtcaaatcaacataccagtagagatattctagcgttgagtattagagacttcagttcctctcagtttacttaccagcaagaacttcaacatcttgaaagctgggtgaaagagtgcaggttagaccagctacaatttgcgcgacagaagttggcatacttctacttgtctgctgctggcaccatgttctctcctgagctgtctgatgctcgaactttgtgggccaaaaatggtgtgctcacaactattgttgacgacttctttgatgttgcgggatcaaaagaagaacttgaaaaccttgtcatgttggttgagatgtgggacgagcatcacaaagttgagttctactcagaacaagtagagattatattttcttcaatttatgactcagttaaccaacttggtgaaaaggcttctttggtacaagaccgcagtattaccaaacacctagtagaaatatggttggatttgctaaagtctatgatgacagaggtagagtggcgtttgagcaaatatgtgccaacagagaaggaatacatgataaatgcatctttaacatttggactaggccccattgtattgccagcattatattttgttgggccaaagatctcagagtctattgttaaagatccagaatatgatgaattgttcaaactgatgagcacatgtggtcgcctcttgaatgatgttcagacttttgagagggagtacaacgagggcaagttgaatagtgtttctctcctcgttcttcatggtggctccatgtccatatcagacgccaaaaggaaattacagaagcccatagacacatgcagaagagacctcctaagtttagttcttcgtgaagaaagtgttgttcctaggccctgcaaggaattattttggaaaatgtgcaaggtgtgctacttcttctactcgacgacggatgggtttagctcacaagtggagagggctaaagaagtggatgcggtgatcaatgagccactaaagctacaaggaagtcatacgctggtgtctgatgtgtgaaaggaactaagcgtcgatgtgatgtgttcttttgatttattagtagttgtgttttctctatatggtggtttggtaggtgactgtataatgtaaaggagttggcacatgttgtcagtgtcgtaacatcttcttgatctattcagcgctctcttgggcttgcgttaaaaaaaaaaaaaaaaaaa

SEQ ID NO: 77870 - DNA, 208 bp, Zea mays
  unsure (1)..(208): unsure at all n locations
  Clone ID: MRT4577_171040C.1
gttacaaaacaagcangctcttgtgcatgactctagaaattgctcactgatatagagatattggcactgggaaacttgctggaatatatgaaaaaaatggaatactgcatgagagcccgtgtgtctgccagctttaccccctttggatccattgaatggatctgaatgtgcaacagaacagcccttcacctttgcttggaagcaccaa

SEQ ID NO: 77871 - DNA, 201 bp, Zea mays
  unsure (1)..(201): unsure at all n locations
  Clone ID: MRT4577_171041C.1
cgatcacaagtcgcaaaatcagcttgattttttctttaatatatccagtccaacgcttagctctttcccccctctccagatactataagatgtgacctctacaatacagagcgaggattaggacatactatgctgaagcacccacgcgtccgcccacgcgtccgcccacggcgttcgcccacgcgttcgnggacgcgtggg

SEQ ID NO: 77872 - DNA, 300 bp, Zea mays
  Clone ID: MRT4577_171042C.1
ctacagtcattaccatgaaaaaataatttcccaccggaccatcctctggggtagggtgccttctgccagtgccgaaccgcacgcgcttgattttccgcaccctctatagcctatagcgtacatgtagcccgccgacgtctccacaaccttagtctcaatatccattgtcgtccacaaccctaccgctacatcccgcggtcgtgtgcgcctttcgctaggcggggtcccatctgcattcactccttactcttacctctatggtaaagttcgctcccaggtccggtgccgtcacctcttttc

SEQ ID NO: 77873 - DNA, 705 bp, Zea mays
  Clone ID: MRT4577_171043C.1
tgaattcggcacgaggccgcgacctccgagctccgtcggctgtgtcctgaccagctgcttccgaccacgccccggccatagcctccacgcctccaccacaccctggcccgatcctccgtggtccgcgctgatgcgcctccgcctaggcaactcgcccacgccccggcagccacgcggcgccgagctcctctgagtactctgcgcctacgcgcaactcctagtttgatagtatgtttcattaacctaattcctcatcaattagtacaactttaaatacctcccttaattcttgtagattggtatcaatatatttctccattggttaggcatcttattcgatcggaagatatgattgaataacttggttagtcatactataactatgtcctcgaacatctccatgcctcaattgggataccatcagagcctgtcaccttaccctctttcatcctttcaatgcctctctaatcttaaattcttggatcctacgcacaaagcgtgtattggtgtcaacaaaagtcacccaactgaatggttgtctgcattttcccgattgaacactttattaaaatactctcggtagttatgtgtgatctcaccatcctttatcaagaggtgctttgggtcattcttaaagcacttaacttggggtgaaatcccctgtcttcttttgacggatcataaccatcctgcatatttgtgatg

SEQ ID NO: 77874 - DNA, 1107 bp, Zea mays
  Clone ID: MRT4577_171044C.1
aggaaatcttggagaaggtgctgcacaggaggaagtatgggaagtaggagctcagcttttaggcctttcaatcggtgtactcattatggtatatatgtacagttcattaagttttatatgttgtttatatctaaccacctttttgtatgccaaccttattgatcagttataatattgcactgatggagacagatgccatcatttttatatccatttacagttgctgtttttattctaggataagacaggtgtaaagtcatcatacttaactcttgttttaacttggctgagtgttcgtcttctacatctttggttgcgctatcagtccatatcagttctcaagttccgcacagtaagataaacctaaaacgtggccggattcttgtgaaatcacatgtcgcacaacatactgttcctggttatgttgcttgcaatgaggaagaaaacattttaacatgggaaagatacttgcgtccacaagtttcttttggtgtgcccatggaaagaatgcttggtggtgacaaatccagtgacatggtgaatagattactgaagttgtacaagaacgagaagtacatcctcttcttcgagcagtttggatcaagggagctgacatttctagttactttcaaggagtcagcaacaagtatgtcagtcctaaggagcctgtggcaagcacattggcttcacaagaatcagctaaggcaagaggaggttttcccatggttagaagaaagcatagtcgcattggagaatggattcactgacttcctcgagcaattggggagcgctggctgggaccaggacctgatcattttgaaagtcccaaaaaagcccgtcttggtgttggaacatttagaagaccaaaaggtgtaagatgccccagctggtctattgctaacctagaggataatgtagaatttttttttttattgcgtgatcatgacctgctgaatcaattgcaactgagcgtcgtgaaggagccgagttcccatgtggcaaatgcttagtgatctaacaagaatagaaactctgtctggcatgtgacaagtttatgctttaaggagtgtttggtttataaggattaatttttagtctcttcctttt

SEQ ID NO: 77875 - DNA, 333 bp, Zea mays
  Clone ID: MRT4577_171045C.1
tcgctttcgaacatattgagggggttgtgccttgctgggacgcaacgggccctcaatgggcgggggccccgcaaacatatatagaatgcgcggtccagccacctagtggagagcgcgtcgactctcgtctggatgtctcaaacagacgtagtcttcacatggatcgcagccctcagaagaatctttcgagggtggaccaaatccgttgtgccatcacgggatgggcagcttgtgcaatctctccaagcgagagacacgggaacacagcgtgctgaggtctattattcgtttcatgggaccccacttggatttgagtgatcccgttggcgctta

SEQ ID NO: 77876 - DNA, 291 bp, Zea mays
  unsure (1)..(291): unsure at all n locations
  Clone ID: MRT4577_171046C.1
tttaaaaaaattaagcatgctttattcactgctccggtttttcaatgtctaatgtttccagcctataagcatttaaaacattacaactaaccttgaccaaacttgtaaataccaacacaattctatcctttatatatggggggggggcggatancaactaccaccgtttatgacatacagaaattgtacactcactacataggccccaagacttcctacctgtcctaaattcaaggaaccatcctacccccaaaaatctaaaaacaacatgacactcataaaccaaactga

SEQ ID NO: 77877 - DNA, 273 bp, Zea mays
  Clone ID: MRT4577_171047C.1
cccacggggggaaaaaaaaaaattacaaattaactagagggaaaaccaaaaataggcatgagtgggggggccaggtaaacagcgtgattggggggggggggacgactcacattgaaatatttccccccccttcatcaggagggggaacgatgcacctttttttcacacagggggcaggggaaagatgttttactttggggaggaaacttgttttgcggggggccccccggcgggggtctctttttgtcgggggggcccccgccccccgggggg

SEQ ID NO: 77878 - DNA, 531 bp, Zea mays
  Clone ID: MRT4577_171048C.1
atgcaggcggcatgcaaccgcaccaagggggcgcaccctttcgacttcgacgcgtccagcatggaggcccagacccacacgtcatgtaaccgccgcgccggttactacaagcgagaaactgcaccgccactcgcgccagtaccgcgccttctcgactgcggaaccggtgccgcgactcgaggcgaccctgcgcatgacccgatagtgccaaccgagcacatcggtcatgggtcattcagccgcgggagaaggcgcgacgatcgatacggccagaaatgggccgacagtaatggcggtggtaggcgggcggaggcagcagtcaagtcgtcagcaagctcacgtcccctcctgggacagcgagagagccctctcccacagcgtgaagacgacgcgcccgtgttccgttccccgaacggctcgcgcacgcacaacggctgccccgcgaaccacctgtcccatcgcattcactctgcggcaggacaggcggcacctttggcaggcgaagcaggcgacgcttcacctccgccataa

SEQ ID NO: 77879 - DNA, 349 bp, Zea mays
  Clone ID: MRT4577_171049C.1
tttcaataactttgccagaagaatcatgttgtcgctcgctgtcgacctccttaacccttcggctgagaagaccgcccagacccacaagctcaagcgtctggtgcagtccccgaactcgtacttcatggacgtcaagtgccccgggtgcttcaacatcaccaccgacttctcgcacgctcaaaccgtcgccctctgcggctcctgcagcaccatcctctgcacccccaccgacggaaagactccactcactgacggctgctccttccgttgcaaggagcaatacctttgaattccatttaaaaccccttttcttaccttgtctcgctggacaccgacccgaactccttcc

SEQ ID NO: 77880 - DNA, 238 bp, Zea mays
  Clone ID: MRT4577_17104C.1
tgacgtcgcatgcactcctccctaacctagatttcagctcgagtaggttttatgctacttgcccttatatgggagttcgatttcccaccattgagtggtcttattatggcaattctaaatgacagtaccataatgaccatattcaaggatcgtgtgatgccttcgtctatacttgacagctggaagctgtccgttattgtcacaactggaattgtgcttgtgggatacctagcatatg

SEQ ID NO: 77881 - DNA, 520 bp, Zea mays
  Clone ID: MRT4577_171050C.1
atgcaggcggcatgcaaccgcgccaagtgggcgcaccccttcgactccaacgcgcccagcatggaggcccaggcccacacgtcatgcaaccggcgcgccggttgctacgtgcaagcaactgcaccgccactcgcgccactaccgcgcctcctcgactgcggaaccagtaccgcgactcgaggcaaccctgcgtatgacccaacagtgccagccaggcacatcggtcacggggaccgggaaaggggataccccgaaagggatccttctccgcgaaggaaacgggctccgagcccccctactgatcagaggttcgaaggttggcccctcggaggggttcaacagccgcctcagagcgctcgggctccgcgcccactactggtcagaggttcgagggccggcccctcggaagggtccaacggccgcctcaggccactcgggctccgcgcccactactgatcaggggttcgtaggctggccctcgaagggttcacagccgcctcagacgcagagcgagggatga

SEQ ID NO: 77882 - DNA, 361 bp, Zea mays
  Clone ID: MRT4577_171051C.1
cgaagatggcgatgaccgtcgaaggtgagtgcgcctagacccttctccccccgatcttccaacattttcctgtagtccagcttcgattcccgtcgtttgggacgccgattcgtgcatggagtcaggccgattgggttgttgctagggttccgttccagtccgatggatggactcggttgctctcttcggaatcagggctttggagatcccgaatagattaaggatggtgcgctgtaagttacctctggcagcgccagcgccagcactggattgctcgttcggtcgaggttggtttgcaggtgctcattttggatcagaggcggagcttgtgttgccactttgcagcagtttttgaatccga

SEQ ID NO: 77883 - DNA, 534 bp, Zea mays
  Clone ID: MRT4577_171052C.1
atggctgaaaggtaccaactcccatggagttgcgttcctccaacgacgaggcagaaagacggcggatatcccccatccgggggcttggaaggtggaaagacacgatgcataagggagcgcgaagacatggtcgccttccaagggagtcaccccccttttaaaggcggctctccctacttgcgtccccagccgtcgtgggctgagtctcctccaacacactccaaagtcctcccctacggcgcgggggctgggtcccacacgtcatgcaagccggctcagagcggaagaagccaaaccgccgtgcgcgggaacgggaaagggggataccccgaaaaggatccttccccgagaaggaaccgggctccgagcccccctactgatcagaggttcgaaggctggcccctcggaagggttcgacagccgcctcagatcgcgtgggctctacacccactactggtcagaagttcgaaggccggcccctcggaagggttccacggcagcctcaggctactcgggctccgcgcccactactga

SEQ ID NO: 77884 - DNA, 450 bp, Zea mays
  Clone ID: MRT4577_171053C.1
atgcagtcggcatgcaaccgcgccaagtgggcgcaccccttcaactccaacgcgcctagcatggaggcccaggcccacacgtcatgcaaccggcgcgccggttgctacgtgcgagtaactgcaccgcccctcgcgccactaccgcgcctcctcgactacggaaccagtaccgcgactcgaggcaaccctgcgcatgacccaacagtgccagccaggcgcatcgatcacaggccagtcagccgcgagagaaggcgcgacggtcgatgctgccaaaaatgggccggcagtaatggcggtggcaggcgggcggaagcagcggtcgcgtcgtcagccaagctcacgtcccctcatgggacggcgagagaaccctctcccacgggaccgggaaaggggataccccgaaagggatccttcttcgtgaaggaaacgggccccaagcccccctactga

SEQ ID NO: 77885 - DNA, 879 bp, Zea mays
  Clone ID: MRT4577_171054C.1
atggctgaaaggtaccaactcccacggagttacgttcctccaacgacaaggcggaaggattgcgggtgtcccccatccgggggctctgaaggtggaaagacacgatgcataagggagcgcgaagacatggtcgcctttcaagggggtcaccctccttttaaaggcgactctccctacttgcgtccccagccgtcgtgggctgagtcttctccaacacactccaaggtcctccccctaaggcgcgggggctgggtcccacgcgtcatgcaagctggcccagagcagaagaagccaaaccgccgcgcgcggtgcatgcaaccgtccagcggttacgagcattcctccgctttcgcccagaccagcgagcgaaagggcgggcagccatgcaggcggcatgcaaccgcgccaagtgggcgcgcccctccgacttccaacgcacctagcatgggggcccacgcccacgcgtcatgcaaccggcgcgccggtcgctacgtgcaagcaactgcaccgccactcgcaccactgccacgcctcctcgactgtagaaccagtaccgcgactcgaggcaaccctgcgtacgacccagcagtgccagccaggcgcgatggtcactacgaccaaaaatgggccggcagtaatggcggtggcaggcgggcgggagcagcggttacgtcgtcagccaagcttacgtcccatcctggggcagtgagagaaccctctctcacgcgtgaagacggcgcgcccgtgttccgttcctcgaacggctcgcgcacgcgcaacggctgccccgcgaactgctcgccccgtcgcattaactccgcggcgggacaggcggcgcctctggcaggagaagcgagcgacgcttcgcctttgccatga

SEQ ID NO: 77886 - DNA, 921 bp, Zea mays
  Clone ID: MRT4577_171055C.1
atggctggaggacgtctccgccgcagggctggagggcgattgccaccaccagaagctggaagaagaggtggcccgccgacccgcgcaggaggtagagccccggctcgcctcgctccccccccagcgaggatgacgaacaccctcgatgctgagggcgggatcgggatcacagcccggcttgcctttcctcatccaggagctggaggcaactctccctacttgcgcccccaaccgtcacgggctgagtcttctccaacacgctccaaggccctcccctgcggcgcgggggctgggtcccgcatgtcatgcaaaccggctcggagcagaagaagccaaactgccgcgcgtggtgcacacaaccgcccagcggttacaagtgaccctccacttttgcccagaccaacgggcgaaagaggcgggcagccatgcaggcggcatgcaaccacgccaagtggacgcgcttctccgactcccgacacgccagcatggaggcccaggcccaagcgtcacgcagccggcgcgccggatgctgcatgcaagcgactgcaccgccacttgcgccaccaccgcgcctcttcggttgcggaaccaatactgcgactcgaggcgacccagcacatgacccagcaacgccagcctggcgcggcggtcaatgcggccgaaagtgggccggcagtaatgacggtggcaggcgggcgggagcagcggtcacgtcgtcagccaagctcacgtcccatccgggggcagcaagagaaccccctctcacggcgtgaagacaacacgcccgtgatccgttcctcgaacggctcgcgcacgcgcgacgaccaccccgccaaccactcgccccgtcgcattaactccgcggcgggacaggcggcgcttctggcaggagaagcgggcgacgcttcgctttcgccgtaa

SEQ ID NO: 77887 - DNA, 586 bp, Zea mays
  Clone ID: MRT4577_171056C.1
atggaggcccaggcccacacgtcatgtaaccggcgcgccggttactacgtgcaaaaaactgcagcgccacttgcgccaacgccgcgccttctcgactacggaaccggtgccgcgactcgaggcaaccctgcgaatggcctagcagtgccaaccaggcacgccggtcacaggtctgtcagccgcgggagaaggcgcgacgggaccgggaaagggggatactccgaaagggatccttctccgcgaaggaagcgggacccgagccctcctacttatcagaggttcgaaggctggccccccggaagggttcgacagccgcctcagagcactcgggctccgcgcccactactggtcagaggttcgaaggctggcccctcggaagggttcgacagccgccttaggccactcgggctccacgcccactactgatcaggggttcaaaggctggtcccccgaagggttcgacaaccgcctcagaacacgcagagcgagggatgactctgggtacgtccgatacatggccgaggctcgggctacgctcccgaggtaccctaggacatttccgagactagcaggagcgattttgtaa

SEQ ID NO: 77888 - DNA, 371 bp, Zea mays
  Clone ID: MRT4577_171057C.1
tatgaaacggggagggacccatgacggcttaaaggctgctgaaaaggcacctgctccatgcactggacagttagaatcagcatcagcagcatgaatgcgacctgctcggactccggctggtggaggtgctggtcccggtggggcccctgctcgtagaattgagagcacatcagagctaggaaagacggataatccacctccagttgcaaaagcaccggccgccacacgcgaatatgatgttgacaagccttttgtagcagacatgataccagttcatgaaaatgtagtcacattggacgatataggtgccgtggatgatatgaaagaatcacttcacgagctcgagatgctgcctttaatacggacctacc

SEQ ID NO: 77889 - DNA, 969 bp, Zea mays
  Clone ID: MRT4577_171058C.1
atggttgcctttcaagggggtcaccctccttttaaaggcaactctcgccacttgcgtcctcagccgtcgcggactgagtcttctccaacatgctccaaggtcctccccctacgacacgggggctgggtcccacgcatcgtgcaagctggcccaggacagaaggagccaaaaccgccgcgcgcgatgcgcgcaactgcccagcggttacgagcattcttccactttcgcccagaccagcgggtgaaagggtggaccgccatgcaggcgacatgcaaccacaccaagggggcgcaccctttcgacttcgacgcgtccagcgtggaggcccagacccacacgtcatgtaaccgccgcgccggttactacaagcgagaaactgcaccgccactcgcgccagtaccgcgccttctcgactgcggaaccggtgccgcgactcgaggcgaccctgcgcatgacccgatagtgccaaccgagcacatcggtcatgggtcattcagccgcgggagaaggcgcgacgatcgatacggccagaaatgggccgacagtaatggcggtggtaggcgggcggaggcagcagtcaagtcggaccgggaaaggggatactccgaaagggatccttctccgcgaaggaagcgggccccgagccccctactgatcagaggttcgaaggctagcccctcggaagggttcaacagccgcctcagagcactcgggctccacgcccactactggtcagaggttcgaaggctggcccctcagaagggttcaacggccgcctcaggccactcgggctccgcgcccactactgatcaggggttcgtaggctggcccccgaagggttctgacagctgcctcagagcacgcagagcgagggatgaccctggttacgttcgatacataaccaaggttcgggctacgctcccaaggtaccctaggacatttccgagaccaacgggaacggttttgtaa

SEQ ID NO: 77890 - DNA, 157 bp, Zea mays
  Clone ID: MRT4577_171059C.1
atccatccatttcttacccattcaaaatgccgatagggcattgttagagcatgacggcgcacgttcacgcgggcacacaggttttgttggggctccgcagtggcgaatccgggcggcggggcggcgtgaggctgacaaagggcgcggggggggcggt

SEQ ID NO: 77891 - DNA, 317 bp, Zea mays
  Clone ID: MRT4577_17105C.1
gggaaaaggggggatcttcggtaaaaattttagcgggccaaatcatagccccttctggggggggggggtaccggaacccagggggggaacattaaacccatttcctgccagggtttgggcaaacccccaagcccccaacgggggccctacgtaccggaccccagtaaccccccccacaccctaccttgtttggaggggcagtttccggtgtacccccccttctgggcggggccccccccgaccacccgggggggccccttatgtatgagtaaggatagggcccccccctcccgggggggaatgggagggggcccccc

SEQ ID NO: 77892 - DNA, 838 bp, Zea mays
  Clone ID: MRT4577_171060C.1
atgcaggcggcatgcaaccgcaccaagggggcgcaccctttcgacttcgacgcgttcagcatgagggcccaggcccacacgtcatgtaaccagcgcgccggttactacgtacaagaaacagcaccgccacttgcgccactaccgcgcctcctcgagtgcggaaccggtaccgtgactcgaggcaaccctgcgcatgacccaacagtgccaaccaagcacatcagtcacgggtcagtcagccgtgggagaaggcgcgacggtcgatacgtccagaaatgtgccgatagtaatggcggtggcaggcgggcggaagcagccgtcacgtcgtcagcaagctcacgccccctcctgggacagcgagaggaccctctcccacggcgtgaagacgacgcgtccgcgttcctttcctcgaacggctcgcgcacgcacaacggccgccccgtgaaccactcgtcccgtcgcattaactctgcggcaggacaggcgacacctttggcaggcgaagcaggcgacgcttcacctccgccataatgaccgcgtcaaaaaagggaccgggaaaggggataccccgaaagggatccttctccgcgaaggaaacgggccccgagcccccctactgatcagaggttcgaaagctggcccctcggaggggttcaacagccgcctcagagcgctcgggctccgcgcccgctactggtcagaggttcgaaggccggcccctcagaagggttcaacggccacctcaggccactcgggctccgcgcccactactaatcaggggttcgtaggctggccctcaaagggttcacagccgcctcagacgcagagcgagaaatga

SEQ ID NO: 77893 - DNA, 994 bp, Zea mays
  Clone ID: MRT4577_171061C.1
atggagtgcgaagatatggttgccatccaagggggtcaccctccttttaaaggcgactctccccacttgcgtcctcagccggcgcggactgagtcttctccaacacgctccaaggtcctccccctacgacacgggggctgggtcccacgcgtcatgcaagctggcccaggacagaaggagccaaaaccgccgcgcgcggtgcgcgcaactgcccagcagttacaagcattcctccactatcgcctggaccagcgggtgaaagggcggacggccatgcaggcggcatgcaaccgcaccaagggggcgcaccctttcgacttcgacgcgtccagcatggaggcccaggcccacacgtcatgtaaccggcgcgccggttactacgtgcgagaaactgcaccgccactcgcgccagtatcgcgcctcctcgactgcggaaccggtgccgcgactcgaggcgaccctgcgcatgacccgacagtgccaaccaagcacatcggtcacgggtcagtcaaccgcgggagagggcgcgacggtcgatacgaccagaaatggggcggcagtaatggcggtggcaggcgggcggaagcagcagtcaagtcgtcagcaagctcacgccccctcctgggacagcgagagaaccctctcccacggcgtgaagacgacgcgcccgtgttccgttcctcgaacggctcgcgcacgcacaacggctgccccgcgaaccactcgtcctgtcgcattaactctgcggcaggacaggcggcacctttggcaggcaaagcaggcgacgcttcacctccgccataatgaccacgtcaaaaaatgtgcgccacgtcgttcgatttcatatccttttccacttcctctttctctctctttctacagggaccgggaaaggggatactccaaaagggatccttctccgcgaaggaagcgggccccgagcccccctattgatcagaggttcgaaggctggcccctcggaagggttcaatag

SEQ ID NO: 77894 - DNA, 235 bp, Zea mays
  Clone ID: MRT4577_171062C.1
acgtccttgttttcttttttactaactatatcatccatttacaaaccaaaccattggccaactacataaataaatgtcccaaaatgctatctgggacaaaaccggctacaatgcccttaccacattggacaggtctacctggcgacgctgggattcttgttaggagaatgactcgatgatatgaggctgctgctgctgcgcctgcagtcgtagatagagcctatagatgatgagc

SEQ ID NO: 77895 - DNA, 3034 bp, Zea mays
  Clone ID: MRT4577_171063C.1
aattcggcacgagggccgcagccccatcttcatcttcctcgcagcgccggcgttccatcttccgctcctcccttactcgcgctcggcacgcaggcggcggcggcggcactcaggctcgggatctcagcgacggcgctcaggctcgggatctcagcgacggcgcccaggctcgggatctcagcgacggcgtcagcggcttcccttccgcctctcgccagtcgcctcgcgccctcgccttcgatcctccgcacaccggccggtgaccctgcgttatttctctgagggcactcatgatttagcacaagccatactgatctctaactctggtgacataagctgttgttagggtagcaaatcaagagataagaatggcagattcaatggtagcgagcttctgggggcctgttacatcaacgattgagttgtgcgaggagaattatgcacactcatcatatatagcagaattctacaacacaatttctaatgtcccatgtgttcttttggcgcttattggattagtgaatgctttccgccaaggttttgagaagcgattcagtggcctgagtaacatttaaggttgtggttaaaaaaatcccctcgtttgtctcacgccaaagcacaggtctaaggtcccggtcgcagtcgtgttctcacatgggctacgatgccgctatgtatgggtggggcaggggttcaggcgttttctcgacctatgtgaggtcttcttaatataatgttcgggggctgtcttacccccacaggtcgatgttttttatctacctcatggaaatggctctgtccccactcccaccaaatacaccttgcatgcacatgcctatagaaactacatgaaatccatattttttgtgtccgttttggcacatatggtttcacttttggcaatatattgatgcacttgctgaccaacaaccatttggcatatgtcgtgattgtgatggccaaaattctatctgttctgatgtccattgattagcacatttgttgagagatccgttttgttctattttatgtttttacccaatcttcatcaccaggtgcatggaaaaaaaactaaggtaatgtagttgtctcttatgatggatcaactggcagcttaagggtgtgtttggttcagctttctaaaccagatttgttgccaaaaatctggaatctcaaccaaaggggtataatagcagaatatatttctgaaaatctgtagatttatatagttcaatttagaatcacctcatatcctagattttctagattcctgccatccatgttaccaagttatcatgcccttacagaatctacagttgacagtggttcaaccaaatatattttagctttctcacaaccgtctgctcgcagcagctcacagccagaataagatttttagaaatctatagctggacgaaacagaccctaagtctgaccaatcatttagtgtatcaaatgatatcaaagcactaacattttgacctttgccgtatactttagtcagcaaatcagcatagagaatttatttgaaattgggactgatccatgtaacttcagttttgcttgcctgaaacgatgactagggcccgtttgctccgctccttgctggagctgcctggcccagtcagctacccagcgtccgattttggacgctcggatgcctggtagggcacgaaccaaacaggaacccatactcacatatgaaatatgatactggctattaggagtgtgaagggttgtgattttctgggttatcagttttttgggggagcacactgttttgacatactgtttactgctggatattttcataaacttcctatctctgtgacctgtttagtcatcttgtacttaattttcataacgtttactctattttgttcataacgtttactctattttgtgcatgatattctttttttggtaacatgttcctttgttgatgttctgttttccatgcacctacaacagagtgacgagactccaatggtctgggagatccttctttatatgtatgtcctttattcgccggactggcattacaggagcacaatgccaaccttccttttcctatatggtgctgcctttgctgtagttcatttctttgcccggttccaattcgtattcaagctgcattacattggcctctgcttcctctgcatcccccggatgtacaagtattacatacagaccaaagacgtggctgcgaagcggctcgcaaagctgtgggttctcacgttaacccttgggactctctgctggctagttgatcgcatcttctgcaagaagctttcgcattggtatgtcaacccgcaggggcacgcatggtggcatgtgcttatgggcctcaactcatactatgcaaacacattcctaatgttctgtcgggctcagcagcgcgggtgggaggcgcgaatcacctaccttcttggatttttgccttatgtcaaggtccagaaaccagagaagaagagggaatgatttgtctctgcttaacactgatgctactcagtccaccgccagtaagctaatgtctatcccccaccccatcccccacccaatgtgcgcagacaagttgtggcatttttgtatatgggcatccaaatgattacggactataaatgttctgatgtcacactggatttcggtaacttttgactggcacctgttttgtaccatacttaatcatcgaacggagattagttggagtggttggttggtgtcctagttttggccatctttctaaaaaaaaaaaaaaaaaaaaaaaaaaaaaaaaaagaaaaaaaaaaaaaaaaaagcggccgtcccatacttaatcatcgaccggaaattatttggaggggttggttggggtcctaattttggccatcttttttttggtttctttccaaatcccttttgggggtaaaaggacagggttatttgtttattcgtttgtcgttgaaaggagccccgttgtactagttatgttatcatccctcggaaacacccttccatataatgcccgttaattcattgacttgggttggggccc

SEQ ID NO: 77896 - DNA, 649 bp, Zea mays
  unsure (1)..(649): unsure at all n locations
  Clone ID: MRT4577_171064C.1
aattcggcacgaggcagacattggctttgagcatcgcacagcacgcacacgcctgcctgccattgttagatccggggccggccatcctctctcggttccgtggcaaccagagcctttcatgcttccttgcagcgtgccccggcggggggctagccagtggatttgagctcaccaatcagacgggctgtgccgaaactccagcggctccacactgaaaaacatagttattgtgacgtgctggctgcggaaagagatatattcggctgctgtggcccaacctatgtgaaatgaaccgactggcctgacgctctcaccttccacaattcccgtatgacatcagctcacgatgcgttgtgggacatggaagggttgattccgcggcaaacgctacatctacttgttttgagtaaaagctgtacctgatgacctctctcatcataaacacagcactctgaactacgtaactggacataatccactatctgtgagaatcagagaggtatcacagtctaatgaacggcagatcggcaagaatattgaaataaaagacaagcactagaattaagtgaaattgcgaatgttatactgtgcgacctggaattaatcctctatnttagaacattgaatttggaatgccatggcatagatg

SEQ ID NO: 77897 - DNA, 1429 bp, Zea mays
  Clone ID: MRT4577_171065C.1
gccggccggtccgggacgtttttttaccctagttttttttttcactgagcgaaggccccacagccgcagccccatcttcatcttcctcgcagcgccggcgttccatcttccgctcctcccttattcgcgctcggcacgcaggcggcggcggcggcactcaggctcgggatctcagcgacggcgctcaggctcgggatctcagcgacggcgcccaggctcgggatctcagcgacggcgtcagcggcttcccttcagcctcgcgccctcgccttcgatcctccgcacaccggccggtgaccctgcgttatttctctgagggcactcatgatttagcacaagtcatactgatctctaactctggtgacataagctgttgttagggtagcaaatcaagagataaaaatggcagattcaatggtagcgagcttctgggggcctgttacatcaacaactgagttgtgcgaggagaattatgcacactcatcatatatagcagaattctacaacacaatttctaatgtcccatgtgttcttttggcgcttattggattagtgaatgctttccgccaaggttttgagaagcgattcagtgtcctgcacatatccaatatgatacttgctattgggagtatgatttttcatgccaccttgcaacttgtcctacaacagagtgacgagactccaatggtctgggagatccttctttatatgtatgtcctttattcgccggactggcattacaggagcacaatgccaaccttccttttcctatatggggctgcctttgctgtagttcatttctttgcccggttccaattcgtattcaagctgcattacattggcctctgcttcctctgcatcccccggatgttcaagtattacatacagacgaaagacgtggctgcgaaacggctcgcgaaactgtgggttctcccgttaacccttgggactctctgctggctagttgatcgcattttttgcaaaaagcttttgcattggtacgtcaacccccaggggcacgcatggtggcatgtgcttatgggcctcaactcatactatgcaaacccattcctaatgttttgtcgggctcaccagcgcgggtgggaggcgaaaatcccctcccttcttggatttttgccttatgtcaaggtccagaaaccaaaaaaaagggaattatttgtttttgttgaaccctgatggtactcagtcccccgccagtaaggtaatgtttatccccccccccccccccccccaatgtgggcagacaagttgtggcatttttgtatatgggcatccaaaagattacgggctataaatgttttgatgtccccctggatttcggtaacttttgcctggcaaaaaaaaaaaaaaaaaaaaaaaaaaaaaaaaaaaaaaaaaaaaaaaaaaaaactcgagagggggccgcggg

SEQ ID NO: 77898 - DNA, 458 bp, Zea mays
  Clone ID: MRT4577_171066C.1
ttcgggactgaccaacgataatccaaccattgcatccaaaaataaataaatcaaaaatcacatagcatttcatccccaaagcatcatggcaaacccaggaaacgttgctggcggcttgaaggcgacgattaataaccccaacgtctctgaacaagccaaatctaatgccgagcaccgattggcaaccgaggagttcccatcggttgccgacgaaaccaaccaatccaaaaacccaggcaacgtcattgggggcatcaaagctgccatcaacaaccccaatgtttctgaggagaaaaaatccgagcttcgtgctaaactcgacgacgcttgaattctcgctcatccactttggtgcttgttggtagtggggctcccagtattactgctagcttgtcctcattaaaccgtgtaaataaaaggcagtgtcaaacctgaagaaatatagctgctcgtaacat

SEQ ID NO: 77899 - DNA, 574 bp, Zea mays
  Clone ID: MRT4577_171067C.1
aacccgcaggggcacgcatggtggcatgtgcttatgggcctcaactcatactatgcaaacacattcctaatgttctgtcgggctcagcagcgcgggtgggaggcgagaatcacctaccttcttggatttttgccttatgtcaaggtccagaaaccagagaagagggaatgatttgtctctgctgaacactgatgctactcagtccaccgccagtaagctaatgtctatccccaccccaccccccacccaatgtgcgcagacaagttgtggcatttttgtatatgggcatccaaatgattacggactataaatgttctgatgtcacactggatttcggtaacttttgactggcacctgttttgtaccatacttaatcatcgaacggagattagttggagtggttggttggtgtcctagttttggccatctttcttttggtttctttgcaattgccttttggtggtaataggacagggttatttgtttattcgtttgtcgttgaatggagtccagttgtactagttatcatcactccgcatggggatacatccttccatatgatgaccgttaattc

SEQ ID NO: 77900 - DNA, 360 bp, Zea mays
  Clone ID: MRT4577_171068C.1
gacaaaaggaaaattttgcggaagttaataacattaaaaatttggacaagccatggcccaaataaaccatttcccaaaaaaaaacctgaaccccttaaaacaccaagacaacctttttgtggacctaccctaaaatggaacaactgttacaagaaggggcgctccaaaaaataacaggttataaataaaaagccctctttgatacaaatattcgcgagaatgaagtgtggaattactgcacataaaccgcttttggatccaaaaataggttattttattttttaaaaaaaaaactgtttttccgtttctacacatgaggagtccaagaacacttggattgcaattttacggcaacaccta

SEQ ID NO: 77901 - DNA, 731 bp, Zea mays
  unsure (1)..(731): unsure at all n locations
  Clone ID: MRT4577_171069C.1
gcccataggctttagcttttcgaccgtgttaaagtcttctgcccccgcagtttcggagttgtcgcctatgggtgaaaaacaagaagatggaaaatccaagcnctctgtggatctcccgaaaacaacatttgagctgagagcgaattctgtacagcgggagctagagctccaaaaattatggggcgataatcaggttttgaaaagggtttttgaggaacactgggtgatcttcacatgggccatgcgctcaataaaatcctcaaggattttataaatcgctacaagctgcttcagaatcataaagtgtcctttgttcctggttgggattgccacggccttttaatagaactaaaaggtggcttgtgcgaacaaggcgtggcaatcgatgagcagtggcaaacccaaaaatcttcaaaagcctaggcaaaagtagtaactaaagatacatccccttgtccagtttttttgcttttacttcgactatatgtcattgtgccccaaaaaacttgtttcatcgacttatgatgagtcttctcaattgtttcttgaatatgcttttttagaaccaaattgaattttacaaggtgcaatattgattagaaaaaggtgtgatgctgactgggaaagcgctactcccttgtatgaattagctggtcgatgattttgtttcccccccttttttaaaaaaaaaaaaaaaaaaaaaaaaaaaaaaaaaaaaaaaaaactaaaaa

SEQ ID NO: 77902 - DNA, 399 bp, Zea mays
  unsure (1)..(399): unsure at all n locations
  Clone ID: MRT4577_17106C.1
agccttcgggttggtacttttagcaaagcattggccatttttcgaccgccgaattccaaacagcccgacgagctaacagagcggcaggcacctcctccaggaacatggcccgcacgcagcanttggcagtagtggcgacagccgtggtggccttggtgctgctggcggcggcgacatcggaggcggccatcagctgcgggcaggtggcgtcggtatcgcgccctgatatcctacgcgcgcggcagggctacggccctcgcggtgctgagcgggtaggagctaaaacgcgccgaccacgcgccgcgtgcgctgaatgctaaaacgcgcgcgggtagggctaacccgtacgcgcagatcctcaagggggtagatcctaacatagactcacgatgtcaggga

SEQ ID NO: 77903 - DNA, 159 bp, Zea mays
  Clone ID: MRT4577_171070C.1
actcatgcacaccgctagagatagatgtgaacgagactaagcttgacagcgggataagtcttagcttgcttttgctacccaaaaggttgttgaggttgatgcacttgctaaggcattggctggtcaaaaggatgaggcttacttacgacagcaaatgct

SEQ ID NO: 77904 - DNA, 388 bp, Zea mays
  Clone ID: MRT4577_171071C.1
ttcgccacccacccacccactcgcttcagccgccttctcctcgcgtaccaagcaggtggagacaggatgccggctggccactgcctgcgctcgcggacgctcgacctcttcgcgcgccccttacgcaagaagggctacattccgttaaccacctaccttcgtacctacaagatcggcgatttcgtcgatgtcaaggtgaacggcgccatccacatggggatgccgcacaagttctaccacgggcgctccggtcgcgtttgtaacgtcagcaagcgcgcgacttgcgttcatgtcatcatgcttgtaaatggtctcatattctgtaagtttttcatgttattttcggagtatttttttgcattttcttattatgtattaaataattctt

SEQ ID NO: 77905 - DNA, 272 bp, Zea mays
  unsure (1)..(272): unsure at all n locations
  Clone ID: MRT4577_171072C.1
gcgggcancgngcagggnggcaacnttctaccaggacacanagatganctggggngattgncgcggcaaggtagttgacggcgggngcgggctggacctgacgctggaccgcacgtccggctccgggttccagtccaagagngngtannngntcggcnagancgncatgcagatcaagctggtgccaggcaactccgcgggcanggtcannanctgctacctgtcgtcccngtgngncgcgcangncgagatcgncttcgagttcctgggga

SEQ ID NO: 77906 - DNA, 260 bp, Zea mays
  Clone ID: MRT4577_171073C.1
ctctttcgtttgggcacgcgtacgaccacacatgggcggacgcgagatgacacgcgatggagcaagctctcgaccacacgtggggaagaatgaatacgggagatcagcaagagctcaggtggctatcagtgcctcagaagatacatcttgagaccgcacatgatgtagtacataaaaatgaacatacatatatgggtgtgtggaggcgacaaaattgtatccacactgtcagagaatgaattaagagggtcgaaccacat

SEQ ID NO: 77907 - DNA, 391 bp, Zea mays
  Clone ID: MRT4577_171074C.1
acccgatcgacaccatgagggcgttgctcgacgccctcggtctcctggctctcgctgcgagcgccgcctccacggcatacaagcgggggctgctgctgccagccaccgccgacggttcatataccgtcgtaggtgcatctgtcacctccggtacacctgcacacctgcggtgcatcttgcaccgacggtccaactgccgacgcctgcacgactgacaacgccggtgcatgtgccgtcgcacggatcatctgccgtcgtcaccatgccactaccatacttaacacggccggcctcagtctgatacccagccacacacatgctcatgccaacagacgtataccaacccgtgccagctgcacggaacctgcagtgtcagcagcaccccgatcct

SEQ ID NO: 77908 - DNA, 221 bp, Zea mays
  Clone ID: MRT4577_171075C.1
aattctcgcacgcggtcacgtcacactaggacattcggctgcgacgtgccatatcctcaactctcttgaataaagccgccgatgggcacatgctatcttaagaaccatttcttaccaaccatacaggaccctggacccagtggtaacctaaattgcacacctatgctaaagcttaagcggcattgactcaataatctacctcataacgcccaatttttgat

SEQ ID NO: 77909 - DNA, 180 bp, Zea mays
  Clone ID: MRT4577_171076C.1
acggtgatatattctatttactggtactatatataacgatggtccttcctaaagggatcttttggctatgcatcttatcagtacaatagtggtcgtggtggctacaatagttagatagttacggggtattttaggcattcttagatattggaaatagtatgtaatttataaataaacatc

SEQ ID NO: 77910 - DNA, 737 bp, Zea mays
  Clone ID: MRT4577_171077C.1
atgggggcccaggcccacgcgtcatgcaaccggcgcgccgaatgcttcgtgcatgcaactgcaccgccacttgcgccactaccgcgcctcctcgactgcggaaccaataccgcgactcgaggcgacccagcgcgcgacccagcagcgccagcctggcgcgacggtcaatgcggccaaaaatgggccggcagtaatggcgatggcaggagcagcggccccgtcgtcagccaagctcacgtcccatccgggggcagcaagagaaccctctctcacggcgtgaagacaacgcgcccgtgctccgtccctcgaacggctcgcgcacgcgcaacggccgccccgccaaccactcgccccgtcgcattaactccatggcgggacaggcggcacctctggcaggagaagcgggcgacgcttcgccctcgccataatgaccgcgtcaaaaaagggaccgggaaaggggggataccccgaaaaggacccttctccgtgaaggaaccaggctccgagcctccctactgatcagaggttcaaaggctggcccctcggaggggttcaacagccgccttagagcacgtgggctccacacccactactggtcagaggttcgaaggccggcccctcggaagggttcaacggctgcctcaggccacttgggctccgcgcccactactgatcaggggttcgtaggctggccctcgaagggttcacagtcgccccagacacagagcgagggatga

SEQ ID NO: 77911 - DNA, 640 bp, Zea mays
  Clone ID: MRT4577_171078C.1
atgccgcgactcgaggcgacccagcgcgcgacccggcagtgccagcctgacgcggcggccaacgcggccaaaagtgggtcggcagtaatgacggtggcaggcgcgcgggagcagcggtcacgtcgtcagccaagctcacgtcccatccgggggcagcaaaagaaccccccctctcacggcgtgaagacaacgcgcccgtggtccgttcctcgaacggctcgcgcacgcgcaacggctgccccgccaactactcgccccgtcgcattaactccgcggctggacaggcggcgcttctggcaggagcagcgggcgacgcttcgccttcgccgaaacaaccgcgccaaaaaagggaccgggaaagggggataccccgaaagggatccttccccgtgatggaaccaggctccgagcctccctactgatcagaggttcgaaggctggccccccggaagggttcgacagccgcctcagatcgcgtgggccctacacccactactggtcagaggttcgaaggccggcccctcggaagggttccacggccgcctcaggctactcgggctccgtgcccattactgatcaggggttcgaaggctggcccccgaagggttcacagccgcctcagacgccgagcgagggatga

SEQ ID NO: 77912 - DNA, 1821 bp, Zea mays
  Clone ID: MRT4577_171079C.1
ccaggactttaggagccaaaccaccgcgcgcggcgcgcataactgcccagcggttacaaacactcctccactttcgcccagaccagcgggtgaaagggcggactgccatgcaggcggcatgcaaccgtaccaagggggcacaccctttcgactccgacacatccagcgtggaggcccaggcccacacgtcatgtaaccggcacgccggttactacgtgcgggaaactgcaccgccacttgcgccaataccgcgccttctcgactgtggaaccagtgccgcgactcgaggcgaccctgcgcatggcccaacagtgccaaccgagcacattgatcacgggtcagtcagccgcgggagaaggcgcgacggccaatatggccaaaagtgggccggcagtaatggcggcgacaggcgggcggaagcagcggtcaagtcgtctgcaggctcacgtcccctcctgggacagcgagagagccctcacccatggagtgaagacgacgcgcccgtgttccgttcctcgaacggctcgcgcacgcacaacggctgccccgcgaaccacacgtcccgtcgcattaaccttgcggcagggcaggcgacacctttggcaggcgaagcaggcgacgcttcacctccgccataatgaccgcgtcaaaaaggtacgccacgaccttcaaattcatatccctttttctcttcccctttctctctcttgctacagggaccgggaaaggggatactccgaaagggatccctctccacgaaggaaacgggccccgagcccccctactgatcagaggttcgaaggctggcccctcggaagggttcgacagccgccttagagcactcaggctccgcgcccactactggtcagaggttcgaaggctggcccctcggaagggttcgacagccgcctcaggccactcgggctccgcgcccactactggtcaaaggtacattttggagcgcgcctctgggccactagccgacccttatcgaacggggcacgggcgtccactcggatcacccgttagcaactcactggagacaccatgttcggcgccctccgagggcaacatggcgctttccccccctcctccttgcggaaaggtgacgcaggggcgtatgaaaaaagccgagtctgtccttgaccgtcctcttgctctgtgtggaggctcgggggctgctctcgcaaacccggctccggccaaaccgttgacagcgtcaacataccagcccgagaacttgggacccgaccgtacacccgggctacggccagctcgcatgagggaacaaccagaccagccgaagcattacgcgaggcattaagacctcggaggagtcaaaccactcctctgaggcctcgggggctacacccggcgggtgcgctcgcgcgcacccaccagaacaaaacgcaaccgagaaaggctggtccccttgcaaaaaagtgcgacaaaagcctccaagcgagtattaacactcccttcgaggctcgggggctactgtcggggaccataattagggggtaccctcaaggctcctaaatctcagctggtaacccccatcagcacaaagctgcaaaggcctgatgggtgcgctaagtcaaggatcggtccattcgagggacgcgatcacgcctcacccgagaccagcctcgggcaagggcagccgaccccggaggatctacgtctcgcccgaggctcccctccagcaacggacacaccttcggctcgcccgaggcccagtcttcaccaagaagcaaccttggtcaaatcgccacgccaaccgaccaaatcgcaggggcatttaatgcaaggatcgcctga

SEQ ID NO: 77913 - DNA, 678 bp, Zea mays
  Clone ID: MRT4577_17107C.1
cccacgcgtccgtgtaccaaagcatgtggacatacacaaggaaggaaggttaattctgcacgagggagaaagcaattatgcgcataaaagctgctgttgatgccaggaatgagagtggctctgatattgttattgtggcaaggacagattctcgtcaagctttgtctcttaatgaagcattatggagagtgcgggcctttgctgatgctggagcagatgttctattcattgatgcccttgcctcaagggaagaaatgaaggcattttgcgccatcgcacctggagttccaaaaatggccaacatgttagaaggtggtggtaaaactcctattactgagccctgttgaactggaagaaataggttataaaatcatagcctatccattatctctaattggtgtatcgatgcgtgcaatggaggtttgtttttcatttatatatgtgaatagaatgtttttcatttatatatgcaaacaatatgattgtttttcatttatacatgtcagtatttcattgcacgactaactgcatctcagtggatcatgcacattgtttgccattagcatttgggcaaaaggaggaatcaacatttgtgtatgcatgccatacgaaacttgtggtatagaagcaagaatgagcccttgtgtagttgttaaatttgctgtgcacatatttgct

SEQ ID NO: 77914 - DNA, 1567 bp, Zea mays
  Clone ID: MRT4577_171080C.1
ctcgaggccggccgggaatgagaggagagggagggaggccgcgcgcctggctcgtcctcccccttgcttccttccgtcgtttataagcgacggcaacacaggcgaagaagacggggggagaaaggggcgcacgaggcaatttatagggaggaagaggaggggccgggcctgagcagagcaggccggaccagccatctctcctctgaggcgtcgaggggaggcggcgcccgagatgggggactccggcggctccgtcgtgtcggtcgacgttgagcgcatctcctttggcggcaaggaacaccatatacaaacgaatcatggacctgtatctgttgcagtgtatggtgaccatgacaagcctgcccttgttacttatcccgatattgctttaaactatatgtcctgcttccaaggactattgttctgtcccgaagccgcttcgctgctgcttcataatttttgcatttaccatattagccccccaggacatgagttaggagctgctccaatttcaccaaatgctcctataccgtctgttgacgatttggcagatcaggttgtggatgtcctcgatttctttggattaggctctgttatgtgctttggtgtcactgcaggtgcctacattctaactctgttcgcggcaaagtatagggagcgggtactaggtctcatccttgtttcacctctgtgtaaaggccccacttggactgagtggttatacagtaaggtaacatccaatctgctgtattactatggcatgtgtgggttagtgaaggagtgcctacttcagcggtacttcagcaaggaagtgcgaggattctctgaagtacccgaatcagacatagtgcaggcttgtaaaagcctgctagaccagcggcagagcatgaacgtgtggcgcttcgtacagacaatgaacgagagatacgacttgtctgagcatataaagcggctgcagtgcagaaccctgatttttgtgggcgacaattcccagttccacacggaggccgttcacttgacgtcgaagctcgacaggagatactgcgctctagttgaggtgcaagcgtgcggttcactggtaaccgaggagcagccgcacgcgatgcttataccaatggagtacttcctgatgggatacggcctgtacaggccgcctagccaggtggtggagtgcagcccgcgcagccccctgagcccgttctgcatttcgccggacctcctgtcacctgagagcatgggggtgaagctgaagccgatcagaacgcgagtcaggcttgaggtgtagcagagggctaggctaacttttgcaggtctgtgtttagtttttggaggtatagttatactgccatgtatatataaatatataggaaacgctgttctttgatttgtagcctgaaagaaaataatagcagaagtttgggtgtacagtctctctattatgccattatacccgctggtttggttgggtggcaggattagatgtggttcccaaagaaaaaaaaaaaaaaagaagcggccagatggaccagctgtagtatttgttcggtttgttgtttggtgtcgattt

SEQ ID NO: 77915 - DNA, 1525 bp, Zea mays
  Clone ID: MRT4577_171081C.1
tcagccctccggcaggtccccacttagatcctcccggacgagtggagcaccgacctccgcgcggaggcgccgtaccggtgcaaaggcaggaccgccccagaacacgaacgccgccctagcagcgtgcgacgtcttgggcggtcctcctgtgcgcgcggcgcgacaaccgcccttgcggcaggagggggcaccgggagccaagccggcgagcccaacgcgctgaagctgacgacgcccgtcgtcggccagccccgcgttatcgaagtccgccccgctcgcagggccagtgagcgccctctcccttgaatgctgaaggagaggctgacccacgaacctgcgcgggaggtagagctctggctcagcccggcccccgccccatcgaggatgatgaacatccttgaagctcagggcgggaccaagatcgcagcccggcttgcttctccccatccaggggctggtggtcaccgtcttgggtgaccatcggcgagggggtgcggccgggctgtatgatgaaaatccttgaagccgaacgatggctgaaaggtaccaactcccacggagttgcgttcctccaacgacaaggcggaaggactgcaggtgtcccccatccgggggcttggaaggtggaaagacacgatgcataagggagcacgaagacatggtcgccttccaagggggtcaccctccttttaaaggcgactctccctacttgcgtccccagccgtcgcgggctgagtcttctccaacacgctccaaggtcctcccctgcggcgcgggggctaggtcccacacgtcatgcaagccggctcagagcagaagaagccaaaccgccgtgcgcggtgcgtacaaccgcccagcggttacaagcgactctccacttttgcccagaccagcgggcgaaaggggcgggcagccatgcaggcggcatgcaaccgcgccaagtgggcgcacttctccgactcccaacacgcccagcatggagtcccaggcccacacatcatgcaaccggcgcgccgaatgcttcgtgcatgcaaccgcaccgccacttgcgccactaccgcgcctcctcgactgcggaaccgataccgcgactcgaggcgacccagagcacgacccagcggtgccagcctggcgcgacggtcaatgcggccaaaaatgggccggcagtaatggcggtggcaggcgggcaggagcagcggtcacgtcgccagccaagcctacgtcccattcggggggatcgagaaagggggataccccgaaaaggatccttcctcgtgaaggaaccaggctccgagcctccctactgatcagaggttcgaaggctggcccctcggaagggtttgacagccgcctcagatcacgtgggccctacacccactactggtcagaggttcgaaggccggcccctcggaagggttcaacgaccgcctcaggctactcgggctccgtgcccactactgatcaggggttcgaaggctggcccccgaagggttcacagccgcctcagacacagagcgagggatga

SEQ ID NO: 77916 - DNA, 132 bp, Zea mays
  Clone ID: MRT4577_171082C.1
gacttgattatccttcaatgaccaattcattttccttcgcatggagaatccttctgggggcgcaactgtttctgtcaagggacaactataacgactacctcaatgatgaatggaccttccttgaaacgtaaa

SEQ ID NO: 77917 - DNA, 1368 bp, Zea mays
  unsure (1)..(1368): unsure at all n locations
  Clone ID: MRT4577_171083C.1
ngaaccgtctgttgacgatttggcagaacaggttgcggatgtcctcgatttctttggattaggctctgttatgtgcttcggtgtcactgcaggtgcctacattctaactctgttcgcggcaaagtatagggagcgggtactaggtcttatccttgtttcacctctgtgtaaaggccccacttggactgagtggttatacagtaaggtaacatccaatctgctgtattactatggcatgtgtgggttagtgaaggagtgcctacttcagcggtacttcagcaaggtagataaaagcgcctgtttggatcatggttcaattattataatcgggattatggatttaggttggtttttaagtgaggaatccctattttatcctgtatagtttagcaagttggataattaattaggggcaatttggactttgagcatctataatcccttttaacctggtttcacctggatcactatgatcacataatctggttatcataattggaggggtatccaaacgtgggctaagttgtttcgattttacccaactcggatttctttgttttttcaacccaactcggatttctttggtttttcttacttaaatcttacttcagttaggaagtgcgaggattctctgactacccgaatcagacatagtgcaggcttgtaaaagcgtaagtaccacagagcttacacttcattagttgttctgtttctttctttttttttaaaaaatgttgttaagcgttaacctcttctgtgacatgtgttgtagctgctagagcagcggcagagcatgaacgtgtggcgcttcgtacagacaatgaacgagagatacgacttgtctgagcatataaagcggctgcagtgcagaaccctgatttttgtgggcgacaattcccagttccacacggaggccgttcacttgacgtcgaagctggacaggagatactgcgctctagttgaggtgcaagcgtgcggttcactggtaaccgaggagcagccgcacgcgatgcttataccgatggagtacttcctgatgggatacggcctgtacaggccgcctagccaggtggtggagtgcagcccgcgcagccccctgagcccgttctgcatttcgccggacctcctgtcacctgagagcatgggggtgaagctgaagccgatcagaacgcgagtcaggcttgaggtgtagcagagggttaggctaacttttgcaggtctgtgtttagtttttggaggtatagttatactgccatgtatatatatatatatatatataaatatataggaaacgctgttctttgatttgtagcctgtgtaaattggtgataaaagcgaaagaaaataatagcagaagtttgggtgtac

SEQ ID NO: 77918 - DNA, 963 bp, Zea mays
  Clone ID: MRT4577_171084C.1
atggctgaaaggtaccaactcccacggagttgcgttcctccaacgacgaggcggaaagacggcgaatatcccccatccgggggcttggaaggtggaaagacacgatgcataagggagcgcgaagacatggtcgccttccaagggggtcaccctccttttaaaggcggctctccctacttgcgtccccagccgtcatgggctgagtcttctccaacacactccaaggtcctcccctacggcacgggggctgggtcccacacgtcatgcaagccggctcagagcagaagaagccaaaccgccgcgcgcggtgcgtacaaccgcccagcggttacaagcgactctccacttttgcccagaccaacgggcgaaaggggcgggcggccatgcaggcggcatgcaaccgcgccaagtgggcgcacttctccgactcccaacacgcccagcatggaggcccaggcccacgcgtcatgcaaccggcgcgccgaatgcttcgtgcatgcaacagcaccgccacttgcgccactaccgcgcctcctcgactgcggaaccaataccgcgactcgaggcgacccagcgcacgacccagcagcgccagcctggcgcggcggcggcgcctctggcaggagaagcaggcgacgcttcgccttcgctataataaccgcgccaaaaaagggaccgggaaagggggataccccgaaaaggatccttccctgtgaaggaaccaggctccgagccaccctactgatcagaggttcgaaggctggccccccggaagggttcgacagccgcctcagatcgcgtgggccctacacccactactggtcagaggttcgaaggtcggcccctcggaagggttccacggccgcctcaggctactcgggctccgcgcccattactgatcaggggttcgaaggctggcccccgaagggttcacagtcgcctcagacgccgagcgagggatga

SEQ ID NO: 77919 - DNA, 200 bp, Zea mays
  unsure (1)..(200): unsure at all n locations
  Clone ID: MRT4577_171085C.1
ggccggggtgaccttccaaggcattanttagctgacatatagaaagcaaggaagcggatgccgtgccagctgctgcacgcataaatcttgaatgtgctggttgagagttttttagttgctctgcaggattagacaatgttctaagactaccatgttttaagtctgctgatgctatattcatgaacgattttgcagctagc

SEQ ID NO: 77920 - DNA, 874 bp, Zea mays
  Clone ID: MRT4577_171086C.1
ctacaagacaatctgatcctgcaggctcgggtcttcacgctggaagggagctgtagcaccctcggcatcgacgataccttcagcgaggcccgacctagcctcggacggcgacgcggtccgaggatctccgctccgaaggacgacgtcatcaccacgcccgggcaatcgctgccagggacttctccgggaatccggcccgagcaggcggctcggccggttgcccctgaggcctcggctgatcaactccggcatcggtcccgctgacggacaacccggatgttcaggcctcgacagccaagatgaacaaaaaaccctggcattcaaagtgccattacaaacggaactccggttccccctccgcaggtacgaacaaaccccactccatgggggaaggcctgcggagcaacggaagaccgacgaacggcgcgccgtcacctgctccagcagcggcgacgacgacgacttctgccccggggggccgaacaacggcagcactgacctcagggcggatgctgctgccaggaggccgccgcccatgcccaaacttgtgaggcaaggacgggcagaaggccgtagagttggaggcggcgcctctggcaggagaagcgggcgacgcttcgccttcgccataatgaccgcgccaaaaaagggaccgggaaagggggataccccgaaaaggatccttccccgtgaaggaaccaggctccgagcctccctactgatcagaggttcgaaggctggccccccgaggggttcaacagccgcctcagatcgcgtgggccctacacccactactggtcagaggttcgaaggccggccccccgaagggttccacggccgcctcaggctactcgggctccgcgcccattactga

SEQ ID NO: 77921 - DNA, 438 bp, Zea mays
  Clone ID: MRT4577_171087C.1
gaattgaagatgctatctaccagttagaagctgggtgcgcatgtacttagagccacttaaccttagcatatgcttaattaaacaaaactgatgctcaaaactgaaagcagcacgaggatattatcatattacatgtcgacttgttgtcacaacagctaaggatcgatgcctttctacttcctgtgctggtgaaaaggggaggaaacaccttcatggacagagttacacttttataagatgcggatacaaagaatagtgagaatccggtcttcccccacagcgtttttaagtaactgtttgcaagagggaactctgcctctccatcgaataatgtatgtccatgctgatgcacccacccaagggacgaccatcatctggcgatacactcaaactgatgaaggatgaaagctaggaccaggctgacaatagcaaggatca

SEQ ID NO: 77922 - DNA, 1480 bp, Zea mays
  Clone ID: MRT4577_171088C.1
ctacaagataatccgatcctgcaggctcggatcttgacggctgaagggagcagcagcaccctcggcgtcgactacaccttcggcgaggtccgacctagcctccgacggtgacgtggtccgaggatctccactctgaaggacgacgtcatcaccacgcccgggccatcgccgccatggtcttctccgagaatccggcccaagcaggcggctcggcttgtcaccccgaggcctcggccagctgtcccccgaagacatcagcccggcccgaggcctcggcagatcaactccggcgtcggtcccgctaacggacaacccggccaggctctggccgaccaagtcttcttttcgagccaactctgcctctgtccgtgctgacaccgctacccctggcttcggctcatcgaagagcggccgaggggttcctttaacggcactcaaggtgccattacagacggaactccggttccacctccgcaggtacgaacaaccccactcgatggggagggccggtgcaaaggcaggaccgccccagaacacgaacgccgccctagcagcgcgtgacatcttgggcggtcctcccgtgcgcacggcgcgacaaccgccttcgcggtaggagggggcaccgggagccaagccggcgagcccaacacgctgaggctgacgacgcccgtcgtcgaccagccccgcgttgtcgaagtccgcccctctcgcagggccagtgagcgccctctccctcgaacgttgaaggagaggctgacccacgaacccgcgcggaaggtagagctccggctcaacccggcctccaccccagcgaggatgatgaacatccttgaagctgagggtgggacaaagatcgcagcccggcttgcttctccccacccagggactggtggtcaccgtctcgggtgaccaccgacgaggggatgcagccgggctgactaatgaaaatccttgaagccgaacgatggctgaaaggtaccaactcccacggagttgcgttcctccaacgacaaggcggaaggactgcgggcatcccccatccgggggctcggaaggtggaaagacacgatgcataagggagcgcgaagacatggtcgcctttcaagggggtcaccctccttttaaaggcgactctccctacttgcgtccccagccgtcgtgggctgagtcttctccaacacgctccaagggaccaggaaagggggataccccaaaaaggatccttctccgtgaaggaaccaggctccgagcctccctactgatcagaggttcgaaggctggccccacggaggggttcaacagccgcctcagagcgcgtgggctccacacccactactggtcagaggttcgaaggccggcccctcggaagggttcaacgaccgcctcaggctactcgggctccgcgcccactactgatcaggggttcgaaggctggccctcgaagggttcacagccgcctcagacacagagcgagggatga

SEQ ID NO: 77923 - DNA, 455 bp, Zea mays
  Clone ID: MRT4577_171089C.1
agcgcgacacgtgctcctcttactggcgccctgttacctgcgattatggcgtctgcacccactagatcatcgagagggcgcaccaggggcgacatggactacatgaggcacgcgcatgactctgttcaccgactttgaagagcgctcttgtacgaatgcttgacatcatgatgaagaatgcacaagacaaaccccaacacgagaagaagaggaagaagcggccgccgctcaatgaatcgtatgacatacggtgatgtggacactacttcataggaccgagcactcctatcctattgtgctaatgatcatcatagtaagacgaaacatgactgctgggaatgaatatttggttctgctattattcgtgtgatcatctactgatgacggatgaccttggtgctgttgatctgcggaccttctgagctgtgaacagacaagcatgacatgatgtctca

SEQ ID NO: 77924 - DNA, 633 bp, Zea mays
  Clone ID: MRT4577_17108C.1
cgtcattattaaaaaaaaaaaaaaaagggggaaaggaaaaaaaaaaaaaaaaaaaaaaaaaaaaaaaaaaaaaaaaaaaataaaaaaaaaaaaaaaggggcgggccgttttgggggttccaggtttccttcgcgggggcttccccacgtgtgggttcttttttagggcccccttatttcattcccgggggggtttttttccaccgtcgttgactgggaaacccctggggttccccaccttattcgccttggggcccttccccttttcccccgctggtttattggggaaggggccccccctgttcccccttcccaacatttgcccagcctgattggcgattggccccccccttgtggcggccctttaaccgcggggggtgtggtgttttcccccagtttttccgttccctttgccagggcctttccccccgctctttccgtttttttcctttcctttttggccccgtttttccggttttcccctgaatttttttattggggggttccttttagggtcccgttttggtgttttccgggccctctcccccagaatccttgtttagggtgtgggttcacgtagggggccatcgccttgttggacggtttttcaccttttgacgtcgcctcccctttt

SEQ ID NO: 77925 - DNA, 523 bp, Zea mays
  unsure (1)..(523): unsure at all n locations
  Clone ID: MRT4577_171090C.1
tctccgcgccaccccgtacctgacaaatcctttgttgcgaccgcaaattcggcatgtgcgactacggaaacccttcaccctgaacctgccggagatgatcgcgtcgcagccgcgccgggttcggcccctcgccgccgtctccctggtgttattcctcctcctcctgtncagccgctccgatgggggctcaccgcgcgccgcgcggctcttaggctccggattctaccctgtgcaccgcaggttcctctccgatgccgnccctgccggccccgcatccagcgccgcgaacccttcggcttcggggaccgttccgttcaatggcgagcagccggaggacccttccgtggcgtgcgcgggcatcgcgctgcacgaggggttcgggacgccgtgcgagttcctccgggcccacccgcagtgctgctccgctgggttcgtcgactacctaggcttcttctactgtcgatgcgagaggttcagggtgctgggcttcgcggcgctcggggtctgcctggccgcgctgttc

SEQ ID NO: 77926 - DNA, 506 bp, Zea mays
  unsure (1)..(506): unsure at all n locations
  Clone ID: MRT4577_171091C.1
accgcccgaaacgagagacaccgccggcaaccgatagaccccgaaagcgcgaggggggcacgccgcacggcgcagccgaagccggagacggcggcaggggacgccgcggagaagcgtcacacggagaaggccgaaccgaggagacacccggcgacgagcacagcggcgaggaaggcnacgcagagcaagacagaggccgagagcagaggccagggaaccaagacgaagcaagaccgcaaggagaccagcaggagacaggaaaggacacacacaagccgaggaaccgagggaggaccataattttgtttgcccccccgcccccgagaagagcaatgggagaaacaggagggngaaattcaaagaagaaaagagaaacggggcagggaaaaaggagaacgggaacatagatgggattaaacagatgaacgaggtggctacagacaaggtaaaggagccagaggtacccagagcggaagagggacacccaaaccagccagcaagggcgc

SEQ ID NO: 77927 - DNA, 393 bp, Zea mays
  Clone ID: MRT4577_171092C.1
ctaccaaaattttttatctatgacggcaaataccaaatcaggggcttctttaacaaaacagaggactacaacaaaccaatttcaatcatatcaccaataaccacaaacctttatcacaccattttacataacaaacccaaaaactccaatataatacaatcactatagccacaaatacaattttcaacaaaaccacctttaactttttcattaaaaacaaaaatactatcacctccgaaaatttaatcaaaaaccccacatatcctttatttccctaaagctcacaaaacacccatttctaaaaaccccttctcactttcataaataataactctaccaattttttcattatacccaattttaaaaaaataccatcccttcacaaattttctt

SEQ ID NO: 77928 - DNA, 596 bp, Zea mays
  Clone ID: MRT4577_171093C.1
gccggccgggttggacacctcaacacagaatccttctagctttcaatgtgcacgggcggtgcaccggacacacccagcgacgaccacatgcgttactaccctgaggcggactactgctcgcacgaggagaggcctggtgtccccgcgccggcttcggccgtcacggcggccgcatccacatgcaccgcatcgaggagaacgtctaggagatcgatatcggtacgcacgctgaccgcgccaaccaatcatccgccaccatgtccaacacgacggccacggatccgagcggcgagagacccggggactacaggagatcaacagctgcacctgtcgaggcacaccgagagacatgcagagcgttcctcgccaggtgtaactgatccactcgcggcgggcggatagtctacgcccgctcgtgtctgcctgcgcgccttatgtgtgcctgagattgtgcaaggtcatcgaacttgtgtagcgcacggacgtgcacgcaatcatctcctgtacgaattacgactatcagctcgagacctgaatgaagcttcttcagaatactaagacctgctgaaaaagaacaagagaaggtcccgtaggtt

SEQ ID NO: 77929 - DNA, 1260 bp, Zea mays
  Clone ID: MRT4577_171094C.1
tcgccccgcgtccgccgcatagagaacgcacataaatatctcacatggagagcagagaagatcctgggtacccgctgctaaagaagttgatcggtgagagtggtgccaaggccctggtgagggagttcctcttcgaaggagttggctcgctcggaaccaagtcgtttctggagtatttcgccgagtacgcgcaagaggacgggacggtgaacaagaagcggagcatggcggggaagtcctttggaaccctccccttgctctccactgaaatgagcggcggcggcggccttgggtccggctgctcgtaccagaagttcgtccacttcgcgctggagcagacccgccaccgctccactctcgtcccccacccgtcccaggaaaagttcaggttcataaaagcaaatgaggataacaccgttctcaatgccttgtcattcagcacttccaaaattagactgcttcggagcttgacaattgagcaaaaaaactcggttcaggttcttgattttgctgcgcttctcaagacctgaatacgaccttcctatattttgtgccaatgccttctcatcccctgcacggagtattgttgtcttggacctcaaccctttgtatgataccactgaacacaaggattacagggaaaaatactacagggctttgatgccccttgtacacaagtacagtgagctccatgtctttaatagatgaaatgcagcttctgccctggggtggcaagattacaagtgagtcgctgagattcttctctcccattgttatctggacggtattcgagccaagcgaagccaaccaccaagctctatactcggccttcgtggattactatatggtctggcttgagttcctggacggagcagttcgcgaaagtagcaaagcaaaaatcgaccgcaatagagaagcgcaacataaatatctcacatggagagcccttgggacgcccacggactgttcgtcggcgacgctgtggatggatagcggccaagcgggggctgttttgcttctacataagcagtttcatctcaatccccgttgtttattcacggaggacttgggtagtggtttcagttgttgtttcaagtggttttgcttgggcaaaagtactggacggttttgctggctcaggtttcagatcatcttcaacctttcccccatggcattccatgggaggccggctacaatttctgttgtctctttacttcttttatagcattgttcatcaaaaaaaaaaaaaaaaaagcgtat

SEQ ID NO: 77930 - DNA, 578 bp, Zea mays
  Clone ID: MRT4577_171095C.1
gggtacctcgaggccggccgggacattagagcaagacggcagcaatggaaagcctctacttcaagctgtccttgcggctccgcgttctcattccatgtgttctccttgttacttcgatcgttgcagaggagttgacaaggaccgccggcgatgatgagctccgcacgttcatcgtctacgtgcagccgccggagaagcacgtgttcgccacgccagacgaccggacgtcgtggtacaggtcgttccttccggacgacggccggcttctccacgcctaccaccacgtcgccaacggctttgccgcccggctgacgcagcgcgagctcgacgaggtgtccgtgatgccaggcttcctcgcggcagcctaacgtggcttatgagctgctgacgacgcacacgcctcggttcctcgggctggacgtggcgccacaggagggcgcgagcgccacaaaccacagtgctacaggattcggggacggcgtcatcatctgcgtgatcgacaccggtgtcttcccctaccacccatcgtacagcggcgacggcatgccgccgccgtcggcaaagtgaaaagggggctg

SEQ ID NO: 77931 - DNA, 254 bp, Zea mays
  Clone ID: MRT4577_171096C.1
tgtgcagccttgactaccatatcgcattcatctttaatccgctgatgcattaacctgggatgggcttgattatctagctcttctgcaatatccacagcattatctatgtttatccaatccgctgctacatactcacaaacatgtacttcttaaacctacccagataacacactacctggaaaaactcctatcaaattatacatgtactgatgattctgtaccgattacacaatatcctcacactcactattcta

SEQ ID NO: 77932 - DNA, 586 bp, Zea mays
  Clone ID: MRT4577_171097C.1
gtatgagctaaccctaccgcgtgccgtcacacctgccgttgctaccgccccgcacctcgcttgctttcccgtcacatgaatgacaaaaagcaccacgaccgtggaactgctggaaaatatggccaccaggaatggctctacatcgcggaagcaaatcaagaagatggcaggtatctgcagactccaagaacttctgcgagacttgtgcgaaacctggtgtgatagacgaaaatacgctggaatttgaagatgccaggactgcgcaaacgtcaaggtgtgcttccgcttactgcatgaacactgctatcgcagacctatctggcaggatcatcgattctccgattgacagagcacacgtgacactcactgatatagcgttgcatacatcacctctctcctatgtgctggtgcaccagaatgtgagctcctctagctggatcgcgacactcattaccagatacatgctaatatttcgacgtgtctaccgttgaccaatttctcgagtgatcatcatccctatgcttgtctgcaatgactcagaatggagtgtggcttctatgctcttgactgtgtcagtgcgctgcca

SEQ ID NO: 77933 - DNA, 288 bp, Zea mays
  Clone ID: MRT4577_171098C.1
aatactcacgcgtgcggccgctcccgcgacatggggggcaacgacgacatggacaggccccgcccacggcacgaagagaagcccgagcacacgacggaagccaaggggcagaagaacgacaccgaccacacggccacagaccacaaagagctcgcggaccagaacacggaggactaccccacaagccagggaacaccaaacacccaagaccccaccaagcaccaacagccagcagcccaggctgggagcaacccgcgggacagccccaaggccaagaaggacaagagc

SEQ ID NO: 77934 - DNA, 335 bp, Zea mays
  Clone ID: MRT4577_171099C.1
aagggtggaacaatgagaccatgtttggtgagcaaggagcctgctgctcccatgagcaaaattacacacagcggcggcggctcctcacgatgctgaggacatggccatggatttcctcttggcggtcttgccggcgaggacattcccgcccctgacgtcgaccttgtagtacctgacgaaccagtcgacgaaatggcggaggccggcctctagcgaggtggcggggcggtagcccaaagtccgccccgcgtggcttacattggcgtgcgtgaaccgcacgttcccggtggctggcattgtgaccacccccctgatcgcctttttgcccaggagct

SEQ ID NO: 77935 - DNA, 316 bp, Zea mays
  Clone ID: MRT4577_17109C.1
cactcggcaagcacagacgtctgaagaagctgtttgacggcaaggatgggaggcccaaggactctcaccggagggagaatctccctccgggcctgggaataggacaccatggacaacctatagggcatgaatcacgacaaggaagggatctgtactgaccagcagctgctcatctttgtgccaagcagctggaggacggacgcacacttgccgactacaacattcagaaggagagcacccttcaccttgttgtacgactcaagggaggcatgcagatattagagaagacccttaatggaaagactatcacccttga

SEQ ID NO: 77936 - DNA, 866 bp, Zea mays
  Clone ID: MRT4577_1710C.1
cgcactacagcgcccgtcccctcctcagcatggccgcggcgtcgttcgcccgcgcctttgtctccacatgctcctcctcttcctcgtggttggctcggcgcgctgcaagacggtgaagagagacggtgcgtgactgctccttcttctcctcccacatcctccgatcccgtccgcgaactcctggcttcttactgcgagtcggcgttttagaagaaagatcgattcttttgttcgcgcggcgcgccattggagatctgaacccaaacttccatccgcagccatgcgttttcttttgcccagcggcgttgaattgggtgcctgttcccttgtagtctcgggctcggctatgcatttctggagccgcgtgataatgttctttcataaactctcgcggaacactgtcggatccattcttcagtatctcaattaagatgaaaattggtttcatatgtggtaattttagttcttatatataatagcatatactttctccagaatttgggtccgacagttcaaagggttgactgctgagactttgtggttgagttgaaactgaactaatattcataaattcatgataactaacatgcactatgtagtgtgtcatttctcagtgctaccaatgagtgttatggttcctgattgattgaggactcgggagagtagctgtgctcgcagatattgctcacagttacttagcaatgtttataaactgttcagcaggtgctcagtgcttaagtgctggaactaaaaccagtcattttttatgcagtgaaagcattgaatgagatcaaatcttcactaggctggagagttgtatactcatgggtcggtgatgatccttgtgggcatggtgatctaccccc

SEQ ID NO: 77937 - DNA, 635 bp, Zea mays
  Clone ID: MRT4577_171100C.1
agtttctcagtgctgcatgcaccgagcgagcgagctaggcagctagctaccgaccagcccagctaattcagactctactagcagagttagtagccaagctgccagagccactaactgatcatcgcgtcgaccagagcatatggctcctaaggcgccggcgaataatggcgctgtcgtcgttgccggcggccatcacgggggcagcaccgacgtcgtcggcgttgccggggacgcgacgacgacgactgtgccgacgtcggtggcggcgaacggcaacggcaagcagcacggcacgaggaagcagaggcggaggcctgcagcggcagtcgtcagcccgatggacaagtactggacgcccgtcgacgacaaggaggcggcggaggccgtcgaggacggcggcgaggacgggcggcgcccgctccagttccggacgtacaaggtcaagggaatcctcctgcacccctataggttgttgaccttgctgagattgattgcaatcatcctattcttcatatggcgtatccggcatcccgatgccgacggaatgtggctctggtggatatccattggtcgagatttctggtttggtgtcacttggttgctaaaccaaggtgcgaagctcaaccctaccaagc

SEQ ID NO: 77938 - DNA, 603 bp, Zea mays
  Clone ID: MRT4577_171101C.1
caatattattttggggtttataaattttttttttttttttttttttttattttatttatagggcccaaaaaccagcccaactcccgcccaaaataaacccccccccccaaaaaaaaaaaaatattttttctcccaaaaaataaaaagcccctatccaacccaaaaaaaaaatcctttccacaaaaaatattatacccagggaaaaaaacctcctcgggcccccccaacaaaaccctgtggggaccctcttgggatcccccaacacaaaccccccgggagacacaccccaacccccaccgggggggggctccataaaggccccccccgccactaaagaaggggccaaaacccccactccccccaaaactcaagctctcccccaaacgccggggacccccccccccaccctatttccgcggttttatcacaacccctaaccctcccccccccatatattgctttaacacctaaggggccccacaaaccctcaaaaatataaaacccaaccgccccaaaaaaaaccaaaattcctaaaacccccccaaacaaaaaaaacacaccccaccgcccttaaaaaaacccctctaagcaaaaaacactctc

SEQ ID NO: 77939 - DNA, 153 bp, Zea mays
  Clone ID: MRT4577_171102C.1
gccgctcgccggactgacaccagagacagactacgttgtgttcctggaggacagcaccacgccggggggggcctaccgaggcgtgagctaccccaaccacgagaccgccgcagcctggggcggaccgaccgtcattcgccacgccgtgtgcct

SEQ ID NO: 77940 - DNA, 144 bp, Zea mays
  unsure (1)..(144): unsure at all n locations
  Clone ID: MRT4577_171103C.1
ggcccttctgggttcttcaccgctggggctgtggagcacattttgttcttcgtcgcgagatcgncggtctcggtgcgtctgcatgggggtgtgtgctggaacatgttggctgtcgttgcgaacatgtctttgtcgtgcgctcct

SEQ ID NO: 77941 - DNA, 116 bp, Zea mays
  Clone ID: MRT4577_171104C.1
gggaatatacgtgtctatgtgagctttttgttctgatctgcactgtcctgccatcagatcgtgcgtgagcccggttagtgctaaagaaacgcaatggtatccgcacctcgcgaacg

SEQ ID NO: 77942 - DNA, 457 bp, Zea mays
  Clone ID: MRT4577_171105C.1
aatagaaatgaaattgcattgttgcaaattatagcaaactgacgacttactacacaggcatgataaaaaaatattaaatggatctagctagcttacaaatgcaaattcaggcatgtcatgataccgaacgccacagctactccattccaccagcttgtagcactgcgtgcggcgggcgatggaaccttggctgccatgccgccgtgcacgctaggaatcggaatgattcctgtctcacctagcgccggcggagtatttgtgaggtttggcgtaggcaccggcctgatcggggacgggaccagcgggccggaaccaacgaacggttcctgctggggtccgggcgcagccaccggcgcctggcccgcaggcgcagccgacggcgcctggccggggggcgctgccatgtgcctcgcccttggcggcgggaacggcttggggaccctgatgcccggcggga

SEQ ID NO: 77943 - DNA, 553 bp, Zea mays
  unsure (1)..(553): unsure at all n locations
  Clone ID: MRT4577_171106C.1
gggggggtcagaaacccccaagcgggtaacggcgtgnaggcgccggntgtgaccgcagacgtaccacgtgacgcacttcacttccaatagggtcacccccaaccacacggaaagcgaggaaccttggaggggaggagcaagacgacccgcttgccccaccgcgccggacggacgtagcgcggttcttaccccaaaccagaaatcaccacaagtatcaggacgtaagcaacaactcttattgtttctacctctaaacccgtcgaaccaattagtcaaggtcctcagtcaacaggaacgtactacaacagttgtcgtactacaccttcagtcaaagtagtcagtttcagtcacgtcacccacaagtctcaactcaaccgtttcaatccaaccttggggttcttcatcataacagcaaaaccagagtcagctaaaaccaacagcttaaccttacaccgttacactaataacggaacccgtttacgaggactaatcctggtccgaacaagtcgttccactctttagttggaaaccctggtcctaacggagttttcgg

SEQ ID NO: 77944 - DNA, 605 bp, Zea mays
  Clone ID: MRT4577_171107C.1
ttgggtacctcgaggccggccgggaccatgtcgctgctgcacatatcaaggctctcgtctcggcttgatatgtcggcactcacctctacacagtgctgaaggggtgatccgacgccgacggctcctcgattcacatgcatctgtacgatatgggtctcacgacaatctgcctgcaccggcctcaagggcatgggacagaaacttgccctcaacatcgcgcgagagaggcgtcgctctctcgcgctacagcagaacaacctcaaaagggggtgagaccgtgcagcatgccaaagcaaaaccaaacctcgcatggtctggattccactaccccgcatccaatttgatgctcactatacacaagactcgcaggccctataatagttcacaaaggctgtatcgtctgcgaaccagacaatagccaagctcgcggtgaagcacggtcggaaatactgaatcgtcaaagcaggctgctaatgaaacaagaacaaccataggcactgcaatgagatggacagaccctggctcctatatacttgcaagggcatctcctaatgaaactagtgctgccgcaatggcccgccctagatcaccggaagctgcttata

SEQ ID NO: 77945 - DNA, 547 bp, Zea mays
  Clone ID: MRT4577_171108C.1
cgactatggaacagtcaagctctgaatgaattgcgatttcatgttgagtttcgtcaactcattactgtaacatgtcattgcgatcttggcgagccggtttgggtctcgctgaattctgatggtttccccccactcgctttgcctgatttatccggtgatccgtgatatgagttgcttagtgctgctcgccgccctgctcctttgtgatctcatcaatgtgcttggagagacggtcaaggtgctgctgctgctcctggagcttcttcttgagctcaatgagcttctccttctcacgctggcggatagcgtaatcctcgctggccttctcacgtcgctggaaagcatcaccagagcctccagtagggcggggagctccagtagcaccctcagtcatgacgcggggagtggtagagaagcatcgaatgggtcggaaggcggctgcctggcggaaagatgtgcgaasatggattgcgaagtagatatggtttcttgttgttacttgctaggaacaaaagatcagttggaattgaggatcgtggtttgtttc

SEQ ID NO: 77946 - DNA, 228 bp, Zea mays
  Clone ID: MRT4577_171109C.1
agggatgacaactttagaagttgatttgttttgggacagaggtggtatatactgctctagtaaccactctagtttaacatgacagaacaacttgcgatgtgcacatgatactcaacaccaagtattatttttttactccttagacatataacacagttggggataactaactattcactgaataagctcattttgagattacaggtgttagggggaacaaatgactct

SEQ ID NO: 77947 - DNA, 212 bp, Zea mays
  unsure (1)..(212): unsure at all n locations
  Clone ID: MRT4577_17110C.1
aaacaagcaaaaagtactcgggttttcataatggcagtggatcagctacataggacttcggctggagatagacgtgtctcaaattcaagtaacttctgagcagaactcgacaggataaatgttctttcactgatctatgcctagatagcgtacttcctnagggggaaatacttgtcacgcttctttaccctctcggtcttaaaggagagctg

SEQ ID NO: 77948 - DNA, 416 bp, Zea mays
  Clone ID: MRT4577_171110C.1
aacccaagtgagactcatgtgaattacgttacacaacatgtggaaacatatgacgacactgatatttacaacggggctgggcttcacgatgaacaacacaatcatgtggctcgagctactacatctgatctcaaaataaatctgcttttagaatgcctgaccatctgcagacatacacaacaagatataccagaaggattttacgatctgctaccggaaatgccagcgcaaaacgatgcaaaggacgactgagtgtgttaaagcaactaagatcacctctctcataggctctatagctctagtgatgaaattcgtacatacgtcatttatgaaatatactgttatgggtaatactacacttcatcagatatgacttgacatcttcattgtatcgatggacagatatggactaatgc

SEQ ID NO: 77949 - DNA, 239 bp, Zea mays
  Clone ID: MRT4577_171111C.1
taggaattcggcctcgacgcaagccactgcgaggccaagttctagggtttgggaatctgtacgaggggagaggggagcgcgctcacggtcagggaggcgaagatgatcgaggtggtgctgaacgaccgcctggggaagaaggtgcgggtgaagcgcaccgaggacgacaccttcggcgacctcaagaagctggtggcggggcagaccgagacgcgccccgagaagatccggatccagaa

SEQ ID NO: 77950 - DNA, 814 bp, Zea mays
  Clone ID: MRT4577_171112C.1
tttttttttttttcgtccagtacgttttatattaaagatagtcgttaggacatgctacagttataatctataaatacaaaacacctataaatacaaaacactgtagaatttttttttttttttttttttttttttttttttttttttttttaaaaaaacggggagaattctttgttgccactctatatgcaagccagcagtagacattggacagcgcccacgtccgtccttggcgacacgcacaactcaaacaaaaaaagggggaatcacgccacattttctgcattctggaactagctttctagtgcactgtcgcagaagaacactacccactacccagtgccgctgaaacacgatacattccttgccgatctggtccactgatccgccgggagccgtccccgccggccaggacgccggcttcagttgaccaccggcctttgacgtttccgagacaccacggggggttcgacggtggagtattgtttttgttttctatgcagtgcttggtgccgcccactccgaaggtagctgtagctccctcagctttgtttagtccctgtcggtgtattttggatggataccatggcacggggaggcggtattttataccgtgcagcttccggatttgcccccacctcacacaaagtaggatgttgtatactttaggtggcgccactgtgtgtcacctccaacaccagaattaaacgtggtgacacatcagctaatataagcagtgttctcgccatgatcttaattagcttgaagttgaaactgcccgcccccaccccttaggagtgctataatacgtgcg

SEQ ID NO: 77951 - DNA, 307 bp, Zea mays
  Clone ID: MRT4577_171113C.1
cttagcagcagctacctgaaagaggagccaagaggaaactggtgagccattgcaaaggtggctcctcatttttcagcaatagatgaaaggtttggagagctctttgccccgtgtctgcgtggagaagcaagagatgcaagaaacatccatcttttcctacgtaatatccggagagccacactgcggtgtgtgccttcaaacacggcgtcaaatgtgctctctctgcaagtctatatataatattagtcattgaaaatagggagggttttcgcaattgcagttttcctcatcttgttgcacatattgt

SEQ ID NO: 77952 - DNA, 241 bp, Zea mays
  Clone ID: MRT4577_171114C.1
gataaaggtaagaaattattctctgtagaacgacccacggcagattacgggcttcgggtaggaaggaggtgacagccgtttacccggatttaagcgatggggtaacgcatgctctgccaagggagtcctggacgggactaaacttaaggagaagtgatgtgcattggttttgcgggggatcggaagcagtaaacctttgacaaccaggaggggagctgcctgtagaatcttgaagacccct

SEQ ID NO: 77953 - DNA, 999 bp, Zea mays
  unsure (1)..(999): unsure at all n locations
  Clone ID: MRT4577_171115C.1
ggtaccctccngagttccggccggtatgctcggaattcggcgaattcccaaactcagatccaagcaaagcaaacatcacggctcgtcgcagtcgtcttcctccccacgcgaggccagatccaacctgcctcggccgaccaccgccatggctcccacggtcccttcggcggcgaagtctgcctctccttcccaaccttccgggaagagcgaggtggcagatctgaagcagcagctgcggcagctggcggggagccgcgctcccgatgcggacgaccagcgccgtgatgtcttcaagagggtgatctcctgcatgacggccggcatcgacgtgtcggccgcgttcggggagatggtgctctgctccgccacctccgacgtcgtaaccaagaagatgtgctatctctatgtaggctcccacgcgcgcgcgcacccggacctagcactcctgaccatcaacttcctccagcgggactgccgtgatcaggaccccaccattcgcggcctcgcgctccgcagcctctgctccctccgtgtccccaaccttgtcgagtatctcgttacgccactcacgaccgggctgaaggatcctagcgcctacgtccggatgatcgctgctgttggtgctgccaagttgtatcacatatctgccacagcttgcattgatgctgaccttccggcttcgctcaaggcgctcatgctctccgatccagacgcacaggtagttgccaattgcctacatgcattgcaggagatctggaccctagaagctgctaactcagaggcagcagcaagagagattgagacattgcatagcaaaccagtggtattttacctgttaaacaagatcaaggagttcagtgaatgggcacagtgcattgttcttgagttggcatcaaagtccttccatctgataataatgaatatttgacattatgaatttgctgaggataaacttcagcatgccaaaggagccagtgttttggcaacaattaaagtttt

SEQ ID NO: 77954 - DNA, 360 bp, Zea mays
  Clone ID: MRT4577_171116C.1
tcgttgcccgtacagcacgggcacaagataggagggattgaaactggctcagatggacgtgtgctgactgcaggaatcaagcctggaatgggtgtcacctacagtccaactggtctgaccactgatgcgaaatctgttgagatgcaccacgaggctctgagcatgcaccttctggagacaatggctgactgaacgactataacgtctgtagtgaatgatctgagacgatgatacacaggactacactatgaacaatactccgcctatgaggctggtagcgtcaactgccaagggatcattaacaaccatcatgcgcagaaagacaatggctatgacacagaactagactgtcacacctac

SEQ ID NO: 77955 - DNA, 194 bp, Zea mays
  Clone ID: MRT4577_171117C.1
atgaaatcgtttttattattttttttttggttggtgcattcattatacaaagagacaggggtgaagtgccatttaagcgagaattctttggggccgtcccggaaggagggcatactatttttttaccttactactacaggataagccatgtttaccacgtgcgtgagtctgccgcacagcctaagaaacctgaa

SEQ ID NO: 77956 - DNA, 353 bp, Zea mays
  unsure (1)..(353): unsure at all n locations
  Clone ID: MRT4577_171118C.1
cgaggataaaaccgaatgtgctacaggctggaccactataacggcaagggtgtatccacagggattgcaggggcactggccttgcgtagaccatggtgcatggactacaaggcttatactatcggatacctgcacgaggccacgggggcgatatccctggaatccatgggaaaactgcaaagaaatctgtagccgcaggatattaacgattgtgggaggccatggtgtgtccaaaccattggatttactgcggaccgggtgggtagcgtctggattgacgtttggactccacgcaggactaggttggttactgtactaaatggngccgagagcgtgaattaacaccactgacc

SEQ ID NO: 77957 - DNA, 136 bp, Zea mays
  Clone ID: MRT4577_171119C.1
aaggaatgaagaaaacttggattatataaggcataggatcatgaaccaataaggcaccggaccatatttttttttacaaccaggtggttgggatcatttttttttctgcttagatgaacggctctgtctccctgct

SEQ ID NO: 77958 - DNA, 231 bp, Zea mays
  Clone ID: MRT4577_17111C.1
gtgcatgcaacgtggtcattgttatatagagtctacctaaatgtcaaatcagtggtaccgtggatattacagggtccatggactggggaaaaccctgatggttaaccctaatcttacataagcatctgcgagcgacataaagcaccatttctgccagagtggcaggaataaaccaaaaggcccggacagatcgaacttcggaacgagggtgtcaggctgaatagcgaatgg

SEQ ID NO: 77959 - DNA, 730 bp, Zea mays
  unsure (1)..(730): unsure at all n locations
  Clone ID: MRT4577_171120C.1
tcgaggccggccgggccgggctgtgggacacccgggcttccagctgctcgagtccgaggaggtcaagctcctgggcgcacgcgcgcgcccgctcgcctccgacgcgccgctccgccgcggccggctctacctcctcgttgcgctccctcgccgcgcgcccgcaggtcccatgcgccgcgcctggtcgggcaacctcaacgtcggggcccgcgagcgtctcgagtcgctcaagctcgcgcgccgctccacctccgacctctcctcgctttccgcccacgcctccgcgtcggcccccacctccnccgcttcccggcggcgccgcctcccctcttcctcccaccggcagcggcgccacgcccgtgcgcgttaagatgcgtcttcccagggcgcaggtggagaagctcatgggggagagcaaggacccagccgaggtcgccgccaagatcatggagctatgtggcgcggccgtgtgcgacgcgcacgccagcgctcgggtcatcccggagcgcccgcccgggatactgcggagccaaaggttcgccaagacgccggaatggggcgccgggttcatgctgccggcggcggcggcggccaagacgccgcagcggtggcccacgctgccacgcaccaacgagaaaaaggcacggntcgtagagttgccggacgagctaataatagcgtgattctgtacttcccctgagcgagttacacttcttttttttttttttta

SEQ ID NO: 77960 - DNA, 624 bp, Zea mays
  Clone ID: MRT4577_171121C.1
cactaatacacggctatcaccgttcacactcgttctcaacgacctccaacgccttataacttaataccttgcgtatttcaataccactcccccaaaccaacaatcaagatgcgttccttcgccgtcattgctggcttcgccgccgttgcccttgctgctccccagtacgaggcttaccctgctgcccctgcctcttcctcggctgccgctgagtacccggcctaccccgccgagacctcttcagcccctgcctacgaggctgcctcctgcgctgctgagtacccagcctaccccgctgagacctcctccgctggatacgaggcttccaagcccgactacgaggcctgcaagcctgcctacgaggccagctccgctggccccgtctacagcgcctccaagcccgcttacaccaccaccgaggctgtccacgccaccagctacgtctgccctgagcccaccaccatcacctacggagcctgcacctacaccatctgcagcagcaccaccctcagcatccctgagttcactgctacctacgtgcacaccgctatccccgagattccggctggtcccatgcacactgtcttctctgagatgccttccgttctcgaagctttccacact

SEQ ID NO: 77961 - DNA, 343 bp, Zea mays
  Clone ID: MRT4577_171122C.1
gaaaaactcaaccaacggccgctgcccatctcggctgcacgacgtgcgaaagggcgtgccccctgacctagacccttgtcaccatgccgccgtgcccggaagactgtcaatgccatactgccatccatcgctccggacgactgcacatgctgcctgcacggcgccctgaactaccggtcgctggctctatgtccatgagccaggccgtatgtacgacacggccaagaccacgctataactagaccactgcatgctgaaggccaacgtacctccagtgactcggtcagattattaaccattgatatactccagcttactctagacgcgaatactgcgccactat

SEQ ID NO: 77962 - DNA, 1589 bp, Zea mays
  Clone ID: MRT4577_171123C.1
ctgcgaatgacacacaagaaaagaagaggtctgatgaaccaccaaaatatccaggattggttcttcagacgaaaaggaataaacaatctaaactccgttcaacatccctttcgttggatggcctcctagattatactgccaaggatatagaggagtctgtatttgacgtctgtgccttgcaattactttatgttagtatatatcaaaagggactactacttgtgcacctttatatgttctgctgctacctagttggcaaacttgagcataccacacacagaatccaaactccgcttaacatccctttcattgcatggcctcctagactatactgccaaggatatagaggagtcagtatttgagctttctttgtttgctgagtcattcagtgaaatgcttcaacacagaatgggttgtgttatcctgtcttttcttgagaaactgcacaggcgatatgttgtgaagaggaatcagcgtaagcgccagagagaggaagatctaaagaaagaagagaatcaatcttcagagaagcggtctaagaccaatcatgagactataactgaaagtgttgataacccaggaggcagcgttgaattgacaaaagaggatgaagaaaagatgagcaaagatcaatctgcaaatgtccatgctgaactgtcaaaagagggtcagataaaacttggcaccgatcatccaattgctaaccatggagaaccagcaaaagggggtgatgaaaatatggaggaagatcctgaatacgaggaagatcctgaagaagtagaagtatatgaagatgacgaggacatggatgatgctcatgctgaagaacagattgcagaacagaatgagaacacaaacgacagagagattaagccaaaagaagtagcgacaacagatggtggaaataacaaaagtacaagacagcctgaagtagaaaatgttactaatatccatgaaagagctgcttcaatggaagaaaagcagtccgtgccagagataggagatttggtgggaggtggagaaaaggtagttagtaaagagattaagccagcaaaagatgaggtgatcgacaaggacctattgcaggccttcaggtactttgacataaatggagcaggatatctcaaggttgatgatttaaaatgtattcttcacaacatggggaagtttttatcaagcagggacgtgaaggacttggttcaaattgctcttgttgagagcaattctgcaagggacaatcgcataatctatcctaagcttgtgaagattgttgacctgtaatctggcactgcttggcccgcgtcagtccccttgaagttaaccatgctatgatcgttgagaagtcagttatgagaaactattttgtttacttattaatgggttcactgccatttttgtggctacctgtttctacgattatgctacaagcagctgcttttcgtttcgatgaatgttttttgtggaattataagtcatgaacttaatcgatgttgcctcatttcgtaaaagaggtgtttgtgtcacttgaaaaaagagacgagcaatgtcttaaggcctagtactcccggcggttagctaacgaagctgaa

SEQ ID NO: 77963 - DNA, 167 bp, Zea mays
  Clone ID: MRT4577_171124C.1
gcggggctgggttttttttttttaacacaacaacaaaagatgtgggacattttatacttagccacagaagtacagaaacacaaccttacatatgccgtcatcttccttccgacatagtgctagacataataccagcgcttgacgctgaagtcttcggggtggtgcgg

SEQ ID NO: 77964 - DNA, 444 bp, Zea mays
  Clone ID: MRT4577_171125C.1
tctttttttttttttatatatgtttttttttttgtacgggcaaggaacttgctttatccaaaattgaagagccatcactgttcctaccagaaatgcactcccccacaaaatcaaaataattatcatgcttccgagccctttattggataagcgatggattacacggcttttgtaggagttattccacaaaaagactcacacagagctctgtaccttaaccaagacccgattttgaaaaggggcctatcctaccctcacaagccctaaaagatccgtacctggatgcttgatcgcgtaaacaatctccatgggggacacactctttacggccccgtactctatgttagtcaccgcttcatagatgacgtcttcaaaaaagatcttgaccccgccgggggcttcctggaatatgaaccccgaaatgcccttatagccccccctttt

SEQ ID NO: 77965 - DNA, 1454 bp, Zea mays
  Clone ID: MRT4577_171126C.1
ctcgggacacgagggggcatcccatcgatgccttgctgggacggcctgccgctgccgtgtggacccacgcgagggggacagcgactgtgtagcaccgtgggcggggtgggccccagcggagtcaagcgggtgtaaattgcagcctctgctctggcggcgcccgtgctttcatcattccgctccccacacccctgttcgtggcggcctccgcccctccctctcaggctctcaccaccgtctgctggtggttgccgcggcgccgctcctccctcgtggtggcggtggaggactacggtcggggatcgacggcttcttcgtccgttggttggcaggcgaggcgatacatcaaccaaccaaaagaaatgtcagctggcaggcaagcatactggtgttaccagtgccgacagagggtgaggccacggggccgggagatggtttgtccctactgcgattctgggtttgtggctgaaatggatgatgtagatgctctcatgagccacttcgtcgggacggatcctgatttccatcgcgacccacggttcgggataatggacgcgatctcggccgcggcggcatgaggagggccaacatcgacggctacttcgttggccctggactggatgattttatcgagcagttgacccagaaggatcgccgaggaccaccgcttgtcttccggtcctcgatccccgccatgctcaccgaggaaaacagcttgcgatgttttcgtcaggactcgacgtggcggcggcggcggcggcggctccaggagggatcccaacatcgcggactacttcgttggccctggactggatgatcttatcgagcagttgacccagaatgatcgccgaggaccaccacctgctgcacagtcctcgatcgacgctatgcccacagtgaagatcacccagaggcatctcagtggggactcgcattgccctatctgcaaggagaagttcgagatgggatccgaagaagcaagagagatgccatgcaagcacctgtaccactccgactgcatagttccttggttagagcagcacaattcctgccccgtttgccgttacgagctcccgccacagggctctgccacgggtgctagctgctcgcgcgcgagatcaaccgaccagagccagagctcaagtagttcaagcagcagcgggagaaccagtgggcgtcaaaggagaaggaacccgttctcgttcctgtggcctttccgctcatcaagtagttctcgctagattagcctctggtaatctttgctcaggttcgaaatactgtttgtttttttgggtcaaatacgctggtctaatgggctttaatgtggtgggatctcaatctgtactgtatggtttgttaatgatcgccacacgatgtttctccttgcaagtatattattattaccacggtatcatcaaaaaaacttggaaatgtttaaaaaaaaaaaaaaaaaa

SEQ ID NO: 77966 - DNA, 962 bp, Zea mays
  Clone ID: MRT4577_171127C.1
cctcgaggccggccggggcggccttcgcccctccctctcggctctcaccaccgtctgctggtggttgccgcggcgccgctcctccctcgtggtggcggtggaggactacggtcggggatcgacggcttcttcgtccgttggttggcaggcgaggcgatacatcaaccaaccaaaagaaatgtcagctggcaggcaagcatactggtgttaccagtgccgacagagggtgaggccacggggccgggagatggtttgtccctactgcgattctgggtttgtggctgaaatggatgatgtagatgctctcatgagccacttcgttgggacggatcctgatttccatcgcgacccacggttcgggatcatggaggcgatctccgccgtgatgcggcatggtatggcagggatgaaccgggagtttgatgtcagagggaggccgaacttcttctcagacctggagatggagttcggttcagggccatggctgctcttccgtggccagctccccggccacctcaccgaggacaacggtttcgatgttttcgtcaatggacgacgtggcggcggcggcggcatgaggagggccaacatcgcggactacttcgttggccctggactggatgatcttatcgagcagttgacccagaatgatcgccgaggaccaccacctgctgcacagtcctcgatcgacgctatgcccacagtgaagatcacccagaggcatctcagtggggactcgcactgccctatctgcaaggagaagttcgagatgggatccgaagcaagagagatgccatgcaagcacctgtaccactccgactgcatagttccttggttagagcagcacaattcctgccccgtttgccgttacgagctcccgccacagggctctgccacgggtgccagctgctcgcgcgcgagatcaaccgaccagagccagagctcaagtagttcaagcagca

SEQ ID NO: 77967 - DNA, 1607 bp, Zea mays
  Clone ID: MRT4577_171128C.1
ctggccgggacccccgactccccgccgcctcccgtcccctcctcgacgacacccacaaacccatcccatctcccaacacctccgccggtccgccccagtctctcccactcccagcgcccaccggcaccgccgccgcacgcgacccctcgtccccgtcccccgccccgaccgcacgccggaatggctgcgggctcgtccgcggtgtgggccgcgcaacaccccgcctgcagcggcggcaagttccaccacctgtcgccgtcccactcccactgccgcccgcgccgcgccctccagacgccgcccgcgctccccgcgagacggagcggcgcctccccgccgcgcgccagcctcgccgccgccgcgcctgcggtggcggtgaggacggcttcggaggaggccgtgtacgaggtggtgctgcggcaggcggcactcgtggaggccgcgacgccacagaggcgccggacgcggcagccgaggtgggcggaggaagaggaggaggagagggtcctcggctggggcctcctcggcgacgcctacgaccgctgcggcgaggtctgcgccgagtacgccaagaccttttacctcggcacgcagctcatgactcctgagcggcgcaaagccgtctgggcgatctacgtgtggtgcagaagaactgacgagctagtggacggtcccaacgcgtcctacatcacgccgaccgctctcgaccgctgggagaagcggctggaggatctctttgagggccgcccgtacgacatgtacgacgccgcgctctcggacactgtgtccaagttccccgtcgatatccagccgttcaaagacatggtccaaggaatgaggctggacctgtggaagtcgaggtacatgaccttcgacgagctctacctctactgctactacgtcgccggcaccgtcggcctcatgacggtgcctgtcatgggcatcgctcccgactccaaggcctcgaccgagagcgtgtacaatgctgctctggctctcggcatcgctaaccagctgacgaatattctcagagacgtgggcgaagatgcgaggagggggagaatataccttccgttggacgagcttgcgcaggcaggtctcacggaagaggacatattcagagggaaagtgaccggcaagtggaggaggttcatgaagggccagatccagcgtgccaggctcttctttgatgaggcggagaagggcgtcacccatctcgactctgctagcagatggccggtgctcgcgtctctgtggctgtacaggcagatccttgatgccattgaggcaaacgactacaacaacttcaccaagcgtgcgtacgtcggcaaggccaagaagctgctgtcgttaccgcttgcatatgcaagggctgcggttgcaccatgaaccatccgtagatcacatcttttttttcttttcttttccaaacccaccttgttttgccccacccttcctttttttttttgtatataatcagcttcagctgcctgcatggcataagccttgcctgttcagggtgattccatgtccctaaatactcaatcagctcttgttacaaggaatggagaattagaattcgagaagcgtacacccccccacaaaaa

SEQ ID NO: 77968 - DNA, 1145 bp, Zea mays
  Clone ID: MRT4577_171129C.1
ggtgctttatcattccgctccccacacccctgttcgtggcggcctccgcccctccctcccaggctctcgccaccgtctgctggtggttgccgcggcgccgctcctccctcgtggtggcggtggaggactacggtcggggatcgacggcttcttcgtccgttggcatacttgtcttgggtggtctagttggatcatttgggaggcgaggcgatacatcgaccaaccaaaagaaatgtcagctggcaggcaagcatactggtgttaccagtgccgacagagggtgaggccacggggccgggagatggtttgtccctactgcgattctgggtttgtggctgaaatggatgatgtagatgctctgatgagccacttcgttgggacggatcctgatttccatcgcgacccacggttcgggatcatggaggcgatctccgccgtgatgcggcatggtatggcagggatgaaccgggaggttgatgtcagagggaggccgaacttcttttcagacctggagatggagttcggttcagggccatggctgctcttccgtggccagctccccggccatctcaccgaggacaacggtttcgatgttttcgtcaatggacgacgtggcggcggcggcggcggcggcggcgtcggccatgaggagggccaacatcgcggactacttcgttggccctggactggatgatcttatcgagcagttgacccagaatgatcgccgaggaccaccacctgctgcacagtcctcgatcgacgctatgcccacagtgaagatcacccagaggcatctcagtggggactcgcactgccctatctgcaaggagaagttcgagatggtatccgaagaagcaagagagatgccatgcaagcacctgtaccactccgactgcatagttccttggttagagcagcacaattcctgccccgtttgccgttacgagctcccgtcacagggctctgccacgggtgctagctgctcgcgcgcgagatcaaccgaccagagccagagctccagtagttcaagcagcagcgggagaaccagtgggcgtcaaaggagaaaggacccgttctcgttcctgtggcctttccgctcatcaagtagttctcgctagattagcctctggtatctttgctcaggt

SEQ ID NO: 77969 - DNA, 952 bp, Zea mays
  Clone ID: MRT4577_17112C.1
gtgggttctagccatgttggcttagctcattttagagttagagctagcaaccatggttgggttcctggtttgcacagatgccatttcatatggcaggaggctgactggttgagcccctaatatatccatgtttgttagtgcatctcactgtcctttcccttgactgtgaatattgacatgggttctatattacaaattatattgctaagaatatatttgttgttttacttgtgtgggctgtatatcattaagcgaatgaaattggaccttggtggtgatgttgacccagttgaagatggcaagacaatgttctgaaatcatgaccaaaagtcaatgcataagttaaaatgtttgttgtaatattaattaatgtttgtttctattgcaaggttgaggagcggcttgtttcagtggatgaactgcttgatgctgatgaggtattctgcacaggaactgctgttgtggtgtctcctgttgggagcattacatatcaagggaaaaggttaaacattatctttgcttgagaactcagtttttaattgaaataataaacatgcaattaaatcaactttcttttgtttcatgcataaggtaactaacagtcattatcatgcaaacatgtggcaagccatgaaccatttgaagcgctacttgcttaatgtctctcttgatcatttgtgttagtggcatttgtcgaccttgtttttctgtgcactttctgccttcattgcaaaatgtcagtttttttatctgcattgtcgtcgatgactggtaaacatggtagtgttgggggcacgctttagcacctaggcaacaaggtgtgactaagacctcttggcatcatgcggtgtcatacattttttgtacataatatggctcttacaacttattctttcaaacaaatgttattctttttggagacttatttagcaatgatatcattacatgtaag

SEQ ID NO: 77970 - DNA, 232 bp, Zea mays
  Clone ID: MRT4577_171130C.1
ggcgacgtgggcaagggcttccgctgcatccgcatggtgaacaacatccgcctcaacttcgacgccttccacggctacaagggctaaggtcgccttcaagactgcaccagcgttgtgctgtcggagttggccaacggagacaaccagagcttgaaaatccttccctggggcgacgaagcctacgccgcgggatgcagcagcgccggcaacgggccccggtttcgcggccgcg

SEQ ID NO: 77971 - DNA, 469 bp, Zea mays
  Clone ID: MRT4577_171131C.1
gcagcagcaactgaaagtaacctcacagtcacagcacaagtcgagcaaaactgcaagagcaaatcctccagggcacgggactgacggctgattagccggctggaatgctcccgtctctcgccatcattccgcccagggctgccgcctgattggccgtcttcgctcggaaccgaccatcactgcccatcggaaaggcgccctccacgcaaaaccacatggaaagtcgccggtggatcgcaaagcggttgctgaaaaggcccggccacacagcgcacgtcctcgccggcgctcctgccggtgccggtgccggtgccggggctaagtaaccaccggaacgggcgcgcgacccgtgtcgggtcggccgcgttcgtttgatttggttataatagagtattagtttattactaaatgaaatgatggcatgcatgtggttagccaggttgacagaacgcactgctcgactctagct

SEQ ID NO: 77972 - DNA, 139 bp, Zea mays
  Clone ID: MRT4577_171132C.1
tagcgttccgctgccagtaggcgctccagtccatggcgtcccctgtgcctgtactgcatatccctgcagaggtgctggacgctggcgagctcagctaccagggcgggcacgactgcgaggcgcagcgactgctgcctca

SEQ ID NO: 77973 - DNA, 661 bp, Zea mays
  Clone ID: MRT4577_171133C.1
gggtacccggggcccccccttcgagctcctcccccccccccccccccccccctctctttttttttttttttttttttttttttttttttttttttttttttataaaacaaacacaaaaaattgggaatcgccttttacgaaggggcccctacggttttaatccttaaaccatccaaccccctccgtaaaaaaacaaaaataacgaaaaaacgccccaacccactttttaaaagggggggaacaacctttttgtttagttcccccccaaccaagtttaagggcaatcacacaaaggttccatcccctgcaaagctaacccgggggatcgggggctccctaaggtttggctgtctccatcgggtggggggggggctcctttgcagctccctcggggggggggctttccccatttgaccgctgctgctccggggtctgaggctcaggagcttgggtttttgccggagggggagtctggggctaaagaactggcttcggtttcgaaatgaacgggttgcaaaacctgtcaagggtttcagctttttttttaaggccagcagcaagggggaccggattaacatgctttggaaaaacatcctgctgcggccttttctccattagccaagtttttggttccgaacactcgttaaggaccttttgcttt

SEQ ID NO: 77974 - DNA, 354 bp, Zea mays
  Clone ID: MRT4577_171134C.1
agcacactaagggtgtgctcgcagattttccattggttggtcctatagattgcaagtagatatggcactaccatcgactaaacccgactcagtacataatgtactgcatgaaagtgtatgacaaaatactgaacaataacaacgtttagtcatgcactcaaacaaagtcgacacttgactcacaaaaagtatagaaagagctatatcctgatgagccctacgaatcggacttcacaagaacctacgacactgacgctgatgtcaaccctgcatgatcagacgatgacattacctatgatctggtctcgactgttaagagacaatcctatttctatcatcaagctggaacaccaa

SEQ ID NO: 77975 - DNA, 141 bp, Zea mays
  Clone ID: MRT4577_171135C.1
gatcaacagaaatttatttttattcttgcaaatcacaacagtaccacaccgccaagagtttacttttttggtcctaaagcacgagcaatacaagcacaatttaagaatttaaaagcccatgcatattaaagttttacaaac

SEQ ID NO: 77976 - DNA, 290 bp, Zea mays
  Clone ID: MRT4577_171136C.1
ccactgacagtttctcagaaccacagcctcgatccatggggggagaggatgtgagagcctactccgcaggagctggcggaggcggcgctcgccggggagtcggcggagcagcgcaaccggtttctggtgctgcggctgtacgaggcgctcggcttctgcgacacgcgccgggcgcggaagctgctggcgcccgacctcgagtggtggttccacggtccccccacacgccaggacatgatgcgccttcttaccggcgcggaccaccagcgccacatgagcggcagcggcgg

SEQ ID NO: 77977 - DNA, 467 bp, Zea mays
  Clone ID: MRT4577_171137C.1
attcggctcgagcgctgtgactaattcttcttcctagcgttggccttccgttttggttcacaagccacagttgcctttatcatcttgcataaggattgctgcttgggcacgacataagatattcacatatactgacctgctatgcgtggactgcacgctaaactgctgactaaagttatcccaactcgcttgggatacaatgcttttgtagctgttgttgaagtatgtacagtgggatcttgttatactacacccagagatgctgttgcactgtgtgctgtacaaattgatgtgacagactagactctgaccatatatgatatagctgttgacagatcatgatgtccaacacagcaggatactcttctgtcacatattactatcatgacattgatgctacaactgtatgttcctgcttactatagttcacgacatgtgatttacatagagacaccaacgagttccat

SEQ ID NO: 77978 - DNA, 340 bp, Zea mays
  Clone ID: MRT4577_171138C.1
gccacgcgttcgatcacctcctataggtccttacacgcgccgggctactaccggacgggtacagtacgcttgatgtgggaataataccgagccccatctttggtccttacatcgatgcacaccagcaggtgcctggagacgtaataactcgtgctgccgtgtgtcaaccaacgtggtgtagagagacttttctgcgtattctattgacaacagatgtttgtattcaaccaacaccatagattgaaccctgctatttatttgcagcaacttctactaccattcagccagttagcttctgcctactcttaggcgcatcaacttttttcatttaaccaattgg

SEQ ID NO: 77979 - DNA, 201 bp, Zea mays
  Clone ID: MRT4577_171139C.1
aagggccataaaataaaatagaaacacaagagtttgaaagacatgcatagaaagaggaaacaggagcagcttttcaaaaggtctgcgcaagctacgccgagaaactggtccgatggcctggtctgcacgtgctcatggccggctctgctccggtgacctctcgtgggtcgcagcagcaccgtgcacttacgggccctgagc

SEQ ID NO: 77980 - DNA, 677 bp, Zea mays
  Clone ID: MRT4577_17113C.1
cctcgagccggccgggaatattcccaaacggagcctctccttcccggtctcctccgcccgttgacttcgtcccctaccatctccggatgcgtcaaacaaagaaaccaacaccgcgagaaagaccccttcgacggggcgggagataacagagggcgcttaggttcgccaaggtgctgagcagggtggtcgccaagaaccacaggaaggtgctcctggagaacatccgagggctccccaaacccaccatcctctacttgcttcagataggcgagatgaacaccatcatcgccactattctaatagaagacccgagtggggatcaaaatattctcagataacgtgtccgggatgccgtcacctacaacaagatcaggccactgaggaccgattacttcctgaacacccactacctcatctttggcgaggaccgcaccctcaacgaactcggaggttaagcgcctcttcagattctgcgaatgcttaaggaggatacacgtactctgatcgctgtgtggccttatggttgctaacaatcctgatcgtacccatgttatttttgtccaatgagataaatgctgaaaattgatgctgccttcatatggccaaagtggtaggaacattgaatctttgtgtgctaaacgaaagaaggattgtatgcaggcctggactgcctgttt

SEQ ID NO: 77981 - DNA, 262 bp, Zea mays
  Clone ID: MRT4577_171140C.1
gggaagcggcggcaggcgccatgtccggccgcgaaggtggcaagaagaagccactgaaacagcccaagaagcaggccaaggagatggacgaggaagatatggctttcaagcagaaacaaaaagaggagcagaagaaactacgaggagctaaaagcgaaggccgcggggaaggggcccttggccacaggtggaattaagaaatctggcaaaaagtaagctgttccctgtgcctgaggagatggtgaccctttatttcatctgt

SEQ ID NO: 77982 - DNA, 275 bp, Zea mays
  Clone ID: MRT4577_171141C.1
aaacacaaattttggcattaacgaacaaaaggggcccaagatttcgcgcaggggccaggagggcacataacactggttggccaaactggcagcgcatagttaacttaaggttttgcccttagcaataacacccggaaagggggcgccacccggtgcaagaggaaaacctgggatccacaaaaaaaacctctcttataaggccctacaaggggcccagaataacaatacccccaggactttatgtttttggcacgaagtttgggggggggaatagg

SEQ ID NO: 77983 - DNA, 126 bp, Zea mays
  unsure (1)..(126): unsure at all n locations
  Clone ID: MRT4577_171142C.1
cggctctgatctcgcngactcgccgcttacctcgccggacgccatcgcccgtcgctgcctgcactcgccggggctagacgctaaggaggtgccttctcccggagctcagcgaagccgagtcaccta

SEQ ID NO: 77984 - DNA, 361 bp, Zea mays
  Clone ID: MRT4577_171143C.1
ctcgaggccggccgggattcctcatcacctagctagtcatcactagtcacgttcgtccacagagacaacaatggccatggagacgtgcttcagagcgtgggcgctgcacgcccccgctggcagcaaggacaggctcctcgtcggcaacctggtgctgccgtcgaagcgggcgctcgcgccgctgtccgtgggccgcgtcgccacgcgccggccgtgccccgcctgcccgtccaccaactcggtgaacgcagttcttggcgtgggcgcggatcactgggacggatactccgataggcgcgcgagactccggtgcacgtgccgggccgtgagacgggggaggtgacgtggggggtgatggacg

SEQ ID NO: 77985 - DNA, 708 bp, Zea mays
  Clone ID: MRT4577_171144C.1
caacttcttctaaactagggaaaatctccatctacataattatcctaatctttttcattgttagagaatggcaaatgcatgagtgattgggctagataaatcattgacaatattacttgatgtagttaaaacatggagacttttacgattttaatgtgtcagatggctcttttccaaattcggtatctatagttattacttgttgtaattccttggctccttgctatgcttcattatattgcaatctttattgtttggtttctatgcatgttattttccatagttgtagaatttatcttagaattatacagttggaaacctttttttttgcttgttggcttgttattttgttgtttattgttgttctgtatcattttacctccaaatgtttgtttaccagagataaccaaattatgcatcaagggactgtatgcaccattgttactaatactcgatggcctcggtaggctttgatggtgctctttgcactccatcagttactgatacctgtcaccatatctaaataccagtccttgcaggtgctcctgtttcttcagtgtgccagactctgaacatgacaagagacgctgaaaactatggtatctcatcagtgacaagtccaggtagattaattgaacccctcaaatcattttgataccaagaagaaaattctatcggcttgatctgtccctattatcttaattggga

SEQ ID NO: 77986 - DNA, 287 bp, Zea mays
  Clone ID: MRT4577_171145C.1
gcgcctgaatgccgtgctgattataactttacacctctccatactgttgagccagtggtaaccttactgagttcatctccgccagctgtgcagcaattagctgcagagctcctgtcacatcttcttctagtggaccacctccaagatgtcacagtaacagatcaggcgactactcctcttattcaagtgctttcttcaggtttgccgtatttacatcagatagctatagaagctctagctagccgtgctatagccttgccaaatacgattgccagtgaatgtggtgt

SEQ ID NO: 77987 - DNA, 322 bp, Zea mays
  Clone ID: MRT4577_171146C.1
gtcgctaccagccgacgacgattccgcctccacaagcgcacgaacccccccagcacattgctctgtcgatgtcaggcatgggcgagggcgagcaggaactcgacacgcccaagctctagaaccgctggaccgtgcttgacgaccacatgcacgacatcacgatgaacgactacctcactctgaacacgacgaatcacgcgatgtacatgccgcacaccagtctacacaggtactccaagaagcggctcacgaaggcgcaggagactgatcgtcgagcgcctgacaaactacactgatgcatgcaccggtcgcaaacaccggc

SEQ ID NO: 77988 - DNA, 439 bp, Zea mays
  Clone ID: MRT4577_171147C.1
attcggctcgagcggccacggaggacctgtttttgccagacagagaggagagagtagatcgtggagatggaacaggagccatggctgctgcttactgggctattggcctaataatccagacggcaaccgtgctggcgctatacgcgctgacttcagcgacagaggggatggtgtctatcgcgaggacttgcgggaaaggccccagcaacctgaccagcatcttgaaccacgcgttgactgaggagtgtctcaagcgttccttcgatggggagggctgcctaagctggacttctacgactgcagcgtcagagcttacctgagggccctgaacatgatctgcacgttaggggaggctccgagagccactatcaatactgtgcccgggagcgcctgtgtcaaacgcaccgaacgagctgtgccggtgtagcctgcgagctag

SEQ ID NO: 77989 - DNA, 1841 bp, Zea mays
  Clone ID: MRT4577_171148C.1
gtaccctcacccggccgggctctttccccctccatcgctcgggaaggcgaagggtcaaggcgtctggcacttcagcttgtcccttttgcagcttgctcctggagtcctggttgctccgtcttatccggtcgggctcttgtccgacgaacgtgtggttgtggcactcgaggaagtacactgagcagggcattccatggagctcgaggcgatcggaaagcgactccgtataagcagcggcagcagcagcttggccggcgacaggctgacctccctgccggattgtctcatccaccacatcatgtccttcttgaaggcccgtcaggtggtgcagacctgcgtgctgtccaccaggtggaggcacctctggcgctctgtgccatgccttgacattgaccaggacgagttcaaggccgccggctcgaaccgcatcacagagaaggaacaggaagacttcgaggactttaccgaccacctgcttatacctaataatatttccattgcgctcctggatacacttcgtctgcatgttagcgatgatgaatattatcatcgtggagcatcagttagatggatccgtcatggcataaagtacagtgcccagaatcctggcattatgcacaaggaatcgaacttagccttttggcgcctcaaaaaactacacctctccggtgtatatctggatggcagtttcatgaagcatgtcagttcagggtgcccgtatttggaggttctcgagctcaaagattgcccgtgcacatttgaagaggtcacatcccacacactgaagaacttgattctggaaaattgcggatgcaatgagctttctgggattacatcaccctacgctgaagagtttaacaattattgctagtggatattacaacataaataggctggttttgaaggcccctgctgttgcttatctgctcctggatgtgaatgcttattttgttaaacgcgatgtttcatttgatgagatgtcatctcttgccaaggcttcaatttatctaagggacagtgtaggaagtggactcagcaagcaccaattcaagcttctttgtagtgtgtctaatgtgacaactttggtgttgtcaggtttccagacaatggtgactgctgtcttcatcgatgttttcttattgctcttaattatattgcggttccatttttgttattggaaaaatgtgatcttactgacaacttccagatgttggcaaactttcttcagcattcacctgatttggagaagctcactttgggccgttgcaagttctcaaaagatcccaagaaaaagaaaggaaaagccagattgagcaaggggtgtctgaaccagtttaacgtccggtgcaagaacctcaagcttactgaaattatctatgaagacgacgatgcgaaaaaggtggtggaacttttgtggagcatgtcaggggacctgcccaagaattacataaaactcaccaaggttgacccggatcatccttagtccaggtcatctggcacttggtcacacagtggcttctatgaactttgcttgcatgcctcccctgtgtttagacgtccttagttgaactgctgggcgtgttcttttggactcatttctagataatttagttctacgagctatggtacttgttttgtgtggtctgcagctcgagactctagtccttatggtgtaagcttgcatgcttcaaagggaacagaaaattgcatgtttgcttcgtttccttgtatatccggtttcaagtttggtggatgcaggctgtttcgaaatgaatcttcgagttcatttcgtatttttgttgagcttgcatgcgttcactaatctacaaagctaattcccc

SEQ ID NO: 77990 - DNA, 201 bp, Zea mays
  Clone ID: MRT4577_171149C.1
aactgtttcggtttttctaattgaaataggattacaataaccaattaacttcatcatcattcacatttcctctcacttctatcattccttttcaatccatgtactacacctttaataaaatttgatcactcaaatcctacactaatcttctataaaggatctaaacatctcaaattgaaaattgttaactttatatcctat

SEQ ID NO: 77991 - DNA, 698 bp, Zea mays
  unsure (1)..(698): unsure at all n locations
  Clone ID: MRT4577_17114C.1
cggacgcgtgggttttggagttcaagcccgcacgaaatggagaacagtgccttgcaatccggacacagtatgtcctcaatcagcactgctgcacaacctaatgatcagcatgcttctggaagtagcagctccccaaatgaatttgtaaatcaagcaggaaataatatattatgacagagagtctctcacgtataggccaactcctgaaattggtcacacacatggccagatgtaaactatttgttcttatggctcccgaattccaaccctatagggtcttctactatggcaccagactagacagcagtggattggaaaacgaagacataattctcagggtcaacaaagtcaaggaccaaaaataagttgtaatgctacatacgaaagcctgctcgggagctcgaaaccattcccacaaccgatccctcttggtgaaatggtggattttctcgtggtcagctgggagcaggaaggcttgtacggttagagctggttattggaaggtgccgttggttagagctggttattggaaggtgccgtttgtaatcacgttattattcgctgaaatgtacgcagcttgagtaggctgcagaagtctgtgtcgtgttgaatgtggattgcaannnanacaggaacaggatgacaccccttttaagcaaatgtataaaatattcgttgttttttttcggacgcgtggg

SEQ ID NO: 77992 - DNA, 374 bp, Zea mays
  Clone ID: MRT4577_171150C.1
gcgagttcattgcgaccacactctgcatttaccttctttgctttacattctctattaagcaccattcgcgtctttaatacatctgtgattaatgaccagattcaccaacctcacacttatcaccaccttcattctatcatctatatctacatctaggtcgaaattgctatccttaaactcttctttacacaaaacataatcttcatctatcaatctatattcaactttgctctgatctgctccttcactataccttgttatgctgtacaataatctacactaatagaatcaaaacctctatcatccaaggattaacagatatgttacatacctctattaactgactcgactgtcttttacattaacactttctg

SEQ ID NO: 77993 - DNA, 608 bp, Zea mays
  unsure (1)..(608): unsure at all n locations
  Clone ID: MRT4577_171151C.1
ggtaccctcgnagtccggccgggggaaaagtggaaaacggtaaattccttgcccccttttcccttccccatgcgtcgaaaccctagccccgcctcgccgccggcacgccggatcggtcggcgccatgtacaaggccagggtctacgccgacgtcaacgtgctgcgccccaaggagtactgggattacgaggcgctcaccgttcaatgggggtgagtgctatctcgcgcgctctcctctcgcgtcctccgcccctcctgcgcataaccctacctcaagcttcggtttcgcagtgctacgagcgtgcctgtatgacgaatcgtttgatcggctcgtaaggctgggctcggtacagtgttcaggcggaactcctgtaacttagcttggattggtagtgtcgtttgggttgtacacatgctattcaggtggagttccaacatgtgatagtccccatgcttagctcgactgggtattgccgtttgtttggtgcatctgttctatagttttgttggcaactgtttggccatgagctagctagttaggctgctctcctgatgatataataagtgctcattattattcctgcaaaaaaaaaaaaaaaaaagcggcc

SEQ ID NO: 77994 - DNA, 139 bp, Zea mays
  unsure (1)..(139): unsure at all n locations
  Clone ID: MRT4577_171152C.1
taanccaacgcttgatgaaggcctagatatataaaatgggttctctgagtataaaaacctaaatatcctacacatgaaaatatataactaaatgagaccggtagatttctcacaaaaaccatccaagctcacatgaaac

SEQ ID NO: 77995 - DNA, 228 bp, Zea mays
  Clone ID: MRT4577_171153C.1
gaagccatgaggcagggtcaaacagcctactcaaaaagacagttcccaattatgatacagtttatagaggagccacacgaaaccatacagggatggactagagctagagcttgaacgatcaaaacgcttactgataagaacactaacttaaaaggcaaaagattatttccttctgccctgtgaaatacatgcagaaacccccccagatgtacttgcttccgcaaaaca

SEQ ID NO: 77996 - DNA, 1634 bp, Zea mays
  Clone ID: MRT4577_171154C.1
ccggccggggtgaatttctaccattctctccccccgaattgatgctgccatctgccattgccattgtgtgagggagacgacgtgaaaggagaccaagggccacgagatggctctgcgcggcaacctgcccgtgctgctcctgttgttcgccgcggcggccaccgcgagcggtaagtcggcgagcctcgaccttttcccagcagcaccgggagcatcagtagccgcgcgggcgaggggcgaccggcgccggcacgcgtacatctccgcccagctcccgtcgcgccggggcggaaggcagagggttgccgcggaagtggcgtcgtcgtccgcggtctccttgcctatgtcgtcgggggcctacgccggcacagggcagtactttgtgaaggtcctcgtgggaacgcccgcgcaggagttcacgctggtagcggacaccggcagcgagctcacctgggtcaagtgcaccggtggcgcctccccgccgggtctcgtgttccggccagaggcctccaaatcgtgggcgcccgtcccgtgctcgtccgacacgtgcaagttggacgtgcccttaccctcccaactgctcctcgtcggccagcccatgctcctacgattaccggtacaaggaaggatcggctggggcgcccggcgtcgccgcgaccgactcggcgaccatcgcgctgcccggcggcaagttccccccgttccaagacgtggtcctgggttgctcaccgcgacctgatgggccgaagttcaagtcactggcgggcgtgctgagcctgggcaagccccagatgccactggcgtccagcgacgcggtgcgcgtggatggtggcttgtcgtacatcgtcttccagcagggcgcgccgcgcagcgcctccggcatcggcaacttcatgcaggggcaggtgccccggaccccggcgacgcagacgaagctgttcctggaccccgcgatgcccttctacggcgtgaaggtcgacgccgtccacgtggccggccaggccctcgacatccccgccgaggtgtgggaccccaagagcggcggcgtgatcctcgactccggcacgaccctcacggtcctcgccaccccggcgtacaaggccgtggtcgccgcgctgaccaagctcctggccggggtccccaaagtggacttccccccgttcgagcactgctacaactggacggcaccgcgaccgggagcgccggagatcccaaagctggcggtgcagttcaccgggtgcgcgcggctggagccaccggcgaagagctacgtgatcgacgtgaaaccgggcgtgaagtgcatcggcttgcaggagggcgagtggcccggcgtgtcggtcatcggcaacatcatgcagcaagagcacctctgggaattcgacctcaagaacatggaggtcaggttcatgcagtcgacctgcacccggtgatcgtaaagctgacctcgatggttttgttcagagcattcgaagggaaatgttttttctgaacataaaaaaatagaaaacgaaaatgatgctctgcataaatcaactttcacgagataaaaataaaaatattctgccgcgatttgctatccttgcatcgaacctagtacagtacgcgcttaccgcaatgtatcggtgtcactcatc

SEQ ID NO: 77997 - DNA, 646 bp, Zea mays
  unsure (1)..(646): unsure at all n locations
  Clone ID: MRT4577_171155C.1
cctcgaggccggccgggagcaccaattagcacctctcagccaaagcaaagtgctacgtcctttgaacagtcactgaaaattcctcgtctcatcatcaagaccagtatagcaacatgcgggctaatctcaagtgagatcctgttctagacctcctcgtctctgatgctgccatggatgtgaccaccagagccgacaacatctgactgcactgcctccagaactgcaatcaaagaagccatggagatacagcctcgcaactaccgggctctacgcctacctgaacatcatgcttctcacaaacttcagaaacgaacacaccccagatctcaacctcgacgcacactgcgagcccatctccggcagctgcaccgtccatagcacatacatccatatctggcagtcgctgggcatcatagcgctcctctccatcgtcgcagccagcgggagataccatctctcctccaccgtactacgccgacaaagaggacgactagcctgctgccacaacttcctgggaagaagaggttcatcccgatatctcggnggcggcgtgatctaatggatctacttctacatcgagaacagacagtcgtggcactactacaacctgctgaacgctttcaattgcaacggaagcgtgctgttg

SEQ ID NO: 77998 - DNA, 357 bp, Zea mays
  Clone ID: MRT4577_171156C.1
gagcaaaacgggcatacaccactaggtacataggcaacaaaattccaaccaacacaagcacaagggggggggggcggaaaaaaaaataacaaacacccttcctagttctgaaggccagcctttggcaaaatcaagcctcacattggacagccaaataatttttgccccctacccaaaggtttttttttcacaaatacctcatcacaggaccaaccacggggaagggggcagaccaaaaaaatccccacagggggggccggtaactgggtcccgccgcccgggggaacaaccttccctgggcccccccccctcttccttgggggggttggccccaacggagaaaaacccggggatgac

SEQ ID NO: 77999 - DNA, 369 bp, Zea mays
  Clone ID: MRT4577_171157C.1
gaagaagcaagcgcctgcttttccgtcgacgaagaaatgtgctccctttgcttcggcgcaaagccggcgatgtcgcctcgacggcccaggtcagctgcgaatgatagccacggaaggccagcagcagcatgggtgtgagcgacgggagacggggagagacaagaaaaaaaaagtgacagcgctgcaggcggcggtggcatcgatccgacgtgccacgagcggagcgggtaatgccagcgctacaccgcgctgacgtggccgcccggcccccgagagtgaggttgggttgggccctatatgccggcccctctcgctggagctgggcctccgaggccaaccgttgaggagaagccaatcgccagaagcggc

SEQ ID NO: 78000 - DNA, 710 bp, Zea mays
  Clone ID: MRT4577_171158C.1
ggccgggccgggagtgtaacacatacacaaggactggcgcagtctactaatggattctgagtgtgaccgccctagagacgacgagctactaaaggtacaagcctacatatggcggctcagcctctcctacctcacgatcctgtcagtgaggtgagtggtgaaggttgacatccctacgacgatctaccgccatggcgggtatgcctcaggcgctgagctgcccacggcgctgtctctcccctccaataagatgacgttcctccgccgtctgctgcggatcctctccgcgtcgggcgtgagtcaccgtgcgacaagtaaagctcgtaggaggagcggaagcgtatcagccccgcgtgctacctcctggtgaacggcatccctcgcaaggaccacatgaaccacaccgatctggagctcacctgtaacacgacacgctacatcgaggcagctatagggctgtggcacttgctcaagagggacgtgcccacgacaccgaatcgaggagctgacacgagactactctgatccaagagagtatgtcgagcctctacgtacatttccacgacatgtcgagggaggacttagacgcccacgacaacttctgcatcgagatacctatgcgggacttcaagaacttgttcgagggcatccagaccatgacctactgctggaggaacttatgagatgacaaggatgccagggccattgtc

SEQ ID NO: 78001 - DNA, 343 bp, Zea mays
  Clone ID: MRT4577_171159C.1
cgcgggcacgcgttctgtatggtatctcagcacatacacacacaaactaaagaaggagaggggtgccccatagggatgttgttcctacagaatgggcgaggtctcagtgacggctacgccatctgtagatggcagtgagagcttttcatgggagtatggcatgggcggacgcgtaggtgttgcttattacatggcgtagtgctcagatttattgctatcacggtggggatgatttgagacaacactgggagagtgaggcacatgttgctgggaggaaatgacatagcagtttggtcatccagataagcagctatgtctaattacatgtggagatgataagaca

SEQ ID NO: 78002 - DNA, 201 bp, Zea mays
  Clone ID: MRT4577_17115C.1
aacataaaaaagcatccattaaggaaaggacacccgtggcttagcaaaggctgcaatttatcaacatcacaaattcccctttataggtcaactggagggggactatgaccatggtttggtaaccatggaaaaaccaattttttattaccttttaaaaggaagggaaggttggggaacatccatttttccattgtaaagggc

SEQ ID NO: 78003 - DNA, 215 bp, Zea mays
  Clone ID: MRT4577_171160C.1
tttttatttttttctttttttttttttttttttttggggggggttttttcaaacaattttgggttaccaagcaggcaacaaaaaccctggttaaacttcccttgactcggcaaaaaagcgggggcacccccaagcggaccccgtgggggccccaccctaatccaaagggtgaacggacactaccccggggccagaagccaacgggcacccgatcc

SEQ ID NO: 78004 - DNA, 391 bp, Zea mays
  Clone ID: MRT4577_171161C.1
attattttcttttttttttgtcttccttctttatgtttttttattttggccgttttttttttttttttttttctcacccaacccggaaatgtaccgatcaagctttgctgctttggaaaccctaaggcttgcctattatacccaaaccttttaagaaaacaagcttcagggggggaaccacttgtaacttagtaaaggttaaaaagggactatgaaactgcttgcaaaaaattagctttgatgggggcaaaacctttctttttaaggaaggttgcactgcactgggccctgattttttaagcttgggtgattgccttcaggccatgttaaagttttccccaacacctttttaatggtgtcgagctgacttgttggttcacaggcggtttaa

SEQ ID NO: 78005 - DNA, 582 bp, Zea mays
  Clone ID: MRT4577_171162C.1
taattgttattatgtatgaaagcacctttatttgtaaaattgttttatgtgccaggcttggtgccagctgttggtttcctgcttaccctggctagcggaggctcatcctggaaagtctcttgaccagaggactggtcaagagagggtccttaccttctcatgcattcattcattcattcggtgaatgtttactgtgaaacaggccctgggggtatggctctgagcaatgtggaagacatcctttacttttcctcctcagagctgagtccagcagggctggtttcatgggtgtctgacccatgcagttgcacagggcttgtggtctcagaagggcttcaaacttggtttgatgctctgccgttaccatcttgaaatttgtaataattttatctttgaatctgggctttgtcggtgacgtcggatagggcagtgcagcatctgcgtgagtaaaggacgcacgcacaatgcccgcagcacctgccgttctccatttgcatgtgtattcacgatgtcccatgaacctagaattcccgcagcgccctgtgggagctcagtgagacataaagcagcacaaggtaggtg

SEQ ID NO: 78006 - DNA, 477 bp, Zea mays
  Clone ID: MRT4577_171163C.1
caaactattccctatccaaccatgccatcccttaagcatggttcatgttccagaaaaatcccaaaatactctcgtcccatattctgcctataactctcctgttcatattaagtcagacgattcattcgtcactattctcaccaacagtgaacttcgctgtgctacaccacatacacccagctataaatacacccagctaccctctccctctccacacacacgcaacaccctcagccaaggcaaacaccccactcactcagttactccgctctgccagctacacgcatagtgtcgcttcgtctccagtccaccctcctgttatcggagcgttcgtaccgtctcgtggaggccagatctacaagcctacgccaggagccagaagccagttccgcgagctctctttccccttcgccggataagcacggcaagctcactggatccctttgatgcataaattacctatgatttttcaaccac

SEQ ID NO: 78007 - DNA, 586 bp, Zea mays
  Clone ID: MRT4577_171164C.1
attgggtacctcgaggccggccgagaattccgttctcgtcatcagcagcttctgcttgctctgggggggaaggagagagacacagcgagagagagatctaataaagaggctagttatgcggtcctcgaacgaagatgttgccgtagttcagcggacaggtgcctgtagtgtctggcggagctggtggcggctggtagtcggacgccggctcccaagactaaggcgtcacagttgtggtggcgcttcctggccgcgtccgatccggacgtgtccgtgcagctctatgaccactgacacctcgcctactctcacaccaaccaagcgctcctccgactcatgacgttcatgccctcggacgaatggttctgcctgatcgactctgtgctgaacaacctagcctcgtgctggtgcaacagcacgatctgtcaagctagggcgcctgcgacgtgctcctcatcatcaaggactacaataatgtgcatgaccgagcgccctacccgggcagattcatgctcacccagctcagctgatgctactgcttattcctcttacgacagcataccagctctctgttatcatcatctga

SEQ ID NO: 78008 - DNA, 802 bp, Zea mays
  Clone ID: MRT4577_171165C.1
agcgttagaatgaagcacacttcgaaacctatgcttccaattaaatatgaatatgaagcgtcccgaatcctctgggactcaaatgtgatacaattactagtcccaggaggctagtaaacacatttatacatcagatgataccaaatctgcttaaacgagacaaacctacaaaggtggcgaacaactttaagagttggtccacaactcgggacatatcatcagagtggggctgaagcagcccgatatacgcagcgaagcaattcagcggtccaacagccacaggcaaggttgggaacagtcgtaactcttacccgatctcctttttcgtgcttattcggcgaagggggaaggggagctcgcggaactggcttctggctccaccgccttgcgtagacttgcagatctggcctccacgagatgacacgaacgcttcgataacaggagggtggactggagacgaagcgacactatgcgtgtagccggcagagcggagtaactgagtgagtggggtgtttgccttggctgagggtgttgcgtgtgtgtgtggagagggagagggtagctgggtgtatgtggtgtagcacaccgaagttcactgttggtgagaataatgacgaaagaatcgtctgacttagtatgaacaggagagttataggcagaatatgggacaagagtactttgggagttttctggaatatgaaccatgcttaagggatggcatggttggatagggaataattcgataagaatttagaaacaagaattattggaatcggagtttggaagcctggttcgaaggaat

SEQ ID NO: 78009 - DNA, 792 bp, Zea mays
  unsure (1)..(792): unsure at all n locations
  Clone ID: MRT4577_171166C.1
ganctgtagcatacatgtgtctatgcttttgatcatgttcattctgcatttgttgcttatgtggtgctcaagttgtacaaacattccctggacctcacaagtccgtgtgtgaagcgtccncaatcctctgggactcaaatgtgatacaattactagtcncaggaggctagtaaacacatttatacatcagatgattccagatctgcttgaacgagacaaacctataaaggtggcgaacaactttaagagttggtccacaactcgggacatatcatcagagtggggctgaagcagcccgatatacgcagtgaagcaattcagcggtccaacagccacaggcaaggttgggaacagtcgtaactcttacccgatctcctttttcgtgcttattcggtgaagggggaaggggagctcgcggaactggcttctggctccaccgcctagcgtagacttgcggatctggcctccacgagacggcacgaacgctccgataacaggagggtggactggaggcgaagcgacactatgtgtgtagccggcagagcagagtaactgagtgggtggggtgtttgccttggctgagggtgttgagtgtgtgtggagagggagagggtagctgggtgtatttatagctgggtgtatgtggtgtagcacagtgaagttcactgttggtgagaatagtgacgaatgaatcgtctgacttagtatgaacaggagagttataggcagaatataggacaagagtattttgggagtttttctagaatatgaaccatgcttaagagatgacat

SEQ ID NO: 78010 - DNA, 1701 bp, Zea mays
  Clone ID: MRT4577_171167C.1
agtactgaaaccaccccggcgagctacagggactcaaccggctgaaaacttgctactgtacatctcttgcacaactcacgtggtaagcaccgggttggtagtcgagcgagtagaagaaggacatgcttatccagtacaacatcccgtctacttcatcagtgaagttctaggcccctcgaagaaaaagtatcctcaagttcagaagctattatacgcagtacttctaactgcccgcaagttgcgtcactactttgacgaccacaaagtcatagtagtaactggttttccaataggggatattcttcacaacaaggaagccattggccgaatagccaagtgggcttgcgagctgggatctcatgacatcgagttccgacctcgcactgccatcaaaactcaagcattggttgatttcgtatcagagtggactgaacagcaagtaccagataacccagtgaagcgccccaatcctctgggactcaaatgtgatacaattactagtcccaggaggctagtaaacacatttatacaacagatgatttcagatctgcttaaacaagacaaacctataaaggtggcgatcaactttaagagttggtccacaactcgggacatatcatcagagtggggctgaagcagcccgatatacgcagcgaagcaaatcagcggtccaacagccacaggcaaggttgggaacagtcgtaactcttactcgatctcctttttcgtgcttatccggcgaaggggaaagagagctcgcggaactggcttctggctcctggcgtagacttgtagatctggcctccacgagacggtacgaacgctccgataacaggagggtggactagaggcgaagcgacactatgcgtgtagccggcagagcagagtaactgagtgggtgggatgtttgccttggctgagggtgttgcgtgtgtgtggagagggagagggtagctgggtgtatttatagctgggtgtatgtggtgtagcatagagaagttcactgttggtgagaatagtgacgaatgaatcgtctgacttaatatgaacaggagagttataggcagaatatgggacgagagtattttgggatttttctggaacatgaaccatgcttaagggatgacatggttggatagggaataattcgataagaatttagaaacaagaattattggaatctcaagtcaagcgtgctcaacttggagaaacctaggatgggtgaccagctaggaagttccctactggaatgaaaatcacagtcaccggagtttgtataactggaatatgggtctggctggtcttaggtggactggacagcatgatggatgagtagttgaaatttggggtaatcggatgattgatgaatagtaacggtgaatagtaatggtaaaaagtaacggtaaatagtaacggtaaaaagtaacggtaaaaagtaacggtaaatagtaacggtaaaaagtaacggtaaacggtaaaaagtaacggtaaaaagtaacggtaaaaagtaatggtaaacggtaaaaagtaacggtaaacggtaaaaagtaacggtaaaaagtaacgataaaaagtaacagtaaaaagtaacggtaaacggtaaaaagtaacgataaaaagtaatggtaaacggtaaaaagtaacagtaaatagtgacggtaaatagtgatggtaaatagtgacgatgaacgaatgatgaac

SEQ ID NO: 78011 - DNA, 406 bp, Zea mays
  Clone ID: MRT4577_171168C.1
aatgtctgctgctggtaggactgttgagactgtgctgtacttggctggtttgggcaatgtcaaaacaaaggtgtgattcttgagtcccagctatcactatcagtcctttttcaaaattgtgatttcctttctattttttcttctgcagattatcggatcaaggaacccacttaatgtgattaaagctctcttcatagctttgaatgctgtatgtgcccatttcttgctcaaaatctgcccaattcaatctcctcatccttgatatttatttgtttatagatcatcttctctaatttatcaatcattttgcttccagattgaaactcctaaggatgtccaacagaagtttgggcgtactgtcgtcgagtcatatttattgtgatcatcatggttgtttggaggacac

SEQ ID NO: 78012 - DNA, 265 bp, Zea mays
  Clone ID: MRT4577_171169C.1
ggaacattgtgccaataatcatttaatatatgccaaatcttacacgtctactctaaactgctctaatgaagtttcagtgaccttgagggctaaagattgttcttctgggtaagagctcttgggctggtttttcagagcagagttcttgttgtgggtagactgtgactaggttcacagcctttgtggaacattccgtataacggcattgtggaagcaatactagttcctatgaaagaaccagagctgggaagatggctgggaagcc

SEQ ID NO: 78013 - DNA, 1131 bp, Zea mays
  unsure (1)..(1131): unsure at all n locations
  Clone ID: MRT4577_17116C.1
gccgcaatgattcctgctcgtctcccactcgccctccggacgcgtgggcggacgcgtgggcagagcagctgcagggaggccgccattatcgcagcacgccgccgcgtcatctaatcgaggcgagggggagacagagaggaggaggaaaaaacgggaaataaatcttcatcaagcaacaggtagcgggagcggacgcggggtgaaccactagctggccagtgccggccgaggctagggttccggggatcgcgggcgcgggctcgggctcgactttcgtagcctagccgccgccgccggccgcgcgggggaaccggatgctatgctgctgagctgcgggtcgctctcctcctgggtgcgccgcttcgtcgcctgcgttggaggttgttttggttgtgcccagcctactccaataatagctgttgacaagcctacaaaaggtttaagaattcaaggacgctcagtaaaaaggcgcaacgtatcagacgacttttggagctcgagcccacacgaaatggagaatagtgccttgcaatcccggcacagtatgtcctcaatcagcacagcagcacagcctaatgatcagcatgtttctggaactagcagctccccaaatgagtttgtaaatcaaggtcttctactatggcaccagactagacagcagtggattggaaaccgaaggcttaattctcagggtcaacaaagtcaagaaccaaaaataagttgtaatgctacatacgaaagcctgctcggaagctcgaagccgttcccacaaccgacccctcttggtgaaatggtggattttctcgtggtcagctgggagcaggaaggcttgtacggttagagctggttattggaaggtgccgttggttagagctggttattggaaggtgccgtttgtaatcacgttattattcgctgaaatgtacgcagcttgagtaggctgcagaagtctgtgtcgtgttgaatgtggattgcctcggagacaggaacaggatgacaccccttttaagcaaatgtataaaatattcgttgtttttattactagtataattgtttgtgttcacatcattcagtttcgnagttgaatgttcggcacgtgccaagaaaaatgcatcaagttcgttttcggaa

SEQ ID NO: 78014 - DNA, 1183 bp, Zea mays
  Clone ID: MRT4577_171170C.1
ccttgtggtcgccggacttgtcgccgtgctcgccggtgatcttgtccttgatcttctccacgatgccttccttatgctccccgccgtccttcttgtggtgctccccctcctccttcttgtggtgctcctcggccttcttaacccttgggtttgaaccgtacgagttcagattgagtgactgcccatacagtctcgagtggttgtacttgtcatgagtacaggtagtgaaggatgacaaaccggtccttatatgaggggacaatccttctgctcacacctaaaccagctgagccatcaccttaggccctcccctaaaccagggagtctctgatcatccctactcaaaggtgataagggtgaaacccttcatcatacacattttgaaaagcattttcttttgaaaactcacaccttttctcaaatcatttgtaacaaatatatcaaggattgattgcggcaagcggctgggtggccataataacttgtctcaaaatcatatcatgcataaaataacaggctgagggttgtggttgaaaaatcataggtaatttatgcatcaaagggatccagcgagcttgccgtgcttattcggcgaagggggaaggggagctcgcggaactggcttctggctccaccgcctagcgtagacttgcggatctggcctccacgagacgacacgaacgctccgataacaggagggtggactggaggcgaagcgacactatgcgtgtagccggcagagcggagtaactgagtgggtggggtgtttgctttggctgagggtgttgagtgtgtgtggagagggagagggtagctaggtgtatttatagctgggtgtatgtggtgtagcacagtgaagttcactgttggtgagaatagtgacgaatgaatcgtctgacttaatatgaacaggagagttataggcagaatatgggacgagagtattttgggatttttctggaacatgaaccatgcttaagggatggcatggttggatagggaatagtttgataagaatttagaaacgagaattattggaatctgagtttggaagcctggttcgaaggaatctcaagttaagcgtgctcaacttggagaaacctaggaggggtgaccagaccggaagttccctactggaatgaaaatcacagtcaccggagtttgtataactggaatatgggtc

SEQ ID NO: 78015 - DNA, 307 bp, Zea mays
  Clone ID: MRT4577_171171C.1
actgacgcgagtatcgacgacatgttcttagatatcgttgtggaccacttcgaggagggcgctaacaactacgagggacttgacaaacatcctccccgagaatgactgcctatacgctatctatgattgcgactttgtcactgcagaagatgaccataacagcatgatcttgtatatcctatggtccccattcttcgccaatgttaagagcaagaatctttattcaagctcaaaccaataattccagaatgtgctcaaatggcattcatgtagaacttcatgctactgatgcatgtgaaatcagtct

SEQ ID NO: 78016 - DNA, 287 bp, Zea mays
  Clone ID: MRT4577_171172C.1
tagaataatgctcacctcatatgtagagaagttttatctcttccctatattgggagccttgaggagctgttgaagggtaatttccctctaaagccccttacgtggctacgtatggtggggtgagagatggagtggatcgttggagacagtctgagtagacccaaattcagaggggttgagatagttggatctatgaaagagataaactgaggcaagcgtttttttccgcaaacgtgaggcaagctttccccgcaaatgcagagaggctggttttgctgggaagctgg

SEQ ID NO: 78017 - DNA, 1059 bp, Zea mays
  Clone ID: MRT4577_171173C.1
ttttttttttttttttttttttttttttttttttgatagacgacaaaaatgctgcattcatggtccatgacaatactttacaactaatggtggacggaagtagatcaaagcagagtacaaaaacaatacaaaaaaatatatatggcttgtacacgatcgaccaagatcagttcgtcatcgccatgcgtatgcgtgttactgccaacttccacttcttcagcatccaaccatgaaccaccgcctgctcgtcttgctgcgctccgccttcctcttctccttctggcacgcgcattttgtttcttgcagtttcttcaccttggtgggcgcgttaggcttgctgctggtgctgcggtggagctggcgcgcgccccgctgcaggatctccacggcgctccagctcccgccggccgccgccgccgcgggcttgctcttgctctcgttgccgccgccgccgccgccgaacgccgcagcaggggccgggtccaccaccgccaccggcgcgaggtcggaccacgtggcggggtcctcgaccggcggcaccgacgaggaggtccccagcaccagctggtgggcggcgtggccggcggccttgccgccgacgtccaggtccagctcgctgctgagctgcctgatgcgggactccagcaggttgaggcggtccatgaggtcgctccgcacctgcacgtgttgcagcgccgccggcagggacttggtgtgctggtgctgcgccgccggcgcgcggcgggccggggccggggccgggtcggcgtgcgacgggcggcgctgctgctgctcctccagctgccgcagccgtagatcgatctgatcgaggcggccgagcagctggctctctgccggcggcggcgggggcgggggctgcgggggaaggccgtacccgtagccgctgatgaggacacggcgctcggagcccaccagcacgtccgccatgacggacggacggctcgcagtcgcacgcgatcgatcgagttggtttatgtgacggttgacgatgacgccgccaagggaacgaatgggcggacgcgtgggcggacgcgtggg

SEQ ID NO: 78018 - DNA, 113 bp, Zea mays
  unsure (1)..(113): unsure at all n locations
  Clone ID: MRT4577_171174C.1
ctggccgggttattgctgatgataagcttggcatagggaagcaggaaccatatacgcaatgaagaggccgtgcgaggtgttgtgtgagaggctgncgcagtggactgtggaac

SEQ ID NO: 78019 - DNA, 694 bp, Zea mays
  unsure (1)..(694): unsure at all n locations
  Clone ID: MRT4577_171175C.1
ctnnnnnnncgtcaagatacatgtcttgagannnnnnacattcannnnnntagacacactctaagacacaacttaagatacccactgtacatgccctcacactgctaacactatacattaattactagctagcgacgacgaaggcgatagctgttgtcgtcttagcaagaacgaaatccagaacaatacaatactgctggtacacagtattactagctaacgactgaccnnnnnnnnnnnnnnnnnnnnnnnnnnnnnnnnccatttccgccttgcgctgatgcatgtccctgaccactttcacctctcccaatgtctcccctgacacctcttcaggtaggagggcggtagggatgaccccgaggacgtggcggccgccttcgtagacggccttggacaccaggcccannnnnnnnnnnnnnnnnnnnnnnnncaccaggttcatctgcctctcgaccagctgcttccccaggtcgagcgccgcagcgctgaaggacggccggttccccggcctgctgccgcagaagacgcagatcgttctcaccgagccaccaccgtcgccgccgctgctctccggagcaaacttctcttgattctcctccatacccnnnnnnnnnnnnnnnnnnnnnnnnnnnnnnnnnnnnnnnnnacccaccctgctannnnnnnnnnnnnnnnnnnnnnnnnnncctgt

SEQ ID NO: 78020 - DNA, 691 bp, Zea mays
  Clone ID: MRT4577_171176C.1
gccggccgggccggggtaatcacctcactgacaattgagagatgtacctttatctactacaagagagagaaaaaacctgatctcatactcatgagtggcggtgctcgaatgctctcgtctgtctgtgtgtctcgcctgggaaaaaggacctcgacatagtacaagtaagggcatgctcatggcagtgaacgacgtggagaaatataccgccacatcatgatctgcaagctctggtgcagatgacatgtccgatggataagcaacaatcatggcaccagctgacagcgcctatgctggcgccgtcttcttatggaacattgatttcccatcagattacgccttcatacctctacacgtactctttcgagacaaaggtcattccattctaatatccacacccaatgccaagtatatgcacttgacattcatcaaacgagcacagctacacctgaatctgacaatttcgtaagtactgcgtatccatctgctccctgctgagcgactgaaacatgaacgaccctctagtgccagagactactgatatgcacaataccaaccgttcgaagaacaatgctaccagccgctcatggacgcgagaacacagcgatgggatgacgaaagcttcctgttcgtctgccagccattgtgcacttgcatttgcagatggtccaatgtatccctgatccatcta

SEQ ID NO: 78021 - DNA, 444 bp, Zea mays
  Clone ID: MRT4577_171177C.1
cccaggcgtacgacgacgcgtgggcgggtggtgacccttggaaccgcccacccgagctgcttctgggcgcaacggataacggggcgggtgtggacctgcggagttctttttgtttcccggccggggagctcgttgggagggggggggtgccaggacgaacaaaggtggaacctctactttaaactttttaagttggtggggctccccaacagaactatctgggaaaaagtcaaaactgcctgatgctccaaaatttaagccctaagaagccgtgctgagagcgactaaaaaagacgtttaaggattttccacattcagcattggagttgaatggagacactaattcgcaattggatccagcagaatcggtttaacagcggctttctgccattatgtaaggggacttacttttaacaacccaaaaccttttttgcattgccggaa

SEQ ID NO: 78022 - DNA, 437 bp, Zea mays
  Clone ID: MRT4577_171178C.1
ggattccgggtcgcccagcgtccgaaaaaaaacaaactacaaaagaaaaaattaaaaaataaagaaaagagaatacaaaaatggaaacgggcccagacctccactggggtgaaacccttgcatactgagcaggctgcagcagggcatgtcaaaacgggctccgatttagaccgcattgtccgttgcattgccacactctttgcacgacatctactggatctggatacatcttattctacctccaccagaaggatcactccaaattcaaaagaaagggttaagaccatctctatgaccccaccttgaatatgaccgaatcactatgtgggttcgaactggtccttacacattgggacaacaggcaactcctcatcaaatcacaccgtggtgaagttgctaaacctgaccaatccaaggcgattaatgatgaagggatg

SEQ ID NO: 78023 - DNA, 1596 bp, Zea mays
  Clone ID: MRT4577_171179C.1
cggtttcggaattcccgggtcgaccgacgcgtccgcggacgcgtgggcggacgcgtgggcgggacactcctgatagtttcaaatttttcacaggttctccatgggtcattttaaacagacgctttgttgagtattgtatttttggctgggagaatctccctagaacactcctcatgtacttcacaaacgtgatgctacctctagaggggtatttccattcggttgcatgcaactcggacttccgcaatttcacagtgaacaacgacttgcggtatatgatttgggacaatccacctcagatggagccccatttcctaaatgttacacattatgatgagctagtagggagtggggttccttttgcccggaagtttacagagaatgcgcccttgttggacaagattgatgatcaagtgctttggcctgtgcctttgttcatagatctgatggaattgttggtgcttccatacaaaattgcgaaaatgaagagcgggggaatgttattgattggttggtaacggtggtaacaacgcagagtacgcggttgttatggacatatggttaattcaatgcttactgttcctaaccccagcattggaaatatggtgtagttttaaattttaacttagagaaaaaaaggcattagaaattaatgaacactgattaataatatttttcctagtttacttatgtaacagagaacctaggaaaaatacagagaccattaatttggaccagttttaaattaaaatgatttgtttagccttatatggactgaaaatcaattattagagttacaaaactataaccaaaatggttaataaaaatctagtggacttataaccaccagagccccactacaaaaatacagagcacctcagcccaactttttaagtaaggaaaataaatacaaagtgataataaggcattttccaaataaatcatgaacaacccctaataatgtgataatgggcaaccaaaaatttgctaagtccatgatgagataaaccaccagagaaaaatgcaaacccatgaagaagaagtaaactcataccttttgctaatgattaaagagaaagaccacttaattcaaataatgcaaaccaccccttcccttaagcaaaaagaagccaaacttcagaatgattgctcttgcacaaaatactaactaagaaaaataagaactctgttgtttgatatttttcaaatatagtggtagtagaaagcacccatttggctagaaacttgagaaaaccatagaaaaataattaaaaggtattaatgattagaaatttgtatcaagtcatgttataacacctaaaagccagcaaaaatgagttttaaagaattacccacagttaaataatagttgtagttcaaagcaccccttctgccctaaaatttggtaattttgtccagagaaaaccattcacctcctgacccccaaattttgaggcagagaatcatacaccagtaacaagccactgtaatttttgcagaatttttggaattttagaaaagcaacttgtagttcaaacctactccaagaaaaaaaaaaaaaaaaaaaaaaaagtactctgcgttgttaccactgct

SEQ ID NO: 78024 - DNA, 412 bp, Zea mays
  unsure (1)..(412): unsure at all n locations
  Clone ID: MRT4577_17117C.1
gggtgattaaaaaagggagattggtgattgaaggggtnnnnagagagatggagttanntgaggaaatgggaaagaaatagtttttgtaanaaataantttagaaagttaatattttaatantnaaagaaattnanattagtgggggggggggttantgangaagagatttttanatnatngtttgggggaggatgttgttgaagttaaataattttgttttagaaaagaaggtttatgttgttggtgaagatggaatnttggaagagtttaagttagntggttttgaatgttttggtggtnnggaggatggaaagaaaaanataaagttggagggggatttttattttganaatgaaaaaagtgttggagttgtaattgttggaattgataagtattttaattattataaaa

SEQ ID NO: 78025 - DNA, 708 bp, Zea mays
  unsure (1)..(708): unsure at all n locations
  Clone ID: MRT4577_171180C.1
cgggttaacaagtgcatcactgaattataacaggatgcacaaactggtgttctgatttgtggcgtcctttttcctcatttcctgatactacctatataacattgcctttttatgtgatacacggtaattattgtaacttcatctgtgttatgtgctgcttccactatgtcgcacttagttcacaccctttcttatgaagtctaattttgttttttaatagatactagcatgttctagttttgcttttggcttgtgtattccgactgacacctcttaggggttcttgagtttcgtgttcatgattctctgttttctttttgtcttttgtcccttgctgcagacttgatccatgttttctcctctgttccaaggcacctcaactttattgatcacaccagtgacattggatggaaagagtctcagagagtgcagccgattatagtagatgctggagtgtatttggcagggaggaatcagttcttccaagccacagagaaacgggacactcctgatagtttcaaatttttcacaggttctccatgggtcattntaaacagacgctntgntgagtattgtatttttggctgggagaatctccctagaacactcttcatgtacttgacaaacgtgatgctacctctcgaggggtatttccattcggttgcatgcaactcggacttccgcaattcacagtgaacaacgacttgc

SEQ ID NO: 78026 - DNA, 997 bp, Zea mays
  Clone ID: MRT4577_171181C.1
agcagtggtaacaacgcagagtacgcgggaagatgatttgtttagccttatatagactgaaaatcaattattagaactgcaaaactataaccaaaggggttaataaaaatccagtgaacttataaccaccagagccccactacaaaaatacagagcaccccagcccaactctttaagtaaggaaattaaatgcaaagtgataataagacattttccaactaaatcatgaacaaccccaaataatgtgataatgggcaaccaaaaatttgctaagtccatgatgagacaatccaccagagaaaaatgcaaacccatgaagaagaagtaaactcataccttttgctagtgattagagagaaagaccacttaattcaaataatgcaaaccaccccttcccttaagcaaaaagaagccaaacttcagaatgattgctcttgcacaaaataccaactaagaaaaataagaactctgttgtttgatgtttttcaaatatagtggtagtagaaagcacccatttggctagaaacttgagaaaaccataggaaaataattaaaaggtattaatgattagaaatttgtatcaagtcatgttataacacctaaaagccagcaaaaatgagttttaaagaattacccactgttaaataatagttgtagttcaaagcaccccttctgccctggagtttaataattttgtccagagaaaactattctcttcctgatccccaaattttgagacagagaatcatacaccagtaacaagccactgtaattttttcaaaatttttagaattttataaaagcaacttgtagttcaaacctactccaaaacattaaagagaataaaagaaaagagaagaagaaataaacctcaccccaataagtctaacttgagaacttatcatttatccctaagacttaaaaggaattcagtggaaccccaaaaaaaaaaaaaaaaaaaaaaaaaaaagtactctgcgttgttaccactgcttag

SEQ ID NO: 78027 - DNA, 1468 bp, Zea mays
  Clone ID: MRT4577_171182C.1
gcgcgcgccgctcccgccgtgcgcgccttcgggaacgttcatgtcgtgggcaggcccaccgcgggcaccccaatgggctcctccggcctcgccgccacgctccgcgccgccgccgcgatgctccggctcgatgcggagtgggactggttcatcacgcttagcgccgccgactacccgcttctcacccaggacgacttgattcatgttttctcctctgttccaaggcacctcaactttatagatcacaccagtgacattggatggaaagaatctcagagagtgcaaccggttatagtagatgctggaatatacttggcagggaggaaccagttcttccaagccacagagaaacgtgacactcctgatagtttcaaatttttcacaggcatttgtcttaacttgcactttgtttttcacccggttgatgaaaaatggtttcttaacacatgcactccctttctgttaggttctccatgggtcattttaaacagacactttgttgagtattgtgtttttggttgggagaatctccctagaacactcctcatgtacttcacaaatgtgatgctacctctagagggttatttccattcggttgcatgcaactcggacttccacaatttcacagtgaacaacgacttgcggtatgtggtgtgggacgatccacctcagatggagccccatttcctaaatgttacacattatgatgagctagtagggactggggttccttttgcccggaagtttaaggaggatgaacccctgttggacatgattgatgataaagtgcttcgacgctggcgtcacaggcctgttcctggcgcatggtgcacaggcaaaaggaggtggttcagtgatccttgctcccagtggagcaacgtcaacattgtaagacccggtcctcaagctgagaagttccgaacatatataaaccagattatggaagaatcaaagtcaagcaacaactcttgcaagcaatagcggtagaatccgagcacgaggcttcacttcccgcagttgaagcgttgagcttgtctcattttgcgccgaggagctctccatgtctcgagcacttcctggcatctgcttcaggagcaagcatttttgcacctgttgtatgaactgaacacacggccaaggtgatagatggatttattctttccagaatttttttgggtgacatggcttcaagggcttagtgcacactagtgttgttggaagccaagaaagcctactgtgggaatacagaagctaatagtcattgtaattagtagcagcgagttgaatggcctgtgcctttgttcatagatctgatggaattgttggtgcttccatacaaaattgcgaaaatgaagagcgggggaatgttatcgattggttggtcacggtggtggttgttatggacatatggtcaatacaatgcatactgatcctcccccctggacatgcagttattttcataatcccc

SEQ ID NO: 78028 - DNA, 187 bp, Zea mays
  Clone ID: MRT4577_171183C.1
cggactggtatctaactggacttggttctcttgcaacaacacaacgagagcatgttgctttacacgctttccgccgtcttagtgtgcagatgcaaaatgcaatacttcaaccaagtccagagcatttcccgaagtatcaagagcaaccaccagtgctgccagactgcgtcaccccaaatttcgctga

SEQ ID NO: 78029 - DNA, 304 bp, Zea mays
  Clone ID: MRT4577_171184C.1
tgctattcttggagtgacttttgaagaattcctctttttaccttcctttggggctagcggtggtacgcgttctgcctgctcgcgccggcggcacccgccagggcggtgcacggggggcgccgcctccgtcctcctcctccagtcaaatggccaaccttggtggttatccggtgtctatgggcttcgggacattgatgacaagattccattcctccaaaagcaactgctatggtaaaaaaggtttcattttgagtctttttggccaaaattggagggattccaggaagcgggcgcggcgggtggt

SEQ ID NO: 78030 - DNA, 113 bp, Zea mays
  Clone ID: MRT4577_171185C.1
ttcaattatccactcaattaagggataacacataaaacaacatcggacctaaagccaaaaaaatgccataaacctgaaaaagacgtattgctccattttcctcataggactgc

SEQ ID NO: 78031 - DNA, 591 bp, Zea mays
  Clone ID: MRT4577_171186C.1
attgactccataggctacatctctttctcccttgctgatcccaccacagttaacaaggactagctggcttttgaatgataaaaaaaaaacacggccttgagctaagaagcccatgattcagactgatcaggcctaaaaaaaaagcatcctacctcttaataagggcccggcacaagctgtaacgaaacctgagggccccaaatttgagcccaagcactaccaacctacgctacaaacaaaaacaaaaggtaccttacttcctggtttacaaccctgcgctcaagtccaaaggctgataaaacttggggccacagtcatccactcatttgcatgcaaatttacagttaggcagccttgaaacaacctggccttgattgtatgtgatctacattacgctacctatataactacaaattatggctgcggactccatgggagagattgccttgccactccacctggggtatgtgctcttgaaccttaacatggaaaccttgagtgaagggccgatgacccccattttcctttctaagcgatctttataggtttgagcatctcaagcaatagataatgcaactggaactgggggac

SEQ ID NO: 78032 - DNA, 360 bp, Zea mays
  Clone ID: MRT4577_171187C.1
ccttcttttttttttttttttttttttaatttttttttttttttttttttttgttcctgttgatgcaaagaccactttacgggagacagaagcagcatactgtcaatgataaatattttatccgagctactgaagacgggcaccccacatcacccaaaattaacttgccatgaaaacaacagcaactccccaaaaccagaaaggcccctacagcggcccacctggaaaggcaccaggctgtcggacaccaaataacctaaggcgactaggcggcggggacagcaaaatagcggttggacatattccctcccctgcttaagggcacttcctctgaatataggaaaccccatgctcttcata

SEQ ID NO: 78033 - DNA, 326 bp, Zea mays
  Clone ID: MRT4577_171188C.1
ctttacttgataatctataatggggggccaaataattttttttttattatacatgctcaaacaaaaacatacttcacacaactagaaaactcaaacaaacttggactcatacactgcccaccaccaaagatactgaggtaatggatcacgatccaaacccttcacaaaatagcaggacactaaataaattttagcttaaaaataaatccaaatatggcctgatctaaatcagcaccttaaaacctaaatgcaaattaaaaaccccataccacccctacaataaacaaagcccaaccagaccccattcgaacccatccaataaacaa

SEQ ID NO: 78034 - DNA, 749 bp, Zea mays
  Clone ID: MRT4577_171189C.1
ctcgaggccggccgggtttcaatttataaaggagctcctttgaagtgccaactgtgaggcaacatgacccactttcttagtactccagctttgcagccttttacaagtctctttaagctttctatccagggtcacaagggggcaatgcaaactacccatagagtcccatgcagactgaacagtatcaagaaacccatcaatttttggccagaatgcttcaaagtggaatctttttttttcccaaaggcattatcatggagtcccaagagtaaggggcagtggtcagaagcatgagaaacagaactttgaagcagcacatttggaaaaatagcctcccaatcagaagagcaaaaaactctgtccaactttaccaacacaggattagcatgctgatttgaccaagtaaatttcctgtacttttgtgaattgggttatccaagtattagtatcattgctgggctgattacttttgtgttcctgtcatgattacatatcatgctgtcttggtgtctatttaaaagtagatttgatatataggctagcgctatttgtcacatagggttaagcttcacccggaccagtcccgcccctatcccgtgcagtcgatcaagtcgcccccgtgcatgccccatggaaaccgcccctccctctcgcgcactttttttctctttttgtgccgcacagcccgcatgcgcattaattcttttccttttttgcaggatcaaataactccgtgcgcatttttcctt

SEQ ID NO: 78035 - DNA, 1699 bp, Zea mays
  Clone ID: MRT4577_17118C.1
cattgggtacctcgaggccggccgggcgttactttgtaaaattagaggctcaaagcaagccatcgctctggatacattagcatgggataacatcataggattccagcttctgcagataaggaaggaggccgacattatcgcaacacgccacctcatctaatcgaggcgagagacaggggaggaggaggaaaacggaagaaatcttcatcaagcaacaggaagcgagagcgtgcgatttcttttttcttcctttccggtgacgccaggtgaatcaccagccggccggtgcgccaaaggctagggttccgcggggcgcgggtgcgggctcgactttcgtagcctcgccgccggcgcgcgggaaccggatgctgctaagctgcgggtcgctctcctcctgggtgcgccgcttcgtcgcctgcgttggagcagtggttgttttggttgtgcccagcctactccgataatagctgttgatgagcccacaaaaggtttaagaattcaagggcgctcagtaaaaagacacaatttatctgacgacttttggagttcaagcccgcacgaaatggagaacagtgccttgcaatcccgacacagtatgtcctcaatcagcactgctgcacaacctaatgatcagcatgcttctggaagtagcagctccccaaatgaatttgtaaatcaaggtaaattagttgccatatatacatgtccagaacacgtggtgcccatgtcgatttatggtgcactaatttacaatgtttggttatctgttccatgcttccttgagttttcacttttcagaaagcgttaaaccaatatttgtttgttggagttctgtttattcttattgacaataaatatcagtaaggtgtgattctacacccgaaaattcagcaagaagccaatttcacaacctacaacgcgatggacattgtatgctaattatttcctaggatgacagtaggcagtatcagttcttagaacgtttgtattcgccaatgatcggtaactaattattgatccctgtattgaaagtagcagttagcaatctaaatctttttcgctttccaattttccatatcaggaagtcagaagtaatgacagagagtctctaacgtatatgccctctgctaaaattggacaaacacatggctttatagcaactatttgaacttatggctctcgaattccaaccctatagggtaggcgccgagggagaaccactggtggttcattgcctcatttttatatgctaaagcaataaaaccactaatggttcattccctgacattatgtccctcatttgtacaaacataggtcttctactatggcaccagactagacagcagtggattggaaaacgaagacataattctcagggtcaacaaagtcaaggaccaaaaataagttgtaatgctacatacgagagcctgctcgggagctcgaaaccatttccacaaccgatccctcttggtgaaatggtgggtttcctcgtgatcagctgggagcaggaaggcctatacgattagagttggttattggaagtgtgctgtttcaagtcatgaatcgctgaaatgtacgcaacttctaggctgcgaaagcttgtgacctcatggatgtggactgtctcggagacaggatgacatccctcttatgcaaatgtaaaatattctttgttattttattactagtaattgtgttt

SEQ ID NO: 78036 - DNA, 688 bp, Zea mays
  Clone ID: MRT4577_171190C.1
ccgatctctagcccccgcggtgctctccctctctcggaatcttcaacacgccttctacctgcctgcgaagtagagtgtgaagttccaagaatgctgccaaacatggaggaaccccttgttggaggcaagagtgagaagacaggagggccaggagagagcctcctagtgattgaggtcaagaagcagctgtaccttgccgggcctctcgtcgtcggaagcctcctgcagaacgtcgtccagatgatatcggtcatgtttgtcggtcacctcggcgagctcgatctctcgagtgcctccatcgccacctccttcgccggtgtcaccggcttcagcttgttggctggcatgtcgagcagcttggacacactgtgtgggcaagccttcggagcaaagcagtaccatcttcttggcatctacaagcagagggcaatccttgtgctcactcctctgagcgtcgtggttgctgtgatatgggcatacactggccagatcctcctcttcttcggccaggaccctgagattgccatgggagcagggagctacatccgttggatgatcccggcgctgttcgtctacggcccgctgcagtgtcatgtccggttcctacagacgcagaacatcgtcctcccggtgatgctgagctcaggtgtctcagcactgaaccatatcttggtgtgctggttgctgg

SEQ ID NO: 78037 - DNA, 253 bp, Zea mays
  Clone ID: MRT4577_171191C.1
ggtttatttaatttaggagggcctatccggttaccaatggttcccacccaccaatccggaacaaacaaacagggccttaagcgacacggatcctgcatgacacaaatgggttaatccaaactggtcatccttttggggggttcctttttttttaagttgaaacggcgccctcggaccgggacctccggggcttttttcgccgccggggctccctgattcccccggtttggcaactttgccctctgtaagggga

SEQ ID NO: 78038 - DNA, 1685 bp, Zea mays
  Clone ID: MRT4577_171192C.1
cggacgcgtgggcggtaggtcacatgcggtcaccccatttccccacccccaggggcccactccccgcaccaatttccgcgctcccccctccggccgacgcatccatcgggtcccagagtcgtcagccgtcgatcgaggccggccggcggtcccggcaaagccgccacttatgtcctcgcgagcttggttaataacgccgcgtgagctgggtgtgggtggggagtttgtcagctgggtggcgcgagcgtcaggcgatggcggaggcgggggagaaggcgagggtcgtggtggttggcggcggcgtcgccggctccctcctcgccaagactatgcagggccacgccgacgtcgtcctcctcgacccgaaagactacctggagatcccctgggctgagctgcgctccatggtcgaaccgtcctttgctgagagatcgttgatctaccacaaagattacctcagcgatgcgaccatcgtgacatcttctgcggtcaatatcactgaacacgcggtccttactgctgacggccactctcttccatatgattatctcatcatagcgactggccatgctttggcttctcctgccagcagagctgagaggataaaagaattccagagagataatgggaagatagagtcgtcagaatctgtgctgataattgggggtggtccaactggtgttgaactggctggagagattgtggtagactacccggggaagagggtgacccttatccatagaggaccgcgtttactcgaattcattggagataaggcttcaaagaagtgccttgattggctgacttcaaagaaagtagacgtgctccttcagcaatcggttgagttggactcattatcagacacagagaatgtgtacaagacatcaggtggagaaacagtaacagctgattgccactttgtatgcattggaaagccactgagttcgtcgtggctacgtgataccatcctaaaggaatccttggacagcaaggggagagtaatggtggaaaaggatttaagagtgaaaggttttaataacatttttgcgattggtgacatcacagatattcctgaaatcaaacaagggtacctcgcccagaagcacgcgctgctagtggcgaagaacctgaagctactgaccaagggtctgcctaacagcaaactggcgacttacagcaccggctacccgctggcgctcgtctctcttggaaggaaggaagggctggctcagtttccattgctgacgctcagcgggtgcttgccaggcatgatcaaatccggggatctattcgtcagcaagacgaggaagcagatgggcctgaatggttgactccagtccgaggaagcttgaaaaaatagctcgggtcctgggttatatacagacgatggattcctttacacagagcttgtgttttgctcgtatggccatatgtgttcgttctgtatctgtgtgatggtgtcgtcgtgtggatgcttggaatggtgactagcagagtgtatgctacgtacatgtatacttggacctttttggtccaacaaaatgttgcttctgtagtatgtatgggcgcattttgtttgctggcaagtaaacaatgaaatcatctttgcttgctggcaacacgatgtcagcagtggcaatttgatgcctatgggaaagcctatggatggaaaaaaaaaaaaaaaa

SEQ ID NO: 78039 - DNA, 439 bp, Zea mays
  Clone ID: MRT4577_171193C.1
gggagaatagacccgggtttaaaaagccaacgacgggattacacgattacggggggacaccccaatcagcacaaacatcaccaaaacctttattttagtcactcagggcaaatgcagcctactggtagcaggggactgaaaataaccatcccggcgtatgggttttgggaagggaacagaatccctttattcgaacttggcgcaatcgatgtcgggggggatgttgtaggacaaggaaaggccccaatcgccgggaaattcctggccccgggaaaggacaagggggacctgaacgtaggcccccttgagggaccggcacgtggcctgcctgtcgggcctggggtcccccccccggtacagggtcctaaacccggcccaaaactgggtggtggtctcgctggggttgggtgccttgccctgcaagaaggggaggcacggg

SEQ ID NO: 78040 - DNA, 119 bp, Zea mays
  Clone ID: MRT4577_171194C.1
gaccgttccagcatattcactgtcatagttagagacaatatctcgaactatgaccgttccagcatattcactgtcaatgaggtggccatttgttacaccattgacagtgaatatgctgg

SEQ ID NO: 78041 - DNA, 213 bp, Zea mays
  Clone ID: MRT4577_171195C.1
gaaatcgtcaaatgaaggaaagtgaatggctttcctgccaaacaaaaaaaaataaaaaatacaagctttcgcaccaaaaagaaatgaaaatgaacagcagcgaccaaaccaagaaaatacccaggaactatgcagaatcttttttttgggggggggcgcttaataaaaccacacctattttccgttcccttgggagtactatttttttttttt

SEQ ID NO: 78042 - DNA, 408 bp, Zea mays
  Clone ID: MRT4577_171196C.1
ctacgctgtccggttccctccctttttgtatggagcaagccaacgaaacaggggggggtttcggggggaaaagaggcggtgactcctaatctttcggaaacaggggtggggattaataccgatggtgacacacttgttgacaaacatacgcgggggctacacacggcgcacattgatgctaaaacggtggctggggcctcacacgcccccgcgggaaatattgaagacatacaggccactacgcgccgttgcgtgatgctaacaaaccaccctacactgtttgaagatgccacgggaaccggcacaaagcaaacctacgcgaatggtcccacacggaaaggcacgagcattggagcttggcccccaccggggcgcctgtccaaaccgaactgaaggagagaggggatt

SEQ ID NO: 78043 - DNA, 530 bp, Zea mays
  Clone ID: MRT4577_171197C.1
gtagttctgatgggtctaacaatatattgcaagaccggtacatgctgccagatgatgctgatacagaacttggttcaaactggaaaccaacaatggttctacaggtttggacatgttgacaaatgggtactttcgctagatccgatagggccttacatatggagcttaccaaagaagctgtgcttatcatcgtttgtattgtaatcaaccttgcctaaatttggacgacaagtgtgcagaacttgagctagatctcctcctacgccagcccgggaaaaatggttaacgacggactggcattgggtcactaccctgtattttggacccacacagaattctttgatcatcagagccgaacccttgacgataccatagtgggggcaaatcacccatggggagcaatgtttcttgttcggcctgataaactgtgtggaagcatggagcgactctttacaaggcttgccattattgtagaccttaatgttcatgtgattgcagtggaggatacccattctgaccatgacggacaa

SEQ ID NO: 78044 - DNA, 190 bp, Zea mays
  Clone ID: MRT4577_171198C.1
cccttcttttctatcccttggcccgccggtccgccaagggcattggccttgggaatgccggttcccaacaagtttaattgattgggaggccccggctaatcccttgggaaaaagaatccttctttcaccaccccgaccaggggttttgccttggcccccgggaatttgaacaaaccttcaaatccccgca

SEQ ID NO: 78045 - DNA, 186 bp, Zea mays
  unsure (1)..(186): unsure at all n locations
  Clone ID: MRT4577_171199C.1
ggtggagcgtagtaggtctcaggtcgnggcgagagattcttcagcatgaggatgagcagtagtggttccttatagggtgcgcaagagcatagaactctgggataagagcttgtgatatggatgtctagcgtctggactcggagtaagggctggaatctgtttacttctaggagcgtcttgctttaa

SEQ ID NO: 78046 - DNA, 867 bp, Zea mays
  Clone ID: MRT4577_17119C.1
ccggccgggtcagtacgttcttcctactcccgatccattcgcagagggcagcagccacctcctctccccccgcggccgagctcgcgcctcgcctcgcccgccgcctgaactcgtctcgcctgcggccgatctcccccctccgttcgccgcgccgcaacccggagaggagaccgcgctcggtcgagcgccacctggggcgagttatttggagcagaggtatcccgaactgcgggcttcggaagtttggtatccccaaccttgcaattggaatcttagtattataataggcttccggttggaaaattgtcttcgtgggcacttttaacagtcgcgctatcgattagcttgttccggctgcatttacgttgcactaaggatttcccgttcggcaaaacggatcgcgagctcgctcctttcttcctccccctctctgtccgtctacccgagcgctgctcgtctcctcgactgaactgggcgctcctgctctctcctcgacgagctcgcgactgctccgtgctcccggccctcgccggcgctcccgacagctccgtggcgcccctcgccggcgctccagactgccccacaagaaacagttggtactaccccacagaagagagtgaggcgtgctgtcaaaaaactgactccaaagaagaagatgaacgctgtctagaaaataaggacagatgtcatgtcttaaactagtttccaggctagcttcagttttcagatgatgtaatgtattgaagtactttctctagacttgtttgtgatgtaatgtattgaagtactttctctagacttgacaacttatcttcagttttcagaaaccacatattttcagccaaaaaaaaaaaaaaaaaagcggcc

SEQ ID NO: 78047 - DNA, 163 bp, Zea mays
  Clone ID: MRT4577_1711C.1
ggagaggaggagccgacgagacaccacacagggcaaccctggcgggcgcggtaccaaggtcttctccccgcgccgtggcacaccatcctgcgcctgcgtgcgtctctactgtcaattgccaccgcatgctgcgagcgaggagaggagcacgtgccgagactag

SEQ ID NO: 78048 - DNA, 450 bp, Zea mays
  Clone ID: MRT4577_171200C.1
gacgagccccatgcacgtgcggaaggctaagctcaagacccacttcatctccgccaaggcaaagctcaagcacaacgtcaccccgcgtcgcgtcgtcctgctggctgccgccgctacctccgccttcctcctcctattcaccctccgcaccctccactatgccgcgcgcgtgctggcgcggcgtgcgccgtgtagcctcctggtgctggggctgggacccgacagcgcgctctgggcggcactcaaccacggaggccgcacgctcttcctcgaggcggacgccggccggatcgcctcggcccgcgccgcgcactcggccgggatcgacctccaggcccaccccgtcgccttccaacaagaagccatgacgccgtccgacgacctcctggctctccgcaactcctccgactgcgctgcctccccgccgaaacctctcaccgtggaccacct

SEQ ID NO: 78049 - DNA, 206 bp, Zea mays
  Clone ID: MRT4577_171201C.1
gcgagcgacgggttcatcctggcactcaacactccggccgcccgcatgccgccggcccatcactgtctcgataggcgccggagcaagaaatccatggacctgaacgagctggacctcgacgtcgacagccaacgtcagtaatatcttctgcagggggcgcatgctagtacaaagattcccggattcacttcccggtggacgcactt

SEQ ID NO: 78050 - DNA, 304 bp, Zea mays
  Clone ID: MRT4577_171202C.1
gggcgcttttttttttttttttttctttttttttttttttttttttttttttttttaacttaattgcatgcatgcatcattagatatacgaacagtgatggatcgttacacgctagacaagcatgcccttaaaactaagttgcaaagaagacataggggaacccaggataacattcagaatggggggggggggggggcgatatccatagggcatcaaattgatgcattttaggtcatagggtgctcaaagaccatatttttcccacatcagcctgattgaaaccggaaggcaggtgtccagctt

SEQ ID NO: 78051 - DNA, 263 bp, Zea mays
  Clone ID: MRT4577_171203C.1
aggagctgctgaagaagaggaaagggtggaagagcaagacctggccaggcacagtggaggaggtgcagctgctgctcgccctgatcgatgtcaaggtcgtgtcgcgggtgctccgggtggggaagctgagcagggagcagctgctgtggtgcgaggagaagctgagcaaggtgggcctcacggagaaccggctgcgccgcgacgggtccccgatcctcttcacctgttgaccgacgcagcatgtcatgccgcgccagagatct

SEQ ID NO: 78052 - DNA, 217 bp, Zea mays
  Clone ID: MRT4577_171204C.1
cacccttcctgctccggcctctggctcggacacctgcgctcgccctcgtgcggacggagccgacagcggcaacgacggatgccgggcttcgccggcctctcaatgcagcagcagtcggagcctgccgatccggcgggccgggccttaccgccaccggcggtgccggcgccggcgccttgtgtcgcgcgcgcggtgcaccaccgccgggctagatctg

SEQ ID NO: 78053 - DNA, 527 bp, Zea mays
  unsure (1)..(527): unsure at all n locations
  Clone ID: MRT4577_171205C.1
cccacgcgttttctcgggcagatctacagccccgagatcaactggatcctcatgctcatctgcctcggtgtcaccgtcggcttccgtgacaccgacctcatcggcaacgcctacgggatggcgtgcgcgggagtcatggtggtcaccacgctcctcatggcgctcgtcatggtcttcgtgtggcagcagggcttcatcctggcagccatgttcctgctggccttcggctccgtggagtctgtctacctgtccgtcgggctcatgaaggtgccgcagggcgggtggctgccgctcgccctgtctttggtggtggtggccatcatgtacgtgtggcactacggcacgcggcggaagcacctgttcgacgtccagaacaaggtgtcgctcaagtggctgcacgcgcttggccccagccttggcatcgcgcgcgtccccggaatcggcctcatctactacgagcttggcaccggcgtgcctgccatcttttcgcacttnggtaccaacctgccggcgttccaccaggtgct

SEQ ID NO: 78054 - DNA, 510 bp, Zea mays
  Clone ID: MRT4577_171206C.1
aggggcccaaaagtttaaaggactttaaaaaactttcaagacaggcccccctcatgttcttagggcaggcctctttaaaaaaagaggggggggacataaattggtcagcaggcatttggggcccacgaaacaaaaaaaacagggcccctcacttggtagaggaaacatttttttcaaaagggccgattaaaattgcagacccaggaaaacctttaacaggacagcctttggattccgaagatgctttttttatccaaaagggtgttaaaaaacaaggggttgcccaaaaaacccccccatttgcttccccctgttcctgattgaaaaataaaacaccttttgcccaaattaaaacactaaaccccccaagaagctggaggcaaacttttgttcaaccaaaaaagttttgttttccccaaggatatcccgcaagggtcccctgagttctttccccccccccttggggagggaaaaaactggcctgaccacaacctttatttcccccttatg

SEQ ID NO: 78055 - DNA, 276 bp, Zea mays
  Clone ID: MRT4577_171207C.1
gggctactgactctgccaccatagtgtcaccaccaccatgatctcgcccctcatccctcagcacagatcccagccagtctctactcagcctgaagcaaggtgggtgatgggtaggtgggtagggcggggcagggctcatcttctggggtgtgggcaggcacgacagcccctgccttcctccctgatggtgcatcaccggcctgtgatgctccccgtctccccagaaccgctgttgtcccggatgggcagcctgcgggctcccgtggacgaggaccg

SEQ ID NO: 78056 - DNA, 397 bp, Zea mays
  Clone ID: MRT4577_171208C.1
atggcgtcgcaaagaccttccggatcaagaagaagctggcgaagaagatgcggcagaaccgccccatcccctactggatccgcatgcgcactgacaataccatcagggacaacgccaagcgcaggcactggcgccgcaccaagctcggcttctgagcgtcgggattggccggctgctgcgtcggaaggctagggtctaagagctatcttccttctggtttatcaatggggcaggttttctggaagctagcaaggggtgctatgacgcttttattaagattctggtgaggcggtgatggtaagagaaaattggcactactggggtggaccccaagattccttgcagcattgctatgctaagtaaagaaccctttatcttattatatatggagtggtgc

SEQ ID NO: 78057 - DNA, 531 bp, Zea mays
  Clone ID: MRT4577_171209C.1
cctcgaggccggccgggatatcgttccgcccccagtggtgggggtccattcacgcacctagggttttcgcgccgccgccgccgccgccgccgcagccgcaacaatgccgtcgcacaagaccttccggatcaagaagaagctggcgaagaagatgcgccagaaccgccccatcccctactggatccgcatgcgcactgacaataccatcaggtacaacgccaagcgcaggcactggcgccgcaccaagctcggcttctgagcgtcgggattggccggctgctgcgtcggaaggctagggtctaagagctatcttccttctgttttatcaatgtgtcagtttttctgtaagctagcaagtgttgctatgacgcttttattaagattctggtgagcggtgatgttaagagaaaattggcactactgtggtgtaccccaagattccttgcagcattgctatgctaagtaaagaaccctttatcttaaaaaaaaaaaaaaaaaaaaaaaaaaaaaaaaaaaaaggcccctagggcc

SEQ ID NO: 78058 - DNA, 129 bp, Zea mays
  Clone ID: MRT4577_17120C.1
ttcaccagacgggaaccgagccgggcggccacccatacgatcccacccggcagtactcggcagcggcgccgcgcaatggccacccacgcagctctcggcgccttccgaatgcccgacggtgcccggctt

SEQ ID NO: 78059 - DNA, 515 bp, Zea mays
  Clone ID: MRT4577_171210C.1
gggaccctcgaggccggccgggccgggattcacgctcctagggttttcgcgccgccgccgccgccgccgccgcagccgcaacaatgccgtcgcacaagaccttccggatcaagaagaagctggcgaagaagatgcgccagaaccgccccatcccctactggatccgcatgcgcactgacaataccatcaggtacaacgccaagcgcaggcactggcgccgcaccaagctcggcttctgagcgtcgggattggccggctgctgcgtcggaaggctagggtctaagagctatcttccttctgttttatcaatgtgtcagtttttctgtaagctagcaagtgttgctatgacgcttttattaagattctggtgagcggtgatgttaagagaaaattggcactactgtggtgtaccccaagattccttgcagcattgctatgctaagtaaagaaccctttatcttattatatatgtagtgttgcataaaaaaaaaaaaaaaaaaaaggcccctagggcc

SEQ ID NO: 78060 - DNA, 817 bp, Zea mays
  Clone ID: MRT4577_171211C.1
cattgggtacctcgaggccggccggataatcgtcaccgcccaccagtggtgtccattcacgctcctagggttttcgcgccgccgccgccgccgccgccgcagccgcaacaatgccgtcgcacaagaccttccggatcaagaagaagctggcgaagaagatgcgccagaaccgccccatcccctactggatccgcatgcgcactgacaataccatcaggtacaacgccaagcgcaggcactggcgccgcaccaagctcggcttctgagcgtcgggattggccggctgctgcgtcggaaggctagggtctaagagctatcttccttctgttttatcaatgtgtcagtttttctgtaagctagcaagtgttgctatgacgcttttattaagattctggtgagcggtgatgttaagagaaaattggcactactgtggtgtaccccaagattccttgcagcattgctatgctaagtaaagaaccctttatcttattaaaaaaaaaaaaaaaaaaaaaaaaaaaaaaaaaaacctacccgaccgtgagcgccgagtacagcgaggctgtggagaaggccaggcgcaagctccgagccctcatcgccgagaagagctgcgccccgctcatgctccgcctcgcgtggcactccggggggacgttcgacgtgtcgtcgaggaccggcggtccattcggcacgatgaagcatcagtcggaattggctcacggcgctaacgcggggctggacatcgcggtgcggctgctcgagcccatcaaggaggagttcccaatcctctcttacgccgatttctaccagctcgcgg

SEQ ID NO: 78061 - DNA, 681 bp, Zea mays
  Clone ID: MRT4577_171212C.1
caaaacatgattatcataaaaacatttcggcagcaaaaggtccttgccatcagataacaccatttagttccaccttacaactgagctaaaacatagaaaacacaaccatgctttccttcctactcctcagcctcaccactcttcttgttgcccttccttgaatacctcaggttcctcaggaacttggggtccatctgcaaacatggtcaatgcaaagggtcagttgtagagcaaaaaccaaggtgcatctcaagcagctgttagagatgaaaaattggcaaaagtaacagttgtgctacatctcaatacaaatagcatcctaaatgaagcgcaacaggaatcaaagttgtgcagttgctcaggtaaccgctcaggaggaaataatgaaagaatatttcccaggttcatagagcagtaatctgctctcagaaggtattacgtctcatcatagcaacagcctcaacctcagcaggagaacgcttgatatgaaaattaagtttaacttcaaagtaaactccatgtaacactagtaaaataatagactgatcaactggaccaacatgaacaaaaacattatgaatatcatctgtacaaagacaagaaaaataccagctgcaagaattcatacacaccgcagcagcaaactgggactaaatgtgttttcaaatcacaagtagaaac

SEQ ID NO: 78062 - DNA, 870 bp, Zea mays
  unsure (1)..(870): unsure at all n locations
  Clone ID: MRT4577_171213C.1
gtgcggcgctcagcggcggaattcggcacgaggctcgctcgcaccatggcgctgcagctccagctgccgcggccgctcgccgccgcccggccctccatcctcctcccttccccagcccatggcgcctccgcttccgcgaccccccttcacgcccgcgcaggcggcgtcgcgttttcgctccagaccaacgtgcgcctcctcaagcccaaccgccgcgtccgccgctctcgggacccctactacgatctcgacgaggacgacgaggaggaggcggagttcgacgaggacgatgacgacgacgacgagggctacgagagcgatgatgacttgtcgggtttggaatatcctggtgtactttattcaaacagccctcgtgcttcaagcaagaaaccaggactccaaactccaatggtaaaagaaaactgggaaggaagacaaaccaaaacccatgacaaatacggtagtccaggaagaagtaagtccatgcatcctaggagtaaagtgggacgatcatcaacagatcttaagaacatggacagagaagttgagttgaaaaatgcaagtatctctcgaagtctgttccagaaactacaagaagaatatgacttcgatgacaaatggttaccactgattgattacttgtgcacctttggactaaaagagtctcattttacttacatctatgagagacacatggcctgctttcaaatcagtcaggcttcagcagaagaaaggttggatttcctgcttaatgctgnggttaaaagcaaagatatgaaaaggatactggtcaggcagccacagattctnggatacaccctttggcatctgaaatctcaggntgattttctcggtgagcattggagttcc

SEQ ID NO: 78063 - DNA, 573 bp, Zea mays
  Clone ID: MRT4577_171214C.1
actagccgtgtaggagtagcactatactatttttctctaaactacaagttacaggggaactggaacctgtactgcttctacacaagttgaaactcaactaaaactcaactaaagccattagaaagtcaaattcagaataggaaaaggtggagctacacctgtgtcaattcatcaaacgatctatgttatctgctagtgctgattctgttcagaatagcagcaaggtgaagatcagcagcaacatctgctcattcatcagttcatgctgcctacaagcctcagcaccaggcctctgtaatttactgccacaacacaagtaatagagtgaacatgtcaaacccagaccatataggcggatcatagacacacaagccttctgtgtgcataaaaatgaactcaggaacagacactgcgagcaagaagagtatgttccatcttccattcccataaccgcagcggccattcagttagagttaggacttctggacagaaaaatggaaccatcgttcaggggcaggagactaaaataggacccattctcatcgacacagcacgcctgccactttatctgat

SEQ ID NO: 78064 - DNA, 672 bp, Zea mays
  Clone ID: MRT4577_171215C.1
gccggccgggccgggattcacgcacctagggttttcgcgccgccgccgccgccgccgccgcagccgcaacaatggtaacttcctagccgtcgccctagttctcgttttccatggagttggcctgtgccgccttggtttcagtgtttctctgacttggttgatggcgtacttcgttgtttgcgcagccgtcgcacaagaccttccggatcaagaagaagctggcgaagaagatgcgccagaaccgccccatcccctactggatccgcatgcgcactgacaataccatcaggtgacggccgcgctaactcctgctcgtctggtctggattcggccgtcgctgaccccgccgctccattccgtgccgtttcaggtacaacgccaagcgcaggcactggcgccgcaccaagctcggcttctgagcgtcgggattggccggctgctgcgtcggaaggctagggtctaagagctatcttccttctgttttatcaatgtgtcagtttttctgtaagctagcaagtgttgctatgacgcttttattaagattctggtgagcggtgatgttaagagaaaattggcactactgtggtgtaccccaagattccttgcagcattgctatgctaagtaaagaaccctttatcttattacaaaaaaaaaaaaaaaaaaggccccta

SEQ ID NO: 78065 - DNA, 342 bp, Zea mays
  Clone ID: MRT4577_171216C.1
ggaatgaaacgacttcacagctgcaaacagtaccagaaacaacagaaattaagcccgagcccgagacagctgtccctcaagaacaaatggaaacaatgccatccgttgcaattgacaacccagttcaggacacgttgataaataatttggcggaacaaaagccagacgcaccacaggaaccagaaaataaggaacgatcggataaagacgaaaaggagattccaaaggttcccggcttgatagttacttcttggaaaccagaatgtgttcaaatatctctagctggtttgctggattacaacctcgcagataaaaacgacaaaacttcgaggtgtccttatt

SEQ ID NO: 78066 - DNA, 530 bp, Zea mays
  Clone ID: MRT4577_171217C.1
aaaaacgcacctagggttttcgcgccgccgccgcagccgcaacaatgccgtcgcacaagaccttccggatcaagaagaagctggcgaagaagatgcgccagaaccgccccatcccctactggatccgcatgcgcactgacaataccatcaggtacaacgccaagcgcaggcactggcgccgcaccaagctcggcttctgagcgtcgggattggccggctgctgcgtcggaaggctagggtctaagagctatcttctgttttatcattgtctctgtttctgtaagctagcaagtgatgctgtgatgcttttattaagattctgatgagtggtgacgttaagagaaaattggcagtactgtgttgtaccccaagattccttgcagcattgctatgctaagtaacgaaccctttatcttattatatatgtagtgttgcagtgattgaggtccacatctgatcatcgtttcatggattatggtatctttcttcaactattttgatgagaaaaaaaaaaaaaaaaaaggccccta

SEQ ID NO: 78067 - DNA, 474 bp, Zea mays
  unsure (1)..(474): unsure at all n locations
  Clone ID: MRT4577_171219C.1
gcaaggcaaccacccaccggccacgcggancgacaagcnnggaggcanngacaagcgngnganngagaggnncgagaaggaagccgcnnngaaagaacaaacggnccnncaagnacgcnngggngcnngacaagcncaaggcngagcgngagagaggnancaccannngaagggcgcgggggaagnnngagaccaccaagnacnacngcacngncanngangccccnggacancgcgacnncancaagaacangancacgggnaccnncncaggcnngacnggngcnnggncngagcanggacnccaccacnggnnggnnnngaggccggnnncncnaagganggccagacccgggagcangcncnccnggcnggcacccnggggggcaagcggaggaagggcggcggcagcangagggangcgaccacncccaagggggccaaggccccgggcgangaganggcgaaggaagg

SEQ ID NO: 78068 - DNA, 818 bp, Zea mays
  Clone ID: MRT4577_17121C.1
agcaactttccgccccctcgtctggtcgtcgggccgtcgccgccggacaccgcccccttccaccgaagcgcggcagctcgaaggttcgtgttctaataagcttattcccttgaggcagcatgcctaagataaagacgagccgtgtgaagtatcctgaaggatgggagcttattgaaccaactctccgtgatttggaagccaaaatgagagaagccgagaacgatacacatgatgggaagaggaagtgtgaggctctctggccaatcttccgtatttctcaccaaaagagccgttatatatatgatctctactatcgaaggaaggagataaaaagggagctgtatgagttttgcttggaccaaggttatgcagacaaaaatctgattgctaaatggaaaaagccaggttatgagcgcctctgctgcctccgctgcatacagacacgagaccacaacttcgcgaccacctgcgtctgcagggtccccaagcacctcagggaagagacggtgatagaatgtgtccactgcgggtgcaaggggtgtgccagcggtgactgaagccgccactcgttgttaagaataaactgaaactgattgctcaagatgctctgttcgatccctgatgaatgaaaacaagcaacgcacaatcaggtgattcgtccatatattcactgtaaactcttgagccgtggtatgtatttgcgtgagaagactcggttttccgccgtggaagttgactactgtttcgctgaatgttatgttaaccccctccatgatggattacgtacagtagtattgttgtgccttgctgttactact

SEQ ID NO: 78069 - DNA, 533 bp, Zea mays
  Clone ID: MRT4577_171220C.1
ccggccgggaaatatgactcgtgtcatacatatacacgacatcgccgtatcattttggttgtatatctagcaatcatttcgcttaaaaaaaaaaaaaaaaaaaaaaaaaaaaaaaagcggcgtaaggagtcttcctctctaacgctggcaacgtcgacaccgctggcaagcttctctccgattgtccctgctccagtaagagtaggcgaggacgagcctcccccatcttgggtgttggtgcctgacccattttctcaaggttctctggaggacatggttgctggagtgacttggccgtccatcttgccaccgggttggacagtcgagtgggaccctacctcggctgaggaggagcatgaggagtgatgggacaggcttccccatctctctgtttatttatcgttagttttattccgatgcattccgaacaatgatgactacttttgccaaaactccgatgatgatgtaataaatttaatactctttaatgtgtggatttatgcccaaaaaaaaaaaaaaaaaaccccgcgacc

SEQ ID NO: 78070 - DNA, 738 bp, Zea mays
  Clone ID: MRT4577_171221C.1
aaaaacgtgcccaccccaatatatttatcgcgcctctcggttccactatataatcgtcaccgcccaccactggtgtccattcacgcacctagggttttcgcgccgccgccgccgccgccgccgcagccgcaacaatgccgtcgcacaagaccttccggatcaagaagaagctggcgaagaagatgcgccagaaccgccccatcccctactggatccgcatgcgcactgacaataccatcaggtacaacgccaagcgcaggcactggcgccgcaccaagctcggcttctgagcgtcgggattggccggctgctgcgtcggaaggctagggtctaagagctatcttccttctgttttatcaatgtgtcagtttttctgtaagctagcaagtgttgctatgacgcttttattaagattctggtgagcggtgatgttaagagaaaattggcactactgtggtgtaccccaagattccttgcagcattgctatgctaagtaaagaaccctttatcttattatatatgtagtgttgcattgattgaggtccacagttgatcaacgtttcatggattgtggtatctttcttaaactattttgatgagtataactgccccaatgtttgttcaggatagaatgagtacatgagctatccacgcgcctttcacagaaaaaatgttagtgtgggcgcctcagtcaaatatgtgtttttgatttagttatgaagcaaactgttagttatc

SEQ ID NO: 78071 - DNA, 515 bp, Zea mays
  Clone ID: MRT4577_171222C.1
ctgacattacattcattactcgctggctaaacatgcatatggagaaaagattgtacaggtctacacataccatctaggcactaactactatatactaggagagacggatcatatatcactgactccgtaacataggggaaattaaacggcggtgacaccagcttaacaagatcaacaatacacaaacacaacaatatatatagtgatgactatctataaaataacatgcgtgcgttttatatcaccacaatgaccaacagacatggactcttgactgcccatgcatattggccgatctagcagtggttgctcctggtcttgtacatgtagacacagtcttagacggtgggaggagttgggctgggggcggtcaaagaggctagcgcccatgcccttgggggccacgttgctccccgaattggaagacgctgacccacacgttgccagcgtccccctgtagtggtcgacgacgacaactacgacggattaaccggctatctcggggctcgacggaa

SEQ ID NO: 78072 - DNA, 771 bp, Zea mays
  Clone ID: MRT4577_171223C.1
acacttcctgaccgaggggaccggcagcggcgtatggagtcttcctctctaacgctggcaacgtcgacaccgctgacaagcttctctctgattgtccctgctccagcaagagtaggcgaggacgagcctcccccatcttgggtgttggtgcctgacccattttctcaagctgacggagaatacatcctcgtgccggagcaaggagttgctcaggaggtagccccggatccagcaccagagcctgccccggaggatctgcctgccccagctttggaaggcaaacaccggttctctggaggacatggttgctggagtgacttggccgtccatcttgccaccgggttggacagtcgagtgggaccctacctcggctgaggaggagcatgaggagtgatgggacaggcttccccatctctctgtttatttatcgttagttttattccgatgcattccgaacaatgatgactacttttgccaaaactccgatgatgatgtaataaatttaatactctttaatgtgtggatttatgctttattgtatttgctctgtgcctcaccatcgagtgagtacgtggtacttgatcctgttagtggcctcgtcggactagatccgagggactgacgtgttattcccatttaagtgtggtctagcctctaaggcaggacttaggcacttaagttggaattaatttgggcggttccgccacagctggtatcgtagctcgtaccaccacaaaggaatcaataaactataaataccatcccttttct

SEQ ID NO: 78073 - DNA, 827 bp, Zea mays
  Clone ID: MRT4577_171224C.1
atataatcgtcaccgcccaccagtggtgtccattcacgctcctagggttttcgcgccgccgccgccgccgccgccgcagccgcaacaatgccgtcgcacaagaccttccggatcaagaagaagctggcgaagaagatgcgccagaaccgccccatcccctactggatccgcatgcgcactgacaataccatcaggtacaacgccaagcgcaggcactggcgccgcaccaagctcggcttctgagcgtcgggattggccggctgctgcgtcggaaggctagggtctaagagctatcttccttctgttttatcaatgtgtcagtttttctgtaagctagcaagtgttgctatgacgcttttattaagattctggtgagcggtgatgttaagagaaaattggcactactgtggtgtaccccaagattccttgcagcattgctatgctaagtaaagaaccctttatcttattatatatgtagtgttgcattgattgaggtccaaaaaaaaaaaaaaaaaaaaaaaaaaaaaaaaactctgctaacgccgctcgcgcatcctattgccctcgcgccaccgtcgccgccgctgcagcgagccaccgccctgccgtcgcctgaggtagacaccaagccaccgccatggggcgtatgcacagccgcgggaagggtatctcttcatcggcgctgccgtacaagaggactcctccgatctggctcaagacagctaccaccgaggtggaggagatgattaccaaggctgcgaagaagggccagatgccgtccgcagattggtgttctgctccgtgaccagcacggcatcccgcttgtc

SEQ ID NO: 78074 - DNA, 2152 bp, Zea mays
  unsure (1)..(2152): unsure at all n locations
  Clone ID: MRT4577_171225C.1
cctctagacaacccccctttttttttttttttttttttaaccttgataccacggtgttctttcttttcttttttcaatcccgtttgcgaggaatctccacaacttggagcctctcgcccttacaaaatatgttcactgttttttttttagcaagggagggatttgttgcgggcgcgcgacacaaaagatcacagcgaatacgcacacacaagacccagacttgagctcaaaagactagcacactagaacggagctcaaatcactagaatgtcgaacaagtgcgcaagattgatgtgtgagtgatcaagagtgctcaaggaatgcttggtgtgttcctccatgcgcctaggggtcccttttatagccccaaggcagctaggagccgttgagagcattccaggaaggcaaatcttgccttctgtcgcctggcgcnccggacagtccggtgcacaccggacactgtccggtgccagatttctttccttaaatggcgaagccgaccgttggcagacttggagccgttggcgcaccggacatgtccggtgcacaccggtcagtccggtgccccccttctaaccgttggctcggccacgtgtcccgcgcagatcgcgcgaccgaccgttggcccggccgaccgttggctcaccggacagtccggtgaattatagccgtacgtcgccggtgaaatcccgagaacggccagttcgctcgagccagcctggcgcaccggacactgtccggtgcaccaccggacagtccggtgctcgtaaaccgagcagagtcttggctgctcgagccaagacatttctaattggatttttcctgtttccagcacttagacacaatacattagtccataaaacaatgtactaagtctgagaaacatacctttatccttggtttgtactttgtccaccattttacacttagacacttgtattggacactaaatcaccaaaatacttagaaatggcccaagggcacatttccctttcagtagtacttccgtgggtaagcggacacactttcgcagctgagatacgtggaacacatcatgaactgctgacatatggggtggcaacttcaattgatatgccacaggtccacaaatctctatgatctcatagggcccaatgtagcgaggagctaacttgcctttgattccaaatctatgaacacctttggtgggtgacaccttaagatagacatgagctcccacttcaaactgtaaaggcttcctcctcttgtcatgatagctcttttgcctggcctgagcagcttctaggttcttcttaataactctgactttctcttctgcttcaagaaccaggtcaggtccaaaaatttccctctctccagcttgtgaccaatttagcggtgtcctacaccttctcccatacaaggcttcaaaaggtgccatcttcaaactggattggtagctgttattataagagaactctgccaatgaaagacacttgtcccaatcgtgggtcccaagtgattcttgcaattgctcccagaaacgtgccatgaatggtgctcctctgtcagatacgatagtccttggtattccatgcaatcgaactatctggtcgatgtagatttctgcatacttctccgccctgtgggtggtatgtactggcaagaaatgagttgtcttagtcaatctatccacaatgacccaaatagaatcatggtgccgggaggtattgggcaatcccataatgaaatccatgcaaatatcctcccatttccaagatgggatgggaaggggctgcaaggtgcctcctaccttcaaatgactggccttgactctctggcaagtgtcgcattccgatatatacttagcaatttccctcttcattctggtccaccagtacaaagatctgagatcatgatacatcttgttactgcatgggtgcatggagaacttggaaaggtgagcttcatccaatattttctttctgagcttggggttcttctgttcgatcatttccttaatgacttgaacacccttgtcaccaatttgtgccatgactatttgctcatgcaaggtgggctccactgaaatataacttaaagcaccgaaggaaacaacttctatgttcagtttgcacaactcatcacatagggtggtgattcttgcatccat

SEQ ID NO: 78075 - DNA, 383 bp, Zea mays
  Clone ID: MRT4577_171226C.1
acattacttgtggtgggggggggggggtaaaaaaaaactttggtgcagatatatcccatcttttttttaactgccatgactcaaaacaaaaggtgctcactacaataaagtggccatgcatctcacagatttgctagaacatatctttaaacaaaactttttttttggggtggggggagactaaaaacagcaggggctggcaaataaaaaaaaaaaaaagagtttttatattacctatttgtccaaaaccatttcatccccagcttcctttgcaccaacatcacctttcaattgtcttcattctgattctctttgcttctgcctctctttggcttttgcttgttcatccatattctttttctccccctcttcaatagttcact

SEQ ID NO: 78076 - DNA, 1414 bp, Zea mays
  Clone ID: MRT4577_171227C.1
gcctgcaggttgactctagaccgtccggcggtatgcgtggattgtccgggtatgtgcccggaccatccgtgattgtacgcggaccgtccgtcgctgcatgaggacggtccaactgggtaatttaggttttgcgcggtattgagagcacctagaggggggtgaataggtgatcctagaaaacttaaaacttaagccacaaaacttggttaagtgttagtacaataattgccgagtggctagagaggagtctcaacaaaacacaataaccacaaagatatcaatcacacagatggcacggtggttatcccgtggttcggccaagaccaacgcttgcctactccacgttgtggcgtcccaacggacgagggttgcaatcaacccctctcaagcggtccaaagacccacttgaataccacggtgttttgcttgctttatctcaatcccgttcgtgaggaatctccacaacttggagtctctcgcccttacacttgaagttcacaaagaatcacggagtaagggagggattagcaactcacacaagacacaaagatcacagcatattacgacacacaagacccagacttaagcttaaaagactagcacactagaacggggctcaaatcactagaatgtcaaacaagtgcgcaagaatggagtgggagtgatcaaaagtgctcaagggatgcttgatatgctccttcatgcgcctaggggtcccttttatagccccaaggcagctagaagtcgttgagagcaatctgggaaggcaaatcttgccttctgtcgtctggcgcaccggacagtccggtgcacaccggacactgtccggtgcccgatttctttccttaactggcgcagtcgaccgttggcagccagagagccgttggcgcaccggacatgtccggtgcccccttctagtcgttggctcggccacgtgtcccgcgcagatcgtgcggccgaccgttggcccggccgaccgttggctcaccggacagtccggtgcacaccggacagtccggtgaattatagccgtacgtcgccggtgaattctcgagagcggccagttcgctcgagccagcctggcgcaccgaacactgtccagtgcaccaccggacagtccggtgctcccagactgagcagagtcttggctgctcgagccaagacaattccaattcgatctttcctgtttccagcacttagacacaatacattagcccataaaacaatgtactaagtctagaaacaaaccttttgacatgatttgcactttgtccaccacattgcatagatcaacacaaaagcacttgcgttggcactcaatcaccaaaatacttagaaatggcccaagggcacatttccctttcaacatgacttggtctaattgctagaacaaaaaagcgtgggtagaacccgg

SEQ ID NO: 78077 - DNA, 279 bp, Zea mays
  Clone ID: MRT4577_171228C.1
gggaaaaggaatttaacccaatcctttggaatttcagcccggacaattgaaacaacccgggttttttaaacaatttggcccccactgaacccaagggccccacccgaaaaagcactttttgaaaaggggtttttccaaacccaaaaccttcttatttggggggccttaaaaacaaagggttccaaaaaccccgggggtttaaaacctccctgaaaaaattgggaaaaaattccagctttttcaggcccggatacattaaaaaaaaggcgcttggggggg

SEQ ID NO: 78078 - DNA, 1086 bp, Zea mays
  Clone ID: MRT4577_171229C.1
ttttgttttgccttcaaagaagtatgctgacgtgatcattcctcgaggtggtgataaccgtgtagcagttgatctgattgttcaacacatccatacaaaacttggttagcatgacttgtgcataatctatctgaaagggaaatgtgcccttgggccatttctaagtattttggtgatttagtgtccaacaagtgcctaagtgtaaaaaggtgaacaaagtacaaatcaaggataaaggtatgtttctcagacttagtacattgttttatggactaatgtattgtgtctaagtgctggaaacaggaaaaatccaattgtaaatgtcttggctcgagcagccaagactctgctgagtctgggagcaccggacagtgtccggtggtgcaccggacagtgtccggtgcgccaggctggctcgagcgaagtggccgctctcgggaattcaccggcgacgtacggctataattcaccggactgtccggtgagccaacggtcggcagggccaacggtcggccgcgcgatctgcgcgggacacgtggccaagccaacggctagaagggggcaccggactgtccggtgtgcaccggacatgtccggtgcgccaacggctctcaggctgccaacggtcgactgcaccatttttggaagggaatcgggcaccagacagtgtccggtgtgcaccggactgtccggtgcgccagtcgacagaaggcaagatcagtcttcctagattgctctcaacggctcctagctgccttggggctataaaagggacccctaggcgcatggaggagtacaccaagcattcctacaacattcctaagcaccaagacatcgattccgcacctttgtttctttgcgatagcaattagagctcttgctgagtggtgaactcattgagttgtattgtgagctctcgttgtgacttgtgtgcgtggtgttgctgtgatttcttgtcttgagtgcgttgctaatccctcccttgctctgtgcttctttgtgaatttcaagtgtaagggcgagaggctccaagttgtggagattcctcgcaaacgggattgagtaaagcaagcaaaacaccgtggt

SEQ ID NO: 78079 - DNA, 355 bp, Zea mays
  Clone ID: MRT4577_17122C.1
atttttgccttgtttatcgtaaggagtatgttatcctttttttttcttatttatgattgtgcatacttaagatattacattgctagaatgtgtggtccacagagtcctttgggtgactgttaatattgttagaatttatttattactagaattcacagttcctttctttagtttgctatctttgtgacaaagtactgagctgagagatatataaaggaaaagagtacaaactcgtatgcaacatacttcgatttggaccatgattgtgatagttcaatgcttgtgtaacagatgctttaagtcagtcaaagagcattggatggacttcagcatatttattcatgatggaaaacta

SEQ ID NO: 78080 - DNA, 1683 bp, Zea mays
  Clone ID: MRT4577_171230C.1
cctcgagccggcgggcgcattgcgacctcgagccggccgggagatcccagcctccgtttccaaatccacacctggcccggctgccccaaatgcgtcggcatcgcgccgtcgctgctgcacaccgtcgatgactcccgccccttcgaacgccgccggcgacctcttcgctgccaacctcacgggcgcgctccttgcggttgcctcctccgccttcattggcgtcagcttcatcgtcaagaagaagggcctacgccgggccgccaccgccggcgcccgcgcaggtgttggaggctatgggtacctcttggagccactgtggtggattgggatggttacgatgctgattggggagattgccaattttgtggcctacatgtttgcgccagctattcttgtcacccctcttggtgcgctcagcataattgtcagtgctgttctagcccatttcaccctgaatgagaagctgcagcggatgggtgtgttgggctgtgtgctctgtataatcgggtcaaccataatcatcctccatgcacctgaagaagagacaccaagctcagtgacacagatctggcagttggcaacacaacctgcctttctttgttatgcggcttctgcattgactatctcactgatcttgatatttcactgtgcaccccgttatggccagacaaacatcgtggtgtatgtgggaatttgctcagtgataggatctttgacggtaatgagcatcaaggcagtaggcattgctatcaagcttacaattgagggcataaaccaggctggctatttccagacttggctgtttgcaactgtttcagctacatgcataattattcagttaatttacctgaacaaggcattggatactttcaatactgcagttgtttctcccatctactatgcgatgtttacatccctcacaattttggcaagtgccataatgttcaaggactggtctgggcagagtataagcagtattgcctctgagatttgtgggtttcttactgtgcttactggtactgttgtactgcattctacaagagaacatgatccaacccttacttcagatctgtatgctcctctttccccaatatattggcatatccaaggtaacggtgaaacaggaggaaagctgaaagaggatgatttactctctggcaatttcatcactgtggtgcgacaagactactttgtctagagaccttccacgatgctcaatgttctggattaaaagaaaagagaacaacactacggaaggatcctactgatgcccagtgtactgcggcttccccactgtgctcatgaacagacattttttcctgccttccaaacaggcccttagaatttgttgaaaagttccagtttgatcacaggcatctgggccgatgccttgtagtaagatgtaagcaatccgtcctctggccgggttgagcaaggcttggctgcagtgtatcagggtggtgcagctgatgtatttatactgtacaatctagtgtgaatgtatgaactagagctatcagaatctgcacagatatttcatgacagactctgtccagcatgttaagttatatattgctcctgacttgtgaaaaaaaaaaaaaaaaaaaaaaaaaaaaaaaaaaaaaaaaaaaaaaaaaaaaaaaaaaaaaaaaaaaaaaaaaaaaaaaaaaaaaaaaaaaaaaa

SEQ ID NO: 78081 - DNA, 5328 bp, Zea mays
  Clone ID: MRT4577_171231C.1
cctcgcgtccgcgctggcaacgtcgacaccgctggcaagcttctctccggtttgatcctttctcatctgctctctacccctctctctatctttctacgtccagttgctgcacatccacatcggctcctagatcccgaccaccgccctgctctccgacggcgtcggcgaggccgcgcagatctactgtgagctcgcccgcctccgattgtccctgctccagtaagagtaggcgaggatgagcctcccccatcttgggtgttggtgcctgacccattttctcaagttttgctatggatatgagcaatagagatcaccttaggaggagggaggtggatggtgatgaccgcttacgattcttttgtcctgaaagatgattcgattgttatagtgatgtattctcatatgaatctaatcataaatcagcgctaaccgggtgggaataagtgcgaaggcgacgtgaagattgtatgaaggattgcagccctgcaaccacaacgaagctataggagcttaaatccttggcgaaccaacatagaatggttgaattggatgacgatacaaatatcaaatttgaggaacaactttgcttattcctatagaaaattgggcacaatggaagagttgaatatctccaagtctttttttgtcatatctgtgatacatttcaacgtgtcctctaacatttcttcgacatagttatccctgggcttagcatgcggttcctagagcctccttccaatcaaggtcatcctacaattcttggagacaaccgatttgatccagacttaaagaatggcataagttagatagatgaaaccgatgttccagtatcaatatcacgagattaagccgcaccactgcgaaatagcatggggacgattatcatagaagcgccgtatgtgaagaggtatcatgaccataccatcttcttatgatgaaaataggagtgttcatgaaggtgagggaaagttctttgaagtggagcttgcggaggccgtcgaattattccagtgggtgtaccctgagcaaacagcttaacatcatgctttgaaatagaagttgattagctccctaaacgattactaaggtttgctagaaaaatttgaaacttttgccaatttaaataatgagctgtcaatcaaaattgagctattagagtctagtgttccatcctctgctaccgatgatggtcttattaataagaatgaaaaaattaaggctaagttagctagctcccaaaatactattgaaaatttgctagagaaaatgaaaattcttagcatacacaatgatgagctaactactaagctagaaaacattggtagcacctcagtagcatctttggttaaaattcctgaaattattaaaaaggatgcttctacttcttgctttgatttaataaatgatactaacccctgcaaccaagttcttgttgagaatattgttatagaaacatgttcggatgaggttgcaaaggaaaatgagcaattaaggcaagaagtggctcgtcttggcaaggctttgtatgaaaagaaaggcaaagccaaacaaatccaacctccacaggataacaccactgcgggagtgaacaagcctatggagggagaaactgtgatttgtaggttatgccacaaggaaggccacaagtctttccaatgcaaaaagatgaccggggataagcaaaagcaaaagcttaagcaaaagccatcaagcaaaatcttcaacacctacatcaaaaaggtggacaaaaagactgctacaccatatttgatcaaaaagaaaaagaatggaaaggtgatagcaatcaaggccaacaagcaagccaacaaaggaaagggggccaaacgcatctgggtgccaaaggaaataatttcaaccatgaaaagcaccaagaaggtcagcctcctcattttgggattggatagtgtggatatcattttaggaactgactggttaacaagacatcaggcagtaattgatgttgcagcaagggccattgaggtgcactcgcctacttatggtgaaaccacattatatttgcccgatcagggttgtacccgttcctgtgcattcaccatgatagaatcaccggttgagagaatccccatagtctgtgactaccgtgatgtttttcctgatgaattgccagggatgccacccgacagagacatagagttcgcgattgaattacaacccggaactgcccctatatccaagagaccttacaggatgcatccagcagaattggcggagttgaaaaagcagttgcaagaattgttggacaaggggttcatttgcccaagtacttcaccatggggatgtccagccttgttcgtaaagaagaaggatgagagtctgagattgtgtgtcgattaccgccctctcaatgcggtaaccatcaagaataagtatccaatgccccacattgatgtattgtttgatcagttggtgggagcccaggtattttcaaagatagaccttcattccggctaccatcagatcaagatcagggccagtgatattcccaagacggccttctctaccagatatgggctttatgaatacctggtaatgtcttttgggctgaccaatgccctggcttatttcatgtatttgatgaactcagtatttatgccagagctggacaagtttgtggtggtctttattgatgatattctggtttattccaaaaatgaagttgagcatgctgagcatctacacatcgtacttcagcgactacgcgatcatcgtctttatgctaagctgtccaaatgtgatttctggttgaaggagataaagtttttgggtcacaccatctctcagaatggggtatcatttgatcctgagaaagtagaagaagtgatggattggaaacctcctaccactgtacgacagattcgaagttttctgggattggcagggtattatcggcgatttattccggatttctccaggattgccaagccaatgactgaattgttgaagaaaggagtcaagtatgaatggagccagaaatgtgaggatgcctttcatgcactaaggcaacatttgacaacagcacccgtgctagctcatcctgacaacaccaaaccctttgaggtttattgcgatgcttccggtactggattgggatgtgtcttgatgcaagacaacagagtcattgcttatgcctcccgagcactcagaccccatgagcagaactaccccacacatgatctggagttagcagccgtagttcatgctctcaagatatggagacattacttgatgggagctcattgtaatatctacactgatcataagagtctcaaatatatcttcactcaggctgatcttaatatgaggcagagaagatggttagaattaatcaaggattatgatttggaagtgcattaccatcctggcaaggccaatgttgtggcagatgccttaagttggaaggcccagtgtaactgtgtgagtatggatgcaaaaatcaccaccttgtgtgatgagttgtgcaagctgaacatagaagttgtttcctctggtgctttaagttatatttcagtggagcccaccttacatgagcaaatagtcatggcacagattggtgacaagggtgttcaagtcattaaggaaatgatcaaacaaaaggtggataaatacaaatgcttccgtcaggacagcaaaggaattctatggtttggagaccgattggttattcccaagaaccccgaacttagaaagaaaatattggatgaagctcacctttccaaattctccatgcatcccggcagtaacaagatgtatcatgatctcagatccttgtactggtggaccagaatgaagagggaaattgctaagtatatatcggaatgcaacacttgccaaagaatcacggccagtcatttgaaggtggcagtcaccttacaaccccttcccataccatcttggaaatgggaggatatttgcatggacttcattgtaggattgcccaatacctcccgacaccacgattctatttgggtcattgtggataggttgaccaaaacaacgcatttcttgctagtacataccacccaccagacagaaaagtatgcagaaagttatattgaccagatagttcgtctacatggaataccaaggactattgtgtctgacagaggagcaccatttgtagcacgtttctgggaacaattgcaagaatcacttgggacccatgtaataagaagctcagcataccaccctcaaacagatggtcagatagaaagggtgaatcagattttggaagacatgtggagggcatgtgtgctacactatggtaaggattgggacaagtgtctttcgttggcagagttctcctataataacagctaccagtccagcctaaagatggcaccttttgaggccttgtatgggagaaggtgtaggacacagctaaattggtcacaagcaggagagagggaaatatttggacctgacttggtactagaagcagaggagaaagtcagagtcattaagaggaatttagaggctgctcaggccaggcaaaagagctatcatgacaagaggaggaagcctctacagtttgaagtgggagatcatgtttatcttaaggtgtcacccaccaaaggtgttcagagatttggaatcaagggcaagttagctcctcgctacattggaccctatgagattaaggaaacttgtggacctgtagcatatcaattgaagttgccaccccatatgtcagcagttcatgatgtattccacgtatctcagctacgaaagtgtgtccacttacccacagaagtgctaccagaaccagaattggagatagatccagacttatcttatcaagagcaccccgtcaaggtattggaccaaaaggagagatcaactcgagcaagatcgattcggatgtataaagttcagtggagtcaccattcagtggaagaggctacgtgggagactgaggagtttctacgttctcgcttccccaactttctgcccaaaggagtcgattgcaacctcgctgacagagagtacgtgctcatccctgagcaaggagttgatcgagaaagagtccaggatccagcaccagagcctgccctcgaggacctgcctgccccagctttggaaggcaagccccgcagactttacccctcacgcgacctgagacgtggtcttccattccggttatggtgggtacaagtgcggtcactgcacgacggcagtcggggttctctagaggacatggttgctggagtgacttggccgtccatcttgccaccgggttggacagtcgagtgggaccctacctcggctgaggaggagcatgaggagtga

SEQ ID NO: 78082 - DNA, 1241 bp, Zea mays
  Clone ID: MRT4577_171232C.1
ttgggtccctcgaggccggccggggcggaatttgcgtacggttccgttcacctcaccggcccacactacccgaatctttataaattcgcggagaaaaccagcggcacacggcgccgccgacccatcatccgtccacagccgcaacgaacgagagacagccagccagcaacgccgcgcacgcaaacgcaacgcagcgaccgtgtcgatcgaccagcggagcggaggtttgtttgagtcgacgggcatggacttccaccacagcagcagcagcagcgtccacgcgcacgcggcagcggcgcggccgtggatcaaggcggaggacttcaaccccagcagcagcgtccacgcggcggggccaccggcggtaccggctgcggcgcggccgtggaacagggcggaggacaaggtgttcgagagcgcgctggttgcgtggcccgagcacacgcccgaccgctgggcgctcgtcgcggcgcagctccccgggcgcacgccgcgggacgcctgggagcactacgaggcgctcgtcgccgacgtcgacctcatcgagcgcggcgcggtcgacgcgcccagctgctgggacgacgacgacggcgaccaccaagtccgcggcgccggcgctgaccgggcgcgccgcgaggcccggcgccccgggataccctggagcgaggaggagcacaggctgtttcttcaaggtctggagaagtacgggcgcggggactggcgtaacatctcgcgcttctcggtgcggacgcggacgccgacgcaggtggccagccacgcgcagaagtacttcaaccggcagttcaaccccgccagccggaactccaagcgcaagagcatccacgacatcaccaccccttgaccctgcccgccgacggcgaaacaagcagtagccagccaagtagggagctttgctgtggacgatctgagaaacagaggcagggagttccagtcagcagctagcacatggtctaggctcactcgtactagtcattaaaatagagttaggattgttgaaacatctaatggagtctgacgtggcaccgtcgtgtcgagtctaggcggatgcagatcgtcaatggagtgagtcactgttaggatggatggtgcctttatagttttgtatgtatgccggcgtggcggtgtcgaagctgcagtggatagacttgcacagttgttgtctccgggcgttccttccaaagcaaacaggcaaatgcatactccgatccacgcaggtggcc

SEQ ID NO: 78083 - DNA, 395 bp, Zea mays
  Clone ID: MRT4577_171233C.1
gaccacacccgtccgtccatttttggttgggtggcagctagcattttccaagagctggctggcggtcctagccctacctactgacaggctggcaagggcctccttttctttggccgccgtaaccgccctttctttggcggaacaagggcaggcccgggccggggtaagaagggggtccttaacggggcgcgcttttttccgaagggccactggaaccgccgccgtggcatgggttgcaagctccctgttggccggcggtgccagggccaaggaggggtttttggctcatggtatcgggggtttagttttatgtcccagtattatatacctgtatggtcgtcttctctttaaatttaatatcagtccggttttctaaaaatttttttttataatat

SEQ ID NO: 78084 - DNA, 286 bp, Zea mays
  Clone ID: MRT4577_171234C.1
cactcgtccgccctctcatctggtccactacattaaagcttccatagactgagatagcagactatcatcgccgagagtgactgactgctcctgtggtcatcgtaatgggactcgaactcattaacgttttgtgtctgacggttaattcgtatagttagcattaggaactgggggaatgtgtaacaactatgaaaccagggagcaacatccagttgatgtgaatcattcatggcacattaggcaatagtagcagtggggtactatacttacacacttaggggacgca

SEQ ID NO: 78085 - DNA, 524 bp, Zea mays
  unsure (1)..(524): unsure at all n locations
  Clone ID: MRT4577_171235C.1
aattcggcacgagggtgtcggtagcgggtgccctgctcatgctgcttgccttggacgtatgaggcgcccggccggacatggacgctcccgtgcgcgccagcgcccggaccgtggccgcccgcatcgaggacttgccggtgatcgagttcgtccttcacctgcaggaccttcgcccgtttcaggcgggatgactacagcaccgaaggcccttcgctgttctggggttcatagacgcttgtgacgtcctacacactcttggcctgctggcacgatgtcctatctcactattgaagtgatggatggagaccgcttagggtctactatgctaaggtctgtgatacgcgctgcgacaactctaacgagctgcccgagttttcgcctgctgaagagtgtgctagcgtctatagatctgtgcttcaccatgtgcgagcctgtacctgaacgggcgttgctgaatctggtgccgcctcccaacatgcttgagcatgctcccttgcgtngtttgctaagactacaaccctttt

SEQ ID NO: 78086 - DNA, 547 bp, Zea mays
  unsure (1)..(547): unsure at all n locations
  Clone ID: MRT4577_171236C.1
ggggggaaaaaggaaggatccgggtccaggacaaagttttaccctccggggatgaaaaccctcctcaggacaaggaccgagttaaccgaagagggaagaacccctttcactcaaacaaaacggacttcctcacaaacggcgggaactaaacccaaacccccaggggggggcccccctcaccaaaaatcgatcgatcgatcgcccccaacttttttttaacaacacgggaacagttggtgaccacaggggggtatgccttcaaagctccaaaacagggggaggaccaggggcgccccaaaacagcacatttaccaggggacgatcttccagggctgggtggggccctcgcaccactttcaaaaaaaaaagttggggccctcgcccaccccgccggggtccttgtcgccggggaaggggtctttaattggaggaaatgttgttgaccatggggaccccagggaaaccggggcccaagtcggggttttccgtccaccaaaccgactcgttctgggaaccgngggttggagggccccaccttgaacggggg

SEQ ID NO: 78087 - DNA, 670 bp, Zea mays
  Clone ID: MRT4577_171237C.1
cattgggtacctcgaggccggccgggaccgacgccgctccccccgcctaacaacacctagaaggagagcctctcgatacacatcgggcaagctgccatccaactggcaaatggtgctgacgaatgaactgcctcgaaaatgcactgcaggctgatggccaagatgaccggtgaccaaccattgggggaggaagatgaggctttcaaaaccttcttcagagaaactgccacctgttaagcaccccccccgtgctgctcctgtagaccctgaagccactgacaaccacgaagcgagtaatgcgacctaccgccatctcttccatgctgagcaacacatcccaggacatgaagatggagcctacaacttcgatctcggtcactacaccattgcaaaagacattggagacctacgtcttgaccgtctcacgaaacttgaacatcatgtgcactgcactccaagggtgcctccatcatcgaccatggacgatgcaggaacgccgctctgatccttggttctctcctcctaggagcgcctgtctgttgactatgaaaaaaaatccaaactcgctgtcatcgcggacccatcaccacaggtgtacacatccctggttcagccatacgacagtagtcctgccacaccgatctctcctcgagcacactgatgttgctga

SEQ ID NO: 78088 - DNA, 121 bp, Zea mays
  Clone ID: MRT4577_171238C.1
aagtaacaggtggaattgaggagagagtaggatgctgatttacctaaccgtagcccaggtctgtgccttccccatggcccagaatcttgtgacaaatgtcaatcaatctggacaccacgaa

SEQ ID NO: 78089 - DNA, 365 bp, Zea mays
  Clone ID: MRT4577_171239C.1
tttatatcgcgcccgtgggaggccagctccatggtggccattggtaactacaaaggggcgactgtccagcaggaaatccacacggacgacgacgaccaacgctgtacggtctggaccgaacgagaaccaggcaaatcaccgagggggcttaccctgcacatcgtgcccacagaccagcacctgagcgggcaagcggcgaattacactgcgcaagcacatggcgaaccgcggggcgcacctgggcggtgcggccgctaaggggatcctactgtgcaccgacgacttaacgagaacaacatgtgccgacttcctggccgcgcgagcggtgcctacgcgcgggatcacgggcttctcgacgcagaacc

SEQ ID NO: 78090 - DNA, 1324 bp, Zea mays
  Clone ID: MRT4577_17123C.1
tcgatcgcgacccgacgctgtggctgtgctccaatgaaatcacgaccggagaggaaaagatcaacattaacaaggaaggatgtaacagtcaaagcgaatctcgagatgaatcaagacttagatttttcagatgaagtttttcctatctttctgttggggaccttcggcctccgaaggccctcaaaaacaggatttaacagtatttctggagtataatgcgtgaacaggtatcttcggatccaagtcggcgtcacagtagaccagagtaatacgaaggttgatacagcgccgaatgtgtgagcaggaaagcttcggcgcgacaacaaaaagtgaaaccgactattagatgaaaagtaaagtttaaattatattactatgataaatatatcaaagaatttttttatggggacgtaaaaattgcatggaatcggctgctgttgggggccttcgtcctccgaaggtcctcaaaaacatgatttgacaatgttttccgagtggattatgtgaacaggtattttcggatccagaattatggatatggagcacggccaggacgaaggctgaaccagacgaaggtcgggggcagccgaagctgtacgcagggaagcttcggcgcgatggcacaagggggaaccgacctaaagatgaaaagacttcgggggcctcaatagatttccataaaccgttaacaaatgtaatggacatggatgtaattttacgtgggctgcgtcccgcgtctataaatagatgaacagtactcccgtactgttcacgctgactttacatttgcttttgcgtcacgcctgtactttttaccttctctcaggaccgaaggtacatttgtaatttgaaatcatttctattttcccatgttaataaaatagaaatgattccatgatgatgcttatattatatctaatgctttatatgagtctttcattattatctattatatccaccaaggtatgtcttttatgaccttcggccgaaactcattatttcccgaagggacataatgcttcgaaggacgaaggactttaacacttaacacttttcatgttgccttgttcttaactcttagcatttgagaacaagtcaccaacattggcgcccacctccggtgaactcacttccacttcttgagtttttcggcaccttcggcaagcatcagcttcgtcatgccgccgaagaaggctccagcaccaggggctggcacgctgcagccgctggaccccaatcaagatgtcctttctctcagagaggcacgaagccagaagaggaaggctaccagtccaacacatccggaggatgatctagagtcgac

SEQ ID NO: 78091 - DNA, 446 bp, Zea mays
  Clone ID: MRT4577_171240C.1
ggctcctgccagcggcacgctccggcagctcgctgccttgagcgccgagcctggccggctaagcaccttggcgtccttgctggccaatacggcggccacgtcagggtcacgaacggagatggcgcgtgtgccgccgctgtgatgaagcaccttgtcgccttcgtcgtctcggtctggcagcagctggtccatgagctggagcacgccgcggtcgctcccgccgggctggggcatccagatggcgcagttgctgaggccgagggcggcggcgagctggagcatggtggtgcgcaggatggtgcgcgcgtcgatggagtcgcggatgtggtgcgtgaccgcgcgcacgacgcgccagacggtctcctcgcggtgcctgacggtggcgaggtcgcggtcgagctggcgcgccttggtgcggaggaaggactcgcggaccttgaggcgga

SEQ ID NO: 78092 - DNA, 401 bp, Zea mays
  Clone ID: MRT4577_171241C.1
gcaggggggggaacgatgccatacgattacatgccccaacacaagcccaacaaaaccgacaccaaacatgcatgggggggagccagagtcaaaccaaacgaggggtccatcctttatttttgacaccccacaagcccaaagcagacaggaaaaaaaggggacatccatgcatgccggaaacgaaacaacccaacaggatcagcagttgcaggggctgcacttgcaactgtcaccccaattgcagccgggggggggctttccaaaatcgccccccgccttaaactgggccgccttttttgtttaaagggcaacccccaagacaaaggggggggggctggcctaaaccccccccccccttttttcctccaggggaggggacattttggcgcaacccaaccgtc

SEQ ID NO: 78093 - DNA, 387 bp, Zea mays
  Clone ID: MRT4577_171242C.1
gaaccaaaaagggaccccgtttcaatggagttgttggccggcttgtccttaaggccgtcgccggggccggcccgaatccggactaccttgcaacccgtggacgtaggcggacgcttctttttccgccggttcggggggcgccagccgccaaggccccccctgttcttggaggcccggggcggaaggggctgttcgaagcggaaaatgcagaagaagccccggccgccgttgttgccgaaaatggaggacaacggcaacccgggattggtaattttaatccgaaccgccaatgtttacttttggtacccgttaaacataataacgggcggtacaacgggaaaaataatgttggctgcaaaggacaactttttgggagggtacatttac

SEQ ID NO: 78094 - DNA, 549 bp, Zea mays
  Clone ID: MRT4577_171243C.1
gttgcgtgcagaacaggagcggacgtggtgagcggacgcaagctaacatccatttgctggctaggttatatctctttggtcaagcccaataccaaaactggacataccccgtctttaaacagccaccctactagtaaactcctggatgcccccaagtcattggtcacgatgcctatccaaatacatcctgctgatcctaataacctacaggccccatccgacatgtcttcctactgcggcacgaactcggttgagcttgtgacgaatgcttggctacatcgcatcaagctgggaagggtgtgctggctgctcacaagtcaaccggtacacattggcaagcgcctatccaccattaatgtcgataacttggatgataaccggcgggctctgcgtgagctcctgttctgctgccctggtgccctccagttcataagcggcgtgatcctgtttgacgagaccctctaccagaagaccaaggatggcaagccttttgacgatgtgctcacagagggaggcgacctgcctggcatcaatgtcaacaaggacacc

SEQ ID NO: 78095 - DNA, 667 bp, Zea mays
  Clone ID: MRT4577_171244C.1
ctcgagtttttttttcttttttttttttttttttttttttttttttttttttttttttttttttttttttttttttttttttttaaacccaaaaaaacccaaacgggggcccaaaaggctttaaaaaaaatgggggccggggcccaccctgggggaaaaccgttgacataagaaaaaacacccaaccccggggggggggccacccccccccccgggtgagggggggttacccccccccccccccaaacagaaaaaaaaagcccggtttaaagtcaacaaaacggggtttattttccttaaaatcccccccaaataacggtaaaaaaccccccacctttcccaaaaaggagcaaaaaaaaaaagggggggggcccaaaaaaaaaaattttttatccaaccccggggcttttagggttggggaaaaacccccggcccaaattccggggcccggggggacccattattttaaaggcgcccccccccgggggggacccccactttttgtccccttaagggggggtaaatggccccctgggggaaaaaggggcaaaaggggtccccgggggaaaattgttacccccccaaatttccccaaaaaaaacaaccgggaaacaaaaagggaaaacccgggggcccctaaggggggccccaaccccaataaatgggg

SEQ ID NO: 78096 - DNA, 385 bp, Zea mays
  Clone ID: MRT4577_171245C.1
tttcttcaaaagcatcggccaggtacgtagaacgtatacatggtgtcgttcggcactggaagcattgccatgaggtggagcgagctccagggcaagaagaaggggaaggtcctcctggagccgctggacacgaacctccgcacgaccatcatctgctacggcgagctcgtggggatcaccggcgacggcttgaacaacaagcactactcgctgaacgttggcctctgcaagaacaggcacgacaacctgctgaccaaggcagtagaggccgccgacaagcactacaaggagagcaagttagagtacgcgagggaggagtcgtagactacctggataggagacgtcgcggttgccaccgacgggaagggccatgcaactctaggga

SEQ ID NO: 78097 - DNA, 623 bp, Zea mays
  Clone ID: MRT4577_171246C.1
aattcggcacgaggaaaaaaggtgctctcgatctagggaaaattcggccccttcccggcttctagttcccctcctcgtccaaaaccctaggccagcctagcggcggagcccgcgcgcccgcctccaggaccatggccgaagaccacttctcctccgcgccgtccgccccgtcggcagcggcgacagcggcggcggcggccgccgcggcggtcgggtcctcggtgatcccgatcgtcaacaagctgcaggacatcttcgcgcagctggggagcagctccacgatcgacctgccgcaggttgccgtggtcgggagccagagcagcggcaagtccagcgtgctcgaggcgctcgtcggccgcgactttctcccgcggggctcggacatttgcacgcgccgccccctcgtgctgcagctcgtgcaccagccgcgccgacccgccgacgccgaggccgatgagtggggcgagttcctccacctatcggggcgtcgcttctacgatttccgcgaaattcggcgcgagatccaggcagaaacagaccgagaggcaggggggaacaaaggtgtgtccgggtaggcagatacaattgaagattttttgtgcaaatgtagttaacattacttt

SEQ ID NO: 78098 - DNA, 306 bp, Zea mays
  Clone ID: MRT4577_171247C.1
tggggcccggatgtatataccccgcccacagagggggagggggtatttgccggcgcaatctgggggactgtttcaatatggggttttacaacaggagcacaaggggagggcgccagaaacatgtacacctatgcttggcccccttgggcgtgcccttgaacttgcgctttcacttgtgggtggctgcagggggaccgagaatcttaatttcacggcgcgtgcgggggctgttgagatttagagattgttctgataacagctcgttaaccaaagtgggcttgcgatccctatttttaaaactacttg

SEQ ID NO: 78099 - DNA, 359 bp, Zea mays
  Clone ID: MRT4577_171248C.1
tacccacgcttctgataaaaaaaaaaaaaaaaaagaaaaaaaaaaaaaaaaaaaaaaaaaaatggaggatgctcaaacgggtaaaaggctaagatagcagtgcaagcaatgtcgtggctcttcattagtatcaccatcatttcaggtggtttggcgtctggttatgatgcgttgactgggacctgccggctttcatggtccttaacctactcctagtcgaactcccattccatcagcctgattcgtccacgctagtggttttgtcatgtcgatttgccacctgagacaactatgcagcgcttgggcattggcctcgatggcgtggtatagatcaggcggctattcttctcatgcgctac

SEQ ID NO: 78100 - DNA, 611 bp, Zea mays
  Clone ID: MRT4577_171249C.1
aggcagaggccgaggaagggctacgacggcaagtacaaggaaggctgaggatgcggttgctgagaacgatgaaaatgagcaagaggaaagggatatggctgatggcagagaacgaggggggagtccattgagggtgttggccgtgaatgatggttctgaagtggataaggtagcaactgaggacgacaagttggatggaacttcaaaggcatccatggaagatgagaagatggaggatttgacattgacagagagggcaataaaggggagtgccaatgttaagcatgctcctgctgacaatggtggtgtggaagaagaggaggtgaagaatttgagcaagggagaggaaactcaagtatatcaggaattgagggaaaaggtttcaccagggtcaaagcctgatggtgttggagaagtggaaaagaatgaaaaaagggaagctgttggtgccagtggagagagaggccatgttggggttggggagcccaaaggaaggcacagattggagaatatgacactgggggagtggtttgttcagatcgagaaataccttctagcaaagaatgaagaggctgctgaaaaggcgatagctgaagtgcaagagaaacatc

SEQ ID NO: 78101 - DNA, 1559 bp, Zea mays
  Clone ID: MRT4577_17124C.1
cccacgcgtccggccggggtgtaaatttacattggctgcgttccgtgccaattatttgatgttcttgttcttctcgttctgttttctctttttgatcatcaaatcatttctttttccttaataatgaaatagaaataataacaaggtacttttgtaacttgttattatttctatttcattattaaggaaaaataaaaataataacaagttacaaaagtaccttcggcttgaaggaaggtaaaagtacaagcgtgacgcaaaagcaaatgcccagtcagcgtgaacagtacgggagtactgttcatctatttataggcacgggacgcagcccatgtaaaattacacctatgtccattacatttgtcaatggcttatggaaatctgacaaggtccacgtagtcttttcatctttaagtcggttcccctctctgctatcgcgacgaagcttccctgcgcacagcttcggctgtgcaccatccttcgtggagcttggtaatcagcccgtccttcgtctggttcatgcttcgtcctgaccgcacttcatgttcgtaattctgagtccgaaggtacctgttcacataatccacttggaaaacattgtcaaatcatgtttttgaggaccttcggaggacgaaggcccccaacatccagcgcaccggcggacaagtcggcaaccatctcaggaagtggaaaaggatttatgcgaagatcgagaagctgaagaacctggatggagctgtctgggatgaacataattgcgtaatcagtcttgacgcagagcattacaataaccatattaaggaccaccgtgaggatgccaactacttgaacattccggtcgagcattatcatgagatggccattatatctggcaacagttcggcaaccgctgctgcatatgttcaaggatcaaatgagccacttggtgttgaagtgactgaaacagatagtgcaccagctgtgactgaaacaggcaatgcaccaactgtgactggaacagacaacaatgcaccgaaacccacgtgtagtgtgccaagtgaacaattcggtggtgacgacggaacgcactcatcaggcaacaatggcgcagaagagtcttcagatactaagcagccaccaccgtcgaagaagcagagggtatacactgacgatgacttggttgtgataatgagtcggagcctcggcgagcttgcttcggctataaaaaggctttccgaacaacccgaccttcctgttccgaaggggttgtacgaagagctgaagagcatcccagggttcgaggaggcacatcttgagcactactatgcttacctgtgcgagaatcctccgcttgcgagggcattctatgcgctgcctcagctttctagcaaagttacgtgggttgctaggtacgtcaagaatcacagctccgaactgatgtagctactctgatgatgtggtggtattttggtctagtcactagggatgaaaaaaaaaaactctttttgttgtatgacagacagcatggaacgtgactatagtagggatcttttaatataacataacgtagattagtggcg

SEQ ID NO: 78102 - DNA, 452 bp, Zea mays
  Clone ID: MRT4577_171250C.1
aaagattgttcgtacaggagttgcactaagtcaaaagcaatgtctcaccattataaaacttgtgtcgatgagcaatgtcctgtgtgcagcgttgtaaggaagtttttgcgccaatcaactgaacaggcatctaagcaaaaaactcttgagtctagaaaacttgctcaacaaaatgtgcctcagagaatcatgaacgggatagaaggtgatagaatggatgttgatccaatgtcagctgaagcgttcgaggatcaaccatctgttccaaaacgtttaaagatgcatcttccatcactcagtggcccagaaaatgatatctctgtagtctccaatcatcatgtaaacccaggctttctattgcaggaagcacagcctgagcagcttgagcacaataataggacaacatatctgaaacgagaggtagatgcaaaggctgacattcgggctcctca

SEQ ID NO: 78103 - DNA, 318 bp, Zea mays
  Clone ID: MRT4577_171251C.1
ccgacgcgtgcggaaccgtacctgcgccagcgcggtggggctggtggcccccttctgggcgccgaagacccacgtgctggtagcacgcacgcacagacgccttactcagccactgtggttggaactacgagctccagagcctaatcgacggcgcgcccatggtggagtggatgctctacgccgagcttaggcaaaacatcttgatggtctgcggacggcatcggcgctgcgctcagggtgcacgagtggagcaagcggagggagattatcgcgtacacagtgcgcgaggagatgcacgagcaaagtaagggccccagg

SEQ ID NO: 78104 - DNA, 353 bp, Zea mays
  Clone ID: MRT4577_171252C.1
ctgcccgtaccggaactgatttaattgccggctagctcttttgttgtcggccgggccgccctttttttttttttttttttttttttttggtccaataggacagtacaacggggtaaaaatggacagaggccatattgtctttaccataaaagaactaggcacgctaagaaaacaaacccaagattcctcaagacgctatctagtagttcctgtaactcatcgagtgtcctccctacagttattaacacctgaaagggaacctgtgtttattaccgtcaaacattgatatgtgtatatccagtgggatacttatttcacttatatgctggccctacacaatgtttttttttttt

SEQ ID NO: 78105 - DNA, 480 bp, Zea mays
  Clone ID: MRT4577_171253C.1
aagatgcagcgtactaagaggggggggagttatggtcaatgcatacgaggagtctgattctcctacgcaaccaaagggtttgttatttagcgtgcatgtgaggggtcctctgggggggggtccaaaacaaatcagtgctgtcagtctgattaggagcatcatgttgagatggcaaaatcaagagccctcatggaacgccaccgagcgcgtgagcgcgacggggttggcgtgaaggagcggcgagcttgtcgccatggccttcttggtggcctgcaggcccctgggctcgaacactgtcccgagcttgtcacctgcgcggctgcgccctgctgctccctgtcgcctctgaccccgacgagggaccagatggagctcctggccaccttgtccacatcgtctatccggatggtcttgggagcccacaccttggcgctgccgttgccatgggcactgccgttcctcttcctcccgtcgtcgcca

SEQ ID NO: 78106 - DNA, 356 bp, Zea mays
  Clone ID: MRT4577_171254C.1
gtaccgctgcgtagacccacgcgagcgagggtttcctagtctgcatcgcatgggaagtagagaaagatgagcaactcggatatcatcattatagcaaacaacccgccatatgagaggggtctagtgctggaaacactaaattttggaactaatataggtgaagagcgagctcgaagtgtctgagaggtcggacaccatcacattaacgctgcagatcaaatgagtcgctgaaaatgaagcgcacctcctgattcacattttcatttggcatcttttttttactcgtttaattatggccttccggctgctaaaagcgtgtatataagcaattaaaatgattgagcacaggttctttc

SEQ ID NO: 78107 - DNA, 585 bp, Zea mays
  unsure (1)..(585): unsure at all n locations
  Clone ID: MRT4577_171255C.1
ttacaaattgctgcggcgtttcaggagtcgtggcgtgtggaaggtcacaaaaaagatacccaggcaccgatcgggaaggaattccggtgcttgagaaggaaggatctcatagagaccatggcgaagaacatacctgcaggatcgatccgcttcggctgccacgtggtcgcgatccagcaggatcctggtacccacggacccattcttactacagtcgacggcggcacgatcagggccaaggtgctgatcgggtgtgacggcgggagctcggcggtagccaggtacctcgggctgtcgccgccgaaagtcatcccccgcacagtcttgcgtggcttcactgcgtatccgcatgggcatccgttcggggccgagttcctgcggattagaggaggcggngagttcgtcgtcggcaggaataatgctcgccaccaaagacgtgagcgccacgacgacgaaggatttcatgctggagaagctgcgagattgctgcgctcccgagatcgtccagatggtccaggactcggacccagagtccctcaacgtcgtgaacagcatccggtacccggtctccgtggcaggtcgcgc

SEQ ID NO: 78108 - DNA, 493 bp, Zea mays
  unsure (1)..(493): unsure at all n locations
  Clone ID: MRT4577_171256C.1
agcagtggtaacaacgcagagtacgcggggctgcgggccgccgccgtcgtgggccgtcgacgacgacgtggtcggcggaggcgcgttccggctcatcgaggagccgctgctgtgggagtactgaactggccaatgccactgcccagtgttggaccgttcggacacatgtaaaaatgccgctgcttccgctcctctctctctctctctcttcttcttcttcttcctattaaaaacatcgaggttgctctgctttttcttctccgggttttcctttgccagatttaggcgccgcgcttgtataaagtgactttcttttgtttctctctcctcctccacttgcttgatttgggggacaagaatatgtataattaagaagcatcttgtgttccgtcaaaaaaaaaaaggaaaaaaaaaaaaaaaaaaaaaaaaaaaannnngggaaaaaaaanaanaaaaaaaaaaaaaaaaagtactctgcgttgttaccactgct

SEQ ID NO: 78109 - DNA, 1548 bp, Zea mays
  Clone ID: MRT4577_171257C.1
ggaggagacatggaggaggaaggccatgacatcgtcattgtcggcggcggcatctgcggcctcgccactgctctcgcccttcaccggaaagggatcgccagcctggtgctggagaggtccgaggccttacggtcagacggagccgcgatcggtgttcacgccaacggatggagagccctggagcagcttggagtagccgcggagctcagggagaccgcggacctcatcaccgccgcgagtcgtggcgtgtggaaggtcacaaaaaagactacccaggcaccgatcgggaaggaattccggtgcttgagaaggaaggatctcatagagaccatggcgaagaacatacctgcaggatcgatccgcttcggctgccacgtggtcgcgatccagcaggatcctggtactcaccacggacccattcttactacagtcgacggcggcacgatcagggccaaggtcctgatcgggtgtgacggcgcgagctcggcggtagccaggtacctcgggctgtcgccgccgaaagcgatcccccgcacggtcttgcgtggcttcactgcgtatccgcatgggcatccgttcggggccgagttcctgcggattagaggaggcggggagttcgtcgtcggcaggttgcctgtcacccgcaacctagtccatttcttcgtaaccatgcctaatcctccaacaggaataatgctcgccaccaaagacgcgagcgccacgacgacgaaggatttcatgctggagaagctgcgagattgctgcgctcccgagatcgtcaagatggtccaggactcggacccagagtccctcaacgtcgtgaacagcatccggtaccggcctccgtggcaggtcgcgctcgccgccttccacaggggcgccgtcacggtcgccggcgacgccatgcacgccatgggcccgttcatcggccagggcggctcggcggggctggaggacgccgtcgtgctcgcccgctcgctgtcacgggccgccgccgccgccgccggcggcggtcacggtgccgctgttcgggagtacgtccgggagaggaggctcagggtggcgctgctgtctctcgagagctttgtcgcggggacgctgctgcgcgctaggtcgctggtggggaagcttgcctgcgtggctgtcctggcgctccttggcaccaggtcgcttcggcatgccgacttcgactgcggtcgcctctagtcctcgacctcgaggatgcatttccttagcttgtggatcatggcatattggcttctgtgcgccggacaagaaaattgtgcgacgacaataattgtctccatccttcatcccggatgatgtgatgaaacgatgcatctgtttcttttttttttccttttcatttttaacttttcatgttgagcactacgctgaaaacaaatgaacgaccctcattggtcagtttgtttccgagagaaaggagttagctatctctgcaccttacttattctcatctcttattttaaactagtgttgtctatgtatttctgtcgtgcaaaaacaaaataaaaaatgttatactgt

SEQ ID NO: 78110 - DNA, 335 bp, Zea mays
  Clone ID: MRT4577_171258C.1
tgcaacggcctgggaggaccagtacaggctttcctgccgcgactgaaacgtctgcctcgggcgcacggaccgtgacgacaacgcgcacagactggatcaaggtcatgaactacagcagctgggtgaaggatcaggaaggctaccctgacaccttgctgggcaacaaaagctgtgtatatgatgtgaaccattgccttggccagtaacactacgggcatcagacctggcataatccatactgcttgtacaagtctgcgacgtggaccaagatccgggacgttaacgacacgttccggtacgtaacgatattcgacatcatttacgtgaacttcaat

SEQ ID NO: 78111 - DNA, 1212 bp, Zea mays
  Clone ID: MRT4577_171259C.1
cctacccaagcccacagtcaaagcccctacatctctccactccccgcgaacaggccgagccacccagacctagccactccccagcaggcaagcaacctcgccaaaaccctacgccgctcaactatgctcatccggcgaccgctccaaaccctcaccctccccctcctccgccgccacttctccgccgccaccgtcgaggcctttgtgtcccccgaccaagccaccgacccgctctccccgccgtacgactacctcccgggccacccgcggccagacgctaagcacaatgaggtgatcctcgccgtcccgcgcgcctcttcggggcgccacgtagccgccaaggagcgcaaggccgggcgggtccccgccatcgtgttcgagcaggagaacggacaggagggcggcaacaagcgcctcatctccgttcgggccaatcagatccgcaagctcgtcgaccacctcggccggtccttcttcctctccaggctgttcagtctccaggtctggtcagaacatgccgggcagggcgaactcatcgaaagcgtccgcgtcctacccagaaaggtacacctgcatgcaggcactgatgaaccgctgaatatcacatttatgagagcaccttcttctgcacttctcaaaatagatgttcctctgatgttcattggagaggatgcctcgcctggtctcaggaaaggagcttacttcaacaccataaaacgaacagccaagtatctgtgccctgctgacatagtaccaccatacattgaagtggatctaagtgagttggatgtaggacagaaattgctgatgcgtgatctgaaagttcatcctgcgttgaagctgcttcattcgccagatcagcccatctgtaactttaccggatcaaggtctccagaatagaagaagggaaaataacttgcttctttgtatgagctgttttgagcacaataaggttttgtttcgtacttgagtgattcaggtgctacttgtcctactgttaggatgaattgtagccagagacacctatttttacctcaggaagggatcttttgagcaggtagatgctactacagctagacgcacttgcaaagtttcctaaaatatggtcatctagtgttaacagaaacttatggtgctgtgagcaatattgaaaattgtttgcaatctaattgtttacaatatgatttatctgaggatgatcaagaaaaaaca

SEQ ID NO: 78112 - DNA, 1174 bp, Zea mays
  Clone ID: MRT4577_17125C.1
aggactataggccttacttcaatggctaatcaacatacaaataaatcttatctacacgagatagacatgtgaattgctctcttgagacggcgagttcttttgccagatggaaaatctagcatcattctgcccttttttacacataagacgtttatgagcaaatcatcaccatgtacgaaattatctattcttttgctagtttctgctcagcaggtattgggggccttcggcttccgaaggtggatgaaaacggtatttaagaggaattcaggggtattatgcaagttaagtgtatcaaagatcaaataaagcacccactgtggaaggagagcgagtgttgggggccctggtcgtccgaaggtcctcaaaaacatgacttgacaatgttttccaagtggattatgtgaacaggtaccttcggactcagaattacgaacatgaagtgcggtcaggacgaagcctgaaccagacgaaggacgggctgattaccaagctccacgaaggatggtgcacagccgaagctgtgcgcagggaagcttcgtcgcgatagcagagaggggaaccgacttaaagatgaaaagactacgtgggccttgtcagatttccataagtcattgacaaatgtaatggacataaatgtaattttacgtgggctgcgtcccgcgtctataaatagatgaacagtactcccgtactgttcacgctgacttggcatttgcttttgcgtcacgcttgtactttttaccttctctcaggaccgaaggtacatctgtaatttgaaatcatttctatttttcccatgttaataaaatagaaatgattctatgatgaagcttatattaaaaataaaaaaaaaaaaagcccacgagaggacatccagccacataacagcacagctattcaaggagatggatctgaacaggaacgggaaggtgaccctcaaggagttcctcttctccatgatcagatgggctggtctcggaaccgaagacgatgacagcgatgaggcctcacctatgatgtaacttttttttcttttcttttggtctgcattttaccagttgaataagtaaaaagtatgttgacaattaaaagtaaaaataaaaaaatcataaaaaaaaaaaaaggtacaaaaaaaaaaaaaaaaaagaaaaaaaaaaaaaaaaaagcggcc

SEQ ID NO: 78113 - DNA, 694 bp, Zea mays
  Clone ID: MRT4577_171260C.1
cggggatactggtctggaattgagctcccctagacccacggtggaaccgctgcggaatcttgcccgagattgccgcagcgcccacgcgtcttccccaaagaggcataggcatctctgcctgtgcgtctgcggttgagttcatcccgcaagtctccagtcggggcaatccttactgaggacgtacgctccggggtagatgcttcgcgtcgatgccaggacgatcgaggcctgggtctgaccgagccagagagcgccatgccgaggaggcgatctacatcgccacgccactgcctcatagcccctggggaagccgtgaggctgggcaagtggcgcaacagttctctggccacagaaagcgctctggcgggggtgtccctcgtcggagtctgggacgcccactctggcgtgtgccgtcgcgcagggtgcatggctgcaacaccaagcgtcggatggccagaactctgcggcgtagaagatgcatcctcctcctccatggagaaactttcagaggtttcgccgcggtgctcggcgatacagaccatgatgctgagctggagatacaagcgaaaacctaacgcctaggcccctacctggcgtgccaaatgtcggagagtagatctccggccgggtggtgggagtgcacccgccctaagtcctgagatgaggaggggcttaggcattttgcttgatcgat

SEQ ID NO: 78114 - DNA, 264 bp, Zea mays
  Clone ID: MRT4577_171261C.1
ctccacgttaaaacctgttcctcttatccccccaagtccggatcccagtaaggtagccaagctactcgcctccaccttcctgaggacgacttcttccaggcaatcgtccccttttcccccacttgactttacctacaatgcaagtgtacgctctctttgccgtcctctcgtacatctcgagctacggacccgagcgcgtcatgacctcggtcccttctatggcgatcaccccagatacctcaccggcctaactccccgctggac

SEQ ID NO: 78115 - DNA, 432 bp, Zea mays
  Clone ID: MRT4577_171262C.1
agatgtcgacggctttcccccgcaccctattttcgccgtggaggcgctgccgttgcggggctccgggctctaggaccagttctctcggaaggttgtggtcgagcatgtcgcctacctgaattccgatcgtgtccgtaccgcatgactcatcacggtaacgctgcataactagattgaaagtgctttacttatcgactcgggctgctaagcattttcattgggacattgttcgacctgtgaaggtctctataatcgctcgctctatcaccgctcgcaataccacttgcttggctgatgacagccatggtatcgtgttgggatcccttgtaccagtggggagactgtgctcatcggtgctcctgatgtcgggaaggcacgctcccccatggaaaatgagcgcggcgatatggtggaagcgttcgtcgcccacgt

SEQ ID NO: 78116 - DNA, 218 bp, Zea mays
  Clone ID: MRT4577_171263C.1
cggacgcgtgtgcttggacaaaggggttttgggaaagtctatatacgagcactaggaggggtcactattatttctgtataacgctttacttatttcgaaagtccaggaggagaggctgctttcttgcctgaggtagacctaattagtgttgcagctcaccggaatcttctaagactgatgggtgtccgtacaacacatacagaccgcctacttgttta

SEQ ID NO: 78117 - DNA, 1858 bp, Zea mays
  unsure (1)..(1858): unsure at all n locations
  Clone ID: MRT4577_171264C.1
gaggtcctgccgggggatttaggtgattgcgaatcccgacttcgcctattcattgcgtttgctcgtacgtctctacgtctggtccatgaactgctcgtcatgtgctcgatggaatgcaccggtgacactgccgtagttacctgcttgtgcacggatgcgccggcgagagcgacgtagctgctcgcatggcgccaaggcgtgccttgccgaatctggcttccagatgtgttgattcccaaatatgtttattacgtgcagcatctgccttgccactttgtaaacacatggtttagctggtattgataaaattgaagacgccctccccattgtgctgtagttggctagttgctaaatgttgccatagaatgccccctcgtcctttctttgataaggagtacgagacaaccatcttggtctttcacttcaatgatgttttttggaaggaaagcacggtgaaattatctagtggtgttaaaanttatgtttgttttctgactctacatatgtgtctcgctcttttgcccttggtagtttgccacaaatttgagagacctctatgcatttcttctcagattcgaaaaaatgttaatccagnttagtgttaatcagctgaagacattgtgtatgtggggaatatttttgtgcaaccagaggaggatggttggctgatttaccatggccgtactagttggcatgagatattgagatgtatacagtttggaaggattcanggcagttntaatttaatgtatcttatcttcctgcagctcgaggccccgggagagcgagactgggagccttcgaagccacacgccccacgggccacgggcgcagctcctttcccctgtaccccccaacggcccaaccccgctgggtcgctactcctctgctcctccggtgaccgcgtcatgccgctcccgacgatgacccactcctctgcctatctcctcccggccccaaccgccccgtccgaccccagcggcgctgccccgaccacctacgcgctcgtcgtcctcaaccagcgcctcccccgcttcgcgccgctcctctggtcccgcgcgcgcctgcgcgtgtgcgccgacggaggcgccaaccgcgtcttcgacggcatgccggaactcctcgcgggcgaggaccccgccgaggtccgcaccaggtacaagccagatgtaattaaaggggacatggactcaataaggccagaagtgaaggagtattattccaaattgggcacaaacatagttgatgaatcacatgatcaggacacaactgacttgcacaaatgtgtatcatttatcacaagcaatctccctatcccagagaagtctaatctgtgtattcttgttcttggcgcacttggcggaaggttcgatcatgagatggggaacatcaatgtattataccgcttttcaagcatcaagatcatcctcctatcagacgactgttcaatctttctgctccctaagacacactcccacgagatccatattgagaaatcggttgaaggtcctcactgtggtttgattccgatgggtggaccgtcagctaccacaacaaccacagggctccgatggaatttagataacaccaacatgatgtatggtggattgataagcacatctaacatcgtggatgacgataaagtaacggtgacttcagattctgatctggtttggaccatatcgcttcggaattgagttcaacttgtataattccatgcccaaattttgtcgcctcaaattacatgtattcagtttcaatattattctgtaactggtgtgatattgttttccgctgcatgtcgttatgtccatatatgtgaacttattcttcatagtttaggaatccagcatctgcc

SEQ ID NO: 78118 - DNA, 369 bp, Zea mays
  Clone ID: MRT4577_171265C.1
cgaatataatccttttgaaggccaataggccagggcggtcatgtatgatccttaaatccttgcaatgacaaacctcatttcagcgtaccacaagaatgacgtcatttcatttgaaaagatcctgtaaagttatacactaacaatactggaccatccttttatccgtaactatattgcggacttattccagaacattataacccaagtgctgctcaagctcaataaaacatatatctctgatatgataccattcatttcacaggaactcaatttttcagaaaaggatgacttaacagatttttttgttattccattcttcacaaccttattcaaggcctaatagataatgttaacaagcttgtttaactt

SEQ ID NO: 78119 - DNA, 905 bp, Zea mays
  Clone ID: MRT4577_171266C.1
gccgggatccatctcttccggtgccccgacgccgttgacatcgtcgccaagctctcggaatgcatcgcctcccgcggtggcaacatccacagcgtcgacgtcttcgtccccgacgacaaacccgtcttctactcccgcagtgagtttacctacaatccaaggctctggccgcgtcatgagctccacaaggatttcctcaatctctcccgctgcttcaatgcgcaaacctccaccgtacgagttcccgatcttgaccccaaatacaacatctccatcctcgcatcaaagcaggaccactgcttgttcgatttgctctatagatggcaagaaggcaggcttccagtacacatcaattgtgtcattagaggcatggaatcccataccactacttacccaccgcacctgccaacaaaagagagaaagagatcttggaattgatccagggtacagattttgttgtgctggcaagatacatgcagatactctcagaaaacttgttaaaagcatatggtaaagacattatcaatattcatcatggccttcttccctcatttaagggagggaatccttcaagacaggccttcagtgctggggtgaagttaatcggggcaactagccatttcgttactccagaacttgatgctgggccaatcattgaacagatggttgaacgagtctctcaccgagacacgttacagagttttgttgtcaagtctgagaaccttgagaagcagtgcttagcagaggctatcaagtcatattgcgagcttcgtgtcctaccatatgaactcaggaagactgtcgtgttctgatctgagctccctttattttctgtcttattgtacttttatatggattgataaaatgaatttttttagctcaaaaaaaaaaaaaaaaaagcggcc

SEQ ID NO: 78120 - DNA, 1178 bp, Zea mays
  Clone ID: MRT4577_171267C.1
gtagtttaccaaggaatgggattgggaatccatatcatccaccaaccgcccccacccagtctgagtctgagtcagaggtacccacccactcatccgtccgtccatccaatgcgatggtgtcgttggcgcgccggccgctctccgccgccgtacctgcgggcaacctcctcggcatccatctcttccggtgccccgacgccgttggcatcgtcgccaagctctcggaatgcatcgcctcccgcggtggcaacatccacagcgtcgacgtcttcgtccccgacgacaaacccgtcttctactcccgcagtgagtttacctacaatccaaggctctggccgcgtcatgagctccacaaggatttcctcaatctctcccgctgcttcaatgcgcaaacctccaccgtacgagttcccgatcttgaccccaaatacaacatctccatcctcgcatcaaagcaggaccactgcttgttcgatttgctctatagatggcaagaaggcaggcttccagtacacattaattgtgtcattagcaaccatgatagaccacaagataatcatgtacggcgttttctccagaggcatggaatcccataccactacttacccaccgcacctgccaacaaaagagagaaagagatcttggaattgatccagggtacagattttgttgtgctggcaagatacatgcagatactctcagaaaacctgttaaaagcatatggtaaagacattatcaatattcatcatggccttcttccctcatttaagggagggaatccttcaagacaggccttcagtgctggggtgaagttaatcggggcaactagccatttcgttactccagaacttgatgctgggccaatcattgaacagatggttgaacgagtctctcaccgagacacgttacagagttttgttgtcaagtctgagaaccttgagaagcagtgcttagcagaggctatcaagtcatattgcgagcttcgtgtcctaccatatgaactcaggaagactgtcgtgttctgatctgagctccctttattttctgtcttattgtacttttatatggattgataaaatgaattttttagcttaaatatatccatcccctcgacattatttaaaaaaaaaaaaaaaaaaaatacaaaagcgatgagattttaggtgggaccccttgat

SEQ ID NO: 78121 - DNA, 1923 bp, Zea mays
  Clone ID: MRT4577_171268C.1
gggagattgatggcactgttagaaaaggaaggaggaaaaatccaaatgtgggtggatccagaaagaatctggaggtcagtttgtcagaaagttcacggaaattcattacgtgcattagaaaatatatgatactctatttaaacctgctggagaagaacacggacctgtggactcttgagaaggcttatacttatctgcgaacagataagaggtttgcattgtgtttaggtgatattgttcctgttggtcttgggaagtatattctagttctaacggcagcaattcataatcctgagattcgtcgagcttctggtgatgcttctgttgagcaattacttgagaaaatgttcactgtattcatggatcatgcgaacatgtgggctgatataagcaatataccagaggtgaacagtccagaattatcggaaagcaatctttacagctatatccaccagtacatccatttgctcgagagtgatgtacgactagatgttctagaaggactaaacgagaagataagaaagcgtttcaagacaccgaagttatcaaatagtaacttcgctaagatatgcaagcatgcttctctggcatggtgccggtgtattctcatcaaactggcctcaatcactccactgcctgaatccgcagatgcaaccaatcagcctgcaccattatccaatgggcttctactctatgttgacttgcaacctgatgagcttcttatctcatcccctgatgggcctgctcaattcaaagggcttgacatgaactggtttgagacacttaacagaattaaaaacatcccggtcaagcaaacatccgaagataacttggagactgctgttacgttaatgaagagcacttataacttttatcgggagagcccttgtggaacatttccttcaggtatcaatctctacacggttacaccatcacaagctcctattgaagggctaccgccaaccgctgctgtagttgagacgctcgacttaagtattccaagaaaactccttctgtgggtatacactctggttcatggtcgttactcaaatatatcctccgttgtaaagtattgcgacgagatgaagttaagaagtaaaagaggaaccccagctgcgtctgcttcgtcacaagttgtgcagccagtgtcgcatagtaccgtttcttcccaagttgtatctaaagaaaagagctcccaagttgaacccgctgaagcagcacaaaatccttctgatctagctgccacttgcgttcctgcataccaagaagttggtggtgctagtgcctcgcaaagtgccattgaggcccagaaagctactgctgcggcatctcagctcactcgcagtggttcatcaagggcaatggaaaatgcacaggacggcggggagaggaagtaacgagatagagttcgtttttttttatcgtctatgctacatcttatggatgcatatgatcctgcctgacgattctcaggtctcagctctccgtggctccgtgtgcaaatctctgccacgggcgtgttttaacgcctgattggatggttgcccgctggcgcgcccggccagcctcgtacggccacttcggacgcatctgcatcttcggaggtacccgcagatgtagatgaatggccgtaaaatggtttggtctgcgtctctttacatataggcaaccaaatgaaactcagataaagttaactcatgtggagatggtgcgggtaaccaatcgaacggttaacaaattcaggtcgtatgtatatcctggtttacagttagtgtttcctaagtgcatttgtagattatagagctgtcaagattgaacgatacatctgtaaggtgttacaaatgctaaatgctaatcatgattttgtggctgatgctaaaaaaaaaaaaaaaaaaaaaaaaaaaaaaaaaaaaaaaaaaaaaa

SEQ ID NO: 78122 - DNA, 302 bp, Zea mays
  Clone ID: MRT4577_171269C.1
gtgacatgaagccacaaaaattaggggcatctaattttcaggaacaccaggacaatggtactgagcaaaagtctcctaaagagactgatgaacgagaccagctacttgtagccaagaaagagattctgacccgagaaatggatgagcatgagacacttgatagagctcaacaagcagatgaaagtcctcagcagacagtgagcataacatcctatgaagaccatgaactggttgagtcaaaggtacacgcacgtgatctcaatgtagtttcacccagagaagcttctgaagctgaagaaaac

SEQ ID NO: 78123 - DNA, 254 bp, Zea mays
  Clone ID: MRT4577_17126C.1
aacaaagataagtaattttttagcaataaaatttatcaagtgtttgatgcgttcatggcgaaacatgtgttttgattgatgtgaattttggatctaatttttggaattaatcttgtgaagagaatctcatttgttcaaataataatgaattattaaaataataaatttggtaagtatgtattttgatttgttcataataaacttgagtttatcctaattgtggaatatatatatatatatgtatattttgcaaa

SEQ ID NO: 78124 - DNA, 647 bp, Zea mays
  unsure (1)..(647): unsure at all n locations
  Clone ID: MRT4577_171270C.1
ccgggttgacccccggggtcgattaatttttaattgcgaaggggggcccccnnttttttttttttttttttttttttttttttttttttttttttttttttttttttttttttttttttttttttttttttttttttttttttttttttttttttttttttttattttaaaatgaaaaaaaaaaaaaatgggtggaaaaacgcaaaaggtttgtgcacctcgtttcaattgttgggacaaaattggtacggagtacagggtgaacggattcattacagcagcaggtaacatgacaatgaatgtagcagtagcaatctcatttttacagtggctaaaccaatcaatcaaccgaacggacgaaggagactaggggaggaaggaattgtagcagcgatctcgctcaccattctcaccgggacgcccgcggaatcctcaaatccacccgaaccggtcaccattttttttcctgagatactttggacacctttcctttgaccactcaatcagcgttccttcccctgctccggtccgacgaccgatgtggcggtcaggcgcggccggctccgtcgtggggcggcagcggcggcgggccgaagagcggcggcgcgtcgcggccgccgactaaagagctcgtcgacccagcaata

SEQ ID NO: 78125 - DNA, 157 bp, Zea mays
  Clone ID: MRT4577_171271C.1
cgacgacgctggtacgaggtgggcggcgcgctccggtggaggcgaacggcggacgcgcgtcatggtgtacgtccagggccctgacgccggcgtcgacctcatggtcgcggggctccaggtgttccccgtggaccggaaggcccgcgtcaagcacctc

SEQ ID NO: 78126 - DNA, 356 bp, Zea mays
  unsure (1)..(356): unsure at all n locations
  Clone ID: MRT4577_171272C.1
aaaatcctttattattntcccactccctttttttctttttacactccncacctactcccgaccggtttttattaagaggcccgcgccccacaaactcacacaccacctacatctacccctcccctctccctattcctcctcccacatacacttttcaatcactttttttttttttaatttattctcaatctacccctcattctcccctcctcactcttttatttaccttcatatcatctatcattcaccaatcaattttaatttcttattcttttttctttatatactttattctcctttttttttccttatccaatccatttttccaaaatttaatcccaccctatttatttttt

SEQ ID NO: 78127 - DNA, 491 bp, Zea mays
  Clone ID: MRT4577_171273C.1
attcggctcgagcgcttacctactctctgactgtcttttgtactgagcagcgcgcgggccttccgcgcccgagggtcagctcggaacgcactctgtcccactcgttgcacctggacaggaccggggagacggatgcactcgcgccaaggatgacgagctcaaatgaatgttgacgatcttaccgtccaccctaatatgtcgcaatgaagggtcacactacaagctagtcattcaagatcatgataatcatatggcacctaaggagggaattaaccgcctagctgtttgctgtcgtaaggatgcctacggactagctgatgaaagaatgatgacagacggctctgatgtctacctatgtatagttgtgcacgtgtgcccatttcactattagcataaaccatgtttgcattagagatatagcatgacactaattagcagtcgtgcggatggtgttataaagatatgaaccataaacttctattgttacccct

SEQ ID NO: 78128 - DNA, 586 bp, Zea mays
  unsure (1)..(586): unsure at all n locations
  Clone ID: MRT4577_171274C.1
atctacctnananncanncnnnnnnnnncnnnnnnnnntaaaaaaacggtttgcttatttgggttccactacatccttttttttttttacaggcgcaactcggcagcaaggaagaaggaaaaccgacaggcctagaagcaaacgctgtcgtcgaagctccagagccccacgctgtcgtcgcaaaacacggcgtcgccgcccaactggcagtccatcgtcacggcaggctcgtagcacacgccgccgtcgaagaagctgaacgggtcgccgaacatgaaagcgtccatcagcagcgtgtcggcggaatcgtcggacggcgccagcgcaggcgccaccttctcccttgcctgggcttcttcctggggctctgtccgggcgcgcttcgaggcgccgccgagttcgacgcacaagtcgaccgccgcgccgtcgccgggggccgcggacatgccctggcacgacctgtcgggcagggcgccgcctcctccgttctcgttctcgttctcgtcctcgtccacgcgcggcgccgccttggcgacggcggagcggcgcttggagttggacgggaagttgagcctcgtgccgaatt

SEQ ID NO: 78129 - DNA, 295 bp, Zea mays
  Clone ID: MRT4577_171275C.1
agcgtgggggactgctattacgaactaagtgtcgagattatcgaagtgtgcctggcgctgaagcatcggaatggagtttagatgagtttggaggaactacatcaacaggtgttgaagggaaggggcaagttcgcccaggatgtcagtcaagatgacctgatcagagccatcgagaaactaaaggcacttggcactggcttcggcatcatccctgtgggcagcacatacctcattcagtctatgccagctgagctcagtaaggatcacaccgtggagctgcagcttgcagagaaga

SEQ ID NO: 78130 - DNA, 476 bp, Zea mays
  Clone ID: MRT4577_171276C.1
accgagctagctccctgcagcgtgtacgtacctctgcttctctatctagaaaattaattagtctacgcgctacacgcaacaatcaccagtaatttctaacactcgtcaccaacgccatggccatattgcggtcaccatcggcaaggccttcatcttgatcattaccaccacctttttcttccagcggcacgacctgttgtgccctcctcttcttgccgtcgttcaggcgcacgccaaacagcttcactggcgcctcatcgtcgccgcggcgtggcctccacgtctgtgccgccgaggcgtcgtcggcagagccgagctccaccagcctgcagctggcggcggtcgtcgtcgtccccaccggtggcggcggcaccgccggctccacgtggttctgcaggaagtatatgatgtcgttgtagagccgcctcatgtgggccagctccgacagcagcagcgagttgcgccgccggagctcc

SEQ ID NO: 78131 - DNA, 581 bp, Zea mays
  Clone ID: MRT4577_171277C.1
tttttttttttttttacaccgtagatactacgtcctgatttttttttcccttcaataaataaaacgctacatcctgctgctaccgcagcattatggaagtcatgctgtacaccgacggatgtatactgcagcggtcgtgcatttttttttggtgggaggtaatgtaccgacagcgacagagaagtatccaggttacttctttggggattaaatctcctcctagtcataaatcacagaggggatttaactcatccatcggttttctcggcggacaacatgattagatcctaataatacaacccgatcagcagttacgaaccttgctccatgaatacctcgcagctagctagcttcaaactgccaagctgtagctggagtaaaaaaaaatcaaatgacaaatgcaacgaaaaaaagtccagttgtttaaacttttttgcttcaacaaaaaaaagcagatctaaagggaatccaatccgtcaataaatgcatcgagttggtgagcacattagcctcaaatgtaggtaaaagacgtacagtacatggagtcgaccggtccagctccatcctatgggaaaatggcg

SEQ ID NO: 78132 - DNA, 348 bp, Zea mays
  Clone ID: MRT4577_171278C.1
tctacctgtactcgctgtccgtcctggagcaccagatcgtggggaccctcgttccagtgcttaaggacgtggtgatgaatatctcgcgcgtgcagaagctgacccccgccgtgcagtgctcgcttttcaaggccttcgtcgatgtcggcgacaggtactgacacctatcgctcggcgtcaagtgctccaatgaggtcatcaccgacattcgaggcgccatcatgctgcccaagctgtcgagagtgcccagtacggatgcgctactggggaaacttgatcggacatccggacactgtgctctgcaaggtcactcggcaaatgctggtccaacatcgtgcgcattgtgcc

SEQ ID NO: 78133 - DNA, 602 bp, Zea mays
  unsure (1)..(602): unsure at all n locations
  Clone ID: MRT4577_171279C.1
tatagggtcatctttcgagaatgtgccggnatagggagggcgacagcgccatgtatgctcctaattttaagagatgctttaacaacgaaaaatggtgttagcgtgcctgaagatctacctagttgatgcgggataccgaacccaaccagggttgttaccccctttttgtggtgagaggacccacttgaatgactggtgcaataatccaggtcaaaatgagtaaggatttgctcaaccataagcactcatccttcaaacatacagtacatcgtgcctttggatctttataaaaggcaatccaaaattttagattaagctataccatatttccccttcccaacacaagtatagattgtcgatgacttgatgcattatacataattgggtcatagaatgaggatgtgatgagtacatcgtacctgatgccgaacatgagttacctactattaatcatctagtgctgtacatgacagtgacgctgcaacatcatctgaaactaaaccatccaagatggccatgaaggaagacaatgggattgaatctttagttaaagcatttcaacgtgccactcagacactagccactgtcatcatatgagcatc

SEQ ID NO: 78134 - DNA, 328 bp, Zea mays
  Clone ID: MRT4577_17127C.1
caaaaaaaaaaaagatccctttttttagcttggccacccatgaacagaggggttgataaatcccttcggaagctaaccccactttgttttcaagcccatgggacacatttttttcagggtgggtcacaatttaccctttgttggggaccaaaaggcacccaaataaaaatttaaaaatttttgggggggtaaacaacaggaattgttttggatgggggcccaaaactgattcaagccccagcttcaagtttacaacccccacaggttttttgcctttgttttgcccttggggcacatggaaaagaaacttccccccaaccagggggtt

SEQ ID NO: 78135 - DNA, 289 bp, Zea mays
  Clone ID: MRT4577_171280C.1
gaatgcaagagtgctgtgagcatctccgtagttggtggcagtgccagcattggtggcagcggtggcatcggccttggcctgggtagcggttttggctctggttcctgttctggaagtggcttcggatttggtggcggtatttatggcagctctggtaccaagatcacctcttccgccaccatcaccaagagatccccacgatagacaagacaggatcctgatggccttcagcccggatacctcttgtgtatccttcactttagccccatccccagtcttgcttcctggt

SEQ ID NO: 78136 - DNA, 355 bp, Zea mays
  Clone ID: MRT4577_171281C.1
ttagggacaagaataaatggatgccacgaaccctgtattcgttattttcggtgcctttgttagaaaccatgttcgaggctcacacaggggatgctgtgaagaagaagatgacacaaacactcataatatctagaaaagggccgagatgtgtgacccctcgaccttatgaagacatgggtttcccctgagccctactagggagagcgttgtcgatcagggtgtcttccaacttcaggaccaagggttccgaaggtctaaccatctccgcgagctgcacagcagtccaggcgttggaatagcatatgctcaaggcttccaagtgaattaccccacatagtgggacatggcgatgatg

SEQ ID NO: 78137 - DNA, 328 bp, Zea mays
  Clone ID: MRT4577_171282C.1
aaaaaacacggcatttcctattccattgggaatgacataaagcaacttgggcggagcgaatacacagccaatcacattggccggttacaacctacacatgacaacatcggatccgccttcaaaccctatgcctttttgggggactgggcgggctttttgggcgacttggcctccttgctcccgccggtggacgccttttccgccgtttttttgggcaacaagaccggattgatgttgggcaacaccccgccgcgggcgatggtcacgccggtcaaaaacttcccgagctcctcgtgattggggatcgccagcaacacgtggcgcggga

SEQ ID NO: 78138 - DNA, 369 bp, Zea mays
  Clone ID: MRT4577_171283C.1
ttgcatctttgttatggacattggcctgctctgcgccaagctcggagcttgcaggggaaacattcgccagagctatcagcacaatactagctatccttgcccccgaagagagggcactagggatcgcatggcttgtggatccactgattcatgggatatgcaacgagttcgggaattgagattataacgtgttacatcaaaaaggcaaccttttttgtataagaccaggtgaaatgggttattgacttacatccggaaaccatgcctgatgattccttgcatgtgaacatacacgccgcgcattacacatcccatgattttaccctcgacaaaagacaaaaaaaaacggccctaggcacactcaacgca

SEQ ID NO: 78139 - DNA, 126 bp, Zea mays
  Clone ID: MRT4577_171284C.1
gttatctcgccagatgtccggtcacatgcacatcctcggtggctccatcaagatcctgctcaatcatggcgcggtacctatgacaggttgaggtcatcacgctctctgaccaatatctagtggctc

SEQ ID NO: 78140 - DNA, 200 bp, Zea mays
  Clone ID: MRT4577_171285C.1
aacaagagctacgcaaactcacagcgatgcacaagcacgagataccagccaccatgcgcctgtccctcctcatcgtcatcgtggcagccatctcggcgcgcaccgctggggatactccgctggcaggcggcggctgtggagccctgaagccggacttctatagccagtcatgcccgcgcgctgatcggatcattgcggag

SEQ ID NO: 78141 - DNA, 413 bp, Zea mays
  Clone ID: MRT4577_171288C.1
ggggggggccacgaacttttcattaaacttttttaacgggaaaaaatggagttttacagcagagggggatatccaacagttcctaatggataaaaaaggccccactacccagaaccaaatcggactttaggctaaataacaattcccgtattttgggaggggacacccccataaaaacggggactgggttttataaaaacccctaaaggaatttggaaaaaaaaaaccaagggctcccctttagggggctaatagaaaaaaaggcacagccttcataaaaacaggggcagaaaaacttacacagactgtttagttggggggaccccatgctttggaaaccattcgggcataagaaacctttcatgcaaaacaggtcggacatttttttggaaagaaagatgcttcaggagggg

SEQ ID NO: 78142 - DNA, 1269 bp, Zea mays
  unsure (1)..(1269): unsure at all n locations
  Clone ID: MRT4577_171289C.1
tattttttggtaggttgcgatcattttttcatcattctggatacctatcttcgtcgtattatatatttcttataatgtctgctatgttcttggttacttctcgaggccgggccgggatctcgagtccggcgcggccgcgctatcccctccttcgtttgcccatcctcgtgacggctcctcgccagtcgcctcgtctctccctgccgcgtcgcctccagttccgcctccgccgcgcctcccgcctccgccgcgcctgacgaacgcagtataggactgtgcaggtagagaggaggagggtccggcgagatggggatgcgagataagaagcggaaccagaagcgagtgctcgcgcgccgtaccgcggcaccgcgcccaggcgagggcaaggatttcctgccgctggaaggaggccccggtaagaagcatctgaaggtgcagcagcctgaagagcccgaaaacacagccacaatcgtctacattgggcatatcccccatggtttctacgaggacgagatgaaagggttctttaagcagtttggggatattaagaggcttaggatcgctcgtaaccgcaagacaggaaagtccaagcactatggattcattgagtttgagaaccctgctgtggcaaaggtcgtagcagatgagatgaataactatctcttgtttgagcgcaccttgcaagttgcacttgttgagccagagaaagttcatcctaaattatggaaaggggtgcgaaggggatttatacctgttgatcgagtagcaattgaacggaagagacacaacaaggataagactgtagcagagcacaaaaagatggttgaaggaattgtaaagcgggatggaaagcgtcgcaaaagaatcaaggcagctggtattgactatgagtgtccagctcttatagggagcattcaaccatcagcgaaaaagatcaagttcgatgaggcatagtattttattctaatgggctgttggatccttagtagacgaggcggtggaatggttgagcaatatattcaccttttgaggagacggcagacaactatgtatttcacttttgaatttctctatgttttatgaatgacaccgacacagatgttacaacttaagtatgaaaatgcaatgggcgatgtgttcttaatttgcccttggaaggttccataaaaaaaaaaaaaaaaaaagcggccaaaaaaaaaaaaaaaaaaaaaaaaaaaaaaannnnnnnnnnnnnnnnnnnnnnnnnnnnnnnnnnnnnnnnnnnnnnnn

SEQ ID NO: 78143 - DNA, 116 bp, Zea mays
  Clone ID: MRT4577_17128C.1
ttctgacttcacgagggcaacaagcacttggggggcattctaaagccggcggggggcccctaccagaacatcaacctccaatctctcacggaaaccatctagttaacattaatatt

SEQ ID NO: 78144 - DNA, 632 bp, Zea mays
  Clone ID: MRT4577_171290C.1
tggaattcgcggccgcgtcgacgatgattgccatgtcgtcgacgccgattctgctcaccatactcttggcatacctcgcgttctctgcaaactgtaatggcgaacgtggtaatgacgaggacacaccagctgcaggtggtcaccggcggtggcagccaaacggcgacaagacgatttccggaggcagcagcgacgacgaggcggcgacgtgcgtgagcagtgaatgcgagggcagcacctgttactgctgcccaacgatgcccactagcccttgcttcttggatctggatgcttgcttgagagtctgccatggtcgtcgtcgtcgtcgtcggccagccgcaccgctgccggaggtaacgtcgtcgtctgggcgcgggtccggaccaagcagattcccctgatcgagagtagctagctagctggggcggcctcgccgtcgacgacccctagctagctccatcggcgatcgatgtcctagcttgtgacaattgacaagacgagagaacatggatgttttcgccaccaccacggctcttcctcgaacaagtatcactccaaactgaagtttctacacgtatatatagttccaaaaacaaagtaaattgcatacatataatataggcttcatgcta

SEQ ID NO: 78145 - DNA, 1212 bp, Zea mays
  Clone ID: MRT4577_171291C.1
ggccgggccgggctctccttcgtttgccatcctcgtgacggctcctcgccagtcgcctcgtctctccctgccgcgtcgcctcgtctctccctgccgcgtcgcctcgtctctccctgccgcgtcgcctccagttccgacgccagcgcgcctcccgcctccgccgcgcctgacgaacgcagtgtaggactgtgcaggtagagaggaggagggtccggcgagatggggatgcgagataagaagcggaaccagaagcgagtgctcgcgcgccgtaccgcggtaccgcgcccaggcgagggcaaggacttcctgccgctggaaggaggccccggtaagaagctcctgaaggtgcagcagcctgaagagcccgaaaacacagccacagtcgtctacattgggcatatcccccatggtttctacgaggacgagatgaaagggttctttaagcagtttggggatattaagaggcttaggatcgctcgtaaccgcaagacaggaaagtccaagcactatggattcattgagtttgagaaccctgctgtggcaaaggtcgtagcagatgagatgaataactatctcttgtttgagcgcaccttgcaagttgcacttgttgagccagagaaagttcatcctaaattatggaaaggggtgcgaaggggatttatacctgttgatcgagtagcaattgaacggaagagacacaacaaggataagactgtagcagagcacaaaaagatggttgaaggaattgtaaagcgggatggaaagcgtcgcaaaagaatcaaggcagctggtattgactatgagtgtccagctcttatagggagcattcaccatcagcgaaaaagatcaagttcgatgaggcatagtattttactctaatttactctaatgggttgttggatccttagtagacgaggcggtggaatggttgagcaatatattcaccttttgaggagacggcagacaactatgtatttcacttttgaatttctctatgttttatgaatgacgccgacacagatgttacaacttaagtatgaaaatgcaatgagctgtgttcttcatttgccctaaaaaaaaaaaaaaaaaaaaaaaaaaaaaaaaaaaaaaaaaaaaaaaaaaaaaaaaaaaaaaaaaaaaaaaaaaaaaaaaggaaaaaaaaaaaaaaaaaaaaaaaaaaaaggtccctgcccggggggccgttaaggggca

SEQ ID NO: 78146 - DNA, 718 bp, Zea mays
  Clone ID: MRT4577_171292C.1
tgggtacctcgaggccggccgggagtactcttccacacgtgcacaaagaggtccggagcactgggcagaggaagaacacacggaatctatgcgaggatgacatgctctagcaccgtgtcgactaactctcacctgtgtggcgtgtgcacatcctccatcctcgacgaatgctccaagtgcagatccaacatgcatcagatggcccgaatcctacaggatgattggtctctagagcgcgagatgtatgaggtttggagtacctcctcgccaacagctaagctggtgagctggtcccactcggagctcgttcaccaagatgctcaccaaatacttatagctgttattgcttatatacctgccaggcaaaggtatatgatgctcagcatcccttctacctaactgtttatgactcgaatggcccacgactatctgatgtgaccttatctcttctagacttgacgcctgcacctgatatatctcacatttccgtaatcatggcacccaacgttcatgtgtatagtctatcatagatatatgactcagacgccgtataatctagtgctgctactgagtaaatcagtacactgtttgtatttgcgatactgctaatctgctgcagctgatgctaccagatagctagctacctacctagcatagcatgcgctgcgctatcttagctagttgcattggcatagatatcagactatattgtctctca

SEQ ID NO: 78147 - DNA, 462 bp, Zea mays
  Clone ID: MRT4577_171293C.1
ggctggccccacgcgtcagcacacgcgtccgcccacgcgtccgcagcttcaacacggccacggcaccggcgcctgctgccccggccgagaactgcaaccttgagctgacactcgcaacgggaccgagcagcagcggcagctgcgacgccggaaggtggcaggggaagcggctcaaggcgtcgcccaactcgggctccgccgccaccgcggtgtcttccacgtcgacggattcggagctggcgcggttcggggacatcgacgtcgtggcgacgccggtggccaggtttcacggcgaggttactagaaggatggacgaggtggcgcagggcccgtggatgtaccgctgcctgagcttgaagacggcgtgacgagtttgtgttgtatgtaggtaggaatggccccatggggatttggagttgtagagttcagacttcacaggaagacagagcccttttctgtgat

SEQ ID NO: 78148 - DNA, 290 bp, Zea mays
  Clone ID: MRT4577_171294C.1
gaacccaaaaccccaaaattaaacccgggggggggggggggaaaaaaatttttccaaccaaaggttcaaaccccccaacgcccaattggtgaaaacccaccaaaacataacccgctaggggcccctcagggcaaatccccggatttcaggggccccccggcccccttgggagtccatgagggcaaacttgggggccatgcgggagaaaacccccacaaccctggggggagaggggagatcatgcccacgggacgctgaaccttggacaggacacccccggggaccaccct

SEQ ID NO: 78149 - DNA, 522 bp, Zea mays
  unsure (1)..(522): unsure at all n locations
  Clone ID: MRT4577_171295C.1
tagnaaactagnaaaactacttacaaaattgtcattaggccaaaattttctcaacagttgtagggtgcttgttattcagtttcataatgagctaaaaactggactggcatccaaaataaaatttgaaaaataaaatttagtggtattacatattctttctattttaaattacaagatattataattatttagatatattactttacctatcatttagatatagtgtatatgtaagtgtataaaaagctatatgttttgaaaatcaaaatgtcttataatttgaaataatggagggcctctagctaatggttaaggctagcacctccaagtcccggattcgatccctctcgagggcgaatttcgggtttggttaaaaaatcccctcgctgtgccccgcccgctcccgagttatgtcatgcgctccaccctccagctgggccgttacagagtggacggtgacagcctgngttcgggaatttttcggtcgggaccatgtttcggtctcttcttaatataatacca

SEQ ID NO: 78150 - DNA, 220 bp, Zea mays
  Clone ID: MRT4577_171296C.1
gcccatcctcgtacgccgacacctctgacccggactcactcgcggcgctagactctcgcgcgccgcgtcgtgctctactgcgcgggacccttccgactacacggacacgccggggcggacggatgagcgaacatagtcgcctactgcctggacatgtacggggagccgaaactcaatgagcgcgtagtgaacaaacttcaccagcccggcgacaggagcg

SEQ ID NO: 78151 - DNA, 740 bp, Zea mays
  Clone ID: MRT4577_171297C.1
ttgggtacctcgaggccggccgggagaatcttcgcgatcatcgaccttctagactggctactgtacgagtgaaatacaaaaagaagacgcatgggggaggagaacgatggccctctcctccacggcctgcgccggcaagggcgtgaacgggccgccgccgcccgccttcggggatgccctggtgactatacgcaacacggccgcaataggtaaagccagcgccagcatgcggaagccacaggtacaggcccgagcgcatggtgtacctgggctcactgcccgcggaaccacgagctacctgtaggggcgagatcacggtcgacaacggttgggacagcgcgaggctcggcgagaaactccggagacactcgccaagaaccgctagctgacaggtgatccactcacgctgggccatgctgggatggttctgctgcatgttctcagcaatgctcgcctgatacacggtccagatcggcaagaccgcgtgaagtcaagggcagttcccagatcttcagacagtgcgcgctgtactacctctgcagacccgatactcatcacaatccgagagcatccttgcatatctgaacctgccagcgccagctcatgagcccatcttcaagagtaacggattgccggcggaccagtgcgggtagtccgcgagccgctctacccggtgaaattttcgacccgctcgacgtcaacgagaacgagatgccttcggcgagctgaggatgatgagg

SEQ ID NO: 78152 - DNA, 402 bp, Zea mays
  Clone ID: MRT4577_171298C.1
taaaaaaaaaaaaaaaaaaaaaaaaaaaaaaaaaaaaaaaaaaaaaaaaaaaaaaaaaaaaaaaaaaaaaaaaattttaaaaaaatttaaaaaaaaaaaaaaaaaaaaaaaaaaaagtttttttccctttcccggggggccttttaaaaggtttatttttccaaatatccataacactgggggggcgttttacctttcttttagggggcccaatttcccttttagggggtctttttaaaattaattggccggtttttaaaacttttttattggaaaaactctttctttccccattttattccctttgaaaaacatcccctttttcccagttggcttaatttcaaaaaggcccccccctttcccctttcctaaagttgcccaccttgaatggtaaatggcccc

SEQ ID NO: 78153 - DNA, 167 bp, Zea mays
  Clone ID: MRT4577_171299C.1
ataagaaaagtggtgatcaacagtattctgcatatgaatatggccctgacacaactgatggttcaccatactttggagcaggatttactgtccaaatctcacaagcacatttcgatcaccaggccgaagatgacacccatcacaagcacggaatgaggcaccacgtg

SEQ ID NO: 78154 - DNA, 426 bp, Zea mays
  Clone ID: MRT4577_17129C.1
gacggatggcactccacgcagactgttcagaagagcaagattctcttcattgcctggtccccatcgacattccgtatgcgtggtgagatgctgtactgcacgtcgaaggaccgcatcaagtacgagctcgacgggtttcactacgaaatccatgcgaccgacccattgtaggtggacatggatgttctccgggagcgggctcactgaagctggttctgcttttgaagggacctgtggagggccgtgaaccttcaatcagatgcgaatctaattgtcaacgatgaagcatccgccgtggtgcctgttaataagttcctgtaagcgtatcatttagtcgctatgcttgatactagctggcgaagcgctatctaagctgaaaacgaagcacgatttgcaaactcgttatatcgcggtattgatgatact

SEQ ID NO: 78155 - DNA, 258 bp, Zea mays
  Clone ID: MRT4577_1712C.1
gattgatagggaaacctctgagatgacccgatcttttttcaataacaaaaaaaccataataacccccttgggttaaatctcaaaaggctccacccatctccctttccaacagttttgcacgcccaataggaaatatggacctccctctatatggtcatttaactccgcgcgtgttttgtttactcccaatgtgaccgcttcacttgtcaaagccttaaagccccgatccttttgcttttttttcctttctttttctcc

SEQ ID NO: 78156 - DNA, 629 bp, Zea mays
  Clone ID: MRT4577_171301C.1
attcctgtgaaatttctatgaagatcgccaccaacctatcattcttacctttttctgtcatgtctctaatctgcatgtagcgttctgtaaggagcatctaaatattttgggcttgttggggttccttatgttcttagcaagcaatgtgtaaacgatgaacgaggtcattttactgatgtgtttttggacatcactgtccaaatgatgtttattggctgatcatcttttttacttgtgtaggtgctcataaaagaacacctgtgatgcctagaaggaaccctccaccacctccaagagagcaatctaatagtttttttaccgcatggaagctcaaaggcaggagatgcacctttaggtgcattttgggtgacataacatgcacgaggtgctcaagctgtagttaataggaaccctttgtttgatggggagtcaattaaggcaccactgtcatcaaagcagaaccaaagctgggtggacaccagcatcagtattcctagcaataggcatgatcattctggtcagatgtcactgacaagtaaagcacaaaataactctttgtccaataatgtgtttagaggtctctctgacacggggatacaaaattcttggaaaagtagagcagaacaacc

SEQ ID NO: 78157 - DNA, 1392 bp, Zea mays
  Clone ID: MRT4577_171302C.1
gaggttcggccgagaggatgaagataacgagttctataggttaaacaagaaaatatttgtgtgggctgtggagaaaagagccattatattagatacagaataataccgtcatgctacaggatgcattttccagaacatttaaagagccatcgttcacatgatattgtgcttctttgtgtagactgtcatgaaatagctcattcagcagctgagaaatacaagaggcgaatagcagaagaatttggaatacccctttttgtgcaaaagataatgaactcgggtgatataagtttgattaccaacacatcagtatctgaagataaattgaatggaacaggtgtctccccattgcagctgaggactgctgccatggctcttctacgtcatggatccactatgccattgaagagatgtgaagagctaatgcagattgtgaagtcatactatggtggtagagatgtgactcctgaagatctcgagatggcattacttgttggtatgagccctcatgagcgaaggcgtcttgaaaagaaaaagggatattcgtttagagctcaggctcaaactattattagaaagagcagcagcaataccatctcagaagacagtggacatggatcagaaaattgtcatgccttatctgcgcgatttcctgaggttggaactggtagtaatggtcagcaagagtttgatgagacagggaatcaaaaccagctagagaatttaaccctgagccagggaagctcaagtttgccagtcagcatggaggacaccacttctgatcatgacactgtgacactcgagaccgataccgagcagcaagcaagaggtgcctgtactcctggaaacagtcatgacgacaaggaacaatccatatgtgacaattctagtcaggtcatttccaagaatgctgagaagatatccctgttgggtcatgggcatcatggtaaacaagttgtggaacttttgttttctaatggtggagaggaatttgttaaccagttttgccaaaggtggaggcagatctttgttgaagctgttcacccccgttatttaccttctggctggaatattaaccacagtggacggcgggattttggtgacttcagtgtctacaagccaccaaggaaagatcctcaatctgcaagggattaggcttacgcgggtgtcatgctgtcgttggtaccctgaggttcaacttactttccagaattggttccattcccttaaacttgatcttgttgtacttgttccattcccttaaacctgatattgttgtacttgtatgtatctcaatctgtgtgtttgttcgagtaccttgaaataccaatttcatctcctatgtatttctttgagatgaactttgcatcagttttgttgacccgttttttt

SEQ ID NO: 78158 - DNA, 466 bp, Zea mays
  Clone ID: MRT4577_171303C.1
agtatcatgcggacttatatatatgtgataatagagagaccatacgttgcgacggaacacaaatcatcatgcctccggagtcccttgcggactgctcataacattctggctagtcatcatgaatatcccatcgtagccaatgatgaggaactcgtcatcttccatcaagatcatctagcggatctctggtttagcaataagaggcgatggcgagccttgatgtagtttcaggtcccagtcccccaaagcctaagtcacaggcagtacgccgttgaggtagccatctttgatgcctttgacgctctgcgtcatatgtcggcttgtgatcctttgacatctccactgttattcctttccaacacaggactgcacgacaatccccaacatttgcctctcacggaccaatgttgtcagcgctgtgataccagaagaacgaatatcagataaaaatgacaaaaaggaacaa

SEQ ID NO: 78159 - DNA, 1407 bp, Zea mays
  Clone ID: MRT4577_171304C.1
gttgtaatctagatcaggaggtgttgatcaggagcagctaatcaggagcctcatcaaccaaactgcagggaaagcattataataccatagcaacactatgtgacatgtatgctttcttggtgttcctttttgtcatttttatctggtgttatcatctagccatatctatcgtaacaacacccaagaggtccgtgaatatgatgggttagcgtttagtactctatacaaggtatttaatctcaaacatattctgaatttctgatattagagataattttctttttctttttaatttattcaccttatatagagtactggactgcaagccattgatgagattgtccccaaatctatgacgagttcctcaagctctataagtttctggatggattcagttttatttacatcggtgcatggttgccttcagttttaaatcactatctatctactgacggcgagcagttgatcgtcatttgttggtttagttttcacagattcaccaaaaatccttttcaagtcccccccttttgaccaactcactgttgttttctattgttgtaatctagatcaggtgttgatcacgagcagttgatcaggagcctcatcaaccatactgtagggaagcattgtaatatcataacaacactatgtgacaggtatgctttattgttgttcctttttgtcatttttatctgatattcgttcttctggtatcacagcgctgacaacattggtccgtgagaggtaagttgataatggaactcaagcctctgcagacgttaacggttgtttcagtgctatgatttaaaccattctaatattcgttcatatcttgcaggcaaatgttggggattgtcgtgcagtcctgtgttggaaaggaataacagtggagatgtcaaaggatcacaagccgacatatgacgcagagcgtcaaaggcatcaaagatggctacctcaacggcgtactgcctgtgacctaggctttgggggactgggacctgaaactacatcaaggctcgccatcgcctcttattgctaaaccagagatccgctagatgatcctgatggaagatgacgagttcctcatcattggctacgatgggatattcatgatgactagccagaatgttatgagcagtccgcaagggactccggaggcatgatgatttgtgttccgtcgcaacgtatggtcactctattatcacatatatataagtccgcatgatactaatggttgtaatgtagtggtgaaatggctagattaagggcccgtttggttcctttagttcaaggattaaagtttagttagaagactaaagtttagtccctatcctatttggttctaaagactaaaagtattcaaaacatactacatgaaccaaaaaaaaaaaaaaaaaacccgcggcc

SEQ ID NO: 78160 - DNA, 363 bp, Zea mays
  Clone ID: MRT4577_171305C.1
agcacacttgagtacctccaagctagagcaaggtgttaggtcctttgaaccagtaactgaagcttcctcctatgatcatggataccagtaagcagcagtggcggataatctcaagtgggcttgtgctcgattcctcctcgccggctgtgctgccatgggtgggaccaccagagccggcagcatcgtcgtgaactgggggcagaacggaaacccaggcagcctggcgaacggctgcgactcctggttctacacctacggctgcatcgcgttcctcacaacttcgcgcaacatacacaccccagatctcaacctctgcggacactgcgcacgcccgcctccgggaggtgcaccgggcagagctgc

SEQ ID NO: 78161 - DNA, 715 bp, Zea mays
  Clone ID: MRT4577_171306C.1
atcagccggagtcgcgtggcgtcgcggcgcggacagaccaatcctacggagcctcacacgcgcggaagagcggcagcttctcccaatctcccctgcccagccctgccctgccgccgcgtttatgttctgatcttcccctcctcctcctcctccttcctcgatgaagggaggagcgaggagcgcgcgcgagcgcgtccttgatatggatccggaggcggtgcagcagggctgggtgcattacatgcgtggatgcagagctccggcggcctgctgcggacaggacttcgggtgccgccagtgccacaacgacgccaataactctgtggaggacgacccgggcgaccggcactagatcccccgccacgaaataaagaaagcgatctgttctctctgctactaggaacaggacgtgcaacaaaactggtccagctgtggtgcctgcatgttcaagtacttgtgtaaagtatgcaagttcttcaatgatgatgtctcaaaggaacagaacgactgtgacgaatgcggaatatgaataactggcgacgggtataactttttccactgggagaaatgtgcgcgatgttacagcaatgccctgaaggattcccaccactgcgtggaaagagcaatgcatcgcaactgcaccggctgcttcgagcatctgctcaactccacacaggacatcagtgtgatgcaatgagtgcataccatccatttg

SEQ ID NO: 78162 - DNA, 358 bp, Zea mays
  Clone ID: MRT4577_171307C.1
ccccggggggggggggggggttcgcagcacacctggtaatagatgtagtagggaaacaaataccgggtaagcgctccagagctctgtaccgctgtatagaatgtctcccgtggagacagtttttttttttttactcgcatcccgaatagaatgctggggggggaggcgatggttgcctctttcaactgacgaataaggttcatggcggggaaaaaaaaaaaaaaaaaaaaaaaaaaaaaaaaaaaaaaacaagcaaaaacaaaaaaaattactatataaaaacctaaacttaaattcacagacactgccctttacaacgacaacaactgggaaaaaccaaaacccttcccatacttaa

SEQ ID NO: 78163 - DNA, 196 bp, Zea mays
  Clone ID: MRT4577_171308C.1
gaccgcatgccgctacgtgctgacttaagcggcgccttttttttattttgggtggtttttgggggggccaaacaaagcccttttatcatatcagaacaaagacattggcttgctccccaataagggccgcttacaggttaaccattttttcgaaccttccgggtaccctatctgttctaccaggggttacctacct

SEQ ID NO: 78164 - DNA, 624 bp, Zea mays
  Clone ID: MRT4577_17130C.1
cgtcgacctcgagaacagaacacgtttatctgccgcatgaatcatggcaatattcgtatccgcttgtaattgattttattgagagtttacaaataaagcatctacagattcttttgcctctttataaacgatatttgtttcccattccaatttttcacgtttgtctctccattttttctccgctcttttcacacgagctagtgcttctcctactaatggtttctcttcgagaaactctagattccctagtcttgcgtgcccatcttgcgtcttaatcttaaagatcacccatacacctaggtcctcatttaagtctgtacatcctacatcaatgtctaaggagaaatgatgcgaatgatgggcacacttttctccatccctacacgaacaatctaagtcaggattccattcaaggtgtggcgcgcatcgattcggctctccacactttccgattggactttgggctgaaagcggccataaggaacccgtacctggcacatttactgtttcatgttttgcattgtagcgaattaaatagatttctaagtcttgactatcttcgatataccctcttaattgataacgggtaaaggcttttaattttgattcatcgattttttgata

SEQ ID NO: 78165 - DNA, 720 bp, Zea mays
  unsure (1)..(720): unsure at all n locations
  Clone ID: MRT4577_171310C.1
ttggctacctcgagcgcggccgggtcggtatctccnggtcgcacaccgtcaanccgcaagtcaagtggaatgcgcagagacctgacctgcaacagcagctagactgcatctacaggccaacaggcagcgtggtgctggactgcacatggacgaaggacatcgaggtgtcgggcaccgaaggggaaggagttctcggagcataggaactacaccgtaccctgcgtcgtggcccctgagcgacgctgaggtagctcacccagcggtcactgataccgcgcgccgatcgtctagttcatcgccacgttgtctcttcctctacaccaccgggagccaccgggatcggggactaaaaccacacagacgcaatgagcggctggcccccacgcggcgcgaggagaggacgaaatcctcggaatcacttggggcttcaggaggatgatcttcattgtcgtctactgcaccaccgtgatctcaggtgtgcgacatcaacccggccgtgatcttcttgctgttcctggctagcaagagagccctggacctacggatgatctactcgtcatccaatgtctgggagccttcctgccctatgaaactcgaagaggcattcaaaattgcatactacatgacgctactgccttcacattgactaagttagagacatctactccaaggtcaccggtctctatggtctagatcatcgaggacttgcgtgctcttata

SEQ ID NO: 78166 - DNA, 338 bp, Zea mays
  Clone ID: MRT4577_171311C.1
ggtccggaaccccgtcgccccgcgtccgggccgccctttttttttttttttacacaaatatgaaaaagacttaacaaggctatagaattttttaaattagagaataacagccgttgttcatacagactcttatttctgggcgtcactaagctcctgtctggggggtggtgccatgcagtcctgctggctgtgccatgttcaaacagtgcggttattactgtgagaattaactggtctttgtcgctggccattgttgggtccctggttcttctgttgctgctgcctttgaggattgcctcttttgcacggtgggatcagtttgctttgcccgtctgtcc

SEQ ID NO: 78167 - DNA, 579 bp, Zea mays
  unsure (1)..(579): unsure at all n locations
  Clone ID: MRT4577_171312C.1
cgaagcaaactctgaataaaagcagagacattatcagaaacgctactgcgccatacaatatatgacaaaagnnnnnnnnnnnnnagctctgctcttacagccttcnnnnnnnnnnnnnnnnnnnnnnnnnnggtggaattggtatttgaataccgtcaaaactttagcagcaatggtggatccttctttccacagccagaatcagaatctccttcctcagcaggtcttacagccgcccagggcacccagcggtggctcaaacatcttcactgtatnnnnnnnnnnnnnnnnnnnnnnagcatcctctccaggaagcacgacgaggctcttctccctgagaggaggctcgctgtagcactccttccacagtgagtccaccagctgccgctcctcgcgtgcggcatggagatcgtcagagtccatcgcactgaccccttcgattcggctcttcaggttcaggatctcttttcagcttgtcttggtcaggtagcgcattaccagatgtctggncctgtgacaactcaaggaggccgcttagagcagcttcacgcaccaagggatcatcgctagccgcaaggg

SEQ ID NO: 78168 - DNA, 338 bp, Zea mays
  unsure (1)..(338): unsure at all n locations
  Clone ID: MRT4577_171313C.1
gttgaccacaatttcccacttccgttttacaaaacattttttgggnactccccaaaaacaggccttttctataaacaacgcccacccgtttgccccttttttttttttctgggggaaatacaaccctcagattcctttttacacctgccaaaaaaaaaaaaaaagctccgggggcttttttggaaccttttacacggccaaacacaaaacccttttggagcataccacccttgggccctgtttttggtaaaaaaatagagggagatggggctgaaaaggggcccccaggggcccccgcgccgtggggcgctcaacctttccttgtagtggggggcatt

SEQ ID NO: 78169 - DNA, 547 bp, Zea mays
  Clone ID: MRT4577_171314C.1
ccccctcgagtttttttttttccctttttttttttttttttttttttttttttttttttttttttttttttttggccggaaagggggctctccttagtctttggccccaggcacaggcaaaggaacacacaagcgggctcagccaggccgggccaaaccaagctttttacggagggggggcatcccatcccatggaaaaaaaaaaattacattatcatgcgaccctgaagggggagggggccttttaaactcccttcctggggcccttgaaccaccttttggcgccggcctgcgccttgaaaatgaaaagcttgccggcaaaaacgggggccgaaaagagctggggcttgcccccctcgtcgccgtcccccgtcctggggagcacggacacggggaaatactggttgccgccaatcacggggggggggctctccagaacgttggggggggccacggacccggtctcaaacccgccctcggagctggccttgccgccgaaagcctgcctgccgaccaggtagtcaacctgggaaaggaactcccgggg

SEQ ID NO: 78170 - DNA, 604 bp, Zea mays
  unsure (1)..(604): unsure at all n locations
  Clone ID: MRT4577_171315C.1
gaccctcgaggtcctgccgggttttttgaaacatcttataatcagtttcttaatcgtagttcagcacaatctcatttatttagtgagccattgtatatgatgctattttttgaaacttataggcatacatggatccatattttcaattagtaattaaattctataagtttactttgctaaactgtcattgtataatggcgtacaagtctttatatgaatacaaactttagtacattttaaaatatacatgtgttaaatgttgaacataaaaaattagtataaatattaagttttttcattattgataagtatttactatgtgacgctaaattattggttctcacgcgctttgctatagcatatttttttaaaaaataaaaaatatagaattattgtacatttcatttaaaaaaaatatgtgcacctcaactatagaacttatttgcgggttcatttttctattattgtatgttctggntttcaataacatatttaacatttaagaaatgttcaaacttacaactaggtcttgtatctttttgattgatgagtttttgaatatccttaaattcctctcggatactctttgcggcccatcctgtat

SEQ ID NO: 78171 - DNA, 757 bp, Zea mays
  unsure (1)..(757): unsure at all n locations
  Clone ID: MRT4577_171316C.1
aattcggcacgaggctttggccatagccaatatggtacttgggctgaaagagattcagatccgtggagagatacgcacaaatgttgatacacagtggatctcttgaatgcaacagaataccgcgaaaataagatccatactggttggcttgacagcagaatagctatgcgtgttagagccgagaggcccccatggtacctctcagttgttggaggagctctatatgaagcatcaagcaggagctcaagcgttattactgattatgttggttatctcagcaaaggtcagataccaccaaagcacatatcgcttgtcaatttaactgtaactctgaacatagaggggagcaaatacacgattgagacagtaaggggtggaccccgcagctacaaattaagaatgaatggatcagaaattgaaacagagatacattcactgcgagatggtggacttttaatgcagttggatggaaacagtcatgtaatttatgcagagacagaggctgctggtacacgccttctcattaatggtagaacatgcttactacagaaagaacacgatccttcaaagctattggctgatacaccttgcaaacttttgcggttcttggttgcggatggctctcatgtggatgctgatacaccatatgctgaggtgggagtcatgaaaatgtgcatgccactgttgctgcctgcctctggtgtcattcactttgntatgccctgaggtcaggccatgaaggcgaatgacctgatag

SEQ ID NO: 78172 - DNA, 502 bp, Zea mays
  Clone ID: MRT4577_171317C.1
ggggggggggggtttttttttttttttttttttttttttttttttttttttttttttttttttttttttttttttttttttttttttttttttttttttttaaccagccccaacgggaaaggacagctttataattatttatcaccccagggggggggggggcaaactggcaaaagaaacaaaacccggccttataaaaaccaaaagttggaggggccccagggcatgggcaacactgcccgcaaaaaagggccaccgggtacaaaacacacattaacaccccaataaagcctaggggtttacaggcttacagcccggaaacaaaaaaaaaacatcgggtctatggccaaaaaaaccccttgctaaaaaaaaaaacatcccttaaaagaaagattttccaaattttaagccgcaattggttcacccaacttggtgccgccctcaaaaggcaccaaactggcataatattcaacaaggaccttccaaccccccggcacaaaaa

SEQ ID NO: 78173 - DNA, 1681 bp, Zea mays
  Clone ID: MRT4577_171318C.1
acggcaagtctcccgcacggcccacggcccacggcaagtctcccgcgaagagacaaatgtcaaccccgatttttccttctccccgtctcctcgccgtcgctcctttcctctctcccatctcggctagggttaggtcgtctcgccaagtcgccatgatgcagcagcccccgcagccgcagccgggcatggcgctacctcctccccctcaggccggtggcgggcagccaccgcagtggggtgggatcccgccgccgatggcgcagcagtacggcgcaccacctccgcagcagcctccagcgatgtggggccagcctccgtcgcaggcgcactacgggcaggcgccgccccctcagcagtattacgccgcgccgccggtgccggccgcccccgctgcggcggacgaggtcaggacgctctggatcggggacctgcagtacgggatggacgataactatgtcttcgggtgcttttcgaacaccggcgaggttcaaaatgtgaagctcatccgtgacaagaattcagggcagcttcagggttatggttttgttgagtttacaagccgtgcagctgcagaacgagttcttcagacatacaatggacaaatgatgccaaatgttgacttgacatttcggctgaattgggccagtgctggtgaaaagcgcgatgatactcctgaatatactatttttgttggggatttggctgcagatgttacagattacttgttacaagagacattcagggttcattatccctctgtcaagggtgcaaaagttgtgactgataaattgacaatgcgcacaaagggttatggatttgtgaaatttggtgatcctacagagcaagctcgtgcaatgactgaaatgaatggaatgccttgttcttccaggcctatgcgtattggtcctgcagcaagtaggaaaaatacaggaggtgttgttcaagagagagatatttgttggtgggcttgaccccaatgtcactgaagataccctaaaacaagttttttctccttacggtgaagtcgtccatgttaagatccctgttgggaagagatgtggttttgttcagttcgttaccagaccttctgctgaacaagcgctgctaatgctgcaaggggccttgattggtgcacagaatgttcgactttcatggggtagaagcctgtcgaacaagcaggctcagcctcagcaggaatccaatcaatggggtgcggctgctggtgctggtggctactatgggggctatggacaaggttatgaggcttatggcagtgggtatgcacaaccccaggatcctaacatgtatggttatggcgcttatggcggttatcccaattaccaacagcaaccagctgcacagcagcaacagcaacaacagtgatgcctgtttgctcgggtaggtcattgggttgtcgcgacggaattaattaaatattatttcaggacactctcatattgcattcttgtcaattgaggtggttttgaaaggctcctgattttgatggccccatggcacggtttcatctatttattagtatatgacatatatgcgctgtgaacaagtggcgctctactgtgattgctgtgttgagacatgctttcttagtttctttccatgtttctcggatctgttgtgttacctttattactgtgtatttgcatatctactgtgatgctat

SEQ ID NO: 78174 - DNA, 503 bp, Zea mays
  Clone ID: MRT4577_171319C.1
ggagccagggactcagatgacactgaaaacatttcattttgcgggagtagctagcatgagtatcctttttaccgctgcttcaggaaaatattactgaattctgtggcatttaaacatgctcaattaagatgcttcattttgtttttcagtttctttttctacttcagattagcgctgctgttgatttaatgtctctggaaaatactccattccaaattacaacgcattttgtcttttctagatacaccgttgttactatgcggctagtcataatatatattcaactgcgtagtaaaagctatgtatctagaaaagctaaaacatcttataacttggaatgtagtagtatccaactttcaggatttttttgaaagaatgtttattcctcaatcaatctaactttattaagtgcactatttgacatggaaagtacagaaacatagcagagcccactaattcctttcaacttgtttccttaaccataaaaaagatgttactctttg

SEQ ID NO: 78175 - DNA, 311 bp, Zea mays
  unsure (1)..(311): unsure at all n locations
  Clone ID: MRT4577_17131C.1
gaacacgggctcacaggcgtttatgattaatcattccccttccaaaacatatatttaataaacacgcgggggaattctccacaccggatctacatatgcttgagggccgagctactcaaatggacacggcttcttccatctacaaagttttacccaggcccgcaaagggcttttaaagggaagggatttccccaacatattgagttcccagccaaggggaaaatccacctctgcatgttttttttttagttgtttgccaataaacatgcttaatttaggnnntnaagtgcccattccttttttcatccttt

SEQ ID NO: 78176 - DNA, 593 bp, Zea mays
  Clone ID: MRT4577_171320C.1
ctcccatctcggctagggttaggtcgtctcgccaagtcgccatgatgcagcagcccccgccgcagcagccgcccccgctgcggcggacgaggtcaggacgctctggatcggggacctgcaatactggatggacgagaactacgtcttcgggtgcttttcgaacactggggaggttcaaaatgtgaagctcatccgtgacaagaattcagggcagcttcagggttatggttttgttgagtttacaagccgtgcagctgcagaacgagttcttcagacatacaatggacaaatgatgccaaatgttgacttgacatttcggctgaattgggccagtgctggtgaaaagcgcgatgatactcctgaatatactatttttgttggggatttggctgcagatgttacagattacttgttacaagagacattcagggttcattatccctctgtcaagggtgcaaaagttgtgactgataaattgacaatgcgcacaaagggttatggatttgtgaaatttggtgatcctacagagcaagctcgtgcaatgactgaaatgaatggaatgccttgttcttccaggcctatgcgtattggtc

SEQ ID NO: 78177 - DNA, 284 bp, Zea mays
  Clone ID: MRT4577_171321C.1
aaaaaaaaaaggggaaacgcccgggaaaaccctttcccttaaaatctttcaagggctattttttaaaaaaaaaggggggccgggcaaacggttacccctaattttggaaacagaaaataaacccggggttgtctaaaatttgggaaaagaattttcctccggggcctttaaaaacacccccaaaatttttatttttgtggggccaaattaactaacatttgcacactttttttgggtagggggggagtttaaccggttccccaagttttgtaaaggaggaattt

SEQ ID NO: 78178 - DNA, 856 bp, Zea mays
  unsure (1)..(856): unsure at all n locations
  Clone ID: MRT4577_171322C.1
attcatcactgacccctgatggaacctatagggcacccttgataggtggagtcccttctactggttacgtggactcaacctatgggtatgacaccacaggggcacactatgcttggtatgatggttctgcctataccaatgcacagcaaagaccaactacagctaattacacgccgtcttcagcgtataatagcaatggctcttctgcaagggcaacaggagaccaacgactacaacagggtcagctactcctacatacccaaacaggatgtactcgagcacccagtcttacaaccagtacggaaattcggtcaaaactggtcttatgtatggaaacactggctacggaagcactggctacggaagcactggctatggaagcagcggctatggcggcagtggctacggaagcaatggctatgattccaggttatatggtcggtggggtgtttctatggatagcagatacaacaggcccagaggccgtggcaacggatattatggttttggcaatgagagtcaggatggaacaattgagctcaacagaggtcctaggtctggtcgtttcaagaaccagaaagcatttggccatactgttactatcgctgtgaaagggcagaccctcccttcaagtgaaaacaagaatgctagtgacgtacctgataaggcacagttcaacctagaggatttccctgtccagtatgatgatgcaaagttttttgtcatcaaatcatacagcgaggatgatatccataagagtataaaatacaatgtgtgngcaagtaccaccaatgggaacnagaagcttgatgctgcctatcaagaagctcaggcaaagggctctagctgcccctat

SEQ ID NO: 78179 - DNA, 1811 bp, Zea mays
  unsure (1)..(1811): unsure at all n locations
  Clone ID: MRT4577_171323C.1
cctcgaggccggccgggccgggaacgtctcccgcacggcccacggcccacggcaagtctcccgcgaagtcgcaagtctcccgcacgaaccacgacaaatgtcaaccccgattcctcgccgtcgctcatctcctctctcccatctctgctagggttaggtcgtctcggcaagtcgccatgatgcagcagcccccgcagccgcagccgggtatggcgctacctcctccccctcagaccggtggcgggcagccaccgcagtggggcgcgatcccgccgccgatgacgcagcagtacggcgcaccacctccgcagcagcctccagcgatgtggggccagcctccgtcgcaggcgcactacgggcaggcgccgccccctcagccgtattatgccgcgccgccggtgccggccgcccccgctgcggcggacgaggtcaggacgctctggatcggggacctgcagtactggatggacgataactatgtcttcgggtgcttttcgaacaccggcgaggttcaaaatgtgaagctcatccgcgacaagaattcaggacagcttcagggctatggttttgttgaatttacaagccgtgcagctgcagagcgagttcttcagacatataatggacaaatgatgccaaatgttgacttgacatttcggctgaactgggccagtgctggtgaaaagcgtgatgatactcctgactatactattttcgttggtgatttggctgcagatgttacagattacttgttacaagagacattcagggttcattatccctctgtgaagggtgcaaaagttgtgactgataaattgacaatgcgcaccaagggttatggatttgtgaaatttggtgatcctacagagcaagctcgnnnnnnnnnnnnnnnnnnnnnnnnnccttgttcttccaggcctatgcgtattggtcctgcagcaagtaggnnnnntgcaggtggtgttgttcaagagagagtaccaaattctcaaggagctcagtctgagaatgatcctaacaataccactatatttgttggtgggcttgaccccaatgtcactgaagatgtcctaaaacaagcattttctccttatggcgaagtcatccatgttaagatccctgttgggaagagatgtggttttgttcagttcgttaccagaccttctgctgagcaggcgctgctaatgttgcaaggggccttgattggtgcacagaatgttcggctttcgtggggtagaagcctgtcgaacaagcagactcagcctcagcaggaatccatgcaatggggtgcgggtgcgcctgctggtgttggtgattactatggtggctatggacaaggttatgaggcttatggcagtgggtatgcacaaccccaggaccctaacatgtatggttatggcgcttatgttggttatcccaattaccaacagcaaccagctgcacagcagccacagcaacaacagtgaggcctctttgctcgggtaggtcattgggttgtctgagatgggatcaattagtattatttctaggcattcatatattgatttcttgaaaatagaggtggtttcgaaaatctcctgattttgatggccccatggcatgttttcttcgagttatatcatatatatatgcactatgttatgtctatgaacaagtggtgctcaactgtgattgctatgttgaggcatgcttcgtagtttccttccagacttgtcttatatattgttctctcttttactctgtattgttatctctattagtgtgtattgcatatctactgcgatgctatatatgcgctgtgccgcctttcgttc

SEQ ID NO: 78180 - DNA, 404 bp, Zea mays
  Clone ID: MRT4577_171324C.1
ataccacttcctaaaataaatttaacaaggccaaaaggtaaacaaaaagggcttaaagcattttgggatgggaaaaggggaaatacccagatgggcccaaaaaaaaagataaaagggcccatgctaacaaatctcaacagttcacacgaaaacaggaacgaacacaaacaaaactggggaagaagaaaactaggtattggtaaagcaggcccaggaacccatcatttttttttgggagcccccttggtcaccttggggccgggcgggtcctttttttccacacttttgaaaaccccaacagcaaccctttggctctggtcacggaccgcaaacctaccaagggggggataccctgaaaaccgctccccccccatgggcttggggggtattttcttcaccatacc

SEQ ID NO: 78181 - DNA, 1287 bp, Zea mays
  Clone ID: MRT4577_171325C.1
gccggccgggctgggaaacccgcctctcagccgaccgtttcgagtccgtcgtcgtctagctcccatccgacctcctgcattccccactagtcccaactcccaaccaccgccagccgtccgctctccgcaagcgcgaccttccggccagatccgccgcgtcgcgccgacgagcggtccttctgcctagtttctccgcccagcgagcggcgggttcctcggagattcccgctggccgcggggatccatttgtgactgctcgcgttgcgcctggatctggtttgggacggaggagtgaaacgcgacggtgatcgtgcgaggtgggacgccatcagtgctctgtctggggttcggtctcttcttcggctgcagatctggaagggtttcgtgggatccgtcgctacggtctatcccagtcagagcacctgcatcatctcggttcgggccatggagactctgctcatctcggaggagcgcaaccaccagctccaccacttctcgggtcgccggaagaaggcgttagcagcgtcgcctcagtccacgcgcagctaccatgcgggcaactgccgggcgttccactccggcatcaccgtcggcatcctgccgtccccgcccgcgcagagggttgcactgacccactcctctcctgagcccaagacacccgaacatcagcttcaccacggcatttaggcgcagttttgcaatctctatatacttttcgacgtttccgtctcatgatcctggagcatgcccaggattctagtctcctccatgtattctcataaaggacttcatgtatcagagatctgcgaatgctcaaccctgaatatggtttgcttgtccgatgccacttcgcctcatccatacctggagttcagaattggcgaagcacctatcacttagctatctgtttcatagtcagtattgtgtcagactgttgtttttgtgcaatatttgattggctactagtctgtttgtgttactgttcaagtttatggtagtgatcatatatggcggccggagtgttccacgccgatgctgtggcattctgttgctttcaagtaaaactagtcaatgttatgtaccttcatgttattttttggtcctgtttctgtgacatgtttgaagttccatgttatcgcactgtatttgctcccaagatcttttttgtttggtccgcttttctagtggtcctaatcatcgtgtgacaaatggttgttactatacttaagggtctcctttttaaggataaatatcaacgttcaaaaaaaaaaaaaaaaaaggccccta

SEQ ID NO: 78182 - DNA, 1839 bp, Zea mays
  Clone ID: MRT4577_171326C.1
cacggcctgggtacacggcaagccggcagggagatggcaaccccgaattctccggcggccggtctcctcgccgtcgctccttcggcccttcctctctcccatctcggctagggttaggtcgtctcgccaagtcgccatgatgcagcagcccccgccgcagcagccgcagccgggcatggcgccgcctccgcctccgcaggctgctggcgggcagccaccgcagtggggtgggatcccgccgccgatggcgcagcagtacggcgcaccgcctccgcagcagcctccggcgatgtggggccagcctccgccgcaggcgcactacgggcaggcaccaacccctcagcagtactacgccgcgccgccggtgccggtgcaggcgccagccgcccccgctgcggcggacgaggtcaggacgctctggatcggggacctgcaatactggatggacgagaactacgtcttcgggtgcttttcgaacactggggaggttcaaaatgtgaagctcatccgtgacaagaattcagggcagcttcagggttatggttttgttgagtttacaagccgtgcagctgcagaacgagttcttcagacatacaatggacaaatgatgccaaatgttgacttgacatttcggctgaattgggccagtgctggtgaaaagcgcgatgatactcctgaatatactatttttgttggggatttggctgcagatgttacagattacttgttacaagagacattcagggttcattatccctctgtcaagggtgcaaaagttgtgactgataaattgacaatgcgcacaaagggttatggatttgtgaaatttggtgatcctacagagcaagctcgtgcaatgactgaaatgaatggaatgccttgttcttccaggcctatgcgtattggtcctgcagcaagtaggaaaaatacaggaggtgttgttcaagagagagtaccaaattctcaaggagctcagtctgagaatgatcctaacaataccactatatttgttggtgggcttgaccccaatgtcactgaagataccctaaaacaagttttttctccttacggtgaagtcgtccatgttaagatccctgttgggaagagatgtggttttgttcagttcgttaccagaccttctgctgagcaagcgctgctaatgctgcaaggggccttgattggtgcacagaatgttcgactttcatggggtagaagcctgtcgaacaagcaggctcagcctcagcaggaatccaatcaatggggtgcggctgctggtgctggtggctactatgggggctatggacaaggttatgaggcttatggcagtgggtatgcacaaccccaggatcctaacatgtatggttatggcgcttatggcggttatcccaattaccaacagcaaccagctgcacagcagcaacagcaacaacagtgatgcctgtttgctcgggtaggtcattgggttgtcgcgacggaattaattaaatattatttcaggacactctcatattgcattcttgtcaattgaggtggttttgaaaggctcctgattttgatggccccatggcacggtttcatctatttattagtatatgacatatatgcgctgtgaacaagtggcgctctactgtgattgctgtgttgagacatgctttcttagtttctttccatgtttctcggatctgttgtgttacctttattactgtgtatttgcatatctactgtgatgctatatatgcactgtgccgtttgtttcctaaaaaaaaaaaaaaaaaagcggccaaaaaaaaaaaaaaaaaaaaaaaaaaaaaaaaaaaaactcgaaagggggccggtacc

SEQ ID NO: 78183 - DNA, 281 bp, Zea mays
  Clone ID: MRT4577_171327C.1
tgccccgcgttgcgtatcatgtgcgtgggcgccctctgtgctgtgctagtctgcagtagctgcgtccgggcctaggcacgtggcatcgttcgagatgataccagtctgtacacgcgcagagtggttcatcgggaggattacctggtagaggtcagaccaccggcttctcgctctctcacactagcgtattctcggggatgataagggaggagcgtaacgccatatccacaccataaggcatgacgtacagtgaccttctttaagggcatcacggtcggctg

SEQ ID NO: 78184 - DNA, 2925 bp, Zea mays
  Clone ID: MRT4577_171328C.1
tcgcaactcccatccaccgacagtcgtccgctctccgcaagcgcgaccttccagccagatccgtcccgtcgcgccgacgagcggtccttctgcctagtttctgcgcccagcgagcggcggattcctcggagattcccgctggccgcggggatccatttgtgactgctcgcgttgcgcgtggatctggtttgggacggaggagtgaatcgcgacggcgatcgtgcgaggcggggacgccatcaatgcgggaaaaaaaaaaaaaaaaaaaaaaaaaaaaaaaaaaaaaaaaaaaaaaaggggcggacccttttacaccatctctgggcgaggccggccgggccgtcgtcgtctagctcccatccgacctcctgcattccccactagtcccaactcccaaccaccgccagccgtccgctctccgcaagcgcgaccttccggccagatccgccccgtcgcgccgacgagcggtccttctgcctagtttctccgcccagcgagcggcgggttcctcggagattcccgctggccgcggggatccatttgtgactgctcgcgttgcgcctggatctggtttgggacggaggagtgaaacgcgacggtgatcgtgcgaggtggggacgccatcagtgctctgtctggggttcggtctgttcttcgactgcagatctggaagggtttcgtgggatccgtcgctacgatctgtcccagtcagagcacctgcatcatctcgggtcgggccatggagactctgctcatctcggaggagcgcaaccaccagctccaccacttctcgggtcgccggaagaaggcgttagcagcgtcgcctcagtccacgcgcagctaccatgcgggcaactgccgggcgttccactccggcatcaccgtcggcatcctgccgtccccgcccgcgcagagggttgcactgacccactcctctcctgagcccaagacaccgaaacatcagcttcaccatgggaaaaagcgcagccgagcaatctctataaacctttcgacgtcccctccctctcgccctgagctctgggctggcccggggttctgcaattcgccgcctcccagctccctcccgatccccaagttctcactccaccagaagcgcagtgtctcacttgaatttccacctgctgaccggtcagacgacgaagaggtgcccgtgcatgccaagtcggcaccttcatcgccgactgcaggctcaggtgttaccttcttcagtggtactgatgctaccattgccaccgagaatctgaggaggatccttaacctcaaaattgaggataactgaatggcggttgggtagttctgtgtacatagtttaactacaactgacctttgtagtatgtatagggtaaccggggataaccactgtgtacctggcggtggttccttctgcagcagtactgtaggcggttagcaagcacagcgaggagtttaggaagtttggaaatgcagtgagaaggatgttgtggtaatggagatttggtggatttgcatatcactgcagtttcagagtcacctttgttccttgtaccttgtagttgcctattagtagtccaatactccatttagatgttatagtatttgcatcttccctgcccatcattaaccagtagccacagccttcatatcataatccttgtcatgtagttcatctcaggcagggcattgtaggctagctagtactgttcaagttctgtcatatatgtagtcttctgtaggattgctgcatcccttgaaacttgcattctgtatcacattgcatcctgctgactcacctcccttcataacatctccctgtgttatgcaaagcgcacaaggatctcccctctggcacttctgttttttggaatgaagatgctcagaggagttgttatgaagtcccgatccaatgttctttgtcctccatgtctgtactgactttagctatgcatctcctttgtcaccccagtcccattgcatgtgccatccaatccgtttcgaaccattcatctcaaaaattgcatttagtggtggttttccttcgtcttattatcttttgtgcctcatgatcctggagcatgcccaggattctagtctcctccatgtattctcataaaggacttcatgtatcagagatctgcgaatgctcaaccctgaatatggtttgcttgtccgatgccacttcgcctcatccatacctggagttcagaattggcgaagcacctatcacttagctatctgtttcttagtcagtattgtgtcagactgttgtttttgtgcaatatttgattggctactagtctgtttgtgttactgttcaagtttatggtactgatcatatatggcggccggagtgttccacgccgatgctgtggcattctgttgctttcaagtaaaactagtcaatgttatgtaccttcatgttattttttggtcctgtttctgtatgctccattttccgtttctgcctacaagtatttattctgggttgccattccagttcgttgctaaaaaaaaaaaaaaaaaaaaaaaaaaaaaaaaaaaaaaaaaaaaaaaaaaaaaaaaaaaaaaaaaaaaaaaaaaaaaaaaaaaaaaaaaaaaaaaaaaaggcccctgtgaaggttggggtaccggcaaaagttaaagaacataaaaaaaaagggcgcccagagggaacaacgggaagcctaaggaattatgtaacttaaaaaaaaaacaaggaaagggaatgacccttaatgaaattttaaggcccggtttccaaatgcaccaattaaccgtccaacccaaaaagaataaattggggggtgcaaatccaactctttcgaaaaaaaaaaaaaaaaaaacggccccctaacccaaacttttggtccctttaagaaggggaaaatggcccgctgggagaaacaaaggcaaaaaatgttccctggg

SEQ ID NO: 78185 - DNA, 656 bp, Zea mays
  Clone ID: MRT4577_171329C.1
gacaccgtggttcagtttttgggtagataataaattaaaaaaaaaggagagagatggcactgtgtcgccgcatggccgcaccattcttcctcgtccttctcatcatcgtcgcggcagagacagcgacggccagggtggtcgtggaggagaagcactgcctgtcgcaaagccactcgttcagtggcatgtgcttcagccacaccaactgcgacaacgtatgcaagacggagaagttcacaggcggcaagtgcaagatggacggcacctcgcgcaagtgcttctgcttaaaattctgctagcgaatgacctgcggtacgtcaacaaataaagatttgtgaagcccagccgtcgatcatggcatcacgtcaacctgttgatttgttcctcgccgtctctgtgaggccatggtggtcgccggccggctggttcctccgtgctgatctggtggcagctaccgtacgtttggtttactgaatgtgcgcgcgatcatgcatatttgctagtgtattctatttgcgaaacacgttgtagttaccgtacgttcgttttgctgcatgtgtgcgcggtcatgcatatttgctcttaagttttattagtatgggctgttcgttattttcctagtgtattctatttttgaaacacgttctagttaccgt

SEQ ID NO: 78186 - DNA, 275 bp, Zea mays
  unsure (1)..(275): unsure at all n locations
  Clone ID: MRT4577_17132C.1
acggatnatgatgggcganattgttcgagatgattaatnaangctaggaggtggcnttagaagaatnaagattggatcaaagccnaaannctaactctgtacatgnncagcatggtgcacgctcacctcggcagnaattttgtgatgcancttctcttagcctnttgctagctgtagtantgcacgatttctcagatttanaaaaagganctttntnatcggtgctccaggttnacagaagtgtgatagttntgnngatctgtgaaganatngta

SEQ ID NO: 78187 - DNA, 259 bp, Zea mays
  unsure (1)..(259): unsure at all n locations
  Clone ID: MRT4577_171330C.1
gaggagaacaagggcaccaccggccagcgcgacgcgggaaggaaacggggggcaacggnggcgcgacagggcgccaccgcggcagggaaagagacgcgacncaaacaaggcggggggggggcacgaacacgcccaacaacccgaccgnaagggcaacgacagagccaagcgccggcacaccaacggaagaccagaacccacggcgccaccgcgcgcgccaccaagaggcgccggggggccaacgacaccgcggacgcgg

SEQ ID NO: 78188 - DNA, 234 bp, Zea mays
  Clone ID: MRT4577_171331C.1
ttcccggagaagatcgacatgaccaccttcaacaaggaggctggtgatgaggatatctaagcagcgtgtcccctccccctcccccaggcccttctacattatcggggttcctcacagctccctctatgcgctctatgcttctttgtggtggagttcgctcttgtgtggaatctagtgaacgctacgcttacatttattgtctcgtgttgctgtgtgacaagctgccgctaagaa

SEQ ID NO: 78189 - DNA, 349 bp, Zea mays
  unsure (1)..(349): unsure at all n locations
  Clone ID: MRT4577_171332C.1
atanngccatcccgcctcgctcacccgcccgctgacagaagctcgccggggcgtcgccggcaccggttgcccgtcagcggaacccgcggaccacggaagatttctgcttcacgagtccaggaagaacaacactgacatcaagcaagtcatattcagcagggaacagcagcatcgttttgatctgccttttcgcaggatacttgggcaattcatagtggaaacttcaacttgttcaaggcctctctcttcacaccagtacatcattttacatccttggaaattgtggagcgagcctacttgagaatgcaatgtagcacgagccattagtttcagtaagttggacacttgc

SEQ ID NO: 78190 - DNA, 178 bp, Zea mays
  unsure (1)..(178): unsure at all n locations
  Clone ID: MRT4577_171333C.1
atgatcgagtctaggcaacactaaccaagtgacaggtccctatttttgatggatctgctatagaatgggtcgatgcgatacaaggggtgggataaacgcggctcaaaaccatgatggtgaaagtgtagagaagatggtcncacatgtgaacaagcctgtgtatgtttgcaagaactat

SEQ ID NO: 78191 - DNA, 233 bp, Zea mays
  Clone ID: MRT4577_171334C.1
gaagcacggaagacggcacgaggacggaccaaaaagagttagtccgcggccgcacaccgcagagcgcaggggggggcgagcaaaagagacagggggccacacaacgaggcgccgcggcgcccaggggcgccaccacagaggacgggcgagcgccaaaagcacaccgcgcgccacaagacgaagacaaggacgaccccacggacccacgggacgagacaaacagcgaggagacc

SEQ ID NO: 78192 - DNA, 250 bp, Zea mays
  Clone ID: MRT4577_171335C.1
ttttctattcccctccccaggcgccattcgcatccctcccccgcggaggagcgtcacctggccgacggcgaggctcgcttttcccctctctcccaacagaggccggtctatccgctgcgcagaacctctcccccccaagagctctgcttcggggccgaccgcgcgctgcttcttcctctctggtggttttcgttgccgcgctcggccgcccgccagaggcctcctggctgaccgggacgcgctaaccctg

SEQ ID NO: 78193 - DNA, 872 bp, Zea mays
  unsure (1)..(872): unsure at all n locations
  Clone ID: MRT4577_171336C.1
gcacgagtatttcgtgtgcaccgaatttgggatttgggaggacaggcgcccgcactccgcctccgcttccctccgcctcgactctcgaccgcatctgagcactccgccggaggtccgcctccgcaggcaacgccacgccatgtcgaagcccgcggatcagcagccgtcggacatgcaggtcgactcctccgtcgccgaggagaagccggccatcagattctccatcaacgtgcttgagctcatgagggaggcgcagatgcagcatggtctccgccagagcgactacacgcggtaccggagatactgctctgcacgactcagaaggctgtacaagtctctcaagtttttgcatggccgaggtaaatacaacagaaggaatataaccgagtcaacagtcacggatgtgaggtgtggtctcttctgctgataatatgctatatagcatgttgcttgtcttcatatttctctttgcagtgttatataaaccttgtctgatgtttggagttggactattacaatttgtttaaacctggagaagacttatgaagcaatttaacatgtgggagtaggtttctccatgtagtgttttatatggccgagcgagcatggagtcatgccatggagaagaaaactgctggtacaaacgcaaaacaacgcatctacatgttgggtcgatttcggaaagcagttaaatgggcatcacttttttcacaattatgttctgtaanaggagattccaggacatctctagaagctgaggcatatgcttcatatatgaagggtgcttntgttntttgagcaagacaagaatatagatgccgcaatgataaatntcaagaatacgagggctatatatgaggagcttggggaag

SEQ ID NO: 78194 - DNA, 677 bp, Zea mays
  Clone ID: MRT4577_171337C.1
ccccctataaatacttcccaccaaacatggcatgtttccttgagttccttattatgcatagaaaataaaataaaataaaataaaaacatggcatcaggcttcttcctggattggccaaatggtcacagtgccatgccatgcaaacggcggtagaagctagctagccagaggaaagacgatgcatccgtacgtatatcttgttgtttgtctgaagctatagctcggccttgatgcttctagttggaatctgcgcagagagccctttgatttgatgatgacgtactgatcgtgtttcactctcgtggttgtatacttgtattccatgaaggtttttggaggccctgcactactactcggcgatcttcgactcgctggacgcgacgttcccggcggactcggcgcagcggatgaaggtggagcagtgcctcctggcgccggagatccgcaacgtggtggcgtgcgagggcgccgagcgggtggcgcggcacgagcggctggatcggtggaggcgcatcatggaaggccgtggatttgagcctgtgccgctcagcccggccgccgttgcccagagccaggtcttgctgggcctctacggcgccggcgacggctaccggctcaccgaggacaggggctgcctcctcctcggctggcaggaccgcgccaccatcgcggcctcc

SEQ ID NO: 78195 - DNA, 1296 bp, Zea mays
  Clone ID: MRT4577_171338C.1
ggggatcccaggaagcaacgaaacacaggcaaaagcgaccgagaagggatcgagcagtcagcagcgtttcctcttgcgttcgggcgggcgggcggctgctggtagcgagcgcgaggcttgccgagcgagcgagcgacatgagctactacaggcttggggaccgcgaggagggcgacgaggagctgttcgagacggcatcgtccgtctccagcgccgacgccgactccgactccgacgacgagggcgaccgcttccctagcgccggcgccggcgccgacgcggcgggggccgagggtccgtgcgaccagcaggaccgccgccgccccgtgccgcagccgctgcggaggatgaactcggacagcatctacgacatggcgtccatggtgtcgcagcagctcccagccaagaaagggctgtcgcggcactacgagggcaaggcccagtcgttcgcgtgcatgtcggaggtgcgctgcctggacgacctgcgcaagaaggacagcccctacaagcagaagaaggtcaagtcgtcgtgcaagggctacgtcgcgctgggagggatgatgatggccaacaagcccccctcctccggatcctgcgccggcctgggcctcgccgccgccaacgggttcaggacgtccccgattcagaacgggtaccagtaccagtaggcaggctggcggcttggccagagagcactgcaactgcaactggaggaaggcgtttttgttcctcccgagggtcactgaactgtttttttttctctttatttctttctttccttcttcccgttctagactgcttgttctgccgggatttatttccttcacggacgcattagtctgtgagaattttatgaggtggtgtgatttgttacttgttctgctagaggaacttaccgttgaccgttctgcactgttgctgctcggcaaaagaaaaatgtccttttttttctgtgaatacgaagcacgccagtccaggcagaaaatcatgatcgaccgtttccccctttttttcatgacaatcttgttttggaggtgcactcaccaggatgaggattctagttgggaagaagagacaaacattgacacgattactcggtcatcccccccccttacggattcatgaatttgggattttttttgttctgacagtggagtgtcctctccgtcctgactccagaaagagccagatttcaaattttcaactgtattaataaaaacggtgattattatttaccgtccgttttcggaattctcgggaaaatccggtattttcccgtattttaaccgtattttt

SEQ ID NO: 78196 - DNA, 525 bp, Zea mays
  unsure (1)..(525): unsure at all n locations
  Clone ID: MRT4577_171339C.1
ctcaacgaagagagtagaactagtggagagggagcaacaggnattagatcagctcgccgtaagccacagaaaaggcctgatgcgtagcccacgcgcgtgggcngccggcagccntcgcatggggcgccttgcatgcggggcgccgtaccctgggactgcctgctgccangcccgacccgcggcgccgggcgatgcctggtgcgtggccccccgcgtcctgtccccggccccgctgcccggcttgcccccgagctacctggccggcgngctccccgggagcttcggctgcgacaccgcggggctatccgccgacccggagactttcgccaggaaccgcgncctgggggtgatccactgccgctgggccctgctgggcgcgctcgggtgcgtgttcccggagctgctcgcccgcaacggcgtcntgttcggcgaggccttgtggttcagggcctggtcccagatctttntcggggcggggcttgtcttcctcgtgctccctagccttattcacgcgcagagcatcct

SEQ ID NO: 78197 - DNA, 207 bp, Zea mays
  Clone ID: MRT4577_17133C.1
cgctcaagatctcctggggagaagaggggaaatgatctgcgtgacacaatcctctctcctgcacggaacaagcctatgaagagttccttcaccggaagaagtcttcctgaccactatgctgctgatccatattgcagccgatggagacccaatggtattgaggccggccgtgggacgtgggcattgcttacagatgcatagcctctg

SEQ ID NO: 78198 - DNA, 480 bp, Zea mays
  Clone ID: MRT4577_171340C.1
tttttatttcttttttttttttttttttttttttttttttttttttttttttttttttttctttgttttttttttttaaaaacagaaaaaaccaggggacccgggattttttttaaaaaacaggtaattggaaacccagggaccgggaaacaaaagggtcacgcaatcccccgaaaccccatcccttaccccaaaatttttaaaacccgggggtgcggcggggccccggcaaaaaaacaaaaagggtcaggaaaccccaccggcccgattagtttttgggggggggggggggaaaccggttgggggggcccccgctgccaaaattggcccccgggcccacccccccgggcttaaagggcccggggggccccggaaaacttgtgggccctggggggagaggggggggcttcccgcccccggggccctcggtgggcggggaaaaaaggggggccccgccgcccccccccggggggggggggg

SEQ ID NO: 78199 - DNA, 1527 bp, Zea mays
  Clone ID: MRT4577_171341C.1
cccagaacatcagaacattgttgtatagcgttgcatatttacactaatctgatccatgatgacataaaacatacaaggcactgtttcaaaaataacaataaaggcaccattacatgtttttggttgccagagtttccatagcttggggtcacatttcttggcaacacacgctgcatatcatctagggttctctgagcctcatccctagaaagctctgtgaagattacctcatcaaaaggctccttcgaatgaggcatatccttcgagagtggtaggacaaaattggctgtcatttcgttaactgcttcagctggtatttcctttcccatctcattgaaacgcttcgctgccctggatttcagttcacttgcggtagttagcaaatggcctcaacttgcgaatgcgagcattcttgtaaacattcgtttgatcgataatgaagttgcgaggggtatttgcagccctagtcagcagtttgttgaaaatccatgtagcacaatccatcagtcgttcaaaacgctcaccatagttattcttacgcaataatcctggcaccttcatttgctccaatacaaggttagttccgagaaggatataacgtttctcctgatgctccttgacccatttctctgcccatgttgacttgccagaggccggaagaccgaccatcatcatgacctcacatttattttgctcaaacgaagggccaaatactgaattcctttgagaaaaagctgaggcccagggttcataaccatcaacaggcagcagcccatcctccctgctgaactgcatctccacgataacattcttcagcaggacatggggaaacagtgcggatccccatcgcatcggcctcagaggagcgtcaaccagaccaagccctttctcgcccgcatcaaaatgcctcgcaataccaagccattcgccatttctcgcgaaccctatcgacgccatgggcttggaatcgaggtccacggcgcagacgaccgtgtcgccgacgccgaacttgacgccgtagttgacaaacctgcgctggtgggagaacttccccgtgcccccgaacccgaagctgtgctgggactccccgagcgcacctacgggatcatcccctctcgagaccccaatgcggcagaggtggcgctccccggaggtcgtgggatccatctccaccggctgctcagcgacgattctgcacccgatgcagtaccgcccgccgcccctggcgcccaccatcgcgcgcgcgccggaccagcagtaggcgaagccgccctcgtgaagcgcgctcccccggagaccgcccccgcctacatcgaagtcgagatcgcagaacgctgggttgagcaccacgcgcggtgatggctcagcggcgtccacctcaggttcggcatcgcgtcggggccgcttcgatggtggctgcgcggactcgtcgtcgggcgacgccattgggtttccgaagggggcagacggcggaggaatcggggagaaactgttgtacggttggttcagctcctaggctcgcccccc

SEQ ID NO: 78200 - DNA, 587 bp, Zea mays
  Clone ID: MRT4577_171342C.1
gacacttctgcgcatccaacaatgtaaagataacgaagactagggaaccatacggtatacttctcaccgtatagagaagtatacggtgttctctcaccaatctgatatcatcaaccctaatctctgtggatggctccttcctcccccgcgctcgcccccacggcgaccgagctccaaaacaacgccgccgccagatccgcccgccaccggccgtccccagctcatgccggctgcaccaagccagatccaaccctgcaccccctccagcaccaccagctcgccctcctgtgtcccagctcccaccgccaccgcccccaccaccatcgccggcccgcccttccgacccagctgtaagccgtgcgccggcggccccccgccctgccaagagggtgaggtttgcattcactacaagcaccatgccgccccgcattcactacccctcccccgtatcccgcagccataatgctacccccgccccgatagctggtgtgaagtccccctggaagctacgaccgcattgaagacgaggatcttgaaggatggacaacgatcctcagcaggcgtgggacgctcacccgcgtaggact

SEQ ID NO: 78201 - DNA, 274 bp, Zea mays
  Clone ID: MRT4577_171343C.1
cccgcgttcttaaaaaaaaaaaaaaaaaaacaagggcggacgatataaaagaaccaaactaagaacgcgagcatgcaaaaaaaataatataatatagagaaacctaaataaaataaaatggccgaaaataacgggggggcgcctggggggacccctggctttacccacctgaatcgcctggcgggggttcttttttggccccctggcttaatttcgagggggcccgttccgatcgcccttcccggggaaaccccgggctgttgcccaattgggt

SEQ ID NO: 78202 - DNA, 400 bp, Zea mays
  Clone ID: MRT4577_171344C.1
ttttcgaaacttggtgagggactgatggtctcgaaaaaacaaagactagagatccttgctactgattgagtccccgaaggcaacagccatgggcgcgaacgcgatgaatttgcctatatctagcgatggcacggcagtaagccacttaccctcctttttttgaacccaaatgctctttttctgtttaaagagcgcggactaacccttttaacgggggtatgacaccttacccttttttcatgcgaggtttatgcgcccattcctagggaaaaagcaagctgtggctaaaaatttctggggaaccaaaaaacccccttggagggggggatttaaggatctaccgaaaaccattcccttgcctcgctccctggggacttggaggaaggggtccactccaact

SEQ ID NO: 78203 - DNA, 725 bp, Zea mays
  unsure (1)..(725): unsure at all n locations
  Clone ID: MRT4577_171345C.1
gtatattacatcaaagtgttgtgtcgcgcgcttcgtcgcgcgacgatctattttaatttcaggttgtttaatgtgtaacattgagcgtgtattcacgcgatgttccactttagactcagtccagttgacgtatgccgtcgtgtgttacgtcgcgcgaagattaacgtctctttataattaatgcaaagtgtctcgttgtgcgctcggtcgcgcgacgagtcgttgatttccttaattcaatttaaagtgctatgtcgcgcgtctcgctgtgcgacaatccttttaatttgtcttcatcttcttataatgattagacatgaaacatgactttactttatgctaaacgtagtgtctacattaatgcctttcaattgagcgagtgatttaattcataataatgtaacgtggtcgtttctcgactgtcttttcctctttctctcttaaccgtaattgtgagcccgcgtggaacgcctgtttacttactgcattctattgtatggngtactggtcttttgtattaaatatgnggatgtatgtatgtttgcgctcgcatagagaacgatccggtcggagaacccgaagaactcgcaggagaagcccctgagcagnagncggntcttggaggcaagngnccctngacctatntntggcctatacattctttaattaaccttccgnattacacatttatacctaaggattgacaagctttngntgggcatgtc

SEQ ID NO: 78204 - DNA, 453 bp, Zea mays
  Clone ID: MRT4577_171346C.1
aaacccccgggaagcttttttttttttttaccaaatactttttacaacgcccgcccccaaaaaggcaaagggaaaaaaaccctccatggcccccccccaaaaactaaatatatctataccccgggggattcgggggcccctaacacggccggggccgacccattgcattgggaccccggggagccccccccttccaaaacctgcgggtggggcatgggggggggcccggcgccgccgggcttaatgttccccacccccccggggctaaagaagcagggggggtttgtagaacacaaaaccctcgcccaaatgggggccgggaacaccaccttgttttggttccgggggaccctataaaaggggatgtgggggggcctgccgttgcccggagcccccgggaagccgggggccccccccaggggccccgggggggccctgggggcccccagaggg

SEQ ID NO: 78205 - DNA, 583 bp, Zea mays
  unsure (1)..(583): unsure at all n locations
  Clone ID: MRT4577_171347C.1
gccaacctcanagagtgtcgggtgggngaataagagnaaccactcagtgtagtctgtttcttcccattgatgataacaggtggttcattcctcatcttgtaaacttggctcacattgatagatccatagtgaaatgatccttgaggattcagacgagcagcaccagtgctcacgttcatcctgtgagacaagaaggtgctatgtgaggccaaggcatagagacatacatgatttagggtgcacatgaaaatttggttagacattgctacatgtctgtactccatgttgcctgcaaatactccatgtactccatgtgcttgtggtcgatctgtgtgatcctgtgcttgaactgtagagggttaatcaatttagtggaagtgtatattgaatatgttttcattaagtacagtgttgtgtggatgttttattagattaattctatcaagtacagtgctgtgtggagcaagttaatttttttaacatgcctcaacatagatggcgtccctttactactgaagcaaaaaaatattgcaaggctaaacacttgggttaattgctatgtttgggtaatctttttttgttt

SEQ ID NO: 78206 - DNA, 901 bp, Zea mays
  Clone ID: MRT4577_171348C.1
cattgggtacctcgaggccggccggggaaagttgtctcctctcctctccctcccacgggaacgggagggagaagcagccgcctctctcttcctcctatccctcctcccaaacgcagcctccgtctgcccaccactccctcctccgtctgcgccgcacgccgcacgccgcagcagcaccaataggtcaccacgcgcctggagttggacgacgcgactgaggcgcagcagttcgaccgggatggcgggatacgctcagcgaaatctacgaggtagcgtagcacgcgagtcttcaggcgaggggaaaaaccccccccccgccccgcccccgcgttggtcctaggccacgacaacttcgcccccacatccaatctcggtgcctgatgccttgaggcaagcagggggaccgggaccggaccccatggcggcggtggcggtgctcgactccttcatcaagcgatgcacggcgtcaaaggaggacttcggcggccagcccagccagaaggcctgcttccttctcggcatcgggttcgagttcgacatcaggggcctcctggccacacaccaatcacctcatccctaacaacgcccgccggacttaccattacctacgcggcgcgcgactacggcggcagcgacgaagtcggcggcgacccgtttgaggggtttcccgacgcggtgctggggctgatcgtgtacaaggaaaactgccgttacggtccccggtcatagccccggctatgtcgcatcggtggcgcggcactgtcgccgctacgcccacgctgcaggacctctgttacgccctacctctactctactcgagcacgtaacagaagataacttagagaattcggaagaaggaaggacgaaggagacgaagaatagcattactgccaaaacattt

SEQ ID NO: 78207 - DNA, 326 bp, Zea mays
  Clone ID: MRT4577_171349C.1
ggggcaccactacagctaaaaattcgaaaatggaacaggtgatccatcttacaaccccggaagaaaacaattcgggggatacacaagggaggggtgtacaaacggaaacaggagtacaggacacattgatagacctttgaatggaacgacaaatcctaggggttgcctgacatgcagggcctgaaaaattgggaagatggggaaatatttttgattttttcaagtggaagaaactcctgaaacattgggtattcgacagggccccacttatcacataggctaaacaggttgggtacaataagctcattttcaggattggcattttg

SEQ ID NO: 78208 - DNA, 750 bp, Zea mays
  Clone ID: MRT4577_17134C.1
aaattcaaaaagggaaccatggcttcttattaccacaattcaaggttctcgaggtacctccgatcgtgcaagagctggtgggcgccggcgtgcaggagccaccgagccagtacgtgcttcctgagcaagaccgtcccgccgcggcggtctccgagatgcccgagcccatccccatcatcgacctcagccggctgtctgccggcagcgccgaagagttcgacaagctgcggtccgccttggagaactgggacctcttcctggctgttggacatggaatggagcctagctttcttgccgaggcgatgaaggccacgagagagttcttcaacctcccactggaagagaaacagaagtactcaaacattgtcgacggcgagaagctgggcatggatggatacggtaacgacatggtcgtgaaagagaatcaggtccttgactggaacgaccggctcaatctcctagtggaacccgaggccctaagaacctacagactgtggccaacacaacccccttctttcagagacatcctgtctgagtacacggtcaggtgcaaagcggcggctaaccttgtctttcgaaacatggccaagatactcaatttacaagaggaacacctggtaaacatgatcggggagaactccatcacccaagctatattcaactattaccctcagtgtccaggccggaccacgtcttgggcctcaggcccataccgatggctcctaatcacagtcacttcgccgatgctga

SEQ ID NO: 78209 - DNA, 288 bp, Zea mays
  Clone ID: MRT4577_171350C.1
tcgcgatctagaaaaaaaaaaaaaaaaaaaaaaaaaaaaaaaaaaagaaaaaaaaataaaaaaaaaaaaaataattataagaataaaaaataataagcaaaataaaagagggctccgcctttggtgtgtttgtagggagaaggctgctttgttttgtcaaggcgtgttaggttatggtgttggagctgttgcttttgcctacggggtttctggggtagccgcaaacttggtggtagaatggtagcttttgggggtgtgttaagaaggtttgggggccttgatgttact

SEQ ID NO: 78210 - DNA, 378 bp, Zea mays
  Clone ID: MRT4577_171351C.1
cattatcatcgtacccgcccccccattttaagggggaaaaaactaaaatcatatataaatgaggatttaaaccatgtttgttaactctaaacttacattcacactcacttgaccaacacatatatttatgttttatactatatattcaaacgaaaactatagctctgtcactagctagttgcactacaactaacaaaactatgaggattttttttattatatatacatatttttgcagagcgtggctgacacgaaaaagcctcctgagatgatatccggcaacatgacaggagtgttgtgcgtgtactctgcgctcttcgtcaggttcgcgtggatggtgcgacctcggaactatttcctcatggtaacccacagctg

SEQ ID NO: 78211 - DNA, 270 bp, Zea mays
  Clone ID: MRT4577_171352C.1
ctccacgcgtcgcgtatttgctcaagaagcaccagtgctaaccatgtgacatagccttaacacggatggggcattgggctcatgatctggctactataccatagacaacaaaagccaacaacctccattccaacgctgactccttgaatgttaatctcacacgtgacgacctcaaacaaattgtatgacagatacattcactttacgtggctcatcaaccacaatgcagatcgtatgcacatacctaacgatattatgcccatacaccaa

SEQ ID NO: 78212 - DNA, 379 bp, Zea mays
  unsure (1)..(379): unsure at all n locations
  Clone ID: MRT4577_171353C.1
ggcacacgaacattgaccctccaaacagcaccatccagataccgggggggggcaccaattatgttgttagattacaccanngatcaccaacacaacacgaacgagataaccacatagtggcacctgattccaaagaacaccaatttcctgaagcacacctgcacgggcaccaaccacgacaacaacaccaagaacaatatgtttttccgctccaacccatctatcctctacattctgcactacctgcgtgcggaacccactcactcttcttcgccgcactacgattaccaactggaacctcgtacatcttagctggaactcgcgatcgacgcctcccatgcccactcttcgaacgttcacaacaagatgccgaataatc

SEQ ID NO: 78213 - DNA, 204 bp, Zea mays
  Clone ID: MRT4577_171354C.1
taactgaaagacaagcttccccgcttttcaagagtagagtgaaatcacgtatgctcgcagaacaatttttcccaccaacatctcgatttctcttaaaccttttttttcacttccctatcgatatcatgggatttcactgtaatctctgggtatcatgtatgtaacagctacaactttatatcatacttggcttaccggaatgtt

SEQ ID NO: 78214 - DNA, 1343 bp, Zea mays
  Clone ID: MRT4577_171355C.1
ttatttccgccactacacctgtcgaaggtcgactggcggccggtctgccagatctcggcaatctccatccccgctacgccatggctgctgcctcctccccaaccttcccgccgccggcgaccgacgtcgccgctccaggcgtccccgatctctcgatcccctacgacctggccacccgcgggcagtggcaggcgctcttctcccacctctcccatccggcccacacgccacatccgcaccaccgcctcctcctctccgctctctccgccctctgcctggccaagctccgacgcttccccgacgccgccgcgcttctagcttccctccacccggatccggcctgcccgccgccgcccttcctcatccgcctcctccatgctctcctcccactctttctccccgaccgccccctcgcgctcgaccgcctctacacgctcctctcctccgtccgcgcccgccccaacgccgggcaccccgagtggcgccgccgcgacgcgctcgtcgcgtccgtcctcgccgccgaccacctcgcccaccgcgagttcgacgtcgcactcgcgctcctcgccgacatcgccggccgcgacccgggcaacccggtgctcctctcgcgcctcgcctacgcgcacctccagatcggcaacctcggcgcggcctcggctgccttccgccacgtggagtccgtggccgccgcgtccgaggacccgacgcggcatgccaacctcctggcacgcaaccgcgcgctggagtgcatcgtgggcaaggactacgcggcggcggtgcgggagtacgagcgctgcatcgaggcggaccccgcggacgccgtggccctcaacaacaaggcgctgtgcctcatgtactcgcgggacctcggcgacgccatcaaggtgctggagggtgccctcgagagggtccccacggctgcgctcaacgagacggtggtggtcaacctgtgcagcatgtacgagctcgccttcgtcaaccacggcgaggtcaagaggagccttgctgagtggatcgccagggttgcgcccgacgacttcgacacctcctgcacgcgcatgtagccagccatgtaggaggtactctgccttttgcaattcagcattgtagccagccatgtgtatatggctgttatgtcaacatgctgaaatgtgattatctctgtttagatagcattccaattcaaccaatttctgtttatgtgcatggaaattgtgacatgattggtatacatgattgaaaacaagagtgaattggagacagacatgctgttgtgatcatacctgcgaagaatcccagtttttctccaaaaaaaaaaaaaaaaaaaaaaaaaaaaaaaa

SEQ ID NO: 78215 - DNA, 168 bp, Zea mays
  Clone ID: MRT4577_171356C.1
agccactccgccgccaccacctcgtccaaactttcgtttgtcatcatggcgcccttcctcatctaatcttggtggcgccccttcctagcgtttgttctgccgtccgcgctgcagtctgcttctcccgtttcactcctatcttagctgcacggactagttttgcatcgt

SEQ ID NO: 78216 - DNA, 235 bp, Zea mays
  Clone ID: MRT4577_171357C.1
gggggaagacaacaagaagaaattcataaccctttattcgggtgggggggacgagggaaaacgtacggggctgccaccggtgacaattaaaaatacaacgcccaccaacttatgaacaccaactgttttgttgggcccactaaaaccaaaacttggttattgggtcggcattattaatcccggccagccaccggccgaccgaaggatgctttacttgatgcccagcctttttttt

SEQ ID NO: 78217 - DNA, 184 bp, Zea mays
  unsure (1)..(184): unsure at all n locations
  Clone ID: MRT4577_171358C.1
aacgccagggggtctntatacaataactctattttnncttctctcaccacttttcancacatntnnatctccaannnaaaatatnacnaaactnatccnnncattntccacatnaantncttctaactttttttncnaaatttttccaaaaaatgggggggggggnggggaanttctacatnnt

SEQ ID NO: 78218 - DNA, 405 bp, Zea mays
  Clone ID: MRT4577_171359C.1
gagcactaagtcggcggccgccctcatgacctttgtctgaattttaacacatgaagcccaaatactacctgaacgggatttaccgatcatattgctgctcgatataacgcgagatggccagcactagtggcgtctgcaaatacatgagaccctgcggcctgcatatgaagatataaaccacctggtagatctgaatgtactgaagcacaacctcctccttgaggactgcgtttaggttggaccccttgtcctctaacattaccgctctgcacagagttcctgagcgctgaaccaggtctggtcactgccgagataagcacggccaccggccctccatgcttgtcaaagttggcgactgacgtacaaggcacctcaagacgactgccaggtgacttactcgggcat

SEQ ID NO: 78219 - DNA, 1112 bp, Zea mays
  unsure (1)..(1112): unsure at all n locations
  Clone ID: MRT4577_17135C.1
tgaggcttctgatgacctcgaagaggaggaagaggacagcgattcctctgattcagacgtcgaccctgagctggagaagataattgctcagcgcgagcgtgccaggaatggaggacggaggcacaggcaggaagagaagtcgttgagccaccgctataggagcagcagcagcaagagaaaatcaaagcacacaaggagttggagaagtgatgatactgaggatgaagaggaggaaggcagaagaggcagggacaggaagaagaggtccagcagatcgaaaaagcatgaaagatcagatgaggctagcagtgatgactctgactcagataggcagagacacaggaagagcaggaagaacagatcatcggaggctagcagcgatgactctgactcagataggcataggcgcaggaagggcaggaaggacaggaagagaaggaggagccaccgcaggagagacgactcatcggatgaggtgtctggaggtgaagaaaggagacgccaatgtcaccgcaagcggagccatcaccaaagggatgcatctgactgtgacaaaggtggcagtgattatgcagatgaaaagaagcgagcgagcaggcggaggaggcaccgccagtcagaaagcagtgggttggatgaggatgagcggcgtgatccccgaggagcaaagcgatctgaggagaagaacaggaccgcaagaggagctaaagaggagcattgaattggtaattcctatttgatgatgttattgagttcctctatttgtcagctggttcgttgccttgtcataagtttgacacatttgaaacatgatgcttaatatgtgtaccaatatagcatgccctgtattactgcatgtctctctgaactatacttcgagtctattatgtgtttaggatttgataattgatatattgncaaggatttttaatatgatgcattcagttagccttcccccgcaataatattgcctgagagaattggcattagaacatttctcctacatngaaggatcctttctagctatgtaagagagttattgagcattatatgagaggaataacgaggatctctacgagctaaaaaaaaaaaaaaaaaaaaaaaggcggccg

SEQ ID NO: 78220 - DNA, 486 bp, Zea mays
  Clone ID: MRT4577_171360C.1
aaaaaaaaggccggttttagtttttttttagtatcaaatcatttcatcggggaccaattaatttttggttcccgcagatgcaatcgggtcaaccaacatgccggtggacacacgttcgtccatgagcccaaagactggccccaaacatgcagagggggatagcaaactgaaaaactttgttttttttttttttacacacaccacacaatacctatgtttgggagccagctcggccttgcttttttttggtcaaccccccccccaagctagatagataataatcatatccatgggcgccgatcgatgtgatcagcagttgcaggggtcgcacttgcagttgccaccccaactgcagccgtgggcggcctccccggactccgccggggcctcaacgaacttgggcgcggccttttttttcggggccacccccgaggacaacgggggcctgcgcgggggtgcttctttcctccaagtcagggtactttt

SEQ ID NO: 78221 - DNA, 600 bp, Zea mays
  Clone ID: MRT4577_171361C.1
cggacgcgtggggaatctacggaaaaggttaagctcgcttttgtgtcatgtcatcacaggggcagacagagaccagccaagaggttgaaatggaggaggattatcctatgcagcaggagaacccttcatttctgcaactctgcgctagcctcttccccagcaacgggagcagtactttcagggtgcgacattccctgttccgtccgcgccgccgagctccactgaaggcgagccctctgcatgtagccatggcagcgataatgaagcgttaggattttttcagcttggtttcgtgtgaagagaagctccagaccagcggcgttctgactttggcaaaagttgtaccctgaatacatggaagcaggttggaatgtcgaggctgattagtctatacatacatgtgggtgcgagattagttgaggcatgcccatctccgtaggctgcatatgagattcagaattctgtttgatttttctattgtggctaattgtaatagccacatgttggtccattgcttgccgccctggaatagggctggcctgatgaaacacctctccttatataatttgatgatctaaagggtttgtttattgcctgggc

SEQ ID NO: 78222 - DNA, 212 bp, Zea mays
  Clone ID: MRT4577_171362C.1
acggacgcgtgggaaaaatcacacaaccacaaaatcaaaattaaaaatcttccacaacagaggaaacaagtcaattgaaccatggaaagaaatcaaagggcagctcctctataagattcagccttagctactccatcatgaaacgtcacatgtcttccaaacagttcgtaatttaagttatcaggccgtccttttaaacgttcctaacgggg

SEQ ID NO: 78223 - DNA, 735 bp, Zea mays
  Clone ID: MRT4577_171363C.1
gccgggtgggggttcggtttgggcgccaagatatcttctatctactcgatagccttttcccattgtagtttatacgtctctctctctggtttggtctgtagttagttcctaacatgttccttttgtatgttgtcaattgtcatgtgctggttgtcacttggctcaaaaaaaaaaaaaaaaaaaaaaaaaaaaaaaaaaaaaaaaaaaaaaaaaaaaaaaaaaaaaaaaaaaaaaaaaaaaaaaaaaaaaaaaaaaaaaaaaaaaccccccctaggtttttccccccccccccaaacccaaaaaaaggccgccaaaaaaaacttcccgaaaaaaaaaaaattgggaaaaaaaaaggcccaaaaaccccccaacccccaatggaaccccaaggcccattaaaaaaacaataaggaaaaacccaaagccaatgaatgggcccccaacaaatttcgtttttaaagcgtcaaaattgcccgcttgttcccccaaaaggaaaggccaaaaaaaaaacctccggttaaacaatggccccggttccgaaaaaaaaaaaaggaaggcgggaaggttttaaaaaaaattcgaagaagggggaacttaaaaaaaaaattgcaaaaattgggttgaacccaaaaatcctttgaaaaattgtaaggtaaaaaaacaaacccttaatttaataaaaaatgaagggttcaaggaattaaggccaaaaaaaaaaaaaaaaaaagggccccc

SEQ ID NO: 78224 - DNA, 125 bp, Zea mays
  Clone ID: MRT4577_171364C.1
gttcacccatctagcgaaagcgggcaataagaacattttacgggatggactcctgcacagagaaacaatgggcgggaagggccttgaatacaccacacaaacagacaggaactctaaagggaaaa

SEQ ID NO: 78225 - DNA, 216 bp, Zea mays
  Clone ID: MRT4577_171365C.1
agtcatcactgacagtgtgtagaggttgggttcatatataagcatgtaagttactggttcaggattaacctacagccttgacggcactcccacacactctggaaccagtccatcaacattgatactcatagcttgttctcctataatcattctcctactaaacacatacttttacaatacaagacctatcatagatatttcataaaaaatactcac

SEQ ID NO: 78226 - DNA, 332 bp, Zea mays
  unsure (1)..(332): unsure at all n locations
  Clone ID: MRT4577_171366C.1
tgtgaaacggctgtcgaagccgggggggcggggggagtgggtaaggaggtcgacacatcctcnagttaataacacagcgcgcttttctcgcgtatccgagattcggaggatcaagtgattggcctgtgtcctgtttttgttgttgttttttttttatttgtgaacggtccatttgtgagggggcgggccatttttttgctctnccggtgcttgggtttctgggtgttctgaaagttgcaatctgctgctgctttcctgcatggggtcactggcagtgttctctatcccgtgtgcttgccctacgcccttccttcggccgggtggtccttggg

SEQ ID NO: 78227 - DNA, 345 bp, Zea mays
  Clone ID: MRT4577_171367C.1
aattcggcacgaggcagctgcgccgcctccgcgctcgtcgcccgagccgaggaggccgtgtagcgctgtggggtgcgcgctgcgagcactgacagggcagcgcggatggaatcgagcgaggcgccacccgtcgcgtttcctctgaggctctgacccgaccgtcgctgtcgcgctgttcctctcgggctctcgttcctcttgctccctcccgcgggccgcggccgccttcgcccgtccccgtccccgtccccgtccccgtcccaatttccaccaacctttcccaatcgccctccaggctctggcactgcgagacgtttcattagccacttaaccgttcccacgacg

SEQ ID NO: 78228 - DNA, 197 bp, Zea mays
  Clone ID: MRT4577_171368C.1
gccggccgggtccgcaacgttgacccgccacgcaagggtttgtacctcgaaaccttatgccacgtctgccgctgccttagtcttcagcaagaaggaatataaagactcgaataagcgccaggccgccagtgacgcccccaccaatggcaccgccaagggatacgttatgagcgagaccaccgaaagggccgacgccc

SEQ ID NO: 78229 - DNA, 240 bp, Zea mays
  unsure (1)..(240): unsure at all n locations
  Clone ID: MRT4577_171369C.1
ctcgcctgatcagagccaagcccatccatcattccacacctccgcgatacgagtgtccgtccctcctgccctactcgccgcgtccacgctcccgcagctcctcgtctagctccagctccagctcctcctcgcgtccgcgtacgaccgctacgtgctccactccaaggctgtgtactacacctccgcgcanaaccacacgtactactcctatgtgtacgacaccgatgccgcctccttcaa

SEQ ID NO: 78230 - DNA, 353 bp, Zea mays
  Clone ID: MRT4577_17136C.1
cttggtttttttttttttttcgaatgtgatggcaggagctgatactactaattaaaaagaaaggaattgacttatttttaaggaaaaccaagtctgaaatctacacaggatgcacatccaaccaaaacaatggtggccccacacacaaagttccttacagggtgggttgtctcgatctcaacacaaaagacaaacaactctgacccaaaatgagcaacacatggtcaaatgaagaaaccaacactgtctattcccaaaaaacggcacagaagtatgaagaccacggcgcggagactctgcaatcccaaaaacaccctacgcgagagcactacaattcttcaccaataacactt

SEQ ID NO: 78231 - DNA, 433 bp, Zea mays
  unsure (1)..(433): unsure at all n locations
  Clone ID: MRT4577_171370C.1
cccgggcctttgnatgaacctaactttcaagtagcttggctcctaacaagttgcgcgggctgtgcccaaacacaatgaacatcggaaaggtgctcgatagcgaaccatctataacactacactatcgacttacgccaagagaggcacaccatatacgcgagcctccgttaactcgaacaagaaactcaggtgcccacacaaagtgctgcgctgggctagttcttccagttcctgtggttatgcttgaaccaaagcagacgcctatcctttaaaaagagagcgtgattcaatgcctgcactttttgagtaagggtgggctacaaaaaaaacaccgtgtttagggtcctgctacatacataaaatcctggaggctcctattaaagtgtccttccgtaaaaacacgtgcatgcaacgggctgcctctcttatagag

SEQ ID NO: 78232 - DNA, 1313 bp, Zea mays
  Clone ID: MRT4577_171371C.1
attcggctcgaggcagctcatttctaagaagccgacccaggccagccgatatcgagcaccaacgacacaccccattgacgtacagctatgatgcggccgacgtcgacccttgctatggtcgtgccgtcgctcgctgtagccatcctctgcatcctagtccggtccgcctccgcggagttctggctcgacgagttcaccacggacggcgacgtccgcagagactacgaccgttctggccggcaggtggcgtcgcttgtcctcgaccagcgttctggcgctggcttcaactccacgcgcaagtacctcttcggcgagttcagcgtggagatgaagctcgtcggcggcaactccgctgggactgtcacctccttctacgtcggccatcgttcccttcaatttttctagacgaatcattattactgtacaattccagcagtggtgattacatagcgttatctgcgcttgtgcagctgacgtccggcgagggcgacgagcacgacgagatcgacatggagttcatgggcaactccagcggctccccgacggtgctcaacacgaacgtgtgggccaacggcgacggcaagaaggagcaccagttctacctgtggttcgacccggccgccgacttccacaaatacaagatcgtctggaacgacaagaacatcatcttccaggtggacgacgtgacggtgcgcgtcttcaagcgctacgatgacctgccgtacccggacgccaagcccatggcggtgcacgccacactgtgggacggcagctactgggccacgcgcaagggcgaggtcaagatcgactggtccagcgcgcccttcgtcgtctcctaccgagactacaccgccaacgcctgcgccgtcgacggccggaacgggggcggcagctcgtcgtgccgccgccggcagcggcgagtggatggacaggcagtccgacagcaccgagtggggcaccgtcaggtgggcggagcgcaacttcatgcgctacaactactgccaggatgggtggaggttcccgcaaggactccccgccgagtgcgcccgccactgatatgcgtccgccggttaattcttcgtcgacgatccagcttggcgtcgtttgttctttgttttgttgggtattctttttttttctacgggtatatgattcttgctcttctttgtggatttgtgattaaaaagcagccctgcagcttgcaacgtgtgggcggttgttgtacacctagcttttcctaaaccgaagcatgtattttatttttaaaaaaaaaaaaaaaagggcggccgatgcagcatatatagtatttacgt

SEQ ID NO: 78233 - DNA, 213 bp, Zea mays
  Clone ID: MRT4577_171372C.1
gacgtatacgacaacgtcgcgcacgcgttagtgaagatactacgcgacgagggccgcgttgagttttaccgtccactgacacccagcctgaccggagtggagccgttcgcgctctgtaacttgtaccactaccatacgctgaagcggctctaccgtcgcgcgaccgggcggtgtccacggggcagacctgggccccgtggcgaccctgctcat

SEQ ID NO: 78234 - DNA, 1327 bp, Zea mays
  Clone ID: MRT4577_171373C.1
cattgggtacctcgaggccggccgggactgatgctaccgaccactggtgtccgattaagcagctcatttctaagaagccgacccaggccagccgatatcgagcaccaacgacacaccccattgacgtacagctatgatgcggccgacgtcgacccttgctatggtcgtgccgtcgctcgctgtagccatcctctgcatcctagtccggtccgcctccgcggagttctggctcgacgagttcaccacggacggcgacgtccgcagagactacgaccgttctggccggcaggtggcgtcgcttgtcctcgaccagcgttctggcgctggcttcaactccacgcgcaagtacctcttcggcgagttcagcgtggagatgaagctcgtcggcggcaactccgctgggactgtcacctccttctacctgacgtccggcgagggcgacgagcacgacgagatcgacatggagttcatgggcaactccagcggctccccgacggtgctcaacacgaacgtgtgggccaacggcgacggcaagaaggagcaccagttctacctgtggttcgacccggccgccgacttccacaaatacaagatcgtctggaacgacaagaacatcatcttccaggtggacgacgtgacggtgcgcgtcttcaagcgctacgatgacctgccgtacccggacgccaagcccatgggcggtgcacgccacgctgtgggacggcagctactgggccacgcgcaagggcgaggtcaagatcgactggtccagcgcgcccttcgtcgtctcctaccgagactacaccgccaacgcctgcgccgtcgacggccggaacggcggcggcagctcgtcgtgccccgccggtgccaacgagtggatggacaggcagtccgacgacaccgaccgtctcaccgtggcttgggcgcgccggaactgcttgcagtacaactactgcgatgacgggtggcgcttcccgcaggggttccccggagagtgcgcccgcaactgatccaccatctgccctgcagtcgcgagtctccaagtctcgccggcctcatcgcatcctcttaccgcagatataggcatactagatcgagttcattcttggattttatgttcttgtaattgtcttattgtacgtacgtacatcgtctcttccgactcacaaagagcccagcagcgtgcgtcctggatctggatgcatatcgaaggtactagttctgtgacttctaaaagatcttatttttgatgattttggtgtaaaatatcatcgcagaaactgaggaataaacatcagaattcataaaaaaaaaaaaaaaaaaaaaaaaa

SEQ ID NO: 78235 - DNA, 375 bp, Zea mays
  Clone ID: MRT4577_171374C.1
gaggcgaacgtgttttcgacatgtaggaaaaatgacatcgacactgcatccactcatcagaactataaaatcctctaaactggtaggcgtatcaagtaatatatatttgtgcccttcataattaactagtgatcggtgcaatgcaacagaggtcgatcgatcggtagctgatatatcttgctagcatttgtcgtcggcgaccatcgcgggctgcggctgctccgcctggctgctggccggtgccgtggcccacatggcgcagacaaggtaggcgacgaggttgacaacgctgagcacggccagcagccagtagaagtagtcgaggcggctgtgggtgaatgtatcgccgagccaccggtgcagctcttgacagcg

SEQ ID NO: 78236 - DNA, 462 bp, Zea mays
  Clone ID: MRT4577_171375C.1
ggacccgagggggggaagggccaacttcagtctaaaaaaagccacagcatttggggttaagggatacaggtttacaccaggccggataaaaaaggtcactaggagtcgggggggaaaagtaggggtttaagtttctgccacagctagctaaaaatatcaggcttataaaaacacacccccacaagctgcccagggtgtttggacagggacaatttttttggctgaccaaggatgaaggatcccgacccgcctggccagtcccaaaacgcggggcccaaggggaaaaaatttagggggccccccccttttggtctacttcaagggagggagggaccgggacaaaaagcctggaaagcttgtaaaaaaaacccccactcgggctgagtctgaactggggcccgctgcctcggtttcctggtggccggcgggggcccaattttccgccttttggaccggctggtt

SEQ ID NO: 78237 - DNA, 252 bp, Zea mays
  Clone ID: MRT4577_171376C.1
cccacgcgtccggccagctgccgctgctgatctcgatgcggtccccgtggcggcggaggaagagacgccaaacgatcaatagactgcaaaggatgtggatcgtcatccggatccggcggcggctgaataggtgaaggaggttgcgtcacttccgctgccgagacagaagcagaaccggcatcctctgatcccgatgctgctgcttctgctgatgagcccgctgcggctgagtcgtccgctgatgagcccgag

SEQ ID NO: 78238 - DNA, 564 bp, Zea mays
  Clone ID: MRT4577_171377C.1
ccggccggggatagagggcagagccggcgccgcatcttcaatcgcggagcgccggagcttaatgttacctccatgaacatactggcgatcggaacgcatgcggcggatgcggctctcacgctgggcctctgcgactgcatcagcggctttcctctccggcctcttggcagtcacacgtgcgccctgggacccggtcctttgcacaccgaccggagacacctgcgtgctagcctatctcctccggccttcggtggatcgataacggcgcccgtgccaaacggcagcgctgcgcgcgtcccgagggcagtgatggccacaagccgatgttccaccaaggcggcagcatttaggaaccctgaactatggggtataagaagacactagtggtgcaaccatgagcaccatgaagcctatggagtgagggcatcatcatgacgtacccgaaggaggacagggacaggagcaccctgttctgtgcatgcatgatcggctagcaggatgaggtcacagacaccatctgggtagatcgcatagaggagcaccacacggctgcggagcgaacac

SEQ ID NO: 78239 - DNA, 303 bp, Zea mays
  Clone ID: MRT4577_171378C.1
agcctgaaaattttttaggcttttttttttggttaaaagaagacctattttcaaaaggatttttggttgcacccgggccacggcccaactgggggggggccaaattcccccattaacccgacgattaactcacacgtacttactcgctacttgcttgcaggttcaggaccgggatccattggcgaaagggaaggggcgcggtccttccacttctggacgcccacggggaccttggaaaaggggggcagcacgcgggggacgctcatgcttcgcattgggcggaagctgaacgacctggccgtc

SEQ ID NO: 78240 - DNA, 246 bp, Zea mays
  Clone ID: MRT4577_171379C.1
ccacgacgaccggcggaagatgcacctactactactcgtgctcgcctgttcgtgccctcggcggtgacggcggcaagaggccgtgtcggcggtggcgcgccaagtgcgcacagcatacatccagccgtcgattccacgctccggaaatctgtcgtcagggccgtcgacgctggccgtctgcgcacgcatccgcattacgcctcattcgttcaccgaggatagttacagcagcaccagcacggacaa

SEQ ID NO: 78241 - DNA, 341 bp, Zea mays
  Clone ID: MRT4577_17137C.1
ttatatttttctagaaacaggtcttaaaaggtgtaaaatttataaaacgggtggcttttacaacccccaaacaaactacacactaaattacaacaaagtttcctaaactcattatagctacgcacgactgatttaaatatcaaatataaaaaagagcacaactcacttgttaaaactataatggtgcacctggccaatatgtaaataaaagcctgcaatacatcattcttcaaccccttttaaaaacaaagatccatcacttccccaagacactattgtcatacctagaaacggacttagcctcaacatccctttgagatagtgttaccatttgatacatt

SEQ ID NO: 78242 - DNA, 589 bp, Zea mays
  Clone ID: MRT4577_171380C.1
gggtaccctcgggctcgccgggattgattgatcggtcacctgacctcatagataactcatagggcggacggacggacgcgcgtctccggtcccgtccgtaataacactgatccgatccacgccggccggcgatggagctcatcaagtccagggcgaccgtgtgcgcgctcctcctggcgctgctcctgctctcgcactacgacggcgggacgacgatggtggcggaggcccgggtgtgcatgggcaagagccagcaccactcgttcccctgcatctccgaccgcctctgcagcaacgagtgcgtcaaggaggacggcgggtggaccgccggctactgccacctccgctactgcaggtgccagaaggcgtgctaagcaaagctcttcaaacaaccttttggcttgccagaactgaactctagtagtactaagtaacacgcagtacacgtcgaccgacgtgcttgcttgcgcctgcgctgtgcacaacctacgtaatgtggtgtcatgtaacgtgacagcaataaatattattaataataataacacggcatgtagccaagcaataaaaaaaaaaaaaaaaaaaaaaataa

SEQ ID NO: 78243 - DNA, 796 bp, Zea mays
  Clone ID: MRT4577_171381C.1
gcacgaggagacttctcgagtttttttttaatgacatgctttggttgacgggatgtctgcttaattgagatcacatggtgccactatcctagaaggagacggacgcgcgtctccggtcccgtccgtaataacactgatccgatccacgccggccggcgatggagctcatcaagtccagggcggtcacctgacctcatagataactctagggcggacggacggacgcgcgtctccggtcccgtccgtaataacactgatccgatccacgccggccggcgatggagctcatcaagtccagggcgaccgtgtgcgcgctcctcctggcgctgctcctgctctcacactacgacggcgggacgacgacgacgatggtggcggaggcccgggtgtgcatgggcaagagccagcaccactcgttcccctgcatctccgaccgcctctgcagcaacgagtgcgtcaaggaggacggcgggtggaccgccggctactgccacctccgctactgcaggtgccagaaggcgtgctaagcaaagctcttcaaacacccttggcttgccagaactgaactctagtagtactaagtaacacccttggctagctgtgcacaacctacgtaccgtgcatgcatgtaatgtggtgtcatgtaacgtgacagcaataaatagtattaataataataacacggcatgtagcctttgcatgcttctagcagcaaaaaaaaaaaaaaaaaaaaaaaaaaaaaaaaaaaaaaaaaaaaaaaaaaaaaaaaaaaaaaaaaaaaaaaaaaaaaaaaaaa

SEQ ID NO: 78244 - DNA, 184 bp, Zea mays
  Clone ID: MRT4577_171382C.1
tgcaccaagaaatccatcgagaggccgtcgacaggggaattaatggcgttgtcgtctagcagcatccaccggcgcctcatactcgcagccgtcgtcctgctctccgagctcgcgactgccagcgccagccccgatacctcctgcgtgccgcggtggtccatctcgcacaacccgctcctgagct

SEQ ID NO: 78245 - DNA, 426 bp, Zea mays
  Clone ID: MRT4577_171383C.1
gcacgaggacgacctcaccttcatgacaaagacgacgaggctactgcggcaccacggttgcgaaaaggacgagccgaggctgcgcaggccggggcgagggggaaaggccgtgggccgaggaggccgagcaggccggaatggcagagaagcttggcttttttcctttttatttattttttcttttcttttctctctttcttttttctatttcctcctatttaatttcaagctcaagcacaaactcacagatgagaagaattcacaacaagcaaattcatcaatcaaaagaaatatgtactccagcatgatgcaacaatcaaaacttccctagggttttattttactaggctcaaacctttatatataacaaaataactctcctttatttagaaaaaagagaagaaaagtgagggtaacacctgaaat

SEQ ID NO: 78246 - DNA, 294 bp, Zea mays
  Clone ID: MRT4577_171384C.1
gaggcccctcatcccggcgcccgtctctctcttccttgctctcgccgccggcagccccgaccaataacaatgtttttgcatttgcttttattggtcacttcggtcgaaccaatatctttttcttgcatattacgttctgctctcaatgcctcccagttacaatgatgcaccatgaccttctctgactccagaagcaatggattttttcaagcgatttctttgcattgacccgcgtataaagatgactgcagcttcatctttaaagatcattttttttttttttcaacactatac

SEQ ID NO: 78247 - DNA, 207 bp, Zea mays
  Clone ID: MRT4577_171385C.1
gtcaaatgtactgcagttcactacatttttgtgatttcatcatatctttattgctctattacgagagcaaaaacactggaaggagctataaggatatgatgaaatcacaaaaatgtagtcaaatgtactgcagttcactacttcactgtacaaatgtaaaaattacttcaagttaaaatttatttatttaacctgttgatatccggt

SEQ ID NO: 78248 - DNA, 659 bp, Zea mays
  Clone ID: MRT4577_171386C.1
acaaaacaaatccgttcttactttcctgtcttgcaaggcaaggaaaaaaacgggcgggccttccaaaccgatccgattggataatctaagggaggggagtggtttggaaccacaaaactaaatggaaccggaccggaccaattaaaaggacatgccttccccccactaaaggaaaaggggataaaaaaacaaaacggggccggggcattgcttttttaaaataaatacaaaacagaattcttttgttcgggacggcaagccaaccaaacaccacagcatggattcaaatgaaatgttttccttagcggagttggcttcccaacaaaacaataaaacaaagcacgggccttctttcctttaaaatacaaaacccccgatgtgatgtaaattaaatgccacgcccggtaaaaaaaaaacttgtactttaccttccaataaaatacaggaaggaaataaggtaaggctaatcttttttattgaactaaacctttcttttccattgctttccacaacacaataaacaaacctgctttgtttaccctacgcaataaaagaataccggggtggggtaatggatggacagaacaggaacgcagggcacattccatgcctagatatactgtacggtccccccccaaattaaataagtgaaaggcaac

SEQ ID NO: 78249 - DNA, 609 bp, Zea mays
  Clone ID: MRT4577_171387C.1
ttggagcagcaggccccgcgaggatacatccgccagcacagccactcgagcagtgttcactgttgcagtgccagtagtggctccggcggcttcggttcttcgacgtggtccagctcccgcggctcgcagggcagggccaagggccacgtcgccaggaggaggcgggtcgtcgtccacggcggcggtgcggagacgacgacgcaccagtaccgcggcgaaatcgtcgtcgtccacgaggaggacgaactcgacgacacggccagctcgtctgccgttttcagcagtcatcatcctatggccatggtgcacgttaattaatttctccggttgaaagcacctccacagctcgcacgagttgcgcaatatatagctaggctagctaggctatgcatgtaacgtagatggtgtgagctccgcatctgttctctactctaacacgggctagttttcttcttccttacatgcatgttcagtacgtacaagaaatctttgacagcgtactacgtagttttttcaaaaaaaaaaaaaaaaaaaaaaaaaaaaaaaaattaaaaaaaaaaaaaaaaaaaaaaaaaaaggggggggccccctatatttgtcccccccccc

SEQ ID NO: 78250 - DNA, 370 bp, Zea mays
  Clone ID: MRT4577_171388C.1
gttctagatcgcgagctgccgaccttttttttttttttttctgcttcgcgtctggggtttttcttaattaatttaggcagcacatgaataaaggtcatgcaacgttcaacaatgttctgctgacctattatgctccaattcgtgaagaatcttctgatgattatgctatcatcttcttcaatcgcttatggattatcatcatgtcctgctcgctgctgcaccatttactaacgacgttctgctgctaacgactctaggagtttgtggtgtgacgacacttaatgaatcctacaagatgcttgttaccacattcttgtacgatgctcatggaattgaaaatctgctgctaccaacaaaggattacctttat

SEQ ID NO: 78251 - DNA, 238 bp, Zea mays
  Clone ID: MRT4577_171389C.1
aacatatcaagcctcactcaaacatgatcgtcatcttttacatcaaactccctcttcacgtgacggccttaaatgtcatactcgaggcacatcctactatctctaatacctttctcaataaccatactggtcgacctactgcatcgtctacaccccacaacacttaactgcttgttcattcaaataacagccatcacacatccattgtcccgacttttaatacataaattccaaacca

SEQ ID NO: 78252 - DNA, 155 bp, Zea mays
  Clone ID: MRT4577_17138C.1
ggcagacaaaaaatagaacttccataccagttaccacaggtgaaaggtgggacccaaactgtcgaacaaaagttttatacaaatccacggggggttttgttagttccaaatttccgaattccagtcacttcacccacaggagcggaggaagtaaa

SEQ ID NO: 78253 - DNA, 871 bp, Zea mays
  Clone ID: MRT4577_171390C.1
gtagtgtagatatatctccttccttctgtctgtctgtctgtcagttcattctgtcggaacattattcagagcggagggccttactacgatgtgcttctggggagaagggacgggctggtggccaaccagtcaggagccaacagtggtgccggttcgccgttcgagcccatcgactccatcattcagaagttcgccgccgtcgacctgaacacgaccgacgtcgtggtcttgtcaggagcccacacgatcgggcgagcccggtgcgcgctgttcagcaaccgcctgtccaacttctcggccacggagtcggtggacccgacgctggacgccggcctcgccgagagcctgcagagcctctgcgcgggcggcgacggcaaccagacctcggcgctggacgtcagcacccccaacgcgttcgacaacgcctactacaagaacctcctgctggagaagggcctcctgtcctccgaccagggcctcttctccagcccggaaggcgtcgccaggacgaaagctctggtggagacctacagccaggacagcgagcacttcttctgccatttcgcctcgtccatgatcaagatgggcaacatcccgctcacggcctccgacggcgagatccgcaagaactgcagagtagcgaactaattattaatagaaagtcacgacgatcatccgatatctcactgttatttctcgtttgtttgtgtcaactgtgaaggcaggcacctacgtaaggtttatgggtgcgacgttaagcatgcagctacactagatgcttaagaataaggacactgtaaatgtccaaattggtcccacatgtcaaacaaaaaagtccttttcatgggccaaaaaacggaaatttcaaatg

SEQ ID NO: 78254 - DNA, 222 bp, Zea mays
  unsure (1)..(222): unsure at all n locations
  Clone ID: MRT4577_171391C.1
agcaatctaaatttttaaatttagatactcaacactgttngaaaacagtaatttaaatgaacacaatgttcatctgattgtaattgcagaaaatcagagacaaaaataataaattttggagttctaaatgggcggtggggtccaaccaagccaagacagcccatcaggcccatcttagcaaagccatgaggggtggcggctagggttagaaaccctaaccgg

SEQ ID NO: 78255 - DNA, 227 bp, Zea mays
  Clone ID: MRT4577_171392C.1
cgaaaaacccggtccgaccacacccttccgccaacccttccgtttttaaaccccaattctcttcttcgaattttaataccccttcttgcggggttttcttaactttgggcagggacaacaactccttcaaaaaccctttaacaacctacttcaatttcttcaattcaaaaatcatccttaatccgaaaacccattatttcccccttttttctcttcataactttttc

SEQ ID NO: 78256 - DNA, 635 bp, Zea mays
  Clone ID: MRT4577_171393C.1
tctttaaatattaatagagctcctgcagagatctggggggggggggggggggggtcggtaccacctacaggacaggcggcatgttgctgccggatcggacaactaaacacatgggcataccccgcacgttgaatgagatgtaattaatagagaggaaatgggcacatcggtaggcgcggctaggcggacgtgcaactagatgcatgctacagaagttttgttgctgttgcaactgatagactcgttctcgtagtggttttcgtaaaggttattgtactgaagtattattataacagtgttgactcttgtggttttgctctactacgtgcttttccagattattttaatggaagtggaagactagtatttgatattggagataaacaacaaggtaaagatcgaggtcaactatatgatagtccaagaggtccataataactataaatttatgattcttgaacagatttttgtgatatagttaatcttgcacaagatgattcttctgtaggttctcttcgagatcgtctatctcgtaatcgtcgttgagttcgagttagatgtcgttgtgttcgtcctaatatagaatttgatatagaactagaagatgcagaaggtagtaatttagaattacgaat

SEQ ID NO: 78257 - DNA, 301 bp, Zea mays
  unsure (1)..(301): unsure at all n locations
  Clone ID: MRT4577_171394C.1
tgggcttggttctgcctgttcgcnaaccaccgcgccgcttctttaggctttgttcgcccatctactacntcttaaacaccttaagtaggttcagcaggccaccctcaactaataagacgctcccgaacaggcatttccacactcacatcttcctcattcaatgcaatttcaagtggcccatcggcttgtcaaccatcttcaacatgcactccatatgctaaatgttgccttttattctactccagattcacacgacttatgtgtccttctttaaattccaactattatcttccaaatactt

SEQ ID NO: 78258 - DNA, 335 bp, Zea mays
  unsure (1)..(335): unsure at all n locations
  Clone ID: MRT4577_171395C.1
gcagtggtaacaacgcagagtactttttttttttttttttttttttttttttttggtttttttttttttttttttttggggggaaaaacatttgaggataataaaaggacgaaattaaataattaatacacgtnacggtacaactgagttggagtttgtggacagccttttggcgaacgcaaattaaataactaattcccccgccccaccncagaatgagaattgacctcgagacatgaacccaattaaaagagccccactaacgggggccgccaccccctaatgatgacccgcgtgctccgcgctggtcccactgcttaggggcgcattctgcc

SEQ ID NO: 78259 - DNA, 411 bp, Zea mays
  Clone ID: MRT4577_171396C.1
attacattcacatttgtgcgattgatccggtttttatatgtttatgctgaatacagaaaccaaaaacaccacgcattcgcattgagcgggggcatatcaaaaggggcggagaaccatgggcccaaataaaccttaatggacacgcaggggaaacaacaccaaaagagggggcgtacccctaaggttagacggttttcagggcacgaactctcctgatacagaactgggggagctcctgttagaaagaaggtcccataccgaaagggcggcttggggaagggggaagtcttgaggttaaacaaggacacaaacccggcctccttcaaggagatggatcacccaacaaaaaacgaaacgcgagcgtgctctttctcctcctcaaggaagattctgaagccgaaccgggccctt

SEQ ID NO: 78260 - DNA, 279 bp, Zea mays
  unsure (1)..(279): unsure at all n locations
  Clone ID: MRT4577_171397C.1
agctcactaatcagagtgactccctaaacttttcttatttttaattaaaatattacaaggcaacaccggaaacttttaaattttttagaaacacaacaaaacaaacnaaccaaataaatatacccccattattactaactaacacaaatanttatataaacaaacaacccttccccctaaatatctacaacctccctgcatccaaaaaaattgccttcaccctgaaaatcttctaaccctagatacctgaaagccatcaaaacttcaggtagaaacatc

SEQ ID NO: 78261 - DNA, 471 bp, Zea mays
  Clone ID: MRT4577_171398C.1
atggttgcaaggcacggaaaagccgatgcgggacgggaggagcgccgcagcattgttccgtgcagccagccggacggcaagccccacgccgccacgctaatggggacgatgaggacaagagggggaataatgaattctggatcactgatatcaccaatttcctggtgcagaaggcagttggagtatgagcagaagcccaagaatgtattggtcctgctcactctcaagttccttgtcgccctctcagtctccaaggtagtaatgaatgttagtttaaatagagcttggaatccagggatagtctcccgagaacaagaagttgttaaatttcttaactcagaactacaagacaatgcaggttacaatgaagctggtagccttactatgttaagagcaaggtttacacgccataatgcatatgaacgaaaagtgggttcttcaaaaattttggattatttggttcctgcttaa

SEQ ID NO: 78262 - DNA, 831 bp, Zea mays
  Clone ID: MRT4577_171399C.1
aagctccgcgaacggcgccacggcggcgacgagaagtggcgagccccgagagcgggtttagttagaggctacgggcggtcgggcgcggcggcggcggcggccatgagcagcgggagcgagagcactaccgccagcaggtggcccgagctggccacgctgcgcgccctggcgcgcgacgccgcggagcagctgcggctgccgcgggccggcacgtcggcgtcggcgtcggcgtcgtcgtcgccgtggcgcgggcgcgaggaccacctccacggccacggcaagacggccaaggtgatgcacctgctgctctggggacccaagtgaagcggcgagaggccaccgtaccgccggcgttgctcgttttgctctgcctgcaatccgccccgcacggactgtactgtactgtacctatacacctatatactacgacgtgcacatgtacgagtctacgacgtgctgctgtaccatactaatactagtgcgctgctgctcccttgccttcttgcttgcaagttgcaccagccactccgcttttttttgctcgaacgatcgactgctcgtcgcgtcgggccacggccggtcgtcagtttgggtgtgtccactccactgtaaagctcctcctcttgtttttttgggtactccctgcatgccaaagttagcggacgtgtactaggtgtggttcggagcagcaggttgtattacttaccaccccctctgtgatgtaagaacgcgtgctgaaattatcatgttatggcatatggattggataagaatgggaaaaaaatatgatagattttgacttactataaaaaaaaaaaaaaaaaagcggcc

SEQ ID NO: 78263 - DNA, 347 bp, Zea mays
  Clone ID: MRT4577_17139C.1
cggacgcgtgcgctcatccgtcactgctgctctctctcgccgctgtgctgaacctatcgcaggctgtatatcatctacagcagtctgctactaaactgctgcaaacacactatctatatcacaaagttctaaaggtctgttcgaacaataacacctctcgtcatgtggatcactactattatcaacaggccatcgatttctccatcacagattggaaccatactacctctatctattgtacatactatggtcaaactcttcaccaacatgagcctatggcaaattacattaaaacatacgcacacaatcaatgcttaggagcctttcttttctgctattctttctat

SEQ ID NO: 78264 - DNA, 331 bp, Zea mays
  Clone ID: MRT4577_1713C.1
ccgactcgacactaggactgtacgatcgcttgtgagcaaaattggaatggaaatcataacactgtcgacgaccaaatacaacggtggttgactcgtttataagagtatgaccaaaacaacgacgactgtttatgtcgttgcatgcaatctttgtaactatgagactctctcctcatcaaatccgtacacttgctatgtaccttggatcgattgttccttgcattcggagccctattgctctccccgcacaggtgacttctgagtcccaccgcgctctgttagaataaaaacttccctcgaagtttcactcgccaaggacaccaatgaacgt

SEQ ID NO: 78265 - DNA, 329 bp, Zea mays
  Clone ID: MRT4577_171400C.1
ctatcaaaccgaacagaggccgtagtgtacgctgggcgcccactctgactgtcctatgggtgcgatgcgcctcgctgccttagcgctccgaactgacgctgcctctagctccagctacagcggggcgaaccgagacggcggcggctgcgtccttctctcggtcgccagctcgcccgacggggtcgagctccggtccgccgtggacagccccaccgccactccgagctcgccaggtcccgggtgtcggccaaagctccggctgacacgtaggcgctggggttgacggaggtgatgatggagaacgtgaccgatgagaagagggtgtctcg

SEQ ID NO: 78266 - DNA, 528 bp, Zea mays
  unsure (1)..(528): unsure at all n locations
  Clone ID: MRT4577_171401C.1
aattcggcacgaggcaccgagagccctaccgccaagcaaaagaaggcagagagtgaagtagccggcgtcgacccgcgccttggttgtcgacgagcctctgtgaagcagccgtggtgactcgcccaaacatggcggatgtgcacatggcttagtccagtctagaggatcatctcgggcgggtggattgctcaccaaggtcccttcggcgccatgaatccactggtcatcatgggccagcgtcttcgtcgacatccccaatgctcggacagagaaacaaggaagacgagtgtggaagagcagagaatccaagctcgacacactaggctttacgacgacacgccatcgctcggccgttgacgcgtcaccgttaagcatcaccgggcttcacggaggcaatctgngacactagagtaaaagggattcttcatcaacgccattagcgctgtcgcgggccgcgtcctgctctggtagaagcttctgggtgccgcgccgggacccagaggcatgctcgtggcctttctcgacgcg

SEQ ID NO: 78267 - DNA, 742 bp, Zea mays
  Clone ID: MRT4577_171402C.1
acggcggcgacgagaagtggcgagccccgagagcgggtttagttagaggctacgggcggtcgggcgcggcggcggcggccatgagcagcgggagcgagagcactaccgccagcaggtggctcgagctggccacgctgcgcgcgctggcgcgcgacgccgcggagcagcttcggctgccgcgggccggcacgtcggcgtcggcgtcgtcgtcgtcgtcgccgtggcgcgggcgcgaggaccacctccacggccacggcaagacggccaaggtgatgcacctgctgctctggggacccaagtgaagcggcgagaggccgccgtaccgccgggctctctcgccggcgttgctcgttttgctctgcctgcaatccgccccgcacggactgtactgtacctatacacctatatactacgacgtgcacgtgcacctgtactacgagtctacgacgtgctgctgtaccatactagtgcctcgtgctatgctagtgcgctgctgctcccttgccttcttgcttgcaccagccactccgctttttttgctcgaacgatcgactgctcgtcgcgtcgggccacggccggccggtcgtaaagctccttttttgggtactccctgcatgccaaagttagcggacgtgtactaggtcactaggtgtggttcggagcagcaggttgtattacttaccacccctctgtaatgtaagaacgcgttctaaaattatcatgtcgataccaagttatggcc

SEQ ID NO: 78268 - DNA, 1159 bp, Zea mays
  Clone ID: MRT4577_171403C.1
cgggtaaggtagcggcgagacgaggccgtttaaataggtgtcaagtggaagtgcagtgatgtatgcagctgaggcatcctaacgaacgaacaacggcgccacggcggcgacgagaagtggcgagccccgagagcgggtttagttagaggctacgggcggtcgggcgcggcggcggcggcggccatgagcagcgggagcgagagcactaccgccagcaggtggcccgagctggccacgctgcgcgccctggcgcgcgacgccgcggagcagcttcggctgccgcgggccggcacgtcggcggcgtcgtcgtcgtcgtcgtcgccgtggcgcgggcgcgaggaccacctccacggccacggcaagacggccaaggtgatgcacctgctgctctggggacccaagtgaagcggcgagaggccaccgtaccgccgggctctcccgctggcgttgctcgttttgctctgcctgcaatccgccccgcacggactgtactgtacctatatatacacctatatactacgacgtgcacctgtactacgacgtgctgctgtaccatactaaatactagtgcgctgctgctcccttgccttcttgcttgcaccagccactccgcttttttgctcgaacgatcgactgctcgtgtcgcgtcgggccacggccggtcgtcagtttgggtgtgtccactccactgtaaagctccttttttgggtactccctgcatgccaaagttagcggacgtgtactaggtgtggttcggagcagcaggttgtattacttaccaccccctctgtgatgtaagaacgcgtgctgaaattatcatgtcgataccaagttatggcatatggattggataagaatgggaaaaaatatgatagattttgacttaaaaaaaaaaaaaaaaaaaagcggcctgccgcatctgggggggctccgatacatgccgaccgcccactgcatggctcaccatgctttaccaaaagctttcttcgcccccgctcggctacaacagatcgatggagaatgagaaggtatccatatccgcgtattatatacttctcgcagtcgagatgcgatgaggcccatacaaaaagaatcagttaaactgcgatatgatgcgctctagctacctaaccgtatacacatataaacacggccgatc

SEQ ID NO: 78269 - DNA, 869 bp, Zea mays
  Clone ID: MRT4577_171404C.1
cggccggccggggcgtgggcggacgcggggacggcggcgacgagaagtggcgagccccgagagcgggtttagttagaggctacgggcggtcgggcgcggcggcggcggcggccatgagcagcgggagcgagagcactaccgccagcaggtggctcgagctggccacgctgcgcgcgctggcgcgcgacgccgcggagcagcttcggctgccgcgggccggcacgtcggcgtcggcgtcgtcgtcgtcgccgtggcgcgggcgcgaggaccacctccacggccacggcaagacggccaaggtgatgcacctgctgctctggggacccaagtgaagcggcggcgagaggccaccgtaccgccgggctctcccgccggcgttgctcgttttgctctgcctgcaatccgccccgcacggactgtactgtacctatacacctatatactacgacgtgcacctgtactacgacgtgctgctgtaccatactaatactagtgcgctgctgctcccttgccttcttgcttgcaccagccactcccgctttttttgctcgaacgatcgactgctcgtgtcgcgtcgggccacggccggtcgtcagtttgggtgtgtccactccactgtaaagctcctctcttttttttgggtactccctccatgccaaagttagcggacgtgtactaggtgtggttcggagcagcaggttgtattacttaccacccctctgtaatgtaagaacgcgttctattcaaaaaaaaaaaaaaaaaaaagaaaaaaaaaaaaaaaaacttttccgagattggctgcagttactaattcatgatctggcatgtacagaatgaaaacttcattctcgattctacgagaattttta

SEQ ID NO: 78270 - DNA, 1374 bp, Zea mays
  Clone ID: MRT4577_171405C.1
ctgcgaatccagcggcagcttgtgcagcacatccgtggtttggtccgcggcaggggtgacggtgacgggagccggagcagcagccggtttcggtgccggtgccggcgcggcgggcgcgggggacggtggtgtcgcgacggcggccatggcgtgaagcgagaatccatcctccgtatctacgtatgtacacacatggatccatacatctcgatcggaaaagaatcaatagaaagagaatcgtacgatatctttttcgaaacaaataaaaaggaaaaaaaagagaaaacagaaatcatgatcaactaagccctctcgggggcttgcttaagaataagaaagaggaatcttatggaaatagcatggaataaggtttgatcctattcatggggattccgtaaatatcccattccaaaaatcgaaacaatcgggacttttcggagattggctgcagttactaatgcccggcccgggaggaacggcggcgacgagaagtggcgagccccgagagcgggtttagttagaggctacgggcggtcgggcgcggcggcggcggcggccatgagcagcgggagcgagagcactaccgccagcaggtggcccgagctggccacgctgcgcgcgctggcgcgcgacgccgcggagcagcttcggctgccgcgggccggcacgtcggcgtcggcgtcggcgtcggcgtcgtcgtcgccgtggcgcgggcgcgaggaccacctccacggccacggcaagacggccaaggtgatgcacctgctgctctggggacccaagtgaagcggcggcgagaggccaccgtaccgccgggctctcccgccggcgttgctcgttttgctctgcctgcaatccgccccgcacggactgtactgtacctatacacctatatactacgacgtgcacctgtactacgacgtgctgctgtaccatactaatactagtgcgctgctgctcccttgccttcttgcttgcaccagccaaaaaaaaaaaaaaaaaaggcaccttcgactgctcgtgtcgcgtcgggccacggccggtcgtcagtttgggtgtgtccactccactgtaaagctccctctctttttttgggtactccctccatgccaaagttagcggacgtgtactaggtgtggttcggagcagcaggttgtattacttaccacccctctgtaatgtaagaacgcgttctaaaattatcatgtcgataccaaattatggcatatggattggatgagaatgaaaaaaaatatgatgatttttgacttgcaaaaaaaaaaaggcccctaatgcagacaactacacctcggatgttaacattgtttccaatgctagctgcaccacaaattgccttgctccccttgctaacgc

SEQ ID NO: 78271 - DNA, 459 bp, Zea mays
  Clone ID: MRT4577_171406C.1
catgacaacatcataggctgcgtcgcataagcatatattattgaactcacccacagttctttacttgcctcgtcgggagattaaaccaaggagcagaccccattgcctgacacgggcaaagacccagtgttcgttcacagatcaggtaaaactcacaaaagattcctgactgtattgcccacatattacacactgatgaaagaccttaacagaaggcactctaggctgcatgtgctgcaccaagtacgcataaccacgcttgttcatgcccaaacctactcagtggactggacgatgaaactttggcggctgacggtatgaatgacaaccggtggcccatcatggtgagtccagccctgtaacttgataactgtggcttgctcaccactccttgtaagaaacatggcttggaggtgctaccttcaaatgcttctttgtaagagctaaatgtgtaacaca

SEQ ID NO: 78272 - DNA, 162 bp, Zea mays
  unsure (1)..(162): unsure at all n locations
  Clone ID: MRT4577_171407C.1
cagaacaagactctgacgccgccgcccccccgcctgccgcacccgtccataccataccataccatacctncggccggtcgtctcctatctcgtcaccttcgcccggtgctcagatctccgtcgtgcctctgtttgattgntntatccgtattgccgggagat

SEQ ID NO: 78273 - DNA, 326 bp, Zea mays
  Clone ID: MRT4577_171408C.1
aactccaactatcgagcgcataaacgagaggttttcagcagccgtagtcccggcgatcccgacgccggtcgccctcatacttcctcgtcactgtcttcgtttctctttccaacaatcaagatgagacgtggcggcagcgcgcgtggtggtcaaagttctctgcgctacctctttggaagcgctgagccccccaaaccagcagtgacagcacctgtaagtgctccacatgctgctgcaggtgctccacctgctgagaaaacacccgctgcaaagcctgatggaaccagtcagattgctgctgattttaccagacaaacccataacta

SEQ ID NO: 78274 - DNA, 180 bp, Zea mays
  Clone ID: MRT4577_171409C.1
gttaaccggaacatggtggcagaacttccactgaattaccttggagtgggccttttgacattacaaatacacttttaatgttgacaggacaaccactttagaatgccttacatttacattgagacccacatttaacaacacgagttcattggtgaagggcgttctttttccaaacagggg

SEQ ID NO: 78275 - DNA, 292 bp, Zea mays
  unsure (1)..(292): unsure at all n locations
  Clone ID: MRT4577_17140C.1
ggcgcccacgcgttcgaccaagctaagctcactattactttctacaacaaggctaccaagggatggctcttttttcacttttctctttttgctaacgcaacatattctttcatnatttcacaatgctcactagctcctagttccattatccacatttcctcctaccattacttaatgttctttaacacccactttgcaatcctatatgctacaacaagcgattgcacgagcgttttcatcaaccaattcctcaattgttcaacaatccttggcacatttaacaatacaaacc

SEQ ID NO: 78276 - DNA, 421 bp, Zea mays
  Clone ID: MRT4577_171410C.1
ggccgctttttttttttttttttttttttttttttttttttttttttttttttttttttttttttttttttttttttggggaaagggtttttggtttgatttttgggggagcccaaggctcagttcttataggcaagggtgtcccagaaataggaaagggctaatctagagaatccggaaagtgcgtatctagggacaccttgccaattagatccaatactaccaaaaaggggaaaaaggctgcagcccccactgctttagggttgcagccgaccacccttctgggccaaccgatcaccccttaaggcccatgggcctatacgggttgctaacacccccccgcagtgggaaccgtggtgcttagccacgggcattcagactgggccgaaatttattgaacaaccgaaataaagtaacccct

SEQ ID NO: 78277 - DNA, 261 bp, Zea mays
  Clone ID: MRT4577_171411C.1
ccatcagcaaaaaaaactttattattgaactataacccataagcaatctaaaagagggcccccccaatgatggggtgttggaaaaacactggtgggtttggcaaagtaagtgggccgaatggcaccaattggtgcagcggtaaaagggggcccacgttaggcccagggtgcaggtaaaacggcaacaaatgttgctggggcaagaaggcagcagggcccacaacagctacctggctgaaaggcagaaattgttggtgttga

SEQ ID NO: 78278 - DNA, 364 bp, Zea mays
  Clone ID: MRT4577_171412C.1
gattataaataggggtgttgtaacatttaatattgttttttttttattttaatttatttatttttttttttcaaagggaaacaaaagattaattgaaaattggggggggacattcaaaaaaaaatttttttttaaaaaaaaaaaaatgtacaaaaacaagggaaaaactctgacccagcccccttgattaacgacgacacctggaaaagacttttttgacaaaattttaaaaaaataacctcaagagaacagcaaaaaaaacccagatttttatgtggacccaattaaagggcacgacatcaaaaccacagattcgaaaacccagcaaatgctaatttgctcgcaaactggacacaaaataaaa

SEQ ID NO: 78279 - DNA, 362 bp, Zea mays
  Clone ID: MRT4577_171413C.1
attcggctcgaggtcaacttcatgccccgttttgtcagcaccgccgactgcgccgtctgggaggacgccatctagtacatctagccctgccatgtacactgcgctggctgcaacccgtaatgcgatgcctgtgaccgtggcccagatgtattatcaaccatggaaccacgagactttgcttttaaaccagagggttgcattaccaggcctccttgatgaactagaaggctgttattcttatccttttggattttcccgtgccaaattacacatatactgggattgtacagaatatttctccagaggttgtggcttgtggacttgggttgttcaccatcgcatgaataccaactgggtgtgct

SEQ ID NO: 78280 - DNA, 312 bp, Zea mays
  Clone ID: MRT4577_171414C.1
acccgcaaaaaaggcaatttttgtaaggaaaattgcccggttgcaacaaagggtcaacttaacccacccttttaccattttttggggacccatgcccccacctattaggacaatctcccagtgttttgaaatcaatgttttcccccaaaacaaatgttgaaaaaattctcctacataaattattaatttcttcgatttgaaagggaaaaacttggccaaatccttactgggttggaccgggagcaaactgtttttgttcgacaatatttttctccatttaagccccgcggagaccgtgtttttttttaaaaa

SEQ ID NO: 78281 - DNA, 318 bp, Zea mays
  Clone ID: MRT4577_171415C.1
acagtctagcacgtgtggatcatgtcacgcctatctctcctacagttccttatggcgattcacacgtttcatatgagccatatgagctagatgccctaggctccagaaggctgagctggatgatctgtgccatcgctgccacagctgcaacagcaggtagggaaagtcggacaactcctgcacatcctgttagccgacttagcagtctcgcatcattcccatcattcagatccatctcatctcgatcagctaggacagcgacgtcatcgtcgcgatcgtcgcgtcatagggtagatctgatgatgctgtctcccaagt

SEQ ID NO: 78282 - DNA, 243 bp, Zea mays
  Clone ID: MRT4577_171416C.1
atggatggcgatcgcatcctcgacccgctgctgtcgggcgcagagcagcaaattccgcctccctctcccgtcctcatcccgccccaaccacggccgctacaacaacgatctgcgacagacaccgcctgctctgcgtcccctcgacctcatccaagcgttcgttccgtgctctcaataccagatgccaaagagtccggcttcatctctgaatttatcggtaaggtagttcaagctggcgtgtag

SEQ ID NO: 78283 - DNA, 361 bp, Zea mays
  Clone ID: MRT4577_171417C.1
aagattgtcttattcatttttgtccgccccaggtaaaaatagcctcaaacggtccagctgggcccgggaaaacttgtgcccaaaggtacaacacggaccgagttaacaagagctggggaagaaacaacccacttttttcccaaaaaaaggggaagcgaccaccccacatcccccggccaaaagtaatacctaccactccgaaaggcttgcccccccgtgatccttaaacaatggggcggcttgactcacaaggggccatcttcgactgggcctccaaactcccaaggcagaacttgccctttaatttctttttaccccaaacagggggggcccgaaaagcacaacttgggggcaaccgcgg

SEQ ID NO: 78284 - DNA, 676 bp, Zea mays
  unsure (1)..(676): unsure at all n locations
  Clone ID: MRT4577_171419C.1
ggcaaaagacatcaaagtctaatatttggatccgcaacatcacaggacagacaaggaacagcgccgggctcgcctttggaagcgagatgtcaggcggcatatcggacgtccgagcggagggggtccggatcgtcaactcggtgcacgggatccgcatcaagacggccccggggcgcggagggtacgtgaagaacgtgtatgtagctgacgtcagcttcgacaacgtttccatagccatcaggatcactggaaactatggtgaacaccctgacgatggctacgacaggaacgcgcttcccaccataagcaacataaccatcaaggatgtcgtgggtgtcaaaattggtgttgcaggaatgctgcagggcattccgggggatagcttcagtggcatctgcttgtcaaatgtttctctaagtgtcaggtctactgatccatggaattgttcacttgtcgaagggtattcgagctctgtgtcacctgaggtgtgcgagcaactgagagccactcctgngcccggacagatgtgctatggcggtaactatccggcagctgcggcacaaccgcagccgccgcagaagtcaggtgctagccggctggtaagtcctttcctctcgatagattggtttctacgtaggtaaccttgagcatagaatctacttatacaccccccccc

SEQ ID NO: 78285 - DNA, 298 bp, Zea mays
  Clone ID: MRT4577_17141C.1
aattcggcacgaggacgaacaaaagcgcatcgatctcgctgtcgtcactcctcgtcacccagccacgaacagaggcaccacccagcatggccctgcaggcggcgctcctcccatccaccctctgatccgtccccaagaagtgcaggctcgccgtggcggggaaggacacgggattccttagcgtatcccacaagaaggtgcaggcggtgtttatgccggtgagaacgcgggtggcgacgacggcgcctgtgggcactccgtggtgcaccacggggggcaagggtgggaagaagaccgg

SEQ ID NO: 78286 - DNA, 131 bp, Zea mays
  unsure (1)..(131): unsure at all n locations
  Clone ID: MRT4577_171420C.1
ccaggaagccacatggtttctagatattttttattatttncggagattagtggaggctccctattctcgaaatcctgagatcgtttccccatttggtttaaaatgcaggacttctaacactggttaaccag

SEQ ID NO: 78287 - DNA, 384 bp, Zea mays
  Clone ID: MRT4577_171421C.1
gagcgtgaccagccctcgcccttttttttttttttttttttataataaattcggtgggtgtatatctatatagtttaaattatattattgtggaccaattaatataggttacagcatacgcaattggatcaaccaacattcatgtggacacacgtgcatgagcacaaatactgacgccaaacatgcacagagagatagcaaactgaagaactctgtttctttctctctgacagacacaccacacaatacctatgtgtggcagtcagctccgcctcgcttattattgttcaaccaccaccccaagctagatagataataatcatatccatggtcgttgaatcgacgagatcagcagatgcacggatcgcacttgcagccggtacc

SEQ ID NO: 78288 - DNA, 949 bp, Zea mays
  Clone ID: MRT4577_171423C.1
atcgcgtaatcctgcaggtgcagctaccggcatcctgtcgccgcttcgcttcgagacggaaggctgtcccggaggtgtggagccgagaggggttcgccgtccgagaagggttcacatcacctcttcctctgcccccctccggtctgtcttcggggtctcccattggtggctgcagttgttttgatgggaactcagtaaccgctcgagaggagaggaaaggagcggatgctcaactgtagcaggaagatgggtagatccgcgagtgtaaggaggccgtatttcttgttgggtatctggattggggttgcgattcagtttttggtgtttcctcgcgaattgctccgccgtcagcgcctttcctgaatgggggtcaatttggctctcgggcaagaatcaaatgggcatattcacgcacatcattaagaatggtagaaacttcagttctaaggctactgacgcggacactttgaatttcacgcaggttcttcaagtccttctggtttccgcaaccatcgttgttgctcagacccaatgggctagtggtgtatggggcatgtactgcgaggacttgacagcgagtgtagaaaggccgcacagggcctcggtaaccgatttcggcgccgtcggagatggtgcgactcttaacacgaaggcgtttcagaatgcgctcttccacctcgactcattcgcgaagaagggcggggcgcagctgttcgtgcctgctgggaggtggttgactgggagttttagcctgatcagccatctcacgctgtcgctggacaaggacgcagtgattcttggatcaccagactcctctgactggccagtgattgatgctcttccatcttatgggcgcggtagagaactccccggcaaaagacatcaaagtctaatatttggatccaatcttaccgatgtgataataaccggtgccaatggcaccgtcgat

SEQ ID NO: 78289 - DNA, 179 bp, Zea mays
  Clone ID: MRT4577_171424C.1
cattgggtacctcgaggccggccgggatattttatatcgattacaaagagtacactacccaacccagagaaaattaaaatttctcaaccaacccctaaccccattttaagatgttgacggtcgttcaatcagaacatctccttaatgatgagttcaatagacgatttcgtgatataccc

SEQ ID NO: 78290 - DNA, 552 bp, Zea mays
  Clone ID: MRT4577_171425C.1
aactcctaagtgctgctaattcattttcttgtcgatgctggaaacatagaagaacaaaggctcgacactcaaacaagtcagaaacaacacattcctcttaactgcagcaactccattcgctaactaaatgaagagggccgactgctgcacagcgagatacaagcgcaggcagagtccttcggtgaaatgcaagggggataatctaccgagcaaagcccagattcttcatagggccatgcgtcctgccagccgactttctgatattcttcgatcaattgctgcgtcaacagagttcatctggagcaagactcttgtcacattctcgaccaaacttaagctacaataaatgctaccgtattggcagaacctcagccacctagttttgctacaaacccatatttgcatgcagtaaattggcaatgaataaaattaatgcttcaattgaaattaaatacatacatatttgccagctgtccagggcttggtcgataaccctcaagccattagcataggcaccacgaaatttgtcagattatagaaaacttactagta

SEQ ID NO: 78291 - DNA, 617 bp, Zea mays
  unsure (1)..(617): unsure at all n locations
  Clone ID: MRT4577_171426C.1
ccggccgggaccagcttacttttttaaatatcatatgatatttacaaggatttccttactggcgacgagatgatgtcggactcatatcctatcaaagaagttgatgatgtcatcttcgaagttgactgcgatgcaatctatccagaatcggttgctggggatgatgaacccgttgaattcaacaacgtcatttactctttccgtctccagcctacgacatatgacaaaaagacttatgtgtcttctctgcgtccttatctcaagattgttaagaacaggcttaagaaaattggaaagaatcccgagtacattgccaatttcgagaaaaatgcgcaagatttcttgaagacaaagctacttcccaacttcgacgacttggaattttacaccggagaaagtatggacctcgatggaatgattgccgtaatgggatatcgggaggatggtaccacaccttatttcatgttctggaaggatggccttaaagagatgagaatttgaacataactaagtcagaatgcctaggcagaagatacggacggcgagatgctggtttggaacgcaacaatataaatatcttgatacaaaacanaaaaaaaaaaaaaaaacccgcggcc

SEQ ID NO: 78292 - DNA, 1564 bp, Zea mays
  Clone ID: MRT4577_171427C.1
ggacccccgggttcggcccgacacgattatttttttatttcctcaaaaccgatatacctatatacaatttatattcaatattaaaaacatcttagcatgatgttctactggttagacagcttcacccagtgtctttcgtccttcttccatcaggacatgggttcgaaccccacgcgtgcgtctagcctgtgccggtcgccgtttggccatctatatagacgtgcagcagattaatttgaaatagctgaggggttattttaaaaagatgacgcatgatgaccgttgaaattggtgctttaagtatagtatagaattcttggaaggttttgctattctacttatttgtgatacataaacttgcccattttttcttggtatctactatgaacttaactgatgcatttgataatataatgatttcttttgagcctgttcattagatgtaaattaacacagtatccatttacaaccaattcttttgcatttttacaattgaccttttcattttcatataaaatattggcatattcacaatatactgaattgtgaacttgtcaaggattcaagggcatgcaattcttgaacgttttagtggaatatgaaagtctcatctggtcatacaatatgtgagtctgagatgattcatattttatgccactttttacattttcaaatgtctctgttgtgttgattggtcacctatatcctgctgattttgcacacatcaggagttccaagtaggtatttacaccattcttcctactagtaagttttctataatctgacaaatttcgtggtgcctatgctaatggcttgagggttatcgaccaagccctggacagctggcaaatatgtatgtatttaatttcaattgaagcattaattttattcattgccaatttactgcatgcaaatatgggtttgtagcaaaactaggtggctgaggttctgccaatacggtagcatttattgtagcttaagtttggtcgagaatgtgacaagagtcttgctccaggtcagctttcatttggccagtgagcctgagatgctgctcgactcattgttttggaggcagcaaccatatctaacaccaagttttttatttcacaatttgtatgagcagatgaactctgttgacgcagcaattgatcgaagaatatcagaaagtcggctggcaggacgcatggccctatgaagaatctgggctttgctcggtagattatcccccttgcatttcaccgaaggactctgcctgcgcttgtatctcgctgtgcagcagtcggccctcttcatttagttagcgaatggagttgctgcagttaagaggaatgtgttgtttctgacttgtttgagtgtcgagcctttgttcttctatgtttccagcatcgacaagaaaatgaattagcagcacttaggagttattttggtccaactgtcgcctcattgggaatatattgatgaacacctcaatttctgcccgaatgtaacctggtcatgtgctattgccaattgaacctaatgctgtgcattggctggaaagcaacttaaaaatgttacggatttt

SEQ ID NO: 78293 - DNA, 324 bp, Zea mays
  Clone ID: MRT4577_171428C.1
acgcgtacacacccgtttcgtacgcgtatccgtcggcatggcgacatggctgggtgcctggggacgcgtactatcctcactatgctcagcaggccccttcgctcgcctaatctctcgccgtggccttgccggtgccgcacacgggcatgggtctgcgaatgtgccctcgcggaaagatccagtgagccgcaagcacgtggaatgacgagcacttagacctgtctagcctcacaatgaggggcgacctctctaatgggggtaacaagcttgttagtggcaagaaggctgccctgactcaggtggcgttgcaccacgcgtcatact

SEQ ID NO: 78294 - DNA, 366 bp, Zea mays
  Clone ID: MRT4577_171429C.1
aaagaaacaaccgaaaaaaaaaaaggggcaatcccataatgagaggagcaccaaaataggaccagaccagggcaaattacccaaaatagggaaaacatgactggcaattgtcaaccaatttttaaagcaaaaccaagggccgaaaagggccaagaatacgctgcttggggagcgcacaacaccaaagcgggagggtaaaaacatgccaaaaaactggcccgggcccaagaatagctataaggcggatccaagcctccgggaactgggggccattgggatgaagatctaatggaagtaacccagggggttggggacaccaggacggggaaacgggcggtaaaaccaagtgaactcctggacagggag

SEQ ID NO: 78295 - DNA, 832 bp, Zea mays
  Clone ID: MRT4577_17142C.1
aaatattcttaatctgctgagggttttgtgaataataactgtttcactgtttgcatgcagtatgctcgcatcatcagaagcttgggtttccagcaaaattcaaggacttcaagattcagaacattgttaggtcctgtgatgtcattttcagaacattgttcggtcctgtgatgtcaaatccccaatcaggctcgagggtcttgcatactctcacggtgctttctcaagttatgaaacagagctcttctctggcttgatctatcgaatgaagcggcaaaaaatcatgctgctgatttttgtttccggcaagattgttctgacaagagctaaggtgagagatgagacgtacactgcttttgaaaatatctatccagtcctcacaaagttcagaaaagtccggcaatgttaagtacatggtaattactaatgggcatgggtaattagggcatgctgttcaactatgtgcccagttgttgttgttgtcccctttttatcgttttgtttcctgatggtacgggtgatcacattttcagaaaacttaagttcggcacttggtgtatgtagataacttaggaatgggcaaatgctgttgctggccgccagctctaacttccaagtgtacatatttcgtaggagcctatgcatacgctgcccatcagtttcccatgagacctggtgctgtgcacttgttgattgatgtccacacagctcaattatttgtggcaagaataattagggtatgttgttcaagtgtttgcccagttgttgtccccccttttatcattttgttttctgatttcgacgataccattaactgggaccctcacgggac

SEQ ID NO: 78296 - DNA, 395 bp, Zea mays
  Clone ID: MRT4577_171430C.1
ctcgcgggccgacacacgcctctaggctgggtcgtggtagccggcgccacagcctctcctgctgtcgctgctggtcgccgtgctagcggtggccgccgatgtacgctaacgccggccaagccaatcccctgaggcttggcgggcgcgtggtacaccacagctaaggtaagttcaccgccgggccgtggaaacacgcccacgcgaccttctaccgtgggcgggacgggtccggcatcacggctggctcttgcggctacaaggatactcgcacgcaggggtatggcgtgcacactgtggccgtcagcacggtgctgtacggtgacggcacggcatgcagatggtgctacgacgtatgctgcgtgaacagccctagcgggtgcaagcccaccggagca

SEQ ID NO: 78297 - DNA, 433 bp, Zea mays
  Clone ID: MRT4577_171431C.1
aaaaaaggcccccccccgggggggaaaaaaaaaaaaaggggctttggggggacgggatagacctaagaaccagggggggggaaggaacaaccctgggaatgggaaatgcagggggaaaaagggcaagggggcaaaggcccgcccacatgggaagggggcccacaggcccaaaacattggggggaaaaggcaacccaaaaaaaaatgcccaaaaaaggaaaaaaggtcaacgggggggccaagggaaactggatcacaccaaaaggcccccttcgaaaagggtgaaaaaagcgttgggaaaaacaaaaaaaaattttggggggaaaaaaaaaccacccctcccacaaaaaggcccagggttccggggaaaaatttttttccaaaagggaaccaacgaggcccaaggggcaaagggttaaaagggggggaaaaag

SEQ ID NO: 78298 - DNA, 302 bp, Zea mays
  Clone ID: MRT4577_171432C.1
aagcaataagagagagaactaagccgagggatgacgacagcgaccccgatgagcagggatgcatcgcaagcattaataaagaaggcaagaaggacaaacgcaagcagagggaaggagaggacacgctaggacggacacgggggaaacaacattcaacggggagggcggtatgggcagagaagtaagatctagaagcaaaccacacgaaaaaggacaaaggaaggtcaggaaggagcaggggagcgaaaaactgccagggaggaggaacagcagaggaaaaaggcccaaggacagaggacaaa

SEQ ID NO: 78299 - DNA, 195 bp, Zea mays
  unsure (1)..(195): unsure at all n locations
  Clone ID: MRT4577_171433C.1
tatttatgttgtatgtatggttggaattaagggttgatgtatgcgttaggggaagagagtgaggtgattgtgaggtatgtgatgtgtggtgaacagaaatggtgaatgttggaggggatgtgatatggnagattgtgaggaagaagaagtggttggtggtgaaggagtttggtataggtaatgttaaggtggagt

SEQ ID NO: 78300 - DNA, 359 bp, Zea mays
  unsure (1)..(359): unsure at all n locations
  Clone ID: MRT4577_171434C.1
ggggggggggggcaaaaaaattgagccgagcttttcagaggtgcggggggcggtggcccccggctttgttgcccagtagccgaaaaaaaatgttgagtctttccgaattaataattggcccccccgactcaattagtttggggccctcatgggctttgctcattaaaagcctctcaaaacagtgcgcaaatgtgcagaatctcgctggcccttggtgcccaacccagtagagaatctagttctaantcgcctaataaccatcctccccctaatcggggtcagccccaccctccttatagtccttttaaagcacagccagtgcctctcaagcctaaaaggggctaccctcctcctttgcc

SEQ ID NO: 78301 - DNA, 439 bp, Zea mays
  unsure (1)..(439): unsure at all n locations
  Clone ID: MRT4577_171435C.1
cattacaaacggaactccggtttcgcccccgcaggtacgaacaacccccacattggagggcctgcggggcgacgaaacccctggtggctcgccgacgcccgccccggcagcagcgacaacgacctccgctctaggtggccaaacagcagcagcgatggcctcagggcggacgctgctgcaacaaggccctcgcccatgtccccactcgaggggcgaggacaagctatcaaagccaaagagccggaggcccggagcgcggatggtggcggtgatcccgtcgacgacgaggacttcttnagccgccaccacctcagcgccgatgacggaagccatctgcccaccggcagacccccactcggatccttccggacgggcgagcaccaacctccgcgcagaggcgccgnactggggcaaaggcaggacagcccaacaacaccaa

SEQ ID NO: 78302 - DNA, 343 bp, Zea mays
  unsure (1)..(343): unsure at all n locations
  Clone ID: MRT4577_171436C.1
cgggcgggttcggcctctcgttctccgcggcgacgtgccggatgcggagcgtgcggagagaccgaagaagggcgagagtggntcgnaccgagagagtggtcgcnagtncgcgggaggggaggctcccgggaaggaggttggcaccaggttgcccgaaaggctgcccccaccactggtggagaggagaatccccgccgataccgccctggaactggtgcgctccgggagagccgctgaggatcaaaagagcgctgacctgctgatcaggaagctgccctgccagaggcacgccagggaactggcacgatatacctaaagtgaaatgcggcgccagaggcgtgcc

SEQ ID NO: 78303 - DNA, 375 bp, Zea mays
  Clone ID: MRT4577_171437C.1
ttacgctcacgcgccggatagaggcctgcacgagagccaacaaggaaaggcccacatagggccaaagcgggggaaccgcaccaaagctgggaaaaccaacccgacatccacgggcgaccggggaggaggcaaagagcacacgacagagggagccaggtgcaagccagcccgcagacgccgggagagatcccacagagactacaagcactgagagaccggatggccacgaaaatgcaagcaatgacaccaccacccactgactaaagcgcagaacgccgggagatatggcctgcacgaggaacggcagcaagccaaaaccagaaggccagacaacgtgggctgcacagggatcaagacccaccgagacagagagcc

SEQ ID NO: 78304 - DNA, 1488 bp, Zea mays
  Clone ID: MRT4577_171438C.1
agccgccaagagccccagcagatcgatcgaacagctagctagctagctatatagcgagagggctccatccatatccatccatctgctactgctagcagctgttggctgttgctgcttgcattgagatgtggatgatcagcgcagggcgcatggagcagtgggcgccgacggcggcaatggtggccaccaacgtcgtgatcgccgtcatgacggcgctgatcaagcaggcactgagcctgggcatgaacaggctggtcctcatcactttccgccagatggtggccaccctgttccttggacccatcgcctacttcaaggaaaggaggatgagaccgaagttcacttccgagatcttcgtgtacatgtttctcagtggaattcttgggccggtgctgcttcagtacacactgtttgtcggattggattacacgacggcaacattcgctgcaacgttcggaaatatgcttccagtggttactttcctgatatcacttgctttcaggttcgaagcactggaggtgaagagcaagtcggggagcgccaagatctcagggacgctcatctccctcggcggcgcaatgatgctcaccttctacaagggttcagcactgacacaaaccaccaccgccgccacgtcgtctccagcatccagcggcggcggccacatcaggcaacaagccggagagcacggcacggtccggtgggtgctgggctccgtctccatgctggccaacgtcgtcggcttcgcgctgtggctgctcctgcagcggaagttcacccgcaagtacccggccgtgtactcggccacggcgttcatgtcgctattcagcttcgtccaggccggggcgctggccctgtcgatccagaggaccagccttgccgtgtgggccctcaggggcaccgtggagatcgccacggtggtgtactgtggcgtagtggcgtctggcattgggtacctcctgctcacctactgcgtggagaagagaggccccgtgttcactgctgccttcagcccgctcgcccagatcttcgtcgccggcatcgatctcttcatcctccacgagcctctctacctcggaagcgtgctggggtcagtgctggttattcttgggctctaccttgtactgtggggcaagagagaggaagctgctgctgctgctgcttcggcaaagccagtgcaggccgaggtagaacaacaagagaaagtgtgatttttttcctttattgttcatcaaagtacagtgtgccagagcagcgacgaacataattaactagaagcagaagcctgcgtgagtgtgtgacagagcgagtgcatatgatcttcgagctcttactgctgcttgtattctagtgctgctaggttatatatcccctaaatctatgcatactactgaccaatataacgcaagaaaatgtatgctgatcgatcgatcgatcgaaatgctgtgaaattctctctcaagtacgtgctgagaaagaggttgggcc

SEQ ID NO: 78305 - DNA, 736 bp, Zea mays
  Clone ID: MRT4577_171439C.1
gccggccgggccggggttccgccgaccccacgccagtagagatgagggccacatcgtccccagtgcccgccgccgtcctcgtcgccccctcctccgcgcgcggcggacgaggagtacgtgagcgagacgaaggaggtgatcgggaaggtgcggtcgacgatcgggctggacaagtcggacccgagcgtggccgacgcggtggcggagctccgggacctgtccaactcgtgggtggccaagtaccggcgggagaagtcgctgctggggcgtccgtcgttccgggagatgtactcggcgctcaacgccgtgtcgggccactacatcagcttcggccccacggcgcccatcccggccaagcgccgcgcccgcatcctcgaggagatggacaccgccgagaaggcgctccaacggggcaggtaggccaaatcccagcgaagctgcccctgttgcaggaacgcgagtgcccagctcggcgacaacgctaccattttgtttttgtaactactgcgatgcattcatcgtcgttgttttcgcggctgggagcgtgtgttgtgactgtggagtaaaaagttaccgagcttttgagctgagtttgcgactttcggtcacatcttgtatcaagctgacaatgccatggcggtgagaacactcatggatgagtctgggagatatgtccaaaaaaaaaaaaaaaaaaaaaaaaaaaaaaaaagaaaaaaaaaaaaaaaaaaggccccta

SEQ ID NO: 78306 - DNA, 316 bp, Zea mays
  Clone ID: MRT4577_17143C.1
ggcgcctggcgcgggcgctgcggtcgcagggcctctgcggcacgtcgtaccgctccctcgcgggcgacgcgccgctgacggaggagctgaaccgggaggccaggtcccggcccctgccgctgggctgccacgacgtcgcgcccagggcgatgcccttgttccaccagaccatgaaggagcacggcaagacgtcgttcacctggttcgggccggtgccgagggtgaccatcaccaagcctgagctggtgcgcgaggtcctgtccaacaagttcggccactacaagaagctgaagttgcgcaagctccaaaggatgct

SEQ ID NO: 78307 - DNA, 831 bp, Zea mays
  unsure (1)..(831): unsure at all n locations
  Clone ID: MRT4577_171440C.1
ccctcctcgttcccgggcctcagctctcaactccctcccagttacttcctcctccacctcctccttcccctggcctcgcccgcacgccgctcgatcgtcgcctacctagtacctaccatacataccatcacacctaccgcccctctcccccactgcctctctcgcccgcaccgccaaacccccccgcgtcagcgatcgagccctgcccgcccgtccgaatccgaagccgccgggcaactccttccgccgaagcgaagcgggccgcctcgggctctccgccaccgcgtcctcctccgtccgcactgcgccgctggtgctggattggcgtggagatccacccggacttgttcctcctgccgctgatatcagccagactgatcagtggtcatattgaatacaaagctttctcgtatggtttttgttagcatgcaaaagatggtgcccatgggtttggaatgagggactacactacctagaaatggatgaaacaccaactagttctgggcgatctgaagctacttcatgtgaacctagttggtggccgccagactttttggagaagatagaatctgtcgccttagcaagagaacaagaagttttggctgaaaaagaatcgcgatccagtctgtcaaattcaaggtcctcatcctgaaaggcttctcagttactgtggtcaactggaacttattcagggttcattccaaancgttttctattcgatcatcccggataaaaagctgaaggagagtttccaacaataccatcactaactgaccttcaaagtcttgaagcagatgggctaagcctggaaatattgttgtagatgctgaa

SEQ ID NO: 78308 - DNA, 1107 bp, Zea mays
  Clone ID: MRT4577_171441C.1
cccacgcgtccggataagctgacgtgtcgccccggccgaaaccaaagtgataatctcactgctcagtcctcccctttcttgttccgccgaccccacgccagtagagatgagggccacatcgtccccagtgcccgccgccgtcctcgtcgccccctcctccccctcctccgccgccgtagcagtgaaacctcgtgccgcagcgagtggcggcggaggcagcacagcaggcaggcgcgacgtgcttgccgccggtaccgggctgggcgcggcgctgctgctggcgctggggccggcgcgcgcggcggacgaggagtacgtgagcgagacgaaggaggtgatcgggaaggtgcggtcgacgatcgggctggacaagtcggacccgagcgtggccgacgcggtggcggagctccgggacctgtccaactcgtgggtggccaagtaccggcgggagaagtcgctgctggggcgtccgtcgttccgggagatgtactcggcgctcaacgccgtgtcgggccactacatcagcttcggccccacggcgcccatcccggccaagcgccgcgcccgcatcctcgaggagatggacaccgccgagaaggcgctccaacggggcaggtaggccaaatcccagcgaagctggcccgttgcaggaacgcgagtgcccagctcggcgacaacgctaccattttgtttttgtaactactgcgatgcattcgtcgtcgttgttttcgcggctgggagcgtgtgttgtgactgtggagtaaaaagttaccgagcttttgagctgagtttgcgactttcggtcacatcttgtatcaagctgacaatgacatggcggtgagaacactcatggatgagtctgggagatatgtccatcgtccgtcccggtggctgacattcttgcttctttttcgcgttgccaatgcgcgttttcttgtgttcttttacgccaatcaaacaaaatggtgctatggtccatgtaaaatactagatttgtagagtgaaattttaaatagtgaatgagataggagatataataggggaggtacggtgctgaagatagcctaaatcccatggaatccaatgatctccgccactctcaccttt

SEQ ID NO: 78309 - DNA, 415 bp, Zea mays
  Clone ID: MRT4577_171442C.1
ggaaacaatgggcccaaaagctaaaaacgggccccatgttaaaaaaaatcccaggggttaaccccccttccaaactagaacattttcatcggagcatggcatgttaatcggcaaaagaaacccccagtcctggatttaagtcagcatcaccatcactgggtactttgaaacaaaaatgccccttcacaggctggggggcggggccccggacacaggcgagggattcgtacgagccaaaaactggatccaggcctgaaaacgggccaaccttgaacagtttcctgtccgcccacaaaggccctcgaaccttggagctgggggcgaaaacccccccccccacgtggtacttggacgggggcttaaaaaacagggtccccttgaaggagccggtgaacaccgggcccttttgggcctt

SEQ ID NO: 78310 - DNA, 981 bp, Zea mays
  unsure (1)..(981): unsure at all n locations
  Clone ID: MRT4577_171443C.1
ctcacacgcacaccacctgtgccacgcaacgcgaaccagcggagaccgcacgcacagccccactcgtacgaccattggctaccctcgaggccgtccgcgcttttgctccctgttccgccgagctcacgccagtagagatgagggccacgtcgtcccccgtggctgccgccgtcctcgccgccccttcctccgccgccgccgtagtcgtaaagcctctgcctcgtggcgcagcgaatggcggcagcacgggcaggcgcgacgtgcttgccgggaccgggctgggcgcggcgctgctgctggcgctggggcccgtgtgcggcgcggcgcgtgcggcggacgaggaatacgtgagcgagacgaaggaggtgatcgggaaggtgcggtcgacgatcaacctggacaagtcggacccgagcgtggcggacgcggtggcggagctccgggagctgtccaactcgtgggtggccaagtaccggcgggagaagtcgctgctggggcggccgtcgttccgggagatgtactcggcgctcaacgccgtgtcgggccattacatcagcttcggccccacggcgcccatcccggccaagcgccgcgcgcgcatcctcgaggagatggacaccgccgagaaggcgctcctccgcggcaggtaggccaaatcccagcgaagcccggccatggcgatcgccgtcgccgtggtggcaggaacgcagctctcagcgacaacgctaccattttgtaactactgcggtgtagtatatatatgcatgcattcgtacgtgatgcgagctgtgttttcggtccgatgggagcgcgtcctgtgactgtgactggagtaaaaatttaccgagcttctgagagtaaaaaaaaaaataacggaggagtctgggagataagtccatcgtccgtcccggtggctgacattcttgcttctttttcgcgatggaaaaaaaaaaaaaaagggcgccgctcgcgtnctagaac

SEQ ID NO: 78311 - DNA, 312 bp, Zea mays
  unsure (1)..(312): unsure at all n locations
  Clone ID: MRT4577_171444C.1
cggtccgnattcccgggcaagctcaatcgactcactctcagctggccgctcactcttgcagcttccacccttaatcactcagccttagggtcctagctctaggctctagctagccgcgccactccttcttgtaggcatcagccttcttatcgccaccaatggccactgccctagtgcaatacacccgaccgcagtggcggtccaagaagcgcccgtggagggagaccccgccgcctgacgttttgccacaagaatctgccccccccgagccccatggtggagctcaagcttaggctgctgctcctgctgctc

SEQ ID NO: 78312 - DNA, 279 bp, Zea mays
  Clone ID: MRT4577_171445C.1
cttaaacgtaaagcatggtgcacattaactaaaactggctcacgttagggtacatgcccgcaacatgtcacatgttggatattaatgctaaaatctactcacgggactgcaaaaggaaaatctctaatatataataaacagttgcacaggcactttggccgacataaaagcactagattccgacacggttagggcgattatacagggtcaccacaatagcccacctgcatcacacagcattagcgccaacctcttgttctagcgtaacaatttcttggc

SEQ ID NO: 78313 - DNA, 538 bp, Zea mays
  Clone ID: MRT4577_171446C.1
cattgggaccctcgaggccggccggaatatggctttgttctattcgtccaagccatatctctctcactgttcttggttgatgtatttgatgttatagattgctatatcactgatttcgaatactcatataccatgatcatgcacattggagtgcatgggataaactgcaggttgacgattattatcgttagtacaaactacgaacggatgtcttgccggtgcccaaaaccccggccgacgcacgcatgagcaagattacatccctgtgctgggataccgcaccgagatgtactttgtttttctacgtgagacccgcatggacagacatttctcgcattaatattctcccgagccacagagaatatacatcgtcgagtaacagaagagatggcctgtctttgcctaactacatattactcgtgaatgcgtttgccgaggactacttctcacaattttagctcactgctattcaccagatctctgataccactgaccgattgccagtgcatgagaaagcgagagatagaataccctccgg

SEQ ID NO: 78314 - DNA, 791 bp, Zea mays
  unsure (1)..(791): unsure at all n locations
  Clone ID: MRT4577_171447C.1
ccgtccccagnccgggagcggaggcgcaaaacccaccttccgctgctccggcgctatgggcggcgcctccaagctgctctcctccttcctcctcacctcttccccgctccgcctccgacccgctactgccgccgccgccgcgctgttcctatccccgcccgcggcggcctcgcgccgcctgttcctgctctccttgccctccccgcaccgtaccctctacacctcgtccgcttccgcctcccttccgcacggctccagctcggcatgcccgccgccaccgctccgagcgcctttccccgagtggtcccgcctcgtcgaccgacttgccgccaccgggtacggctccggcgtgcccttttccgctgacgatctcgccctcgtgtccggatgcgtcctgtcggacggggagcaggccgctgtctccacctgcctcgccttcgcgcgcgaccggcctgacctcctcagttcgcttcaaaggaaggacgtggaggtcctggtgggcaatgtggcgccgtctctgttcaaggacggggaggcatcaggacagcggcttcggcgctaccttgctggggaagaaaccgacgtcactgtttcagagagagctggaactgttgatattgttcgatatctgctaagttacacatacggttcttctgacatctgctcagaagacaaggaactcactgatttggccgtgagaaatatcatggttgagttagtgagttttagtgctctttcccagtcttccacttttgtggaattaactcccgaccaaatttgctcgagtcagc

SEQ ID NO: 78315 - DNA, 249 bp, Zea mays
  Clone ID: MRT4577_171448C.1
cctcgagccggccgggaaacaccactattcattacttgtgagttcatcaaatccactcaggactcacacgtgcccattacacccgacgccgccgacgcgcttcgtctgtttaacatgaatgagactaagatcaagaagatgagagctgctgtgtgcactgtgacgaacgagccatcatgctgacgaagaaaatggtagcctactcgaccgcaaccaccgacgacaagagctttcacagcacgacgaaaa

SEQ ID NO: 78316 - DNA, 280 bp, Zea mays
  Clone ID: MRT4577_171449C.1
gcacaacataacatcttcgagagttcagcccaaaaacactcgacatccatccgcaaatacaccacgagattagaaaatcgccctacacccgttgtatcggctcaatagacaactccccttgaactgatttctactaatcaaccccggatcccaccgttcgaaacataaggagcagtggacagaatctccctcgagtgagtatacataacaccgccgatggctgcctcgtcttacctaaaaccgaacccactgaagacaactctggaatgcacagccagtg

SEQ ID NO: 78317 - DNA, 264 bp, Zea mays
  Clone ID: MRT4577_17144C.1
atggagcaagggacagtcggtgacagaggaatcccttggcatggtcagtgcacaggtaaaggctcagggtctcgagctgcaactctgaaagtaagagaacttagtaactcgaaagtgtttcaagagatcaggcaaccaaagcttactgaccccataattgttgagagcctccaagcgagcccgcaaacgctagatttcggtgttggctgcccccatggtggcacgagctacacccagatccctctagagatcttccaccaatga

SEQ ID NO: 78318 - DNA, 302 bp, Zea mays
  Clone ID: MRT4577_171450C.1
ccggctcgacgcactcgtccgcctatgcgtgtgcccactcgttttcacattttctgcacgaggacgaccgaccgcgcacggtcatatccaacttgcttcaggggcttaaaactgatctgatatatcacatcatctaagcttccacgagaagtaaaagtttacatgacaaatctcacctatcaagcagacaggtacaatatgatccacaaaatcacaaacattgtagccactactgtaaactccctcacattcattgtccaagaatgaatccttctatcttttgcattccccaacgccatttg

SEQ ID NO: 78319 - DNA, 356 bp, Zea mays
  Clone ID: MRT4577_171451C.1
ggggcgaagggcacatctttactatataacaggggttctatccaaaataaataaataattcccttataagggtacaacgggccaacaacccaaagttgactgggaaacgacggcctaaacctttcacgaactcatcacaggatcctccaagcgcctaatcctgggggacctgttcttgacatctcactgcattcggcaaaaagcgggggttatgagctcatcccccacacaactatggggttcttggcggggcccttttgcccctgctgcgtggggaggcaccccactgcgggggccgggggcccccgcaggggactagccccagtcattggggaaaaaggcatccaccctgtcgt

SEQ ID NO: 78320 - DNA, 233 bp, Zea mays
  Clone ID: MRT4577_171452C.1
acacggctgctgcaaccattactcggcggccgcgatttctgagcatagggcacagcaagcgccactccacactactagcggcccatgaggcaggtagcatttagctttcaccatggctaggggactgaccgccgtcagcatctggtgcattggccatggtcgctgtggtgcgactaaccaccactggaacaagtgatctagcaggcttaacagcctgctgacaggcagagagg

SEQ ID NO: 78321 - DNA, 384 bp, Zea mays
  unsure (1)..(384): unsure at all n locations
  Clone ID: MRT4577_171453C.1
tctctcttcctctctctctgtntcgagaagagtcttcctccttggggggaggtaggcggtagggtaataagnaaagtccagcaagtaagnaagtttccttgcttgctccagatntggtctaggtcggaggaggagcgggagggcgcgctgcggtcggcgccggatatgaacgcggcgcctgcggagccggcaggagccgcggtgtctcagcaacggtcgccatcatcgccgccctgctcctctccctctgcgtcctcatcatcccccaggtcccatactgctccacccccttcgctcagccgctacgatcaccctcccggagcatactgccccccaccctccgccatggacacccacgcccaccccccgtccgtcgcccccccg

SEQ ID NO: 78322 - DNA, 372 bp, Zea mays
  Clone ID: MRT4577_171454C.1
ggagtcttggtgtggtcactcacgggtcgctgttaggttggcaaggagagggtgcctttgagtccaacgcaaggcgaaattcctggcagggaagtgagtgagtggccgtgccgtgccgtgccgccgtcgtcatcgctggtagtggtcaccaatacttaatatttttttttgtaacagtttcattgcttacttgatgttttgaaacactgaaatcctgcatctcactgtcgtctcctctgcagagaaaccaagaagaaagagtggggaattcaaaggtgggaacaaaaaaacagacagcgtgagggggagcagtggcattgacctttccagcccaaacaccccgaacggacgtgacatgttgggggccctccc

SEQ ID NO: 78323 - DNA, 658 bp, Zea mays
  unsure (1)..(658): unsure at all n locations
  Clone ID: MRT4577_171455C.1
tttttctctctcctattctttccaccataatctaacttatataatctaggagggaacaaacacacccttaatccgctatttacctataaagagttggctcccacgcgtccgaaaacatctacatggctacattatccatgtgccatatgccttttgaaaatcaattaatcgttactgatttttcctgtagatgcaaacaaaactggagctgcccaagaagctataaatggtattagacgggctagcaaggccatgactgagcaagaagcccggcaaattcttggtatcagtgaaaattcgacgtgggaagagattgtccagaagtacgacacaatgtttgagaggaataacaaaaacggcagcttctatctccagtcaaaggttcatagagcgaaagaatgcctggaacctttatatcaaaagcctgatgtactgaactgagattttgcagacgccctagcttctgtttgaagcggtatgcctaattgatcgatttattagtgtgctcagagatcaacgttcagtttattgatcggtttgccaatgcgcccagagatcaacgttcagttttgagttatgtgttgggcgcatcaggttggttccttgtaatgccagaataatgtttaacaaacataccgaattttggctgattctanaa

SEQ ID NO: 78324 - DNA, 479 bp, Zea mays
  Clone ID: MRT4577_171456C.1
cttgatgtttatgattggtcgattccagatgacttgcttgcaaagttctctgagattaagcaggataggctacttagaggcaacttcattgttaatcctgagagcgtttacaagacccatgaggagctctgggacggtgaactctaggaaggacaccgttgtttcatcgtgagcagggagcagcgttccattagggtctgccatatcattttatctcctaatttgctctttatctgaaatgaaggttcagtgctcggaagctctgatgccatcctatatcacgaactggttcgggaatttgtcagcggtctacttgtcctacgggatgtgtgctgctgcagcaacagctgcagcctagtgtcgcttgattttctggtaactgtgaccaaagcagttagttcgccaggcattatttttgtcactatttttgtacgctccactgattctcacttgatgaacgtgctaacttgcgtgtccta

SEQ ID NO: 78325 - DNA, 699 bp, Zea mays
  Clone ID: MRT4577_171457C.1
agggtcaactgatcaagccaaagccgaacaccaccaacaaggcagcagccgaacaccaaacaagggagcagccgccaccacttcattgcgcgaatcggagcccgtggccgtcgcctccgccttcgcgattcgccgccgttgcccacgagcgaggcttcctcctcttcgtcgccgccgtcgcaggaggggaaagaggataaactgccatgatgcaaacaaaactggagctgcccaagaagctataaatggtattagacgggctagcaaggccatgactgagcaagaagcccggcaaattcttggtatcagtgaaaattcgacgtgggaagagattgtccagaagtacgacacaatgtttgagaggaataacaaaaacggcagcttctatctccagtcaaaggttcatagagcgaaagaatgcctggaacctttatatcaaaagcctgatgtactgaactgagattttgcagacgccctagcttctgtttgaagcggtatgcctaattgatcgatttattagtgtgctcagagatcaacgttcagtttattgatcggtttgccaatgcgcccagagatcaacgttcagttttgagttatgtgttgggcgcatcaggttggttccttgtaatgccagaataatgtttaacaaacataccgaattttggctgattctaaaaaaaaaaaaaaaaaaggccccta

SEQ ID NO: 78326 - DNA, 171 bp, Zea mays
  Clone ID: MRT4577_171458C.1
acacagattcatacaagtcgaactaatagagacaggagatctggagattagatcagctcgcatccaagccaattgcacacgaaatatactgagcacatagagtggacgcggcctgcatcacgtggatctgactcccgacgtctccgatcacattgccgtggatgacatgta

SEQ ID NO: 78327 - DNA, 1014 bp, Zea mays
  Clone ID: MRT4577_171459C.1
gaaaacatctacagggctacattatccatgtgccatatgccttttgaaaatcaattaatcgttattgatttttcattggacctcgaggccggccgggcagggcaactgatcaagccaaagccgaacaccaccaacaaggcagcagccgaacaccaaacaaggcagcagccgccaccacttcattgcgcgaatcggagcccgtggccgtcgcctccgccttcgcgattcgccgccgttgcccacgaggcgaggcttcctcctcttcgtcgccgccgtcgcaggaggggaaagaggataaactgccatggcgggcaggcttctcgcgaatctaatcgtcatgggcggaaccgtggttggcagggccatgctccaggcctaccgccaggccatcgtcaatgcaaacaaaactggagctgcccaagaagctataaatggtattagacgggctagcaaggccatgactgagcaagaagcccggcaaattcttggtatcagtgaaaattcgacgtgggaagagattgtccagaagtacgacacaatgtttgagaggaataacaaaaacggcagcttctatctccagtcaaaggttcatagagcgaaagaatgcctggaacctttatatcaaaagcctgatgtactgaactgagattttgcagacgccctagcttctgtttgaagcggtatgcctaattgatcgatttattagtgtgctcagagatcaacgttcagtttattgatcggtttgccaatgcgcccagagatcaacgttcagttttgagttatgtgttgggcgcatcaggttggttccttgtaatgccagaataatgtttaacaaacataccgaattttggctgattctcattggcaacgtctcagtcactggttttaattcatagtatgttatttcacactttgtcaaccaagcaaccctttgaaactttttgtcgataataaatggttcggttcgttcacaggactactcatactatcgagcccaacaaaaagaacatcaac

SEQ ID NO: 78328 - DNA, 393 bp, Zea mays
  Clone ID: MRT4577_17145C.1
cttttgccagaggagttgttggtgcgtgaatgcccgagcgttaccccctgcgagaggcatcagatgaatgcaaacaggtgatgttagccattatgacggctatggtctctccatcggctcagttgactgtatcgctggcaggaaactgttgcaacatgttggtggtgcatggacatgcaggtaccagctgccacagcaagtgtgtggtatgcaagcttgttgtgtatgtctgaaggccatagggttcatcacttctacctgctgtatggctggaactatctggtgtagctgctgcgacgacaaggattgaatgggttgatgggtgactgattgcagctgctattggcatattgcctgctggaagacgcttgccctggtgctagttgcagcctg

SEQ ID NO: 78329 - DNA, 505 bp, Zea mays
  unsure (1)..(505): unsure at all n locations
  Clone ID: MRT4577_171460C.1
cccgggccccctcctcgagccaccccccccccccccccccccccctataacaaaaacggccgcaaatggctaaacaaaaacaatcatctaggacgactaattactactcttacagcagcttatggggggggggggggggggggttanntaaacataacctgttactaactttactgtccctaatttaaaaatgtccacctttacttttgttggttaaaaactactaacccctttaaagcttattaaacggcaaaaagaaacttttctttttttttcaatggcgtaacccctttattttttactcacatacccagtaactgtttgttataatcaccctcctcatataagtaataatacatatcatttttcactcaacagttcctccaacctttttttccaccactgttttcatccgtttggaactttaatttcattgcttttaacctaatggaatctcctttattcctggggttttttttacccaagtcattttttccccttttcc

SEQ ID NO: 78330 - DNA, 880 bp, Zea mays
  Clone ID: MRT4577_171461C.1
aaaaccaaaagagccacctgtagtactttaaaagaaagaagtcctcacaatgggaaaccttcaaagaaaatgtatggaaaaaatcaacaggtcaaagtatctagcaaatgtttgaacctgaacaaatagctaacttcactgattcaacatccactgacagggactcaattattgaatgacatatgtcttcgaaaaaaagtaaacattaaacaccttaccggttcaattccactatatattaacaacaaactgagactagatgtagaggacaactgcaagccccaggtagctcaaaaaatactttgctcttgcatccttcttgagctaccacaagttacatccatgcctgaaaagaaacataagtggctcattctataccatcttctctacctttccatcctcaactttacatccttcatcattgctggtgatgaattcgtctactccagcttcagagaagcaaatctcagcctagacggcactgccaaatcaaaccagatgggctccttgagctaaccaacggtagctttaatctcaaaggccatgcattctacccaactcctctgcatttccgcaagtcatcaggtgaaaatgtgaaatccttctcagtcaccttcatcttcagcatcctctctgcctaccctgacaagagtgcagatggcatgaccttcttagtcacaacaaacaagaatttctctgatgcatttccagcccagtacctaggactcctcaatgatcagaacaacggcaatccaaacaaccatatctttgcggttgagcttgacaccatacaaaacagtgagttcgaggatatcaacgacaaccacattggcattaatattaatggtatccactcccggccggcctcgagggacccaat

SEQ ID NO: 78331 - DNA, 395 bp, Zea mays
  Clone ID: MRT4577_171462C.1
gactagttctagatcatcaccagcaatctcttaaaaaaaagatcatcaccaggaatcagcactgccaagcttttccgtgcagtgcttgttccagagtcccgtccaccactccggccacctcgtgctccttgtcaacactggctccagcaactctgctcccagcgcccttgattttttttacttggtgtaacttcatcccgcaaaaccatgttttcttcattccgttgttgtccttatcagtaacttgccttctgcagaagcacctcgtccatacataaaaaagaaaacagcttccattgtccatccattcatctttcttttcctgtttaatctttctcttcgccaccagacccttgcaccctgcatcttcaacttattcatttcactcctacgac

SEQ ID NO: 78332 - DNA, 736 bp, Zea mays
  Clone ID: MRT4577_171463C.1
gatcagaaattcagcgacgtcgctatgttcgtgatctcacaccaagagagcctccgctccgtacacccgacggtccacacaaccatggcgaggaggataccatggagcccatggatgacaacgtgacccttgcacccactgcccgtgaaggcacagcacgtgtttggggacactcacatcttggcatccttgaatgacaccttcattcatatcactgatttggctggaaggaaaactcgggttcagatcagcggcgtcatgacatgcgaaagctgaccgcgacgaggccacagcttacgctgctatgcgttggtggtcaagacggcgacacagcgctagcaaggagcttggcattactgaactgcacattaagcttcgcgccgccggagtgtatacgagagcaaaagccctgctacctggtgcccaatctgacctcaggatacttgctctgtccggaatgaaaatcggacgcgattgaagacgctaccccggtccccactgacagcactctaagaaagggcgttacgaggctaaggaagctgtaggcgtatcggctgcgtgggatttgccggctcttggtcgcaggtcattatgaagttagccctctctgagtggaggtgctgtcctgtgtttgccaagatgagctttaactctgctctatgtggatgagcgcttagcgttactcgaacctatatgacgtgccatggataatgtattttggatgaggaattggctc

SEQ ID NO: 78333 - DNA, 221 bp, Zea mays
  Clone ID: MRT4577_171464C.1
catcataatgcaattatctacaactgtttatttattaaaaacaatttgcctagcacagaaggcttttttacttgggaaggaatgattttttcatagtatccaaaccaagatcaattaaagtggataaattgattaacatttatagatacttccatgttattcacatcatcttaaccgttattttacattttgatgatcatcttcataatttgtatgccttt

SEQ ID NO: 78334 - DNA, 163 bp, Zea mays
  Clone ID: MRT4577_171465C.1
ggcccaacatcttcgggtggcaaaatttcaacctcactgagggccccgatatcccgcaaaaatattgggccaagccctatggaggccgcccgaaatggcccaaaaaatcaccccttggatggccattttcccgcagggcatgggcagccaagcaagtcttgtt

SEQ ID NO: 78335 - DNA, 326 bp, Zea mays
  Clone ID: MRT4577_171466C.1
tttgaacttcttgctgaccttccttggcaaagggacatttaagaaaggtttgcttgaccttaccgctgcgaaagagagccttgaccaggatcattatggactaacaaaaggtaactcaaaggactatcgagtatctggctgctgcggagcttaaacctgcctacaggggtccagtgctggggcctggtggaccaaccggagccggcaagacatctttgtcctgctccataggaactgccacaaacagcaaatccataacaagatctacttggagcgagtacatgatgaagctccatatgtgaggctcagcgtgcagagcatacatt

SEQ ID NO: 78336 - DNA, 764 bp, Zea mays
  Clone ID: MRT4577_171467C.1
tttttttttttttttttttttttttttttttaatgtcaataaacttttgattatctggcaaacgtggcattaaaaaaagatggaaatgccgcacagctttgctcatgctggttcatcaaatttacacagaactctccttgccgaggacatggcctccctcaaaacagagagagacttcctcgcctccatcccatcccgccgccgccgtctctacggtcgctaataagccgccgcatccagggatggagatgaagaagatcgcctgcgccgtcctcgtcgccgcctcggccaccgtggcgctggccgcggaggcgccggctccgtctcccaccagcggctcctccgcggtcgcacccgccatcgtcggggccgccgtggcctccttcttcgcgtactacattcactgagccgccggacgaggagccggagccggagggaagagaccaaggtggggggagagacttggctgcgctgcgctgctctgctgctcccgcgcattcccgatgcgtgggcgtgctctgattgggcacggcggtggcagtggcacaccttcgtcttccttttgtttgttttttttccttcctctttctacttgattttcatttaacgaattggtatcgctgatgcaccagtttaatttggtgccctgttatttgttctttccctcgagtgagggatcgacacctgtaccattgcttgccatttgtctggaccagttcaacaattcgatttaaccatcacgtatatgtgtgctttggataaaa

SEQ ID NO: 78337 - DNA, 779 bp, Zea mays
  Clone ID: MRT4577_171468C.1
ccggccgggccgtactaccctggcaagcgatcgtcggagcagacagagacttcctcgcctccatcccatcccgccgccgccgtctctacggtcgctaataagccgccgcatccagggatggagatgaagaagatcgcctgcgccgtcctcgtcgccgcctcggccaccgtggcgctggccgcggaggcgccggctccgtctcccaccagcggctcctccgcggtcggacccgtcatcgtcggggccgccgtgggctccttcttggcgtactacattcactgagccgccggacgaggagtcggagccgcagggaacagaccgaggtggggggagagacttggatgggctgcgctgatctgctgctcccgcccattcccgatgtctgccagcgttctgattgctcacgggggagggagggtgacaccttcgtcttccttctggttgcttactcttccgttccacgatatagttgatctgcgtctagataacagcaagaagtgaggcgacaactgaactggtcgccatggcttcctcgccttccacgctgtgggggaaggaacgcggtctgatgttggttccctcctcctagagcgcctgtctgttgactacggcatgaaatccaagcttgggttcactgtgcacccttccccacaagttgctacttcgatagatgagccatacaacagtggactgtacacccactctctcctcgagcacactgatgtgggtatactgctggacaatgaggccatctacgacatctgccgccgatcccttga

SEQ ID NO: 78338 - DNA, 595 bp, Zea mays
  Clone ID: MRT4577_171469C.1
ccggccggggtactacccttgcaagcgatcgtcggagcagacagagacttcctcgcctccatcccatcccgccgccgccgtctctacggtcgctaataagccgccgcatccagggatggagatgaagaagatcgcctgcgccgtcctcgtcgccgcctcggccaccgtggcgctggccgcggaggcgccggctccgtctcccaccagcggatcctccgcggtcggagccgcgatcgtcggggccgccgtgggctccttcttcgcgtactacattcactgagccgccggacgaggagccggagccggaggtaagagaccaaggtgccgtgagagacttggctgacctgggctgctctgttgttcccacccatttccgatgcgcggaggagctctgaatgttgaccatggagatcgagcgacacatccaccagctgtttgtgcgctgtatttagatcgctcgggtcaccgactagatcgacttccgcgaggatcccgcgctccccgtcctcgatgacctcatcgcgatggagaagaaccacgggacgatcgacttcctcttcggggactgcgagtaggacaactacctcaactacca

SEQ ID NO: 78339 - DNA, 3309 bp, Zea mays
  Clone ID: MRT4577_17146C.1
cccacgcggacgcgcgggcgcctgattgtttccgagacgaagctcatcacggtgcactcctgcgctgggcgcctaggggacgctcgcaaggtgttcgaaggaatggcgtgcagggacctgctcgcctggtcggccatgatcggtgcctacgccatcaggggcctgtacgaggaggtcgtcacgctcgcggtggccatggtcagggaaggggtcatcccggacaggttcctgatcacccggattctacaggcctgtgcgtacacagaggacctggagctcgggacggcgatgcattccatggcgatccggagaggtttcatggcggagggagcgagggacgtgcccgtggggaactcagtgctggccatgtacgtcaagtgcggagagttgggccgtgcgcgcgcggcgttcgacatgatggggcagcgggacctgtgcacgtggaactcgatgatcttcgggtgctgccgctccaacgagtgggaagaggcacggaggctgctcgacgatatgaggcgccaaggtacagagcctgggcttgtcacatggaacacgctggtttcgagctacgcgaggtctggggaacttgatgtggccatggagatgctggagcagatggaggagtccggtgttgctccggacgtcgtcacctggactagccttgtgtctggttttgtccacggtgataggggtggcgaagcacttcggtgtttcgcgcgcatgcgccttgctggagtcgaaccaaacggcatgacaattgcgagtgccatctcagcttgtgctagtttgcggttgctgagtcagggcatggagctccattgccacgcagttaaggttgggagtgtgaacaatgtgctctcggggaactccttggtcgacatgtatgcgaaatgtggagaaatcattgcagctaagagagtatttgatgagatacccgagaaggatatcttctcctggaactcgatggttgcagggtatgcacacgcgggctattgcggcaaagcatatgagcttttctgtgagatggagagccttggtgttcggcgcaatgtgatcacgtggaatataatgatctcgggatacataagaaatggggatgatgagagagcttttgagctatttcagatgatggaaagctgtggagtaaaaagggacacggcttcatggaatgcactcattgctggttcggtgcataatggtcattctgatagagccctgagaatattctggcagatgcaatcactcttggtgagaccagacttcattacaatattaagtatcattccagcttttgcgaacctagctggattttggaaagtacgggagatccacgcctgcatttatcacaacaatttagaaatggatggcaaaatagcaaatgcactcatcaatgcctattcaaaatctggtgaccttgctggtgcttgtgctgtttttgataggcactcatcaaggaacattatttcttggaattgtataattcttgcacacttgctgcatggttctccaagtgaagcactggatcgcttttgtgagatgaaacaagaaggcgtgctgccagatcatacaactttgactgccgtaatcaaggcctatggcctccagggaaaggtatctgaggcgaaacggatatttcacaatatgacccacgatcacaacattactccagatttagatcattacacagctatagttgatctccttggccgctcagggagtctacaagaagcgtacgagtttattgataatatgccactcatacccaatttagcagtctgggaggcattgcttactgctgcaactattcatggaaatgcaaggctcgcaaacctgacagcaagagagttgtcatcgcttgatccgagtgaccctagaatccaaagactggtttttaattactggggtctaactggaaagtctgttgatgtgccactcatgacggtatacaacggaggaagagagttggaagatgttgatagttgttcggttgaaatcaagaacaatgtctatttgttctcaaccggtgataatttagcattagagagtacagttgctgaattgaagctgattatgattcagatccgaatgtcattgctgaacatctctaatgagactaacgctgaagaagagaaagaagaattatcaggaatacattgtgagaagctagcaattgcttttgcaatttcaaattcccctcctttcagaagcatacggataataaagaccttaaggatgtgtagccattgtcacatctttgccaagctagtttcagaaaaatacgagcggcagatactaatcaaggattcaaattgtttgcacaagtttgaggatggaaagtgctcttgtgaaggttattggtgaatacaactaatataagtgcaccaatggtttctgttcatttatgcgtcgtccatactggctttttcatttggaagtagtagatatctttatcttctttggctgaggcttactatactttagttaagttctcgcaagcttgaatttactggtgttcaaatgctatctgctacggacagaggaagagctccccctacggtttctagcaactctaataagggaatgacaacgttcagcggtttatggaatctagatcaaccattagacaagtatgttgcaacaatataagggaatgacaacgttcagcggtttatggaatctagatcaaccattagacagcaagcacaaggtcagctgttgatgacatccacatcccggactttacccaatcagctgagcaacttggcaaaacagtcggaagtgacttggcaaagggaaacctgacggctccagtcatctttgctttgcaagatgaaccagagctaagagagatcatcgactccgagtttagtgagactgattcgtttgctgctgcgatagatcttgttcacaagagctgtggaataagaagggcacgcgagcttgcgagagagaagggtgacttggctatccaaaacctgcagtgccttccgagaagtgatttcagaagtaccgttgagagtatggtaaaatataatcttgaaaggattgagtagatagattcagttgattcctctaccagtccactagatacaggcctccagtatgggatccatgtagctccaaaacccatctttcagcctcttcgtggaaggtgaatctttggcttggagttcaaggatcagatattacctcatctacaacaccagaatttataagcacccggttctgcagaaatataaactatggatttttctttttactttcagttggcaaaagaaattgcaatggttgaagtattttaccatttat

SEQ ID NO: 78340 - DNA, 752 bp, Zea mays
  Clone ID: MRT4577_171470C.1
agatgaagaagatcgcctgcgccgtcctcgtcgccgcctcggccaccgtggcgctggccgcggaggcgccggctccgtcccccaccagcggctcctccgcggtcgcacccgccatcgtcggggccgccgtggcctccttcctcagtccgtactacattcactgagccgccggacgaggagccggactgccggagggaagagaccaagggggggagagacttggctgcgctgcgctgctctgctgctcccgcgcattcccgatgcgcccacgcgtccgctctgattgggcacggcagtggcacaccttcgtcttccttttgtttgtttttttcctttcctctttctgattttcatttaactaattggtatcgctgatgtaccagtttaatttggtgccccgttatttgttctttccctcgagagagggatcgacacctgtaccattgcttgccatttgtctggaccagttcaacaattcaatttaaccatcgcgtaaaaaaaaaaaaaaaaaaaaaaaaaaaaaaaaaaaaaaaaaaaaaaaaaaaaaaaaaaaaatggaagaaaaaacaaaaaaaagaaaaataaaaattaacataaaaaaaaaaaaaggggctgccccccaagggggtcaatttatccctccggtctcagcgaaatttaagtttttttaatttgaccccaattttaaatttcctggcccgtttatcaaacactaacgtcttggaaaaacctcccgttttccccatttttat

SEQ ID NO: 78341 - DNA, 290 bp, Zea mays
  Clone ID: MRT4577_171471C.1
cggcgaggcatgtgtccttctgaacgatggctgtcactaccttcgcggccttggtttaataacagccactgccactaccgcagcggcaaagcctacctctacttgccctgctgctgggaaggccaatgctgcaggcgatacaagctgtgaccctgctaaggattatcccggcgaggcatgtgtccttctgaacgatggctgtcactaccttcgcggccttggcttggatacagccactgccactaccgcagcggcaaagcctacctctacttgccctgctgctgggaaga

SEQ ID NO: 78342 - DNA, 726 bp, Zea mays
  Clone ID: MRT4577_171472C.1
ccggccggggctataaatcccggccccgccctcgcctccgtagtccgtactacccaggcaagcgatcgtcggagcagacagagacttcctcgcctccatcccatcccgccgccgccgtctctacggtcgctaataagccgccgcatccagggatggagatgaagaagatcgcctgcgccgtcctcgtcgccgcctcggccaccgtggcgctggccgcggaggcgccggctccgtctcccaccagcggctcctccgcggtcagagccgcgatggtcggggcggccgtgggctccttcttcgcgtactacattcactgagccgccggacgaggagccggagccggagggaagagaccaaggtggggggagagacttggctgcgctgcgctgctctgctgctcccgcccattcccgatgcgtgggcgtgctctgattgggcacggcggtggcagtggcacaccttcgtcttccttttgattgattttttttccttcctctttctacttgattttcatttaacgaattggtatcgctgatgcaccagtttaatttggtgccctgttatttgttctttccctcgagtgagggatcgacacctgtaccattgcttgccatttgtctggaccacctcaacaattggatttaaccatcatgctcgacaagccggacaaagccaaagaggcctagggccggttatactaacttctctgagaggaaccacaaagac

SEQ ID NO: 78343 - DNA, 654 bp, Zea mays
  Clone ID: MRT4577_171473C.1
ccggccgggagtccgtactagcccaggcaagcgatcgtcggagcagagagagacttcctcgcctccatcccatcccgccgccgccgtctctacggtcgctaataagccgccgcatccagggatggagatgaagaagatcgcctgcgccgtcctcgtcgccgcctcggccaccgtggcgctggccgcggaggcgccggctccgtctcccaccagcggttcctccgcggtcgcacccgccatcgtcggggccgccgtggaactccttcttcgcgtactacattcactgagccgccggacgacgagacgtagtcggagggaatagaccaaggcgcaccaacaaacttgaatgcgctgccctgctctgctgctcccgggcattgccgatgcatgaacgagctctgattgcttctcccgatgggagtgcaacgccttcaccgtcctctttgaccgctgaccgtccgtcctcgtatctacttgagtgacatgtcacacaatgcgatcgatgacgtgccgcattgataagctggccaggaatgtgtccattccccctggaggggtatcaacaccggaaccgtcgcttgactattatcactggagcatgctcacactgcttgttagccattggttcaaagagactttcgcgtgcctatggct

SEQ ID NO: 78344 - DNA, 2802 bp, Zea mays
  Clone ID: MRT4577_171474C.1
ttttttttttgcatcgtgtaatgtcaataaacttttgattatctggcaaacgtggcattaaaaaaagatggaaatgccgcacagctttgctcatgctggttcatcaaatttacacagaactcttcttgccgaggacatggcctccctcaaaagaattacgctattgtaagcatgtgtaacacgcgaaaagaacacaataattacatggctcaaaacttacaacacaacacaaggtagtgtgtactacccaacacggtataaaattatgaagcagcagtagtgcacaagacacagcgcatgcgagactggcctgatggggaaccatcctcatcgtccatgcctccgtcactatcctgaccactgtttgatctcatcgagtctaagccaccttcaaggcaagacagatgatacgcatggcagcagtagaacacgatgacagatatgtcctggataggcaaaggatcgaagcacaaacaacaccgggcaccacatcttgttctggacttgatatctagagcccggacgctagatgatctctcgtgtccccgcgatgatccatcgtcagctctgtttccgtgtacctcctcgtccatgcttaccatgtataccccacgccgagcctcgtggtagtatttaaccaaaaggttaacacagtcagccttaagtatatcgttgcatccatttcgcaatgaagtttctgtccggtaatccgtcacaattttcacaagacgatcccgcaaccgaggtatttctaagccatcaggaaccaaactgacaatgtacagaggatcaagattgccaactgtatgttccaatagattccctaccatttcaggcttctggaggcattgtctaatcagttcctcccacagttcatcatcatgctgttccgtaacaaattcaacagcctcctgcatgtcttccagtttgtttataattgtcgacagagcttccttagcattgcccattcgaccaaggacaaaaacttgctcccttacaagttctttttgtgcaaagatttcatatgccttgtcaagcctgtaatgctgactggttcgaaggaagggtagtagcatccttgtctcgtagtcagcataaagctccacctgcatatcatgaaaatcctttccagcgtgtatatctatctcaaataaagcatgcaaatacaggtgtaacaaatatctcttgtcacattttttactggtatgcaacagctgctccacaacttcatatgggggaatgatatcacgatgttggatcagtaggtgaactgttcttttattgtccactatcataagattgacaatcttatcatgaatggcatcatgcaagttgtatttctcaataaactcgaatacttctggcttcaggagttcagcataaagagaaagtgccttttcgtattgaccattgatcacatacaattcagctaatgactctttcaatgaatcagccatcgatgaggagtttagctgtggctcaatggcagatatgaccggtgaggctgagtataatgtcggtggccaattttttatagtagtcaagagaagttcatggaaagaaggattggtagttagagcaacaagggcaacctcatatgcagtatcactcagctgaggattttctgtaggaatataagggaccaaaacaggaagttggcggagatgagcaaagtggaacccatctctccgctgaaggggatcctcgcaacaactttgggcagcgctgagcagcttcagcatattttctttcaattatcaagtgatcaaggtatcttgagcccacctcatcaagaagctcagtgcgtccttgccctgcctcaactgcagccaatgctttttcatggcaaccatgttgaagaagccaagcaatatgatcttcagcatctcttggctttgcaacgactatgtccttaggagacacaatgtaatacaaaggttcatcaccagcagcccactgtccacctgcattgctacttcctgagaaaggcgcatgcgcaagagcatagtcctttgccttgtaatgctcataaccatgaataggcagagcatctgtagtaagctcatcatttttccatgaagtccgtactacccaggcaagcgatcgtcggagcagagagagacttcctcgcctccatcccatcccgccgccgccgtctctacggtcgctaataagccgccgcatccagggatggagatgaagaagatcgcctgcgccgtcctcgtcgccgcctcggccaccgtggcgctggccgcggaggcgccggctccgtctcccaccagcggctcctccgcggtcgcacccgccatcgtcggggccgccgtggcctccttcttcgcgtactacattcactgagccgccggacgaggagccggagccggagggaagagaccaaggtggggggagagacttggctgcgctgcgctgctctgctgctcccgcgcattcccgatgcgtgggcgtgctctgattgggcacggcggtggcagtggcacaccttcgtcttccttttgtttgttttttttccttcctctttctacttgattttcatttaacgaattggtatcgctgatgcaccagtttaatttggtgccctgttatttgttctttccctcgagtgagggatcgacacctgtaccattgcttgccatttgtctggaccagttcaacaattcgatttaaccatcacgtatatataaactttggataaacattattacattaccctcatggtgaggggattgccggtttataaaaaaaaaaaaaaaggggcggccctcgagctcccagctttttgtccct

SEQ ID NO: 78345 - DNA, 225 bp, Zea mays
  Clone ID: MRT4577_171475C.1
ccgcagccagagccggttgcaagacctccaccacggggcggcaaatcagcaaaatgcggcccaccaaaaggctcaggataacccgaaccaggaagctgaggaccgccgccagataatgcttgctcaaattttatcttctgaagcaggaaaaaggctttccggattagctttggtcaaacctgacaaaccaggagggggggaggatgttttgctgaaagctgctca

SEQ ID NO: 78346 - DNA, 479 bp, Zea mays
  Clone ID: MRT4577_171476C.1
cgtcgacccattcgctgctcgaaacacgcgtccgcacaacttgctaagctagccggatacgccatccctgacaaactgggcgctgaaacatggagcgcactcttccgcatatcacatctcttaactatgactcctggtccgcgaaaatgctttgttttaatcaaacatgacaaatgcactcgtttcatcaagcatttagacggtcgtttcactcccggtgaaagaactacagggcgactatcccgccgcactttgtttcggtcaagctgagtctcctcacgcctatccatgccttactcaactgctgacctgtaacatcgaaacggtctgctgtacgtcgagtggtacgcttgagcaaacaatctacagcctattcaccgatcaccagtgcccaattgccttgccactcgctgagcattgacccgcagctatttaccttgcgcacacgacacccgtatatactccaactcgggcgtttc

SEQ ID NO: 78347 - DNA, 1116 bp, Zea mays
  Clone ID: MRT4577_171477C.1
gccggccggtttccggaacgctacctcggagacccgttagtccgtttgctgtatcactcccctctccaccgcgtctctcctgcatgctcgtattcggcacgaggcgcaaatctcctccccgcgtggcgcgcctgcaccttccggtccggcgagaggccaccgcccgcgcggccgcgctcctcacactaccacccgccccctctacgcaaggcctagaagcgccgcctccacggctgcacctccgccagttgcgctcctcgcctcgccgctgcctccgtagccgtcgcgggcgccaccatgccgctccggttggatatcaagaggaagctcgcgcagaggtcggagagggtgaagtccgtggatctgcatccgacagagccatggattttgtcgagtctttactcaggaagcgtttgtgtatggaactaccagactcagacaatggtgaaatcatttgaagtcacggatttaccagttcgttcggctaaatttattgcacgtaagcaatgggttgttgctggtgccgacgatatgttcatccgtgtgtacaactataacacaatggacaaggtcaaggtttttgaagctcacactgattacattagatgtgtggctgttcatccaacccagccctttgtgatatcatcgtccgatgacatgctgattaagctgtgggattgggataaaggctgggtgtgtactcaaatattcgaagggcattctcactatgtgatgcaagttacatttaacccaaaagataccaacacctttgctagtgcttccctggatcgcacaataaagatatggagtcttttgggttaaattcccaacttcacactagatggccattcgaaaggtgtgaactgtgttgattacttcactggtggtgaccgaccatacttaattactggctctgatgatcagactgcaaaggtttgggactaccaaacaaagagctgcgttcaaacacttgaaggacatgcacataatgtttctgctgtatgtttccacccagagctacctataataattactggttcagaggatgggacagttcgaatgtggcattctactacctacaggctcgagaacactcttaactatggccttgagcga

SEQ ID NO: 78348 - DNA, 442 bp, Zea mays
  Clone ID: MRT4577_171478C.1
gggaaaaaacttgtttaaaagggttttttccttgacaacgggttttacaaaaagactttttcccccctcccatttaaggggctttcctcccccaacccgaaagctaaaacctttttgaaaagcaaaatccttttccccccgtttttgccgttttttgcaatccccagggggggaaaaaaaaacccctcctgaaaaatttccaatcttgaaatcgaacgggcatccccctaccttggggggtcccaaggaaaggggggtttgaatggaaaaccttggggagcaaatcccccccccaaataaagggtttaaagttgttccatcaggggcaaccttccctccttgaaaaaatctagcctaggggttacccctcccaaaggggggggggggaccattggttgccccccaaattaaaggccctttgccaactttgggaccttgatgg

SEQ ID NO: 78349 - DNA, 539 bp, Zea mays
  Clone ID: MRT4577_171479C.1
gttaggaaaatcatctagacaagtaaaattctatttacttaagaattatatgatatacatatatttatactgtttatatagtatgttgtctaagcacggcatggccacaggaccgagattggtccgtaccaactaccaagtgaacgctggggcaaatcgcgtgcttcatgcctaattataattctcctctcgccaatacttattccatcgtactaaccaaagaatgaaaaaaagaaaacctacatcacagccgcatttgtaacacgtgaatgagctgtctgtccctgcgcctttcaggccgcaccactgcaaaggtggccattgccgttgcacatggacgggttcctgactaaggcgttctcgccctcgacgagtggcatctgcggctcctcctcttgcaaccctgccccctcgacgtcctggtgtgtcaggaagcacggctggttcgtggagcacaacacccgtgcccacatgcgggccgggatcaccaccttgttctgcttttcggggatcctgtaaaaagggatgtaagcctgcct

SEQ ID NO: 78350 - DNA, 1577 bp, Zea mays
  Clone ID: MRT4577_17147C.1
ggccgcaatttcctcgcgccgctgtcccttcgtttccccagacagtgcagaccgaaccgaacaggcgaacagacattggttttccccgccgcgcagcgcgcacacgcctgcctgccatttctagatccggggccggtcatcctctcttgtttccgtggcaaccgcgcctctcctccttccttgcagcgtgcccctgcggggggctgcgcgtggatctgatctcgtcaattgtcgtgctatgtttttctccagcggcacgaagtgaagaacacgtttttgtgacgccatggctgtggaaagagatatatttggaatttctgggccaacgtatctgaaatcaatcgattggaactgtgagcataatcggagatctgtggctgcaagcttagttcaggctgtatatgtgttggagagagaccggcaactgaatcatcaatcttttgaagccttggcacctgcttggtgggaattcctccattttgagctgattcgcaagctgattgatgatgctgatatgtccatatttggtgcaatatttgaattcaaccctccaagggaggaagcttctggtgcaaatgctccaagatttgtcatcgcattcagaggcaccataacagagaaggatactatctctagggacctttccctggacctgcaccttgttcaaaatggtctccacaggacctcgagatttaatatagcaatgcaagctgttcaaaacgtagcctcggttttccctggatccacgatttggctagcagggcattcactaggcgctggcctggccatccttacgggaagaaacatggttaagaagggtgtgcttttagaaagctttctcttcaacccaccgttcgttgctgctccagttgaaaggatcagggacgaaagggtaaagcacggatttcgtattgcaagaagcgtgattactgctggattgactattgccatgaaagctaaaactgagggtagcagtcagagatccgtcgctgaagaatctttcagcattttgtcatcatggacgccgtacctgttcgttaatccaggagaccacatttgctcagagtacatagggtacttccagcaccggaagaacatggaggatcttggtgccggatttatcgagaagcttgcgacacagaattccatcggagacctgttcttcaaggcactagggtgggagtcagaaccgctgcaccttcttccgtctgccgatctaatcgtcaacgtgagcccttcgtctgatttcaagtacgctcacggcatcagccagtggtggcaacctgagctgaatttgcagtgcagtaaatataggtactcatagttgtacgtcgctagaaatgatgtctcagaaacttagttatcctctctatcccttcagtttattcatgtggttcattctgtttgttgtagtggttggtttcccagctgtggtagactatttcagacattttgactgcattttcctgacctgcaaaatctgttgattgtgtggagtaaagttgtgacatccatcgtttaaatgcactgtacagtatgtttatccatttatggatgatcgcatcctggattcctgc

SEQ ID NO: 78351 - DNA, 278 bp, Zea mays
  unsure (1)..(278): unsure at all n locations
  Clone ID: MRT4577_171480C.1
tcgaggcnncggccgggcctgcgactaactcagcactcggcagtcccagctcatccccatccctgcccgtctccccggccggccactcgaccagaagcacgcgagcgagcggagaccgatcgaggccgacagccatgggcaagcaagcgacggcgctggcgctgctgtgcgccgtcctgctggcggcgacggcggacgccgcggcggcggcgtcgtgcaacccgtcggcgctgagcgcgtgcgcgcccgcgttgttcggcagggcggtcacgctgggg

SEQ ID NO: 78352 - DNA, 216 bp, Zea mays
  unsure (1)..(216): unsure at all n locations
  Clone ID: MRT4577_171481C.1
ctaaaacagcaagtcaccccaaatcaaagcggggccatagtgttattatgaacttgcncnncnagtggccatattgggattgcttgtcaaccttgtggagaaggatagccttaataaggtacgacttgcgaatgctcgtgtatctgataatcgtctataaaaatgcacatcgcgcacatgatcacaaggacgctattcctatgctctgttcaacat

SEQ ID NO: 78353 - DNA, 443 bp, Zea mays
  Clone ID: MRT4577_171482C.1
aacaaaaacgactcgaggccaaacgcttgcaaggacagctcaaaactgtacaacgagtggagtcatgtacaacgagaactgcaccgaactgctgaaccgcatgtagtgggccgtggtctacgtcaagatgcggctctttgacggactgcacgacgtgctccggtagcagctcttcgaggggtcaccgcacgcctagaacgcttactgctccttctccaacgtgcgccagtggatcatactcccaattgcatatgcttattagtatatagtacaagctccagtcccaattctccttctgtgctcctaccaccaccgagcttgcatgccgctcatgtcacggtcgacaacctgaatgtgcatctgatattgcgaacatggcagcttggccgttggatttgtgctatggtgatgtatggaatgattaaggcggttgtctttgtgca

SEQ ID NO: 78354 - DNA, 996 bp, Zea mays
  Clone ID: MRT4577_171483C.1
gctctaggccgcacgccgcaggccgcatcagcttgagcgtctaggactaggaagaggtagcagcgttcgatggccggcgacgactgcgacagcagcaagccaaagcctccgccgccagcggcggagggtgcgggcgaggtcgtcgaaggccccgtggctgcggacaaggcgctgcacgcgctgggcttcgagttcacccgcatcggcgcgcgcgaggtcgccggccgcctccccgtcacagacacctgctgccagccgttcggggtgctgaacggcggcgtgtcggcgctggtggccgagtccacggccagcgtcggcgcgttcatggcgtccgggtaccggcgggtggccggcgtgcagctgtccatcaaccacctccgccccgctcgcctcggcgacgtcgtccgggcgcaggccgtccccgtccagctcggccgcagcatccaggtgtgggaggtccagatatggcgagcggacccttccacaggggagtgcagagatctggtgtcaacagccagagttaccatgctgataataaccaacccatcaagaccagaggagatgtcgactcaccaagcaagcatcaagaaatacgcaaagctgtagagagagagagagagagaaataaaatcaaccgctttcacctgattacacctcccagtactaggaacactaaaccaacatcatctccagacatttcactctccaactattcgatgctcaaagacgaacgaaggacatgtgtgtcgtttcttattggacaattgtgtcagtgcccctctgttttaagtaaaactatagattattatcctgttttttagactttgggtttttgtcccttttataaaaaaaaactgttgtataccattatttcgttagttacacttaacggtgttaagtgggtgcttgtcactgctctgggtttcaacttgagcgtgaagatgatatgtttgcaatacttctatcgttaatatggtagcaaaaaaaaaaaaaaaa

SEQ ID NO: 78355 - DNA, 945 bp, Zea mays
  Clone ID: MRT4577_171484C.1
ccgctctaggccgcacgccgcaggccgcatcagcttgagcgtctaggactaggaagaggtagcagcgttcgatggccggcgacgactgcgacagcagcaagccaaagcctccgccgccagcggcggagggtgcgggcgaggtcgtcgaaggccccgtggctgcggacaaggcgctgcacgcgctgggcttcgagttcacccgcatcggcgcgcgcgaggtcgccggccgcctccccgtcacagacacctgctgccagccgttcggggtgctgaacggcggcgtgtcggcgctggtggccgagtccacggccagcgtcggcgcgttcatggcgtccgggtaccggcgggtggccggcgtgcagctgtccatcaaccacctccgccccgctcgcctcggcgacgtcgtccgggcgcaggccgtccccgtccagctcggccgcagcatccaggtctcccagcatgtttggtttggtttgcctgatcaatcgtatatcgtaataagctcgatgaggccaattcaaatgttgctagcttgttcttctggcaggtgtgggaggtccagatatggcgagcggacccttccacaggggagtgcagagatctggtgtcaacagccagagttaccatgctgataataaccaacccatcaagaccagaggagatgtcgactcacgaagcaagcatcaggaaatacgcaaagctgtagagagagagagagagagaaataaaatcaaccgctttcacctgattacacctcccagtactaggaacactaaaccaacatcatctccagacatttcactctccaactattcgatgctcaaagacgaacgaaggacatgtgtgtcgtttcttattggacaattgtgtcagtgcccctctgttttaagtaaaactatagattattatcctgttttttagactttgggtttttgtcccttttat

SEQ ID NO: 78356 - DNA, 323 bp, Zea mays
  Clone ID: MRT4577_171485C.1
cccacgcgtccgtccacgcgttcgcccacgcgtccgcccacgcgttcgctgacgacgggactggggctcacagatactggaagctaattgatcgatgtatagaattcaatctgacttgatcatattacctaggtgcatcctttggtatatgcttatatacgtcgaatcttgtagaggcttactttaaaatcattcaattgtataatgattttggcacatgaatcaatagaatatataaacatccaagctgactcaagggcaattgcaactttgatgctgataacaaatattcttactaacagtttttcatgctgggtaatatt

SEQ ID NO: 78357 - DNA, 218 bp, Zea mays
  Clone ID: MRT4577_171486C.1
atttttgtcccttttataaaaaaaaactgttgtataccattatttcgttagttacacttaacggtgttaagtgggtgtttgtcactgctctaggtttcaacttgagtgtgaagatgatgtgtttgcaatacttccatcgttaatatggtatgcttataatacccttataaacttttgtaaacactaccacctccaagcgagaagacatatccacttat

SEQ ID NO: 78358 - DNA, 461 bp, Zea mays
  Clone ID: MRT4577_171487C.1
ggggggggttttaaccctgggtttgggcccgaaggaggcctggcttggtcgtgcggtagccaaggggccttaaattaaccgatcgccccaggggcccggaccaaacagggggggggggccaaggccataatttacccacccacggaacccccgggccggcggggcggaggcaggcaggccccccaaaccggggggggggacccccggccggggaaccataggcggttggggaggaaccccgggaaaaaaaaaccgggcgcggggggcgccccaacaaggcaattggacaaacccggggccggcccgggctgaacccccgccttccagacaacgtcactccgggggccgtcgagggcgcccacctggggggggccccagccttcaaaaaagcgcaccacgcccccggcgtggtacgcgtaaacaaccccgcgcccaatggggttttggggggacccgaggcc

SEQ ID NO: 78359 - DNA, 2246 bp, Zea mays
  unsure (1)..(2246): unsure at all n locations
  Clone ID: MRT4577_171488C.1
ctctttcctgtaggctgcagcaacccgctcccccgctcacaccgaaatttgaaatcctcctcccagtctcgtccttcgaacgaagcaacagccgccgcgccatggagaagatctccgtcgccgtccgcttccgccctcccaacctggtggccgctaacacctccccagccagttccggcggaggcggcgaccgcgagtggcgtatcgatgacacccgcgtttccctcctccaccgcgccgccggccccatcaccggtgcctccttcgccttcgaccacgtcttcgacggtgcggcgaacaacgagcggatctatggcacggtcgtccgggaactcattggcgccgtcgtcggcggattcaacggcaccgccttcgcctacggccagaccagcagcgggaagacattcaccatgaacggctccgacgccgacccgggcatcattccccgcgcggtccgcgacgtcttcgacaccgtgcgccaggctgacgaccgcgagttcctcatccgggtgtcctacatggagatctacaacgaggaaatcaacgacctcttgacacttgaaggccagaagctgaagattcatgagagcttagatcgtggagtgtacgtgtctggtttgcgggaggagatcgtgaacagcgcagagcaagtgtttgagctcctccagcttggagaagcgaacaggcattttggagagaccaacatgaacatgcggagcagtcggtcacacactattttcagaatggtaattgagagcagtggtaaggaccagacagacggtggagatgctatccgcgtatctgttttgaatttggtggatcttgctgggtcagaaagaatcatcaagacgggggcagaaggggtacgtttgaatgaggggaagtatattaacaagagcttaatgattcttgggaatgtcatcaataagttgagcgagaacggaaaacaaagagggcacattccgtatcgtgatagtaagttgacacgcattctccaacctgcacttggaggcaatgcaaagacatctatcatctgtactgctgctcctgaagagattcacattgaggaaactagaggtactcttcagttcgcaagtagagcaaaatgtgtaagcaattgtgcccaagtaaatgagattctaactgatgctgctttgcttgggaggcaaaaactggaaattgaagagcttcgtaaaaaactgcagggttcccattctgaagggttggagcaggttgtactaaaactacggaacgacatgcacaagtctgaacttgagcgtgatcgattggccatggaacttgaagacgaaagaaagttacggatgactctagagcaacatttgactgagcaacagaagctagaggccatatcgtcagaccactttacagattcaatccagctggatcttctgaaaactccagattcgaagtctgtaccagatggctttgttgcctgtcgctcacgttactcacaagatgttgagttcagcccaatacctgaaaatttggataatattgctgaagaagatctatggacacgtctgaacaaaggctgtgttaccgatcttgatatgcttgagatgacacctaatctcaaacgcgagtcatcctttctacaagaaaaatcatcagctgcgccattggaggaacctaccaacgccatatgccagaggttagcaaaggagtgcatctatgatcagcaacagcttgaggaatcaaaggcgagatgcgccaatctcgagaaagattgcgacgtgctgagggacgagaacttgtccctgcaacaggagctctccgagtccaagctagaggcggacagcctcgtagccgagaagcaggcacagctggatgatttgaggatgaggtgcgtggccctcgagagggatctctccagctccaggcaggaggcccaccgccttgccaccgagaagcaggagctggccgggcagctgggcacagagaggcagaagatggatgagctgaagcaggatatccgggtgatctgcggcgacttgctccagcgggaagggcagctcacgtcgatttacaccaagtccaaggccatcatagagagctgcaaggcctcccaggtagctactctgctttgatggtttcaatgaccgctgttggcttgtgcattttttatacataaaaacagaaggacagcatttttatgttgagattatatccttcgttggcgttgcaattataatttcatcctcagtcttttttaannaaannaaaaa

SEQ ID NO: 78360 - DNA, 730 bp, Zea mays
  Clone ID: MRT4577_171489C.1
agaaattcggcacgaggcaccaaccaccggttctgcctccgcttcaatcccgggtggtcgcgctttcgtcgccgccattcagcggtggtcgctatcccctccctatccggcgtccgcgatgctcgccgcccctgctcccccacgcgtcggtcgcgtccctcccctctggcccgcctcgctcccctccaaccccaaactccccatcgggggccagcctatgacgaatagccatcgcgcatgtggaaatcgctcccccattccatcgacgggcgctcaacctatatccccttccaccgatctcgtgctcaccttccacgttcgcggccgccacgctccggcgccactcgccccagtcccgctcgcgatccttgcctcccctgtctatttccctatacgcgcatagctgggagcgccgatccccacctccaacctcgctcccccctgtcctctgactcgccagctcccccgtcctcctccatcgcgctgcgcgtttgcaactcccagtcccacctccggcgcgtctgccagccagtagtcagtaggcttgatcatgtcgtcgcggaagcatcatgagctgccggagggaggagcaggaggcagcggcgccggccgcacggcggtgtgggacaccgggagctccctgtacgactcgtacgagctggccgccgtgcgccggctcctcgacaagcgcctcctcgccctccgcgacgacgctgaagagacgaggggc

SEQ ID NO: 78361 - DNA, 444 bp, Zea mays
  Clone ID: MRT4577_17148C.1
ggccgaaacaatgggggacctttcctggcccttgaaaaaagaggaaacaggcaacagatcccggccatgggcaagggggccccggccgcccctaacattaaccctaaaggccgccggcgccggcatcacggggcaaaagcgacccatgttaaaccatcccagggtggccggcaacaaaactgatataaaggggcccatttatcacccgagacaggtttcaccaatataacacccaaaaaaagcagcagcagcaaactaacagtcccccgaaggccggggggggggcggacctttaatggattgaaaaccgggccggggggggggattgaaaccgaggggaattcccccaggcagtcaggggggcaagccacccagtttcttttggggggtgccggggcccccgggcttgggctggggggggggggccccggcggcggcgggggg

SEQ ID NO: 78362 - DNA, 583 bp, Zea mays
  Clone ID: MRT4577_171490C.1
gggggggtgggggtgtttttttttttttttttttttttttttttttttttttttttttttttttttttttaatcaaaggttcaaagggtttacaaagggaatacatgtttctagtctaaataccatgccgttcgtctgggacccccaaaaaaccctgggttacaaggtggccccttttaacatggggaccaaggaaccaggcttttgggaagccccaattcacaaaaaataaaacaccgtgccttaagcgatacaaacccccagaaagccttcttccctgttctaaagtgcttgataagccaatccatgaccacctttattttcacaaaatccttaccccaaatcatgtagcaacaaacctcccggtcctttatcaattccagtccaagttgatcaaccaaggcctgcttcaaaagcccttctgacttgtcaattttgttgccaaggacaagcaagggaatcccacccaaaaactgtttcgtcagcaaatcatgcaactcacttttcgcgattgggacacttttttggtcagcagcgtccacaacatacagaatagccgaaactccacggcaatagccctccc

SEQ ID NO: 78363 - DNA, 660 bp, Zea mays
  Clone ID: MRT4577_171491C.1
gccggccgggtcgggattatccgcgctcgcccctcctgacgatctgctccatccgtgctaacaccccgttcagccaatcacagcttccatgtacgaggtgccgctcttccgcccgcccgaagagacctctaggagctggaaagatatgcggctatgtctgagccgctgccccagaactcttatatggacgtcgagatagataagcctcatgtgctaatactaggtgttgtgaagaacgagcaggacaatgtatgctagcccatggagtcacgagcacaactgtacatgtagacgcaaaagattgattctgagaatctgctacatatcgaattcagtgagctccattgcgactcagaatatgaactgctacttcagcaaagcgcctcaacaaaggttacctttcctttacttagcaccaatacgttctgcagccaccctctgtaccgagagtatgagcttatccacaagaactaccttggtgagataaatgcataacagaggaagctactggatgagctcttcctcccagcagaagatgccgcatgtgaccagttcacccctctggagaaaatgctttacaaggaaccatctgacgcgaaatagggcgactatgatattgactacctgctgatcatcgtccgggacgcgtaggtgcagacg

SEQ ID NO: 78364 - DNA, 395 bp, Zea mays
  Clone ID: MRT4577_171492C.1
gcgcgaacttctctggggcggacaagctgtgcatcagataaatagggcccgggattcactctagacctcacatggaacaactgccaaaaacaaaactgatgcttttgctaatggaacaatggatttcgacttgaacatatggcacccgtgttattatccgttttggtgcaactctgaacccgtccaccaaatcacatgtatttgcgataactcggcccccacctaatgctgatcctgtatgcacaaaccatcggacccccctggccgaatgaacagtcaatctaggaaggtgattagtacgcccagtacaatcacgtgccggagattccctccaaatttcctatattcccttgggtattataacgcacgctaacacatttgctgatttctcaaag

SEQ ID NO: 78365 - DNA, 814 bp, Zea mays
  unsure (1)..(814): unsure at all n locations
  Clone ID: MRT4577_171493C.1
cactcctaagggcgaatgggatcctcaaggccggccgggacgcccttttgtgcaaaacatcccaatgtcatcggacaccgcagcacctaacttgccgagagttgcggctctcgagaacgacgattccatgttgacccgtcgcttcggtaaagaagtcgtcaactattatgccggcagccgtatcaatcggttctccttccttcgtgccgacactggctttcttcgcaaggctgctgccagtcccacagctcgctatctggctctcagcgaactgaaccctctggttgtcgataagagaacgccagcatacttgactttcaacgatgttgagcccttgattggatcagacccctttgcgcaaaccgaggacgaagctatccagaacttcgactcaaccaagacgacccctctcattgtcttcctcggcatgctagaagagggaaacgagaacgaccacatttcttctactgatcacggagatatcctgggccatccctatttcgccatcgacatcacccccaagggcaaccatgctgagaaagccgagagcttcttggccgagtaggagaaagaggaaatgtctctagacaagaaccctcgtgccatgggccattctcctgaagccgccgccttgtacgctcaggccagatcaatgatggattggaactcacgaagccctttctgcgctggttgcggtcagcctaatctatctgtccatgcgggctacnagcgtgtctgtcctccgccgacaaaaaggtggcgagacagcgaggctcgaggagattgtgcactcgccatggcgtctctacatctg

SEQ ID NO: 78366 - DNA, 586 bp, Zea mays
  Clone ID: MRT4577_171494C.1
ccctcctcgagttttttttttttttttttttttttttttttttttttttttttttttttttttttttttttttcaccacagcaacaaaaaaatttgccccctttcattttttattataaagttacaacgggtttcgttacaaaacaagggccctgctgttttggctcaacttgggcaaatctttattttttccatgcttcaaagcctcatttttaaaacaaacaaacaatcgaaaagatctgatcatttatcaatcacctcctaccctaaaaaatcaatagggaaaaaagctcaaaggatcggaccacttgcttggatgttccccccccattgaaaaatcttttaaacaaaaagaagcttgcctcatacagggacgggagtcgttttttcagcttgcaggctggggtagtaaccaacaaaaaccttccccccccccgggcacatgaaaccgggggggggattctctccagttttggcataagggcccatcttggttccaaagataaacaaaaaatcttgactgcgggaaggatcaaaaaaggccatcccctttgctacggagaaaaaagcggcccccttgaagggc

SEQ ID NO: 78367 - DNA, 718 bp, Zea mays
  Clone ID: MRT4577_171495C.1
ttgatgctcaggtagggacctctcaactacatgtcacctgaagcgttcatgtgcaatgatacagactcggatggtaacattattaagtgcgggctcccctcagatatctggtctcttggctgtattctttaccagatggtgtatggcaagacaccatttgcagactacaagactttctgggacaaatataaaggagtgactgataggaaccacaagatcatgtatgaaccagttgacaacccatggctcattgatttgatgcaaaggtgtctcgcctgggaccgaaatgaacgatggagaacacctcagcttcttaagcacccttttctcaatcctccagttccaagggatttacctccctctgacgatgatccatataggttgctcattgagaggatcagagtccactgggataacccaatggttcaaaaacttcgtagtttaattgaagaactcgatggggatcagtaaaaatgggtttttaacaatcctgattgatactcgatctagggcctgggtagtggtggcacaagtgttttagtttctgtattgttcctgattgatagggtactgttgtaatttgtaattagagagtggcggcatcggttggagacgtcggagcatattatgatgccctggcatttttgcttcctcgtgtttggaggttgatgtgacactttgtcagaaatggcggctagttaacgttaagagtcaagac

SEQ ID NO: 78368 - DNA, 2223 bp, Zea mays
  Clone ID: MRT4577_171496C.1
ccggccgggcaaccaaacgagctgctagcccttctaaccttgctcgacccttgcccgccgcctgaactcgcctcccccgcggccggtcccctgcatctgttcgccgcgccgcaacccggagtggagactacgactacgagcaccaccaggacaccaggtagcagcaactgttttgctgcaatctgacaaagtggagggtttaagagtcgctgcttcttttatgtctgaacaatctttgctttatttgggattgctgggagagtattcttgcgcgacgaggaaaaggcacaagtttctgctccactgcatgcatcaagagcccatccggtttccttgttctgaggtgtcattcgctagtgctcagagccggcttggttttctcgaaagatcagcagccactcttgattcaggactttgtcacacctgatagcatctagttaatacatctttatccaagatggcactgcaaaacattggtgcttcaaacagggatgatgccttctacaggtacaagatgcccagaatgattaccaagatagaaggtcgtggtaatggtatcaagacaaatattgtgaacatggttgacatagcaaaagcacttgccaggcctgcttcctatacaaccaaatactttggatgtgagcttggtgcacagtccaaatttgatgagaagacagggatttccttggttaatggggctcatgatactgcaaagctggctggtctccttgaggtattcatcaagaagtatgtccagtggttatggggtgtgggaatcctgagactgagattctcatatcaaagactcagatgctatcactgaaatgtgcagcctgtgggtttgtctcagatgttgacatgagggacaagctcacaaccttcatcctgaaaaacccaccagaacagaagaagggaggaaaagacaagaagaaggccatgaggagagctgagaaggaacgcctgaaggaaggtgaggctgctgatgaggagcagaagaaactgaagaaggatgcaaagaagaagggtgcatcttccaaggagtctactgccaagggttcaaagaagaaggctactgctggtggctctgatgaggaccactcaacctctccaactcgcagccgtgatggtgaccatgcagctgcggacgaggaagaggatgatgatgatgtccagtggcagactgacacttctattgaggctgcgaagcagcgtatgcaggagcagctgagtgcagcaaccgctgaaatggtgatgctgtccactgaggagactgagaagaagaaacatgcaacccacaaagatggcactgctaatggttcagcaaaagaaatacctgatgaaaagcctgctgtcactaagcctagtccctataaagaactgattggagacatcaaggctagcctgggaagtgctcccacacctacccagctcaaggctatgctggcctcctcgacccttccttcccaggacgtgatgaatgctctcctcgaggctctctttgacggtgtgggcaagggatttgcaaaggaggtcgtgaagaacaagaagtaccttgcagttgctgtgccagatgagggtgcccagaccctgctggttcaagccatcgaggcttttggcagcaagtgcaaccccgaggcgctgaaggaggtcccagttgtcctgaaagccctgtacgacggagatatcctggaggaggaaaccgttgtggactggtacaacgctgctgtcgcagctggaaaggactcccaggtcgtcaagaatgccaaaccgtttgtcgagtggctccagagcgccgagtctgacgacgaggatggcgatgagtgaagaggcgatgctgctctactgttcatggcttcacttgataatattaattcaataagtttattttgcttgtctggtgtcatcgatgtcagtcttcgtttggtgtcagtcggtctggtgtcgatgtctaaaaactgttattgtcgtgccgcgcagcataccctatgtggttggctgcgtttggtgtcagtccgttttgtgtttggatgtcacggtttattatgttcctgtgggctgccactatatattatagttgcttgggatgtgttttttataaccttttggggtgttgcactttcttattgcattgttttatagtattttaagggttgatgagattttatatcaaacttatatggaatccttatcatgtgttggtactggtgagtcttctgttctcat

SEQ ID NO: 78369 - DNA, 269 bp, Zea mays
  Clone ID: MRT4577_171497C.1
gcgcgagggcccgccacacagcagacggcggaggaagccgaccggcgccaaaggcgcccaggaacgagcgggcgacgaacgcggcccggaaggcagcccccgccaccgcggcagccaagaagccccagcgcgcccgccccgcagaccgacacgcgccagaaaagccacaagaaccccagcagcacccaggtgctgcacccgcaagccgacggaccagcgcctgcgagcgcaagatcacgcccgacggcaagagcgaccgacacccccag

SEQ ID NO: 78370 - DNA, 409 bp, Zea mays
  Clone ID: MRT4577_171498C.1
ccacgcgtaagcaaatatccttaggctagacatcaatcatccaccaaatattcatcttcatacgggaatttttgtacgcgctacaaaacgtcaacatcctcttcacaatcataccacaaggggaggactgcctaatcatttcaaagtaactgggggggagacttatcctaacatcagacatgagccaaatcttcaaggtcctgttatcacggttatatctgatcaaaatactgttgactctatcagccacagtcaaaatcccacctccaccaacttgttgcccgacgtcttagacaaagctaccatccatgaattcgttttttttcagcacattaccgatcgaaagcattatgctatacacgctctcaatgatccactcttaagtttacatgatcactaccttatacct

SEQ ID NO: 78371 - DNA, 983 bp, Zea mays
  unsure (1)..(983): unsure at all n locations
  Clone ID: MRT4577_171499C.1
catcgggccggtagcgcaattccgccgacagacgcaggcggcaggcagcggcgcagcgcaccgcttcttcctcttctatctctcatctacagccttcgctgcgccgccatggccaccacccgcttgctgccgctgctccgacgccgcctcgccgccgcaatcgccggatcgcctgctccctactccctccgaggaccctcatttcctgcaccagcagctgcagggctaaggtccctcctaacagctgctggagcgagcgatactgcaacagaaccccaggaccaacagcattccgaaacaactcccccgccggcttctgtcccgacaccggagtccggtctcaaagtcagggacacctccaacctgaagatctcaccaaggcatgacctcgccatgatctttacgtgcaaggtgtgcgagaccaggtccatgaagatggccagcagggactcgtacgagaacggagtcgtggtcgtgcggtgcggtggctgcaacaacctccacctcatggcggacaggcttggctggtttggggagccagggagcattgaggacttcctagcgacgcaaggggaggaggtgaagaaaggttcgacagatactatcagctttactttggacgacttggctgggtctcaggtcagttctaaggggccttccgaacaaaattaatatgatagtgtttggtccagtaagaacctgcagaagcctctctttactataaagaagacgcgcatgtcacctgtgtgttgaagagaagaaaaaagcgcctctagaagcctaccttaactgttgcacctgtagttctgcttaacttcatggcttttcatgtgtagcttcgagcccatcaaatacgcgatgttgtgatctattgtatgttactatttcctataccaaaaactggatccaagaaaacctacattaattgaaggaatgnccgcatttccgatcatgttatcnngttgtgttgccgcattcnttcc

SEQ ID NO: 78372 - DNA, 739 bp, Zea mays
  Clone ID: MRT4577_17149C.1
ccggccggggccatttctaaatccggggccggtcatcctctcttgtttccgtggcaaccgcgcctctcctccttccttgcagcgtgcccctgcggggggctgcgcgtggatctgatctcgtcaattgtcgtgctatgtttttctccagcggcacgaagtgaagaacacgtttttgtgacgccatggctgtggaaagagatatatttggaatttctgggccaacgtatctgaaatcaatcgattgttctcacaattcattgacttgaggaagtaactatctctcattatcaattgtcaaaaggaactgtgagcataatcggagatctgtggctgcaagcttagttcaggctgtatatgtgttggagagagaccggcaactgaatcatcaatcttttgaagccttggcacctgcttggtgggaattcctccattttgagctgattcgcaagctgattgatgatgctgatatgtccatatttggtgcaatatttgaattcaaccctccaaaggaggaagcttctggtgcaaatgctccaagatttgtcatcgcattcagaggcaccataacagagaaggatactatctctagggacctttccctggacctgcaccttgttcaaaatggtctccacaggacctcgagatttaatatagcaatgcaagctgttcataacgtagcctcggttttccctggatccacgatttggctagcagggcattcactaggcgctggcctggc

SEQ ID NO: 78373 - DNA, 651 bp, Zea mays
  Clone ID: MRT4577_1714C.1
gccggccgggtcggatcccctcgcgacatgccactgatctcttcacccggcgcaagatgtgctcgtggtccccgtgcctcccacatcacccgtccgatctctccgcactccgaactgctgtcaatccgactctatcatgtattgttgtccaccacgcgcttgcatccttctcgcatttgtttagatcgtaagcccgtccaactgcaccaccttgagacgcctgacactgtctgctacctgctgagtgagagcgagtatgtcacgattctggacccaccttatccctgccttggtcacatcgcccaaccgatgtctggaaggtctctcgatgcttggaacggctttttgactgattaccgatagtttccactgcacggctcgacatgtatgaactttgactccatacagttctctgactgaaagttcccgggagtcagcctggtcctcgggtgcatgctcatgttcgtgccgtcatgatgaccgaaatctggagtgacgttgtttctacgacatcggagatagcgacctacgacgaggtccatgtgctgtatcgtcctctactgcgcctaccagattactagttgccctctccacatcagatttgaacctgcctgcgacgctgacctcgattatagaattggagaactgact

SEQ ID NO: 78374 - DNA, 289 bp, Zea mays
  Clone ID: MRT4577_171500C.1
aaaaaaaaaatttaaaaaaatataaccaaaaaccgagaactagatgaacctacgcaagactggttgtactcgccgaagtatccctaacagtcaccgcatgagcgtccaactcatgattaacagactcaaacccaatccgccctgttaccgaccgcgcggcctcagagctcgagtacacggtcttcgccgcgctagggcgcacccgcgacgcactacgctatgcacgcttaggtctgagatacggcaagagctataacagcccggaaaaggtccacacgctgctcaggat

SEQ ID NO: 78375 - DNA, 566 bp, Zea mays
  Clone ID: MRT4577_171501C.1
ttactggattctacatcgacctatttttatactacgcacctatctcacacttgattcgagacaatgacggacttcaagggatcgtgccactgcaagcagacggagtggacggcgacacttcagccggatcaacaggcgcatatcctttgtcactgtaacacgtgcaaggagctctccggcgcgacatacacgctcaaccagatcattcccgccaaggcgcttaagatcaccaagggcgatgacttgggcaaatacacatacaagggtgactctggcaagagtgttcactgcttttactgcaagaactgcactgcgcacgtataccaccagcaggaggtcctcggcccggacaacattgttctgaggaccggactattggagcagggactcaaggacttcaagccgggcgcggagatctttggcaaggatcgcctgccatgggagaaggaggttgcgaccactttcgatgttctgccaccctcatagacggttgaacttgccgcatgatgaaccatcagttgaacagcattctagcaatagaataaaatatatattgcatccgcgag

SEQ ID NO: 78376 - DNA, 375 bp, Zea mays
  Clone ID: MRT4577_171502C.1
attttcagcattcagaaactctcttttcgtagcgcacttgcttcttccgggcaggttttgcttccttgagatgagccctccttgcgcttcttgccctttttgtgtgcgcaacatatgcgttcattattccacagtgctctcttgctcctagtgccattattccacagtttcttccaccagtttcttcaatgggcttcgtacatccttccgtgcatgccttcatgcttcaacttgcgcttgcggggagcgtctttcatcaaccaattgcccaattgctactacaatccttggcacatcttaacctacataccatcgcatcgcaacagctacaacagtttctggcatcactgatccacctagccgtggtgaaccctg

SEQ ID NO: 78377 - DNA, 230 bp, Zea mays
  Clone ID: MRT4577_171503C.1
gttctcgacagaacggaaagctattggtttttgtgcggatagaatttaagccttttttacgtggtgcacgttgtgaagtaattgctttgagtctcttgtgagctggtttaaccgttaaaaaaaaaagactaatacataaaaaaaagaaataaaaatgaaataaaaaactggcttgaaagcatattaaagctaaaaggattagtaaactgaaagagagcgtttacagaact

SEQ ID NO: 78378 - DNA, 1264 bp, Zea mays
  Clone ID: MRT4577_171504C.1
gaaaagagagttatagaagttaaaatagaaaaaaggtaccgtccaaaccgaatccaaatttgaatcaataaaataaatccaaattccagattccagcagtagatgaataattgcaaatttttgtgtgacgagattagaataacttaaaaataactgacataattttttatttttcctgatcagaaaaatacatgaaaaagaaaggaggtagaaaaatttgttgatttatggttaaagaagaaaaacaagaaaacaggggttctgttgaatttcaagtattcagtttcaccaataagatacggagacttgcttcacatttagaattacacaaaaaagatttttcatcggaaagaggtctacgaagacttttgggaaaacgtcaacgtttgctggcttatttggcaaagaaaaatagagtacgttataagaaattaataagtcagttggatattcgggagaagtaatttaatcgttctcatttttttcttattttattagtagtcttatagtagtcttagattttgcattttgatgagcctcgttttgaggaattcatggaataatccattttcatggaataaagaataagaacaaggatacataacataaaaaaaagaatagataagacgatattcgccctccccctacatatttgatttcttctcctatacaaaaaccagcaagacctactccattggtaattccatcaatgacacctttatcaaaaaaatgcgttagttcggctaatcttcttatacctaggataaaaaccctagtatagaaaaaatctatataaccacgattatatgaccagctgtatatctttttttttacttcatccaaaaagctcttttttggattcttttttacaagggaattttgaaaattcaaattctgaaaaaaagaataagcagatccataaaagatatatgctatgaatagaccaaaaattgctaaacttacagaagaaattgcattagtgagaaattcatatgaatttatggaagaattagaattttcctggaacaagtttattgaaggagttagccactttgataatatggttaactccaatattctattatcttttactccattatcaaaatggattcctatggatccaatgaacaaagtaaaaagtagtaatataagaagaggaaatagcatagtatttcccgtttcatgagggtagacaaaagtatttttagccccaaagggagtactaaggatcctatccttattcttgtattagcaggaatttttg

SEQ ID NO: 78379 - DNA, 229 bp, Zea mays
  unsure (1)..(229): unsure at all n locations
  Clone ID: MRT4577_171505C.1
ttgctctagctctatagctcgagaattgcagggggtccacaagaaacaaggtgagtgccccctctacgtccgncggctcctcgttctttgtccttcagatgaaactggacgccgacttggctggcatgagacgcaaagccggcacctttaccatcaccaacaactggggcttcaccgtgtggcccccggccacccccgtgggcggcggcacccaaatgaacccgggggg

SEQ ID NO: 78380 - DNA, 1266 bp, Zea mays
  unsure (1)..(1266): unsure at all n locations
  Clone ID: MRT4577_171506C.1
cctcgaggccggccgagaattctaccatccattccaataatccaaggtaaccgaaagcagcagcggaggtcgcaagaacacttccctcctctccggatcaatcatcgatcagccaagcccctacaaaaaaaccatcgccacatcttacagcgacgtccaggtccaggtctgagctcgaggcacaggactccctttataatttatccatccatggcttcctccaattccaacagcagcagcaacccgctggaagccatgggcgccttcttctcgaagcaggtggaccggcggaagctggtgaccaccgagaagcgggcgctggccacgcggctgtcctcctccggcgacacgttcccggggtcggagcaccggccggcggaccggaagcggtggatggcggagctgggcgccgacaagctgcgcgtgcaccaggtggtgtggcccggcacgcacgactcggccaccaacaagatcggcgtgccgctggtgacccgccccttcgcgcagtgccagtccatgtccgtgtacgagcagctggccatgggcacgcgcgtcgtcgacgtgcgcgtgcaggaggagcgccgggtctgccacggcatcctggcgacgtaccccgtcgacgtggtgctggacgacgtgagccggttcctgagcgagaccgagtccgagctggtcgtcctggaggtgcgcaccgagttcgggcacgaggacccgcccgagtcggcaggnttctggtggagaggctcggcgagcacctgctgatcccgcaggacgaggcggtgttccacaagaccgtcgcggagctgctcccgcgccgggtcatctgcgtgtggaagccgcgcaggtcgccggcgcccgggcccggggagcccctgtggagcgccgggtacctcagggacaactggatcgacacggacctgccggagaccaagttcgagagcaacctcaagttcctggggcagcagccgccggtggcgggccgcgggttcttgtaccgggtggagaacacggtgacgcccaggcccgacaacccggtggtgtgcgtgtggcccgtgacgaggcggatccacggctacgcgcggatgttcatcgccgaggtcttcgccaagggcctcggcgacaagctccaggtcttctccaccgacttcatcgacggcgacttcgtcgacgcctgcgccggcgtcaccaaggcgcgcgtcgacggcaccgcgtgaccgcgatcgacggcccggccggcctcgaggaacccaatcgccctaaggagtc

SEQ ID NO: 78381 - DNA, 1828 bp, Zea mays
  Clone ID: MRT4577_171507C.1
ttgggtacctcgaggccggccggggggagcgaacaaaccctctgtggctctgtccagtagtagcaatttggatagagatatatgccaatcggcaatcgccaaagaaaagaaaagaaaaactctctctctctctctcgaccggcctggcatcagcacacgtccacacctaacgacgccaattctaccatccattccaataatccaaggtaaccgaaagcagcagcggaggtcgcaagaacactaggactcatccctcctccggatcaatcatcgatcagccaagcccctacaaaaaaaccatcgccacatgttggctaatcccacgacgcactgatatttttcttccttgattgtcttgctgctatttataatcgatctccagcttacagcgacgtccaggtccaggtctgagctcgaggcacaggactccctttataatttatccatccatggcttcctccaattccaatagcagcagcaacccgctggaagccatgggcgccttcttctcgaagcaggtggaccggcggaagctggtgaccaccgagaagcgggcgctggccacgcgtctgtcctcctccggcgacacgttcccggggtcggagcaccggccggcggaccggaagcggtggatggcggagctgggcgccgacaagctgcgcgtgcaccaggtggtgtggcccggcacgcacgactcggccaccaacaagatcggcgtgccgctggtgacccgccccttcgcgcagtgccagtccatgtctgtgtacgagcagctggccatgggcacgcgcgtcatcgacgtgcgcgtgcaggaggagcgccgggtctgccacggcatcctggcgacgtaccccgtggacgtggtgctggacgacgtgagccggttcctgggcgagaccgagtccgagctgctcatcctggagatccgcaccgagttcgggcacgaggacccgccggggttcgacaggttcctggccgacaagctgggcgagcacctgatcccgcaggacgaggcggtgttccacaggaccgtcgcggagctgctcccgcggcgggtcatctgcgtctggaagccccgcaagtcgccgccgcctaggcccggggacccgctgtggagcgccggctacctcaaggacaactggatcgacacggacctgccggagaccaagttcgagagcaacctcaagttcctggggcagcagccgccggtggccgaccggaggttcttctaccgggtggagaacacggtgacgcccaaggccgacaacccggtgctgtgcgtgtggcccgtcacgaagcggatccacggctacgcgcgcctcttcatcgccgaggccttcgccaagggcctcggcgacaagctgcaggtcttctccaccgacttcatcgacggcgacttcgtcgacgcctgcgccggagtcaccaaggcgcgcgtcgatggcaccgcgtgacgtgacggcggcgatcgacgagcccgtacgtacgtacgtgtgccagtgttgcggccgtactgccattgcagtgtatgtactgtgtagtgtacactccagtcgtgcagtattatatttgcatacaggaacaggtaaatgcgatgtgtatatacgtattcattcatgtgtaacgtgtgcgtcccgtacgtgtatgcagtgcactgtgtctagtgatgaattgctcgtgggacgagcaaaggaataaacatatgcagttacggaattttcaaaaaaaaaaaaaaaaaaaaaaaaaaaaaaatcgtgaagagtttcattgtgttatttgcaataataatgctgccacgttatctgctaaaaaaaaaaaaaaaaaagcggcc

SEQ ID NO: 78382 - DNA, 590 bp, Zea mays
  Clone ID: MRT4577_171508C.1
gtgagatcatgtatgagacccaaactgccgatcttgctaccgattccgttccaaggaaggtttcccgtcatcactgtatgacgtcctccttctttgggggggggggggggggggctacagaatgttctcgaggtggagggggaatggcgctaggaactaaagcaacgacttacagggagtaggataataaataaataaagccagcattaaaagaagcggcgcacccaacggctaactaaggggagcgataaagagtcaacgagaaacagaataaaagaatttcgtcggcggcgacggtaagtatgggtcgacgtggtagtagtgttaaaccgaaaaatacaactagtgctacttagccttggaaatgtatgggtgcgctgccctattgtcacatgccatatgcgggggttggtaatcggacggtggcctgtatgactagcatcaaggcctcgacactgtggcgggtttaaccaaatggcggtgcggctagcgcagaaagggctaagggtagggcaaatgtgctggcaggtccacatgtgccgcgtagggggaatgggggtaatgctggcgacaccgctggggccggctgg

SEQ ID NO: 78383 - DNA, 1161 bp, Zea mays
  unsure (1)..(1161): unsure at all n locations
  Clone ID: MRT4577_171509C.1
aatagcagcagcgctggcaacaacggcagccaccaacccggtggacgaagccatgggcgccttcttctcgaagcaggtggaccggcggaagctggtggccgccgagaagcgggcgctggcgacgcggctgtcgtcgtcgggcgacacgttcccggggtctgagcaccggccggcggaccggaagcggtggatggcggagctgggcgccggcaggctgcgcgtgcaccaggtggtgtggcccggcacgcacgactcggccaccgaccggatcggcgtgccgttcgtgacccgccccttcgcgcagtgccagtcgctgtccgtgtacgagcagctggcgctgggcgcgcgcgtcctcgacgtgcgcgtccagaaggggcgccgcgtatgccacggcgtcctggccacgtaccccgtcgacgtggtgctggacgacgtggccaggttcctgggcgagaccgagtccgaggtggtcgtcctggaggtgcgcaccgagttcgggcacgaggacccgcccgagttcggcaggttcctggtggagaggctcggcgagcacctgctgatcccgcaggacgaggcggtgttccacaagaccgtcgcggagctgctcccgcgccgggtcatctgcgtgtggaagccgcgcnnnnnnnnnnnnnnnnnnnnnnnnnnnnnnnncaagttcctggggcagcagccgccggtggcgggccgcgggttcttgtaccgggtggagaacacggtgacgcccaggcccgacaacccggtggtgtgcgtgtggcccgtgacgaggcggatccacggctacgcgcggatgttcatcgccgaggtcttcgccaagggcctcggcgacaagctccaggtcttctccaccgacttcatcgacggcgacttcgtcgacgcctgcgccggcgtcaccaaggcgcgcgtcgacggcaccgcgtgaccgcgatcgacggaccaggggtacccgtacgtgttcccgatttgattaggagatgcccggggcttgtagaaactagaggagtcgccgcgattacaggcaggggtccgtctaggcacagtcaggagtactatgtagtgtcgcatgtagttatcgagaagtatggccaatgcatgcgtataataggctctaaattttacactataaaatttaaacattgaatt

SEQ ID NO: 78384 - DNA, 511 bp, Zea mays
  Clone ID: MRT4577_17150C.1
aagaacaaaaataaccagatcgttacatgataaacattcatacgtttaaacattgatgattaccaatatgcgcaatgaactacccaaccatcgcaaactttaaccagcccatactacggttttccacgccaacattggcactagcaaaagggcaaactcttacatatgcaagttcatgggctaaacaggtctgtctgcagcaactcaactcatttgaatcattgcgggtaagcatggcctcaccctcaaaggctcctggtaccaaataatagcattgcacaccctccttgtgggcctgatgaaaaatttcaccttgtgccacccgaacaggttcatttcatataactagcacattacaaacttggtaacatgctccgccatgtgaagaaccaaaggtccttcagctcttaacggcggctctacatcctatcatgagcatttccaccaaaggcctacttacgtgtacagtgccatcccctgtacgaattcaccaaccttgatcagggtcaca

SEQ ID NO: 78385 - DNA, 336 bp, Zea mays
  Clone ID: MRT4577_171510C.1
cgtacgccccagaccggcaaccctagcgccggattccttcttctcggatccgcccgccgcctcgctggggtggttgtcacaggtgagcgagggggatagatacagcttgcgtggtctcattactgagagaggcatgggatgatgtccacacggtctttgaacccgatccgacatgttgcctacggtggtctgcccacagtctgagtcctgttccaccccaagtcacgctcacctcccgtgcttactattgccctactcctcctgggtgtcattcttctcgtcgactacttcatcagcggctcatgtgtaactggtacacgctgatagtctgttacc

SEQ ID NO: 78386 - DNA, 281 bp, Zea mays
  unsure (1)..(281): unsure at all n locations
  Clone ID: MRT4577_171511C.1
ttttgtgtttaccgacaccaagcctgcctccacgcncttcttatgccgttccgggcgcgattacaacaacaggtatgaggacgatatcaccgacctctcctgcgctccttacccgcccgtcacgcactccgatagagcactcttggaccttctgcttctacaacctgtatagcaagttcaaacaagccgtctttgggagctctattccccccatacacacctatatcaccgtataggaattcttgggactttacaataacatcaatcacccctaccaaatc

SEQ ID NO: 78387 - DNA, 204 bp, Zea mays
  Clone ID: MRT4577_171512C.1
gatcgtgctaattctacttctttttggtatcgccgccgctcccggcgcggggggttgtctactaccgcaggaggtctccgctgcaggatcggtggtccagcgtgcgatggctgcggctcctaccgtgcggggctacgggccagcgacgccgtcgtcgtcgtcggtggcgctgcctcggtcgcgatcgtgggtgcccgccccttt

SEQ ID NO: 78388 - DNA, 1038 bp, Zea mays
  Clone ID: MRT4577_171513C.1
caaactggcttgattctccgtaatttcaactggacttgaactgccagcaggtattgtcaaatggtgcacctccttcaccagtgccttaccagatgtgtaatgggcattcacatttggcaccttccgcgaagcatagcccttgtcctccctaagacccagccacctctgctccctttgtagcggattggttaagcgggattcatgcttgccatgaccaccatgtggtgccctgccttcctggacgggaggcatgtactgatctacatggagcctcctgccacctaagataggaagtgtatgctgctctccaattggcatcctgccaaactgtccattggcattgatctcaggcggtgtccgtgacaaaaaacgatcttgctgctgttccctgtaaaactgctctccgtgtccatgaggcattctgccaaccggatcacgaacatctgcaagagccggaacgaaatccacgggacgaggattgtactgctccttacgcaataccacaccagatgcactccgcgcatcacgggcagcaggaagtggatgcgacggcttgccaaaccctggaggcggcgcccccgaccgaggcctctccgccctaaccgcatccccagatccgaaccctctaccgccaagagcagcgaaggggtcccctggagcgaatcggggatccgagaatcggggttgctgctgtacgtgcgtggtcgaggtggaggaccacccgaagtcccctccttgcgtctgcgccgatgcggcgaagagaggccccacggcggcgacggcagggtcactaaagaagtggtgcgcccccggggcaacgggggacggggcgaggatttcctctcgcgggtgcgcagaaggagggttttggaggaggcggagtaggagaccgccgtcgaaagacgccggtgaggtgtgtgtggcagtggatggcgaggctgacgtggggcggccgccactgcgaccggaggagtcggccatcgggggcggcgaggacctgggcctctgtgacgatattttcccagctttggtgcatca

SEQ ID NO: 78389 - DNA, 451 bp, Zea mays
  Clone ID: MRT4577_171514C.1
gttcgggaatgtgtgcgggcacaatacgatatccaatcgctttgatgggattctgctggcgaatatatccctagtgcggtgaagactgggctacaatatggtcattcaggggtggacatgatggtgaatttctgcatgaattggatcgtagcggatatcaattccactcgggtgtttgacacccaacttatcagtcattgctagtgagtggatgttacgagtctttggaactttgggacatatgggagaagatcaccatgaccttggacagtgcgcatgacgggttggttgcagacctggcatcatgcagtgctacagggaagggtgccgcagtgagacatgatataactctcgagctctggaaatgactttatcatatcgatcggtgggaagacgagtttttatcacaaatgacgacatgacgcacatgaggaaaaggtggctgtcacga

SEQ ID NO: 78390 - DNA, 1321 bp, Zea mays
  Clone ID: MRT4577_171515C.1
cccccgaggtcggccgggagaacaacccatccctcgtggaccgaaccaggcgttcttcaacctcggggctgcggagccgcctcttggcctcttcctgttcctgttcgttctagcctagtaggctactaggctggagcgttattcggacacagaaactcctctctcggttttggcgcagccattcattttgcagtcacaattgtatagcagtgtgaaggatagaacacaagttgacagagacttggagtcatttaagaaagacaaagtgttacggatattcaaacttagttctgggcaagatgatcatgcaatcatgttcatggatgattatttgaaacaggtctcttttgctattaaacggtcagggggtaaagaccaaggtggtagtgaagtatttgagtggtttgagagatatgtggtcccttcaaaactggatgttagcataactcaactagagctgtgctcactgttatcacagggtggtgatgtaacagacaaacatatcacactattgatgaatgctggtctcttaactcgtcaacttattgatccaaatatttactggttttctattccaagaattggccccatattgaaaggcctatcccagggcaggaaggaaattctttcgctgttgaaccgtagaaagtacaaggagatgccgctttcttcactggagaatacaaagttaagattatcacctcttgatacgcggttcctccttcgcgatttgattggatctgggcacataaaaacagttcaaacgcccactggtttgcttgctcgcgtatcaagagattaatagagctctctgtcataatcctacttatctgtctgccttatctcttatctgatcatgcacgatttggtgattctagtttcgttttgcattttacctgttttcaaacagtattcaacatgaccccaactcgtcgatagtctttttcaaaaaaaaaaaaaaaaaaaaaaaaaaaaaaaaaaaaaaaaaaaaaaaaaaaaaaaaaaaaaaaaaaaaaaaaaaaaaaaaaaaaaaaaaaaaaaaaaaaaaaaaaaaaaagaaaaaaaaatggaaaaaaaaaaaacaacaacacagactggggaaaaaccagaaaaattcccaattaaataccccttgaaggggcatccccttgtccgccagctgacaaactagcgaagaggaacaacacgggccgcccttactaacagccgctcagactaaatccccattgggacgcgccctgatgcggcacataacccaccccggccgccgtgctaacacgcagcgcgaccggtgcgctctttagccccctcctgtccgctg

SEQ ID NO: 78391 - DNA, 2365 bp, Zea mays
  Clone ID: MRT4577_171516C.1
ccggccgggctcttcctgttcctgttcgttctagcctagtaggctagtaggctggagcagaaactcctctctcgtatctccctaaactgatgtagaacagccatttcatcttggtcatttgatgacatctctctgaaatcgacggagtcaacagatcaagatgacagaaccatcatcatcatattcattgccctctaaaaagcgacaacgctctcctgatgataatgaacattcactagacagaggtcgaatttgtttaagccttgatgataatcttacgttcaatgataccatgatagcacttcaattgatgcgcacacagtttccaaagctggataaggttttggcgcagccattcattttgcagtcacaattgtatagcagtgtgaaggatagaacacaagttgacagagacttggagtcatttaagaaagacaaagtgttacggatattcaaacttagttctgggcaagatgatcatgctcgtcgtcgccgccgccatctgcgccctctccagcggcagcatcgcggtcgcctcagaacagccatttcatcttggtcatttgatgacatctctctgaaatcgacggagtcaacagatcaagatgacagaaccatcatcatcatattcattgccctctagtgtgtcttatccaagggctatcctgtatgcctgtaaagctttagatttctggacatatgaaaacctatctttttatggacatatttgttcacataataatagcttatgtgtatatttattcacatacatgtatctgatcgattatttcaatattctactctacttttaatccttcagaagcttaaaaagtgcatgtttttgtcataaattctgtaaaggatttgcttttcatgggattatgataaaggaagttgtttaaatttgacaaatgctatcaaggcagtggacaagtaattcatcatttttgccttacacttttcatactaaactattttttatatggttctttcttgcattaaacttgtgcaggtctcttttgctattaaacggtcagggggtaaagaccaagatggtagtgaagtatttgagtggtttgagagatatgtggtcccttcaaaactggatgttagcataactcaactagagctggtaagtatcaagaattaggtattacttctgtgcagaattctatggccttttcttattagaggtaattatcatttgctattgaaaatatacagatttctgtcagaattttgcattgctactctttatgatccttttttctggtcaaatgttaaataaaactaggtgatgaaccaagatttataagatttattattgcgctgttgctatagtagcacttccacctcattgatatcttctattgaagaaatggtcgaatatatctaatatctttcattgcagtgctcactgttatcacagggtggtgatgtaacagacaaacatatcacactattgatgaatgctggtctcttagtaagtaacttcatatttattgctttaagatcactatcacggatattgaggccatgatttcaagaaagttatgttcaaattccaattccatgtactaaaagaataaatgtagctgtactcgtatcatctgttttcatgcgtgtctacttctacacctagcatgaaaataaaatgatttatcttctctttaccaattgtacttgcttaacattgctgtttatgctggattccttattccttccagactcgtcaacttattgatccaaatatttactggttttctattccaagaattggccccatattgaaaggcctatcccaggtttgtgcaccttcctaaatattttcagttcttgttttacgaagttgccagcgtggacatcttttaccatctgagttggctgtgttgagcagggcaggaaggaaattctttcgctgttgaaccgtagaaagtacaaggagatgccgctttcttcactggagaatacaaagttaagattatcacctcttgatacgcggttcctccttcgcgatttgattggatctgggcacataaaaacagttcaaacgcccactggtttgctcgctcgcgtatcaagagattaatagagctctctgtcgtaatcctacttatctgtctgccttatctcttatctgatcatgcacgatttggtgattctagtttcgttttgcattttacctgttttcaaacagcattcaacatgaccccaactcgtcgatagtctttttcattttaagagggtggttgggactccactctacgttttgatgttccgtggaaactccagcaactctgttccccaaaaagcgtttttgatggagaaattcgttttaagatgtgcacaaaaaaaagaattcccc

SEQ ID NO: 78392 - DNA, 554 bp, Zea mays
  Clone ID: MRT4577_171517C.1
aacgattgaatctctgttataattgtccacaaatgatacatgtaggtctacatagtgtaggaacataccacaaaaagtttggtagacaaaatcaaaaaaataaaaatatactttgtcgagtgtctagagatgacactcggcaaagaggtctttgccgagtgctagatgtgtgacactcggcaaagaatcctctttgccgagtgccagccgctggctctcggcaaagactgacggccgtcagctttgggacggctgttgacggccctttgccgagagccccctttgccgagtgtttgacactcggcaaactagtctttgccgagtgtcgtcctgtgccgagtgtccagcactcggtaaagagcctcgttgccgagagtctagctttaccgagtgcggcactcggcaaagacttctttgtcgagtgcccgacaaaaggcactcggcaaagattgcaacactcggcaaagccttggattccggtagtggttgttggtaactatatttgtgattagtggcacattttgtcagttacgaatgataatggatcacgaatt

SEQ ID NO: 78393 - DNA, 489 bp, Zea mays
  Clone ID: MRT4577_171518C.1
ctatgtgggccgggactgagggactcccttattgctgccaagctccacgcattaaacaacatactttgttatcggactataactgatatcagatctcaatgacgcccccaccactgaccggaagcatggaagaaagctgctggggtgcccaaagcgagatctaacaaagattacttgcgttgcactcactgcacggtgccacagctaggaacactcgtgctgccacaacggtacagaagcggcctgcgcacgaagggaggagggctgacaccagctagctgtttcactggctcactcactggctggtggaactagcacgataggccgcagctggcagtagcatgaaagtaagaagcggctggacggaggcacacaaaatctggctgaacggcaggagatagctggtgcaacataaaagccagagttcagtgcagatccgtggatgagcggaagaaacggcggttgttcataggccccgcccacctggcg

SEQ ID NO: 78394 - DNA, 571 bp, Zea mays
  unsure (1)..(571): unsure at all n locations
  Clone ID: MRT4577_171519C.1
ggtaccgcncccttctcgagttttttttttttttttttttttttttttttttttttttttttttttttttttttttttttttcgccaaattttataaattttaaaaaacaagagctttgtaccctaaaagtcacagggccaattaacaagtggtttaggggttattttaaaggaggtataaaagttggaaccaaggggtttgaaacagggaaccctttttttttttccaattccggatggcaaaaggtatgtaaatcttgcatccagttacccgcctgcacttttttaattctcctaaggaacaataaggttatccctacttgattacccattaacaccctttttttgaaaaaattttaacattaccacgggttgatacataaaaaatccataccctccaggggagttgctgattaattaaaacttaaacatccctttttgcccctaaaaaaacggaactacagccttttaaaaatttaaagtcccccgccataaaaaaaggggcattcaatcctgagggttctgtttatttttttctcgggggaatgctttaagaaaaccggccccaaaa

SEQ ID NO: 78395 - DNA, 399 bp, Zea mays
  Clone ID: MRT4577_17151C.1
agaggggatatcacataacattatcatatgatttagataaatacgcacaaactgtagagtaaaacaaacgggggcacttattacaaaaatttattttctcaagcccaaaagataaaagtaaatgatggctacagggcatggaattccaacacaggcgtggaaatgatcacacgcctgaacgaaacgtactgaagggaggaactagctcgttttttttttggtgatggagcaatatttgtttcctaaaataaagggaatgtatttcccgatgacaaggtgaaggttacttagcgcatattgtaagccggagggtcccatacctttgagcttcatgacacactgggttatcattttggggattcggttctccttccacgcaagccgagtgtccgatatggg

SEQ ID NO: 78396 - DNA, 299 bp, Zea mays
  Clone ID: MRT4577_171520C.1
aagcccaaaatgtgttaaatttgatatgaatggctttgacttatacatagattccaaacacaaaccccgcaaggatctaagtaggcatatgctccaatgggcatccctgcgcagacagttatagcagtctcaatccgtcgaggtggaagggtcaacgaggatcaagtatatcggaactaaaattacggcatgcaaagttggcgaacctaatggcaagccaggcgttgatgctgctacgccaggaggttattttatcctcatctggaggggagggtgcggcccttttggtttgggcactg

SEQ ID NO: 78397 - DNA, 462 bp, Zea mays
  Clone ID: MRT4577_171521C.1
aaaacaagggcggacagcccaaattccgcggcagttaatggccccccctttatccggcattaaagggtataaaaccaaccaggggcgtccgacctcccagccccaaaaaactctggcaaacagttcgggcagcggaaacaaaacaacggaaattaaacgatccaggacaaaatataacaaatttccccaggaccgagtcatctataaaaaactggccccccccaacaaaaaaaaatgggccccgccccccgaaaaatccaggaaaagggccacgaggccaatcggttcaatttattcaaagcggcccttgccaaaatatgggaacacgggccaacgatcagggattcagggggaaccatctctgctatagtccgggcccaagggcttggcgggaatccgggggaaaagttcccggggggaaaatccgaaccattgccctccccagatcgggggccgggaaaa

SEQ ID NO: 78398 - DNA, 198 bp, Zea mays
  Clone ID: MRT4577_171522C.1
gttctttttttttttttttttttttttttcaatgggttgaggaaacctcattgtttatatttttaacaaatcacaaaacaactataatttaatgaattcttcataggacggtagcccataatttaaacacaaaaaggctacctttccaaaacccgcatggatccaacgtccaggggcacccttcacatttattttttc

SEQ ID NO: 78399 - DNA, 561 bp, Zea mays
  unsure (1)..(561): unsure at all n locations
  Clone ID: MRT4577_171523C.1
gatggcggcgtccatggcgtcgtcgtgggggcgatcgatcggggagacggtgtttgagaccgtgtcgttnttccactcgggtcatcctcacctacatcttggatagctcttacgttcgttctttttcctggtacaaactctccaatatattagggggggacattattaacatggaatgaactttcatccataaaagattctatgacagtgacaggtatgaattacattaactgaggataatattgtgtcacacttttgcacaagtactaacatgagtacagagcatggtcacctttgttcttttaaaatgctaatgcagtagagagcatggccgttgggtgagtcaatgactactaggatgtctcaccgcaaatctgaaacaggttacaaattggttaatcaagggatccgactaggattttgagtgtccagaagtctcccaagaccctacattgtttgagggagtgtacaataagaatgaaccttgatcctcttgaagagcatgctgatcaagaaaattgggaggtacatcctagtcacttagatgctatactagtgtta

SEQ ID NO: 78400 - DNA, 376 bp, Zea mays
  Clone ID: MRT4577_171524C.1
cttatctctttaattgatacatgtgtgctgtgtgagatgtgaaggggaaatcccaggatttggtggagaagaagcacagttcaatttgacgcccgccaggtgttcgacgaaatgttcgaattgggtttcgtcgttgattttgacgcctgccaggtgttcatctcaaactacaatcaccgttgaaaatccgaggcgacgggaaagttaggtggcatcaccagtgatggcgttcgatccttgaaatgtacattatgtgataagagtaagcgtcactagagaatgggaactcctaggcgcaacaaatgatggtcctgtccatcgtggctgcgtgaacatatccgatttacctgggttctatatatactcaaattttttt

SEQ ID NO: 78401 - DNA, 359 bp, Zea mays
  unsure (1)..(359): unsure at all n locations
  Clone ID: MRT4577_171525C.1
aattattnttatttttcacaccaaacctatatttttttgggggaactttaagttacattttggcgtttccccccacgacacaaacaaggtgcgtgtaaaaaacccgggatgcccaaagggcgggggattttttccctcccaaagagggaagtgaaaaaaaaggggggctaccacaaaaaaaacactgttcccttgggcctgggggaaataaaaaaaaagggggcgccccaaaaaagccccccccatttggggcggcaaaaaaactcttatccccaacccattttgggggggggggcccccccatttttggcaaaaaatggcccttaaaggccactcccaaagccggggttttctccggt

SEQ ID NO: 78402 - DNA, 228 bp, Zea mays
  Clone ID: MRT4577_171526C.1
ctagacccgccgtcgcctgctgatgctctccgaaccctatccctcctcatctgccgggtggaactacggcacccattacgctcaaacatgctgaatagctgacgcaacatgcactggctcggacacatcatgaacatccgatacttcatctacaccaagtgctttcccaaggataaagctatcaaacatcccttggtgatgaacattggtaaacaggctgacgaaaga

SEQ ID NO: 78403 - DNA, 852 bp, Zea mays
  Clone ID: MRT4577_171527C.1
ggccgcttttttttttttttttttaaatcctaaccacacatatgttcattcacttctacatacaagtctcattcacaaaagtacacaaaacacaatcttgtccacatataattggtcgtacactcatacatgtccactcttaaattttaacacacaacacataagtattaaaacacgattgttcattcacattcacatacaagtctcaaccacacaaatatacaatacatagtcatgaccacacataaatgatcatacatgttcactaaagttttaaccacatagtatgtaagtcttaaacacgcgatacataaactagaaatcatgtggcatgtcgtctggatcacttgatatatcttctatgacatctaaaaccctaatctctaaaccctaacgagtatagttcttacctcctttgtttttttttgggaccggaaaaatacggttaaaatacgggaaaataccggattttcccgagaattccgaaaacggacggtaaatatgtctcaccgtttaccgtaccgttttcgtaataacacatcccgtttccgtcccgttttccgtatatcccgaaaaatatgaaaacggtcggaaaaatctggtaaacggtaccgggaatttaccgaattttaccgaccatttacatccttaatcgtatctctcctgttttacctgactaaccagaaagaaagaaacaggcagagaagtaaccctggatgcatgatgcacgcagctgctatacgacgccgacgaactggaggagacctcgcgggacctctcagacgtgttcatggaggcctgcgcgatctacaggatcgtgtcgagcgagcaggtgtaccaggagcgtcaccc

SEQ ID NO: 78404 - DNA, 524 bp, Zea mays
  Clone ID: MRT4577_171528C.1
agcagtggtaacaacgcagagtacttttttttttttttttttttttttttggaaataaaacagaaatttatgagatgcacccggtttgtcccttaaaaccgggtgtgacacacatccttggtgccctcaccggcctcgacccctccctgttttaccaaccttgtgcgtgtccatcaacgacgtgcacgggcaggtgcctagctctgctcatgggcttaaccaatggtgtaccatcctactattcttcatcgggaccctcgccacgtacactcaatggtggctcgacaggctgctagggttcttcgccctgtcgactgtgttgtcctttctgtgacatcctctccaccggtcttcctgtgtcgtcttccgttcatagcgccctcacagatcctcattggcgttgtgctatggaggaagagtatccggccctacttgccaaccacacctaggaattggtgccccgtccccccggcaacaatgtggcgactggcgatacccgcgtactctgcgttgttaccactgct

SEQ ID NO: 78405 - DNA, 340 bp, Zea mays
  Clone ID: MRT4577_171529C.1
gggtgggggttttttttttttaaaacacggaccccaaaagctttacttggatccaagggcttggatgtgctttatgtacaagggcaacacaatttcatggggtggttagcacattcgttatgttattttacaacaacacgagcttcttacgtttgcattaaattcgcatatgttggatattcttcagcgaaatgcaaaattggaggtttctttctaaccaaaacagaaaggggtagaaaccgtaacattcccagttttacatgatcgacggaattgagtcatttttattcgagaagaatgacaggtttcgaaatgcattgaggctatttggcattagggg

SEQ ID NO: 78406 - DNA, 353 bp, Zea mays
  Clone ID: MRT4577_17152C.1
caaaaaaatacacatacaaaaaaaaaaaaaaaaaaaataaaaaaaaaaaaaaaatgggaggaggtaaaatcttgctggtccttatcgaccaacccttacttgcgcgtgcttgcaacttcttattgcttctcttaatttgaccacattgaccaaattaccctaagtcttacacctgcataactgtgaaaacccccatgttacacaccttaatatccttcctgctcatccccctttctgcagatggatttataccaaacaggttcgcccttaccatcttgtccaccatgtgcttagccacatggacaatttctttgccactcccttaagcgcatttataagtggcggttactgtg

SEQ ID NO: 78407 - DNA, 650 bp, Zea mays
  Clone ID: MRT4577_171530C.1
atctccctactcgactctggcggcggccgcctctccgcctcagcgaatagcctgtcgcgacctcttcgatcatcttcaactttctatcatgcgcgcacgtatatgtcgaaccggatgatgccgtgggagctctgaagaggatgagggttcgcatgacagttaccgtggtcgtcgacctagatgtgcttctcgacatgcgcacggtagatctcgtccaggtcttccccgcgagcgccaggagaatgttccagaggatgctgaacaggaagcccatggcgctcatcaagaaactgcgcgaggcgaaaatacatgctcctggtgatgggaaaccatagacagtttagacacgtctccgtaacatcgatcattgtccctgagatgatggtcagtattgttgtggactacagcggccagaacttgaacgaggttgagatcaagactgagatgatcgggcactacctggatgagatctccgtctcctataagccggtcaagtatggtaggaccggtatatgtgccacccactcctcgacggttattcatctgtgatgagctgatacccggctctgtagtctcccaagagtcagatggcaatgatcgttcagcttctctacttgttgtgaacaagttaaatgcccaagatattttgt

SEQ ID NO: 78408 - DNA, 404 bp, Zea mays
  Clone ID: MRT4577_171531C.1
gggccaacaaaaacttgaatttttaccccaacttattttatttcattccccaacaaagttcgcatttttttaaagcaggggggggggggaagtaaacagattccagcccttaatccgggtcccgaccccagacacacatatgaaaagcttttatgcccgagttgtttgatcttgccccccatttaaggaaccactcctggtcatcatgaggctgaaaaagttcccgccccaatcgggtgggcaaatttttcggccccggaacactcagggtctttggtgaaagcgaggcctttggtttttccctcctcgggttttttcacaaaccccacccccaggcgttcaaaggggtcacatgccttgggggccttgtcccctgtttcttttttttggcccaacccccgggg

SEQ ID NO: 78409 - DNA, 720 bp, Zea mays
  unsure (1)..(720): unsure at all n locations
  Clone ID: MRT4577_171532C.1
ccggccgggacaacactttcaactccatcaacactcccaatacctttcaccaaagcaaaaatgtctgacaacagcgctaccatcccccaggaccctacccaggctcaggaccagaccatggccgagaacaagggaaagggcaaggctcttgctgagcaggtcaccgaggacactgctatggatgaggatgaggatgacgacgagagcgatgaagaggaagaggtcgccgaggctgacgaggacggcttggaggagattgacctcaacaacattgtcgagggtcgccgcacccgtggtgcccagatcgactttgccaaggccgcagagcaacaccctgccgaggacgaggatgaggaagacgatgaggacttccagcccgccgaggacagggacaccaagatgtccgactaaacgcacatcgcgactttcactcctgacgaaccgatctatacagggtggaatgggtacgatgatatgattttggaactgagtaataaacaaaagggatggggcgtggatgattatacctgttttacccacgacccccaggcacatactcgggggtctaggcggcttggagtcgtggatagcatcggccacctttagcattcactgctttgctttgcatatattctgtacgcttacagttcacgtgtagaaagagncacacagaatgacattaatacagtcnaggaaaaaaaaaaaaaaaaacccgcggcc

SEQ ID NO: 78410 - DNA, 346 bp, Zea mays
  unsure (1)..(346): unsure at all n locations
  Clone ID: MRT4577_171533C.1
tttnttttnttttgacgaatattttcattataaattatgatgacatggcagngatgtgccaaagcatttgtgatagatacaatagtcattagaaggaacacatcataagcattcatatcgtcaaggaatattacacattacaaccaaaatatcgcatgaatttgttcactgcaaatattttttgcttcttgatctcaagttcatcttaaagttgttgaacctttgcagaaattgacgctatggagcttttcttggatgcagaccgaagaccaacattgcataggaacacactggagcccggtacgatattagaaacaacttttgtaggatatattggttgttatcc

SEQ ID NO: 78411 - DNA, 109 bp, Zea mays
  Clone ID: MRT4577_171534C.1
gtgagcagcctcactgctgtttgagggggggtgttactaggcaattggctcctaaatcgctgatacgtgggcacgtgtccatgcctgtaaaggggtgatgctcactaac

SEQ ID NO: 78412 - DNA, 131 bp, Zea mays
  unsure (1)..(131): unsure at all n locations
  Clone ID: MRT4577_171535C.1
cacaactcctcgcggtccatcagcagtgacctgttccgttccggaaacggccggagagcaacgtcacacgcgctaattttggcctctgncaggcaacagaacagagcacgccgacctcactggtatataaa

SEQ ID NO: 78413 - DNA, 958 bp, Zea mays
  Clone ID: MRT4577_171536C.1
gttcttgtaccgccacctgacgtacagggacaacttgaccgttctgggcgcgggctaggagcgcggacgcgtgggcaacctcgtgctggggcacgtcgagcaccaccgcctggccggcgtcgtcctgttcgcgggcctcgacgacgtgctggacctccgcctctttgaccagatcagggagatcagcgcgttcggtgcgtggccggtggcgacgatgtggcgcgacgagagggaggtcgtcgtgcggggccccgcgtgcagctcgtccgcggtcaccggctggttctcccaggacctgggcgacgtcaccgtggctgctgcctctaccacctctccaccgcgagggcgaggccttctggcgaggtggcgggccacggcttcgccttcaacagcttcttgctctgggaccccgagcgctggggccgctacccgacctccgagcccgacaagtcccaggactccacgaagttcgtccagcaagtggttctggaagatcttagcaaggtgaagggcattccttccgattgttcagaggtcatggtatggcacgtcgatacggccgggggtggtccctcgtctccgcagaacaagaggagatagagagctgaacaccatagaagagaacggacgagcctggaggacggccggagtggtgtacactgtacatgcatggctacaccactgagatgctgattgtcctcctagctagttgcaaagaaggaaaatttttggttttctcaccggaggatggatccacctctgacccccccccccccccccctccatcataatgtgcgattttctgctattcttttttttccttaaaaatgtgatatatgtatattttcccttttctttttactcaagtgggtttaggtgaatacaaacataataacctcttgaagtgtttctcaagggttgtatggatagatggcaagctaaaaaagaacaacttaac

SEQ ID NO: 78414 - DNA, 833 bp, Zea mays
  unsure (1)..(833): unsure at all n locations
  Clone ID: MRT4577_171537C.1
ggccggccgggccgcggaaaaaaaaaaaaaaaaaaaaaaaaaaaaaaaaaattagggcacctgggtgcggagacacagctaatcacggcacgacgtgtctttgcagcgcgttcggcgcgtggccggtggcgacgatgcggcgcggcgagaggaaggtggtcgtccggggccccgcgtgcagctcggccgcggtcaccggctggttctcccaggacttgggcagcagcggcaccgcggccgcctccgcatccacggcgaggcctggtgagctggacgtccacggcttcgccttcaacagctccgtgctctgggaccccgagcgctggggacgctacccgacctccgagcccgacaagtcccaggactccatgaagttcgtccagcaagtggtcctggaagattttagcaaggtgaagggcatcccttccgactgctcagaggtcatggtatggcacgtcgatacggctgcgccttctccctcgccttcgcacccgtctttgcagaacaagaagagaagatagagagctcaactctagaacagaacgggggcgagctgtggatggaggacggctgagtgtgtacgttgtacatgcatgtctacgccgtcaagatcaagatgttggttgcccccctctaggtacctgcaaagaaggaaaaatttttgagtttctcaccggaggatggatcagcctctgacccccccccctctatcatgatgtgcgattttctgctattcttttctttccttaaaaatgtgatatatgtatattttcccttttctttttactacaagtgggtttaggtgaatacaaacataatnccccttgaagtgt

SEQ ID NO: 78415 - DNA, 198 bp, Zea mays
  Clone ID: MRT4577_171538C.1
atttctaaaaaaaaaaaaaaaaaaaaaaaaaaaaaaaaaacttgtaccatacccgaacgaaacgataaaaagggcaaaatactaaaaaaattccataacacatgacagacgataaaaacatacatcttttagcccccacctgcgccctcttttgaaaggggatatacattttaaaatttccgtcacactacaggggcc

SEQ ID NO: 78416 - DNA, 216 bp, Zea mays
  Clone ID: MRT4577_171539C.1
gactcctcttttttttgtttttttttttggaaggatcgacagtagaagcgtgtgccaccttctttaaagcctgaaagacccgtaggctttatgcttgtactttctaggctttgactatgaggtatcctaggctagacccgtattatgcctctcccactcctgtggatactataaggaaaaactatcttcgattgttgtgaagtagactggagtgaa

SEQ ID NO: 78417 - DNA, 342 bp, Zea mays
  unsure (1)..(342): unsure at all n locations
  Clone ID: MRT4577_17153C.1
ggtgggccagttttgattcaattgcagtgacatgccatcatggaccagtatgtagacagatttttgtttcgagaaaaaggatgtaaccagaattnnnnngggaaaaaaaaaagagaaaaaaaaaaaaaaaaaaaaaaaaaaaganaaaaaaaaaaaaaaaaaaaaaaaaaaaaaaaaaaaaagggggggggacctccccgggcggccgctcaaaaggggaattttgcaaaaatccataaaactggggggggctcgagaatgtttttaaagggcccaatttgccctatttggagggcgattaaaaataaaagggcggggttttacaaaaccggggcggggaaa

SEQ ID NO: 78418 - DNA, 273 bp, Zea mays
  Clone ID: MRT4577_171540C.1
tgcaatgcaattctaagtgataaggcagaactttattcagatgatattcaagaggcttgtaaaattgatgagcttctcgattctgtcgaagaactgaacaccctgatcttcagtgcaacctacgagacgaatgacagcgagaaaaagaccaagatagcgaagttgcttaaagagacattgccaacatggcttcgatatattgagcagagattggaaatctttggagatggaacgtattcagtcggaagccagttgaccattgctgatttgaag

SEQ ID NO: 78419 - DNA, 230 bp, Zea mays
  Clone ID: MRT4577_171542C.1
gcgcctctagattccttctctctctgtaccgccacctccgcctgatgtcatccatgacagggatcgtcatgttggactctcaggattagcactgtgaatcgtaggccaacgctggggcgtccaagacctagccgcagcaagctggcaccgttcgtaagaactgattcatggtcttcaagaagcgtccctacaaggttgttgaggtctctagcttcaagactggtaagcat

SEQ ID NO: 78420 - DNA, 215 bp, Zea mays
  Clone ID: MRT4577_171543C.1
tccactcttcctcggaagatgatccaaatcgaccctaatctcggtctaatcctcaggatgaatctgatgaactaatctaaagatggatagactaaacaagtatcagaacaaggatgatcgtcaagtggacttcacctaacatcactaacctagtgttattcatgcaaacccattgcatttatcatctccttgtgttttaaaaatctttttcactt

SEQ ID NO: 78421 - DNA, 588 bp, Zea mays
  unsure (1)..(588): unsure at all n locations
  Clone ID: MRT4577_171544C.1
tccgaaactgtgggcaagttgaggtacgatagcaggnacacagacttacaaaaagcaaacaattcctgtcaacaaaataatagcaagtgcatgcctgacgaacaactttataacgatagagttccnagctgaggaaaaatcaaatgatatatccgctgaaggccttgttgatggttcaggaaatctacagtgtgatgagcagatgaaagcaaagggggatacatgtcagaaagattgtgaaaacttttgtgttcatagtcaacactattctgaagcatcaagctttgcaaggtatggtgagcatagtactatcgatgagaatcagtttgtggaagatatctccccaagcactacaagcacgttgcatgaactagaaactccatcgtccagaggagataatcttcgcgaagaagacaaccaaagcataaacggttcctgggaagagagagggttatggataagcagcctaggttggcctgcaccaattgatactatgagtccggatagctggcatcaggaaacaatgggtgatattgagaatcataataatccaattcaattcaatgaccgcccctggatagagtcccc

SEQ ID NO: 78422 - DNA, 505 bp, Zea mays
  Clone ID: MRT4577_171545C.1
agctcggtaccacgcatgctgcagacgcgttacgtatcggatccagaattcgtgatttataggattcatcgtttgaatgcggaaaacgagtactttatcattctcgtcttttgctgggtagacgagaacgctcacgatatttatttgtaaatcactaaaaatagcaacgactgttccaagaataccaggttcgttttttacttgaatttcaatttgcgaacttggttgatgtgctcctgttaattctactaatgtgtgcagtactgtagattcagaaatgattccaactaacttgccggcctttgtaacaggaagacagccaattttattttcaaaaaataaagtagcaatttcctcaacgaaatcgagaggatggcaagtcataacaggatgtttcataataagttcgagcggttgctgtagcatatcgattgaaacttgttcatcttagatagacggacttgcatttattacatcccgatcagaaataaatgctacgacgtga

SEQ ID NO: 78423 - DNA, 154 bp, Zea mays
  unsure (1)..(154): unsure at all n locations
  Clone ID: MRT4577_171546C.1
accaaaaaacangaaaagccgggcagggttcaaaagcacgagcggagaccaatacacagaaccaacgaagacccggcaacccaaaagcaaaatcacagcacgaacaacaacaggcactcacccgacaagaccacaacaagctaaacccgaacaa

SEQ ID NO: 78424 - DNA, 298 bp, Zea mays
  Clone ID: MRT4577_171548C.1
ctctttttttttttttttttttttttttttggggtcttttggtttgaccttgggaaacccgaaccggtacccggagaattcccagcttcccctatagggggtcccattttaccttggggcaagaagggccaaagctggtccctgtgaaaaattggaatccgtccacagttcaaaacaacatccgacccaaaagcaaaaagcataaagcccggggggccaaagggggaagcaaagggacactaatgggggggggctcacagcccatttgccaggcggaaaacctggggttccaggtgga

SEQ ID NO: 78425 - DNA, 626 bp, Zea mays
  Clone ID: MRT4577_171549C.1
gccggccgggtactgaagaaatcacacgaatcctcttcctcgagtgctcctcaaccaaattcgaagttacaagcggcgaaactctcagcgatcatgtctggccgcggaaaggtcgagaagggtctggacaaggtcggcgccaagtgccaccgcaaggtgctgcgcgacaacatccagggaatcaccaagccggcgattcacaagttggaggaggaggggcggtgtcaagcgcatctccgggctgcatctacgaggagacccgcggagtgctacaagatcttcctctagaacgtcatccgcgactccgacacctacaccgagaacgcccgccataagagtgtcaccgccatggacgtctgctactctctcaagtaccagggccacaccctctacggtttccggcgggtaagtcggccccatactctccgaggagaattatcatggctgcggagtacgatggggtacgagttgtgtgcttgttctagtatgcgctgtctttatccgcgctgctttctgtggaacatgtgctgcatcactccagtttctaatacatgagctgataatatctcgctgctggaatcaatggaatggcttcgtttctaaaaaaaaaaaacaaaatgacacta

SEQ ID NO: 78426 - DNA, 158 bp, Zea mays
  Clone ID: MRT4577_17154C.1
ctatagtctgaattaccggctcgaattaccgggccggcgcatgcgtcctgctgtcaagcgccaaattactcctatcggcagcaggcgtgcagatcgaggctcacgacgaagcgcagaaccatgaggcagagtgccaattatgctgattgacatggatt

SEQ ID NO: 78427 - DNA, 106 bp, Zea mays
  Clone ID: MRT4577_171550C.1
gtttatcttggctggaggccaagtacaaatgatgggacggtatagatatcatgtgtgtcgacaatcgcgctgttgatcatagtcttagtgactgatgtgtaacttg

SEQ ID NO: 78428 - DNA, 353 bp, Zea mays
  Clone ID: MRT4577_171551C.1
aaaaaaaatgggaacggggtggtatattggtttattagaataaaaatgtttaaaaactggcggggggaagaggaaattaaaattcagtcccctgaatttttagcaaatcctttggacaaaactgttgcagggacaaactggaagggcgaatgggcaatataaaaaggggaagggggcggtttatttgaggggaacgttaaactggagtagagtttccaccccgtttggggggtgtttgttggcaggatgcagtgtttggatgggggaaaaacctttggggttttataatttgccggggcctccaataacggggaagtgggattccggggccaccatgcggtggaccccaaaaa

SEQ ID NO: 78429 - DNA, 318 bp, Zea mays
  unsure (1)..(318): unsure at all n locations
  Clone ID: MRT4577_171552C.1
tctgcccattctgtctctcagttgctcaccatccgtccgcggctactgccctcttcgacaacacgcatggaggggagctgcaatctcggactccacactcggtccagggccggctgtccaggggcggaaacgcgtgctgggagctgcgctgcctcgagcctgggggggaggctgatggtcanatgcccggcggcgagaccattgggggaggtgatgatgctgccagcaccttgttgagggggactggcgctggggagcgcgggccgcgggctgggggggagggcctagggggcgctgtggtcggggggggggagggct

SEQ ID NO: 78430 - DNA, 405 bp, Zea mays
  unsure (1)..(405): unsure at all n locations
  Clone ID: MRT4577_171553C.1
cccgcgtccgcccagcgtncgcgcagcgtgggggtgggcgtggttctactcgtggtacgggtcgggttaagggtcgagaggctctccggggttaggtttcgtgggtggacagatcgagtatggcagagtaagcatgttgagtaccgataattcgtcggcggccttgcctgggccacgaacgaccactcggtgcacaacgccttcagaacctacggagaggtcctcgagtccaagatcatcctagatcgggagacgcagaagtgccgcgagttcggcttcatcaccttctccacgtagaggcgatgcggaacgccatcgatggcatgaacggcaaggagctggacggccgcaacatcaacctgaacgaggcccaaaccaaccgcggtcccgcaagccgaggccgcg

SEQ ID NO: 78431 - DNA, 513 bp, Zea mays
  Clone ID: MRT4577_171554C.1
gcgttcttccagcgtccgtgttttctttggtgctgggtattatgtttggcaaaaggaggaatggttgagcaaataaagtaattccagattgaaaaaaaaaaaaaaaaaaaaaaaaaaaaaaaaaaaaaaaaaaaaaaaaaaaaaaaaaaaaaaaaaaaaaaaaaaaaaaaaaaaaaaaaaaaaaaaaaaaaagggggagggagggaaaaaaaaaaaaaaaaaaaaaaaaaaaaaaaaaaaaaaaaaaaaaaaaaggggcgccccttttaaaaaatccaaatttttgccaccgccttatccctaactttaaattttttttttttggggcccataaaataaaaataaagggggcgttttttaaaacaggcccgtggaaaaaacccttcctttcccaaattaaaactctttggaaaaaatccctttttctgcaggggggtttaaagaaaaaggcgcctgctttatttactttttccaaaaatttgtccattttaaaagggcaaaagggcccccccc

SEQ ID NO: 78432 - DNA, 384 bp, Zea mays
  Clone ID: MRT4577_171555C.1
cgtatgagaagacgacagaacaagcccccagcgcttgtaaccaatatgcagtcgggggggaataagtacactcctcagtgccaccaggcttccgccacaccttcatatcgtcctgatctgcttcctccgccagtatcttccgactatgcaggaaacaacaacatcgataacacctcgatgccaatggctgatgtgtcaaattacctgcccacgcccactaccagcaacgtggacatgaggtacccatcgacaagttcagaaacggaagcattcagatacgcttctccaatagaggatttgtatggatgggatgcggaactcgaaaggcgtgaagcttcaccaagccgggactcgataagctccaccgaaggtcttgatgccttt

SEQ ID NO: 78433 - DNA, 129 bp, Zea mays
  Clone ID: MRT4577_171556C.1
taatcttttttttttttgttattgcttttaataaatgcttatacttccttgcgaatttagggtttagttaaccggtcttaagaagaacgatatcacaagctgaaaccatatcttgaacagacgccggca

SEQ ID NO: 78434 - DNA, 455 bp, Zea mays
  Clone ID: MRT4577_171557C.1
gtaagctcggaattcggctcgaggtgctaggtcacacgcagtttacaccactaggctaggttaggccaacaaccgctggcaagaagcatgacgggcgctcacgctcgcaggcttgcatgtggagagccgatcgcacgacagctagcacacgatggggaggccattcaagatgatggtagaggctgatctgctggccttggccctggacacatccaccgtctaggctaggtgcataaataatacaatgactgctaataatgaccacgcgacagtgcggtcgcatacctaccggtccttacaccgtcttgtttgccgggcgtacatagacacaagcgggctgcccagcggatggatatctggaagctgacatgccagcacaacgatgccatggagggggaggagacgaacctgcatcatgttgccctgcatgggcagaatgcccatcttctggggca

SEQ ID NO: 78435 - DNA, 298 bp, Zea mays
  unsure (1)..(298): unsure at all n locations
  Clone ID: MRT4577_171558C.1
cacgccgtcncggaagggtgcctctgcccccttcgtgtaccccatattcttgtgttgtnnaatccanncggaaacccaatctgtgataagtannatctgttctctcgttgtgtcgagtttccnnncaaagtcgnnaaataaaactcgcactctgttcaaacctctctcttcgagccctcgggccagtnatctgcatttgttntnntctggcggcnnggggtgcccgtcgcttgtnncggggaccccggaccgnnccatcnnttttccttcaagnntttggccccttgacnccctgaaa

SEQ ID NO: 78436 - DNA, 148 bp, Zea mays
  unsure (1)..(148): unsure at all n locations
  Clone ID: MRT4577_171559C.1
accaagaaaagcgacncccgccncnaggganagggacggccggagccaccacaagcangnaggcagcccccagaacccgcagccagaaagcccggaaggggcccacccagagnccancnncacncaaaannanccaagcagcggccaa

SEQ ID NO: 78437 - DNA, 236 bp, Zea mays
  Clone ID: MRT4577_17155C.1
aaaaagggaattattattggggaatatacaggaaaaaaaaaggggggaagggaaaagagtaaatagagtgataaataccgggtgagaacaaacaaataaaaacggggtgtgtttaacacgataagagaaaaaaaacccccccccccctcccaaacaatatcaggggagccccttcccccgcaaaaaggacccaccagaggggtccctccccaaaccttccaaaagaaaccccccca

SEQ ID NO: 78438 - DNA, 656 bp, Zea mays
  unsure (1)..(656): unsure at all n locations
  Clone ID: MRT4577_171560C.1
aatagcaggtccagcccattttcgaagcatgtggccgatagagaggtatctaatgagattgaagggttctgttcatacaaaaagtcattgtgaaggatcaatcatggagtggtctatgtttactgaatgccttacattttgtgctcgctatttacatggcgagtctcaattgaaccatctggatgctaatgatgaagattgtagtacaactcctttcttccatataattggtcgtggattgtctggaaaatgcatagttactttagaccacaagacatggctacaagcccacagatatgttttgttcaactattacaatatagggccttacttggagtaagttatctatataagtatatatcttctcatcacatgatcactaccttttgcatgttgaagtgataaaatgacctttacagcaagcatgctcactatctatcctcaaatggtcttcaaaataaacgagatatcaaccacatacaacatcaatcctttcatgagtggcttaggttgcatgtaagtaagaaataaacttaatagatttatttgagatggaattcacatatactntaacggtagcatttcaaattcaggtggaagatacgtgtgaagaagcatcagacgagattaatattttagccaaagcaccaatgatg

SEQ ID NO: 78439 - DNA, 524 bp, Zea mays
  Clone ID: MRT4577_171561C.1
tttttttttttttttttttttttttttttttttttttttttttttttttttttttttttttttttttttttttttttttttttttttttttttttttttttggggaggccctttttttttttggaaataaaaattacgggcctaagcccccattgagggacaaaggaagctgctcagggggggggagtaaaaaagccccccaattaaaacattcccccccatttggaaaggcaattcaaattggaaaaaaggggccatggccgggtttttaaaaattgggcaattaaacaaaaatgggggttttgcaacgtttttgtttaaaccctccacagaacatgccttaaatggggaactagacctttttaaacaggaggggaattggaaattttaccaaacctgggatttgggggaaggcccaacaaacccttgggggggtttctggaaaaaaaaaaaatccctttccaaaaaaaagggccccaggaaaaaaattggggtcacattacctggggctccggtggatttgg

SEQ ID NO: 78440 - DNA, 288 bp, Zea mays
  Clone ID: MRT4577_171562C.1
gtagtctagaagaaaagctagttctctcctcctcagggcagtagaccagccttgttctctttcggaattcgggaaaaaaaagaagagcccgtcttcatagcgagccagctgcatcccaagtgtaaaaaaaaaagagaggaaacagctgcgaggcttaccctttttttctccccagttttgttaccctgatggttccttcctaattctcccttttctgcacatgtttttaggggaattaatgacattttccttttgttgaataataataagaatgggtgggtggtggca

SEQ ID NO: 78441 - DNA, 381 bp, Zea mays
  Clone ID: MRT4577_171563C.1
acgcgtgggcgccaaaggccaaagaaagacttaatggtgcaccgaaaagacagggagaactgataagaaggatgggctatctgaagcatatactgagatcctttaccaggactaaggctttaaagggccagaaggtcaccgttcactgaaccggctactggaaggatagtgatctgtacaaaatatattaaagattcattgacgatggggaatattttaagaggatgttaaaggtcagggttcattaatcaaaggttgggaccagggatttttcgaataaaaatgtagtatgattatggttgggagcaaaattaaatcttgtataggttacttaactatatttaatttacatatctggggtatattaaaaaactcattttt

SEQ ID NO: 78442 - DNA, 362 bp, Zea mays
  Clone ID: MRT4577_171564C.1
gcgcccacgcgtccgagcagctgcaggagatgggcataattgatgtcgatcccaagggtggacgggggatcaccttccatgtgtggcgtgatctggaccaagtggctggaagggatgctgttgaagcttgatcaatctcatattttgtttctatgatgacatgtttgattgttgagatggcttcactttatttgcactttggattatgatttttgtgttaagaggactcaaggcattcttatcttttgttgacactttattttgcctgagtacctatttattaaaacctatttttttttttgggaattgtcttatcttatattcattacacgtattttgtttaggatcattttatttgcact

SEQ ID NO: 78443 - DNA, 272 bp, Zea mays
  Clone ID: MRT4577_171565C.1
ccggcaaacccacaggcagggggggcacgaacagacaaccaaaggccacggcggcaaacaaaaaaggggacaacgaaaccggccacccggaagccgcacaggaacgggcgccgcgacaaggggggcgcgccacatcaacaaggacacccgcagcacgcagcaaaacgcccccgaagaaggccagacacgcaacccggcacccgagacagaccacgccagccgcacgacccggacgaccaagaagcacgccgacccgcccacccaagaaggcc

SEQ ID NO: 78444 - DNA, 365 bp, Zea mays
  Clone ID: MRT4577_171566C.1
cccctgttgttgattacgctgctatcaatgctccatgggatgctgtggaaaccattgcggccgtcaaaactgacagcagctggtgaggctagagctaatatagtctctcaaatccctgctgagcaccacaaaaagaactacactgccttaactgatgccatcacacgcactgctggggacatacagaatctaagggctcaagaagacagcaaggtgaaccaaaccattcttatgactacagcagatgctgcttatatgaaccacatgcgctacaagatcatcaactaggcccctcgcccaataaaggatagggactgagattacacgctggctctccttgaagcaggaggcgactgaccctatga

SEQ ID NO: 78445 - DNA, 1590 bp, Zea mays
  Clone ID: MRT4577_171567C.1
gggacctcgagccggggggccggccgggatcgtgacatcgtctgtccgccaccggttacctctttctccaggtagcgcaccatcggaacggcgaggagcagacgggaacggggatgggaagcgctggggcgctgctctggcacacgccgcagcagctgcacggccgtggcgtcctcttccgccagagccggcctctcctgcgccagcgcaacctgcctctaatatcgctagctgctccggcgctcgagcccgagcgccgccgccggcagtgcctccgctgcgctgccgtcgacggggacggcgccccccgggagtctgggccactgccacagaaggagtctccgtccagcggcatcggtgccgcactcgaggacccgcctccaggacctccagtggagaatggttcctttggaggcccctcacaggaagaacagagtgctctatatacttttctttatccaagcaaagacttacttccagatgataaggagatgagtatatttgatcatctagaggagcttcgtgacaggattttcatctcagttttggctgttggggctgcgatattaggctgttttgctttttcaaaagatttggttatttttcttgaggcaccagtgactgctcagggtgttcggtttttgcagctctcgcctggggaatttttctttacaacattaaaggtttcaggttattgtggccttttacttggaagtcctatcattttgtatgagatcattgcatttgttatcccaggtttaacaagggacgagcggaaatttcttgggcctattgtgttgggttcttctgttctattctatctaggcattttcttctcctacacggttctcagccctgctgcgttgaacttctttgtgaattatgcagatggggcagtggaatcgttgtggtcaatagaccagtactttgaattcatacttgtgctgatgtttagcacagggttgtcctttcaggtccctgttatccagcttttgctgggacaacttggattggtttctagtgaccaaatgctttcgatctggagatatgttgttgttggtgctgttgttgctgctgctgtgcttacaccttcgacggacccgttgacacaaatgctcctggctggtcccttgcttggtttatacttgggtggtgcatggatggtcaagataactgggcgctaactgctttgtgcaaggtgatggtgctccggatagcaagagtcccagtgtaacctagtcttgtaaaaatgaattcactctgttcatcagatgatattgttaccatttctctttctgaagttcatgagcagtagaaaatagaggaaacggttagttagtttcatctacagatcttgaagtaacaaatgaatgcgttgtggtacatatgatatatgttttctttatacaacaaaaaacaacataagctgcactggttagtgacaagtactcctagtagttgcacgttatatgcgtgcgcagggagtaagacgacacaagacgaaactcccgctttatattataattagtaaggattgttaccatttcactttataaggctagctttagcagatcttctatctcatcctct

SEQ ID NO: 78446 - DNA, 335 bp, Zea mays
  Clone ID: MRT4577_171568C.1
agcgcgcagccgagcgtcgcgacgctccacaacgcgggcatcagtacgatgctgcgcacgcgttcgaagcggtcggcgagcaccgacagcggaaacgtcagcagcccgaccagcagcgcgacgacgccgctcaacgaaccgagctgcgtgtccgacagcccccacgcgtgcttgagcagcggaaacacggcgttgagcacctgccgcgacatgtagtccgacagcaatagcccgacggtcagcccgaacacgagccacgcatacgcgggcgcgcgccgctcggtggccgcccgatcctgcagcgacggctcgacatgatgaatcaacatgcgtgt

SEQ ID NO: 78447 - DNA, 809 bp, Zea mays
  unsure (1)..(809): unsure at all n locations
  Clone ID: MRT4577_171569C.1
ttgggacctcgagccggccggaacttcgctggggagacgaagctgctagccgatcaggggagaattcttttgtaatggagctgctgcgaccacgcggcgatggttgttgcccgcgcgtgctctcggtttctctgctgctcctcgccgccctgctgtggaagcacgtctctgcggcggcgattaccaggggtgatttcccggaggggttcgtcttcggcgccggcgcatcggcttaccagatcgaaggcgcatgggcagaggacgggaagaagcccagcatctgggacacatacacgcacagtggtcagcgagcgagcgagtagctcctcccatttctctcgctcagctccatatggtttggaaatccgagtcctgtatcgtctggttttttgtgcttgcgttgtgtaggatattcgattgaccatgatactggagatgtggctgcggaccagtatcaccattacaaggaagatgtgaagctaatgcatgacatgggtttggacgcgtacaggttctcgattgcctggtcaaggcttatcccagatgggcgtggagctgtgaacccaaagggggttggagtactacaacagcctcatagatgagctcctcagatatggaatacagcctcacgtgaccatctatcacttcgaccttccccaggctctccaggatgaatacaacggcctgctcagtccganaatcatcgatgatttcacccgcgtacgcagacgtgtgcttccggagcttcggcgacagggtgaagcactggatcacggtgaacgagcccacatcgagcccatcggcggcta

SEQ ID NO: 78448 - DNA, 244 bp, Zea mays
  Clone ID: MRT4577_17156C.1
acagcataataatccatattctactccatctctttcttctatactgcgagccctattcgggcgggtcttttatcaaatgctccgccccctcaaccctttcacattctccttcatctaggctattccttcctcttctgcttcttttattaaagcgtaccactaactctttttttaccactacaacaacccacgtaacgtatgttccttctacaaaaactaccccaacttcatcacttttttgttc

SEQ ID NO: 78449 - DNA, 232 bp, Zea mays
  Clone ID: MRT4577_171570C.1
aacggaggctttttgctcggaacacccgcagcttaccggtcggtggagacactgggagacaggagaagcacatgagcaccacatgtcaccagcccaagcatccgtgccacgatgctcgtcgtcgctcctgcagatcctgctgtcagttgcagtgccgcctacagcgacagtcacgggggcattcggattgtaaccaactgtggtgcagttgaacgaccaaggaagtgcactg

SEQ ID NO: 78450 - DNA, 731 bp, Zea mays
  unsure (1)..(731): unsure at all n locations
  Clone ID: MRT4577_171571C.1
acacttcttactcggagacgaagctgctggccgatcatgtggagaattcttttgtaatggagccgctgcgaccacgcggcgatggttgttgcccgcgcgtgctctcggtttgtctgctgctcctcgccgccctgctgtggaagcacgtctctacggcggcggcgattaccaggggtgatttcccggaggggttcgtcttcggcgccggcgcatcggcttaccagatcgaaggcgcatgggcagaggacgggaagaagcccagcatctgggacacatacacgcacagtggtcagcgagcgagctagtagctcctcccatttctctcgctcagctccatatggtttggaaatccaagtcctgtatcgtctggtttttttgtacttgcgttgtgtaggatattcgattgaccgtgatactggagatgtggctgcggaccagtatcaccattacaaggcatggccagcatttccttttaagttcgattttatatacgtattgcttccgaatccgtagtcagtcatgtgctagctggactgacgattttcaggaagatgtgaagctaatgcatgacatgggcttggacgcgtacaggttctcgattgcctggtcaaggcttattccagtgctagctagtagagtcctgtcctagacacagaggagaggatctttttttcccctctgnttatcagtgtactttgccatcctatcgtatcgttttcgcatgtctgatg

SEQ ID NO: 78451 - DNA, 2624 bp, Zea mays
  Clone ID: MRT4577_171572C.1
cgaagctgctggccgatcaggggagaattcttttgtaatggagccgctgcgaccacgcggcgatggttgttgcccgcgcgtgctctcggtttgtctgctgctcctcgccgccctgctgtggaagcacgtctctacgggcccgcccaaaacaaaaccactagggcgctagctagtaccccgggtgatcccggaggggcaactccacgtgcattggggtgcctcggcccggccggcgcttcgctggggagacgaagctgctagccgatcaggggagaattcttttgtaatggagctgctgcgaccacgcggcgatggttgttgcccgcgcgtgctctcggtttctctgctgctcctcgccgccctgctgtggaagcacgtctctgcggcggcgattaccaggggtgatttcccggaggggttcgtcttcggcgccggcgcatcggcttaccagatcgaaggcgcatgggcagaggacgggaagaagcccagcatctgggacacatacacgcacagtggatattcgattgaccgtgatactggagatgtggctgcggaccagtatcaccattacaaggaagatgtgaagctaatgcatgacatgggcttggacgcgtacaggttctcgattgcctggtcaaggcttattccagatgggcgtggagctgtgaacccaaaggggttggagtactacaacagcctcatagatgagctcctcagatatggaatacagccgcacgtgaccatctatcacttcgaccttccccaggctctccaggatgaatacaacggcctgctcagtccgagaatcatcgatgattttaccgcttacgcagacgtgtgcttccggagcttcggcgacagggtgaagcactggatcacggtgaacgagcccaacatcgagcccatcggcggctacgaccaaggctacctcccgccgcgccgctgctcctacccgtttggactgggcgtcacctgcacccacggcaactccacgacggagccgtacgccgtcgcccaccaccttctgctcgcgcatgcgtcggctgtgtccctctacagacgcaagtaccagggcgagcaaggaacggcctgctcagtccgagaatcatcgtggtgttaaccgcctacgcagaagtgtgcttccggagcatcggcgacagggagaagcactggctcacggtgaacgagcccaacatcgagcccatcgtacggcgactatccgcccgtgatgaagaggaacgtgggggcaaggctgccgtcgctgacggcccgagactcggccatggtgcgcggctcgctcgatttcgttgggatcaaccagtacggcgcgatcctggtcgaagcagacctgggccagctcgatcgggacctcagagactactacggcgacatggctaccaacttcgtcacggtaccgtttgagagcacagtaacgaggaaccagcaggtgcctcgacttgggctgcggaaccatgaggcgccgtgggctctgagcaaattgctggaacacctgcagacgcactacgggaaccctccggtgatgatccacgagaacggagctgggcacgagcccgacccgtccggcgggttcctgtacgacgacgagttcagggcccatttcctgcgggtctacgtcgaggcggcgctcgcttccgtccggaacggctccgacctgcgcggctacttcgtctggtccttcatggacgtgttcgagtttctcttctcctacaggttccgcttcggtctctacggcgtggacttcgccgccgacaaccggacgaggtacgctcggcgctccgcgcgatggtacgccggcttcctccgcggcggagaaaaaaaacaaaaactaaaaaataaattttttttatttattaatattattttttttttttttaattattaataataattaaaaaatatattaaataaaaaatttatcattataaaaattaaaataaaataaaaataaaaaaactaaaataaactaattaaaacataaatcaaaaaaaaaaaaaaaaaatatttaaaattcactaaacttaaacaaatttatataactttaaattccccgacttaactgcttcactctaatattttcatattataaatatattaccccgcctctgtttcaacgcggacacacggctccacctattcggagtgaaaatcagccgcacgtgtctgtgttatagattcatcgcgagtgaacaagtacatgatggatgttcttcaccctcatccatgtctgtcgtatgcggcattttcccgtcagttgtgtatttgtttgcatttgaggaataaattcagttctgtagtatttcgttgttaaaaaactctctctattgatctccaaagaattagtttttttcaaactgatactttcagaaattaatatactttatcaatgatctaataaattaaataagatggttaatctatttttattatgttactataaaatatttatactgaatacaatacagattttaaaaagcttgtatgcattattggtatttatttctacttacatatcaaatctttaccttgttcacaaagacttatttattccgttgttactaatctaggatgaaaatagaagtataattataaaattaaattaaatg

SEQ ID NO: 78452 - DNA, 2154 bp, Zea mays
  Clone ID: MRT4577_171573C.1
acacttcgctgtgggagacgaagctgctagccgatcaggggagaattcttttgtaatggagctgctgcgaccacgcggcgatggttgttgcccgcgcgtgctctcggtttctctgctgctcctcgccgccctgctgtggaagcacgtctctgcggcggcgattaccaggggtgatttcccggaggggttcgtcttcggcgccggcgcatcggcttaccaggtaggataggagcagtgtgggctacgggcagtgagtggcgcgcgaggcagagaggcaggtagtgttgagatgaatcgtctggtttgtgcagatcgaaggcgcatgggcagaggacgggaagaagcccagcatctgggacacatacacgcacagtggatattcgattgaccgtgatactggggatgtggctgcggaccagtatcaccattacaaggaagatgtgaagctaatgcatgacatgggcttggacgcgtacaggttctcgattgcctggtcaaggcttattccaggtgctagctagtagagtcctagacacagaggagaggatctttttttccctctgtttatcagtgtacttagccatcctatcgtattgttttcgcatgtctaatgatatgccacgtgtttgtagatgggcgtggagctgtgaacccaaaggggttggagtactacaacagcctcatagatgagctcctcagatatggtcgtcatttggtacttcattaattgcaacgttaattaacggcgcctgattcccaatggttttgtgggcgcgcgtgtaattaacgtgtggcaggaatacagccgcacgtgaccatctatcacttcgaccttccccaggctctccaggatgaatacaacggcctgctcagtccgagaatcatcgatgattttaccgcttacgcagacgtgtgcttccggagcttcggcgacagggtgaagcactggatcacggtgaacgagcccaacatcgagcccatcggcggctacgaccaaggctacctcccgccgcgccgctgctcctacccgtttggactgggcgtcacctgcacccacggcaactccacgacggagccgtacgccgtcgcccaccacctcctgctcgcgcatgcgtcggctgtgtccctctacagacgcaagtaccagggcgagcaaggaggacggattggactgacgttgctggcctggtggtatgagccagcgacgcagaagcccgaggatgtagaagcagctgccagagcaaatgacttctcgcttggatggttcatgcatcccctggtgtacggcgactatccgcccgtgatgaagaggaacgtgggggcaaggctgccgtcgctgacggcccgagactcggccatggtgcgcggctcgctcgatttcgttgggatcaaccagtacggcgcgatcctggtcgaagcagacctgggccagctcgatcgggacctcagagactactacggcgacatggctaccaacttcgtcacggtaccgtttgagagcacagtaacgaggaaccagcaggtgcctcgacttgggctgcggaaccatgaggcgccgtgggctctgagcaaattgctggaacacctgcagacgcactacgggaaccctccggtgatgatccacgagaacggagctgggcacgagcccgacccgtccagcgggttcctgtacgacgacgagttcagggcccatttcctgcgggtctacgtcgaggcggcgctcgcttccgtccggaacggctccgacctgcgcggctacttcgtctggtccttcatggacgtgttcgagtttctcttctcctacaggttccgcctcggtctctacggcgtggacttcgccgccgacaaccggacgaggtacgctcggcgctccgcgcgatggtacgccgccccccctctgtttcaacgcggacacacggctccacctattcggagtgaaaatcagccgcacgtgtctgtgttatagattcatcgcgagtgaacaagtacatgatggatgttcttcaccctcatccatgtctgtcgtatgcggcattttcccgtcagttgtgtatttgtttgcatttgaggaataaattcagttctgtaaaaaaaaaaaaaaaaaaaaaaaacaaaaaaaaaaaaaaaaaaaaaaaaacaccaaacaaaccccac

SEQ ID NO: 78453 - DNA, 156 bp, Zea mays
  Clone ID: MRT4577_171574C.1
ctacgttgatctggcgatgcgctttttactggtactgggacgcgtgatgggcatataagagctcaaaccattatttgggatgaggaacaccgtgcaccaacaacaatattataatggagagtgcagacgttggacaaaagggatgccatattttca

SEQ ID NO: 78454 - DNA, 278 bp, Zea mays
  unsure (1)..(278): unsure at all n locations
  Clone ID: MRT4577_171575C.1
nactcatcagcgtagtagctcggaatcagctcgagtacgatgatgttgtggtgcttgagactgagaacatgctgcaccgtgacgtgtgttcggtcgagcaacaactagtacgctaatgacgcgagtcgtcggctgctgttacggaggctagctactagagcgatagtgtatgctagtacgtacagaacgtgcgacactcagttagcatgaagctcgccgttgtacgatgagaagtatgcaggagcagatgatcatggcgctagtacttgtcgatgcgc

SEQ ID NO: 78455 - DNA, 483 bp, Zea mays
  Clone ID: MRT4577_171576C.1
gccagtcttaaccccaatgggttttcaggggccttatttaaataaaaaattcccggtttaaaaaaatggtggcaaaaattcttgagaaatacccactggtttgggggggtaatgggggccccccccctgggaattccagggaagaaatccccattggtcggccccggggggtgaccccggaatttccggccgggcccctggggggtacccacttttccttaagggggggtggtttaaagtggggggaaatcaggggaatgcagttccctgggggaaaatggttttccctacacaattcccacaaactaacagcgggaagactaaaagggcaaacctgggggggcccaaagggggagcttcttcaatataatgggggggggtcactggcgcgttttcaagggggaaaaccttgggggcaccttgaataaaaaaactggccacccccgggggggggggctaggtatgggccccagtgggtttttt

SEQ ID NO: 78456 - DNA, 3064 bp, Zea mays
  Clone ID: MRT4577_171577C.1
gaaatcctccacaacccccatcccggaaccgttccgccgcaccgcgggccgcttccatctccaggggcaggggatcttggagggggtctgctggtgggtccgagcagggcagcggcggcgttggatggagactggggcggcggcggcaccggcatcgagggcggacggcgtgcggaggtgcaaaatactcgtgccctggcgtttccagcccggcttcgtcaggcagccgctcaagcaggccgccaatgacgcagcggtcaacggcgacggaggtaataccgccggcgcgcctgatgctaaaagttgccgagcggatggggcggcgagcgacggcggtgagaccaacgttttccgagacgcaaaaaaattcggatcgggtagggctacccgcgggaagaatggggaagttgacggaggagaggagcattcggagagatgcactagcagtcagagtttgaagagtcctgatgtagaaaatggcggtcgccctggacccggagatgcatgcaatctgggcgagtctgtaaggggaggctgggtgaagagctccccattggaaggtactggaaatagcaggggtgcaaatggtggcgtcgaggctggagaggactacaatctggggagctctaactgtgatgctagttggaaggacgctcgcacccaggaattcaggggtgctggtgatggagcagcttgcgatcctgaggtgattgagagcaatgtaggagcagagaagtgctttgccaagggtttgaagaagccgtttatggatcagaccgggtcaaagagcaatggttcttctgctccaggactcgagtcagaggaccctgagggaaatgttggcttggaagattcctcttatcaagccgcaaaggggtgtagcatgggagatggagcagccaaggagaatgaagcaacagccaatggttgcagctcggcgactcctggcagcattggtaatggaacgtacgtccgcaagggacggaaggcagctgtaccatggagatttcaggccaggtacaagcgatcgttctctgatgcttttggctccaataatgaatctcctgatcttccagcatacatgtttgacagtagttcaacacagtgcaccccagcaactagaagcaccgtgcggtgttatgcgagtgctcattctggtgttagagtttcggctatgaataacttctcagtgaaaggtgatactgaatgtaagaagaggaaaactaataatgattatcaggatgaatcaatgctaaataatggaggtgtcgttgttagagaacgcatcatgcggtctctacaggatctccgtttaatttatcgggaccttttagatgaagaagataattctagggaaaaagtgcttaatgtgcggcctgatctaaaggcttacagaatcttcagggagcggttctgcacagattttgatgatgagaaatatattggcagtgtgcctggaatatatcctggtgatatcttccatctgagggtagagctttgtgttgttggtctccatcgcccacatagggtaggtattgattgtaccaagaaggatgatggtacaactgtggctgttagtatcgtgtcatgcgcacaatctcatgacatcaagtataatctggatgccttcgtatatactggactggtggctgttgcagtcaatcagaggatagagggtaccaacttggctcttaaaaagagcatggatactaatacaccagtccgtgttatccatgggttcaccacttttaatggaaaaaagaaatttcctgcatatatatatggtggtttataccttgttgagaagtactggagggagaaagagcatggagaccgttatgtgtatatgttccgactgagaagaatggaaggacaaaagcacattgacatccaagaaattctgcaaacagggaactctggatcaaacgacaatgttattatcaaagatctatcacgtggattggagagagttcctctacctgttgttaacaaaatatctgatgagcgtccaatgccctattgctacatttcacaccttcgatatccccgtaactaccggccaactcctccagccggttgtaattgtgtaggtgggtgctcagactcaaacaagtgtgcatgtgcagtgaaaaatggtggagaaatccctttcaatgataaaggccgtattgtagaagcaaaacctctcgtttatgagtgtggtccttcttgcaagtgccctcctacatgtcacaacagagttggccaacatgggctcaagtttcggctgcaaatcttcaaaacaaaatcaatgggttggggtgtgagaactcttgaattcataccatctggaagctttgtgtgtgaatatataggtgaagtgttggaggatgaagaagcacaaaaaaggacgaatgatgagtatttatttgctattgggcacaattattatgataagtctctttgggagggcctatcaagatctataccgtcacttcagaagggtccgggcaaagatgatgaaaatgaaactggatttgctgttgatgcttcagagatggggaactttgcaaaatttatcaatcacaattgcaccccaaacatatatgcacaaaacgtcctttatgatcacgaagatatcagtgtgcctcatatcatgttctttgcttgcgatgatattcgacccaatcaagaactagcataccactacaattataaaatagatcaggttcatgatgccaatgggaacatcaagaagaagaaatgcctttgtggctcggttgagtgtgatggctggctgtattgattttttaaaaacttgctgtattacgtttagaatctgcagtttttttaagcataactgaacttgaacttgtttcattttgccttcatctagatcatgttgtgacaaaatgtaaaataagacatcagtgtttttagttgccaatgggggtcaagttttttcctttctcattctattcgttattttatatgtctagctttcaatatgtagaataatgtgtgaatatacatggcaataagttcaagtgaatttgctatatttgacaatttacataaaaaaaaa

SEQ ID NO: 78457 - DNA, 347 bp, Zea mays
  Clone ID: MRT4577_171578C.1
tcgagccggcgggatcactacaccgcggtctcgcggatcctgccgatgtcctagacgccctgtccgagtcctctctgctttgcggccatggcggtccttgtgatcaatatcctccgctcggaccggagcacaacgacaagggtctctgcgcacgtggtacttcagacggctcgagattgagctgagagatgtctaaatgcccgaactcatggcgtgccgcgcctatgatcggccgtgcaagctccttcgccggagctaggatctcagggggctctgcgcatgaccatctaaatcgccagtgcacgtcggaccacatcaccgcgctctggcgtatgggtccggatgtc

SEQ ID NO: 78458 - DNA, 439 bp, Zea mays
  unsure (1)..(439): unsure at all n locations
  Clone ID: MRT4577_171579C.1
ttnttttttttttttttttttttttttttttttttttttttttttttttttttttttttttttttttttaaaaaaaacaaaaaagcatttagacatatctgggggccatgattttttttttgagaaaaactgggtgggcatgggtttcaggaatccacagataaacatattccgcccacgaaataaagggccttttttcccccctaaggtgaaaaagaaacccgggaaaaagcccgccctctaaaagatttacaaggcataacctaacagacatttattcagccccaggagccagccccaagactcaacaggtttgcccgtttaagcttttttcccgcctaggggttgtctaatccccgggaaaatccgcccaggggcccttcctcttttttccccccctncgtgggccccccctgtgctccctttttttgtcgccccc

SEQ ID NO: 78459 - DNA, 2654 bp, Zea mays
  Clone ID: MRT4577_17157C.1
gccggccgggccgggctcttgtcatttcgccttcgcccccacggtacccgcccctaccagatctgctccgccgccaccgacaccccctcctcgccttcctccggcgagctcctcgccggagcagggccggccgccgctaccgacccatcacccacaacaggccttactgccgcgtggcccagatccgcgcgctccccgccgatccagatccatggctcgccccggcgcgctcctcctcgccgtcgcggtggccgcgctgctcgcggccgcagtgccgggcgcccgcggattctacctcccggggagctacccgcacaagtacaacgtcggggacgacctcaacgtgaaggtgaactccctcacctccatcgacaccgagatgcccttcagctactacagcctccccttttgcgagccacaagacggtgtcaaggacagcgccgagaacctcggcgagctcctcatgggcgaccgcatcgagaactcgccctaccgcttccgcatgtacaccaacgagtcagacgtcttcctctgccgctccccaccgctgggcgccgacgccttctctctcctcaagaagcgcatcgacgagatgtaccaggtcaacctcatcctagacaacctccccgccatccgctacaccaggaaggacgactacatcatgcgctggacggggtaccccgtcgggatccgcgtcggcgtcgactactacgtcttcaaccacctccagttcaccgtcctcgtccacaagtacgaggatgccaatgtcgcgcgcgtcataggcgccgccgacgccaccgacgccatcccctccggggctaaggatgccgcctcctcctcccctggatggatggtggtcgggttcgaggttgtgccctgcagtatcaagcacaacccagaggacgtcaagtcgcgcaagatgtacgacagctaccccagcaagatcaagtgcgacccgaccaccgtgtccatgagcatcaaggagaacgagcccattgtctacacctacgaggtgaacttcgtggaaagcgacatcaagtggccctccaggtgggatgcctacctcaagatggagggggccaaggtgcactggttctccattctcaactccctcatggtgattgccttccttgctggtattgtctttgtcattttgctgaggaccgtgaggcgtgatctcaccaagtacgaggagcttgacagtgaagcgcaggcccagatgaatgaggagctgtccggatggaagcttgtggtcagtgatgtgttccgtgcgccaagcaacccgatgctgctttgtatcatggttggggacggtgttcagatccttgggatggcggttgtgaccattctctttgctgcgctcgggttcatgtccccagcctcccgtggtactctgatcacgggcatgctgttcttctatctggtccttggaatcctggctggatatgttggtgttcgcgtatggaagacgatcaagtgtggggatcactctgggtgggtcgctgtgtcgtggcgggtggcttgcttcttccccggcattgcattcctgatcctgaccacactcaacttcctattgtggggaagccacagcactggtgccatccctttctcattgttcgttgtgctgcttctgctctggttctgcatctccgtgccgctcacgcttgttggcgggttccttggtgccaaggctccacatattgagtaccctgtccgcacgaaccagatccctcgtgaaatccctcctcagaagtacccatcctggttgttggttcttggtgctggcacactgcccttcggccaccctattcatcgagctcttcttcatcatgtcaagcatatggatgggtcgtgtgtactatgtctttgggttcctcttcgtcgtcttgctgctcctggttattgtctgtgctgaagtttccctggttctaacttacatgcacctgtgtgttgaggattggaagtggtggtggaagtcattcttctcatctggatcggtggcaatctacattttcttgtactccatcaactatcttatttttgacctcaaaagcctgagtgggccagtgtctgctaccctctacatcggttactcactcttcatggtgattgctatcatgctggcaactggcacagttgggtttatttcttcattctgcttcgtccactatcttttctcatcggtgaaagcagattaagtttcttcctgctgaggattcaagtcactcaattgagaggtgagcagaatggacagtgaaaagtttgtagtcacaaatcttagttcatgtcatcttttggtatacaaaagcctggacaactattgcaagggctactaggattcatcaatggatctgtggagaggtgtttgcagcttgcacgatgtaataggttgaattgctttattctcatgtggcgttgctatagttgtttttagattaccattactatatctcaatatgtatgctaagtaccatatctgcttgaatttatgtttattgacattttccccgaatgttagatctagttatctacttatctgctgcaatgtatgtctgttgacatttgccccaaatgttggatccagttatcgccacctactaatagatctttgtagttccacattaaaaaaaaaaaaaaaaaagcggccctccgcc

SEQ ID NO: 78460 - DNA, 161 bp, Zea mays
  Clone ID: MRT4577_171580C.1
aattcgaggcacgacccactcactatccttgcgccattctacatgaaacattcttatctactcctacatccgacacaaaagatctggtataaaaaaacctaaactcaccttactggccttccatatacacccaccccactggaaaaaccctgtctttaccc

SEQ ID NO: 78461 - DNA, 111 bp, Zea mays
  Clone ID: MRT4577_171581C.1
gcacagattctaaaaaacagtcacacacctaccacatcctagaggacatacccacaaagtcagacagacattccctttctttggacctaagtgcaaactggcttcccaaaa

SEQ ID NO: 78462 - DNA, 119 bp, Zea mays
  Clone ID: MRT4577_171582C.1
tttttctcgaagactcaacccttccactttgtgaaggattaaaattacaagccggccctccctaatgccatctccacttcaataactctttctcttatttcatacacctaactattttc

SEQ ID NO: 78463 - DNA, 144 bp, Zea mays
  Clone ID: MRT4577_171583C.1
tttccgggttgtctccacagcgttcttgttggttttcccaagttttttttcacaagaattttttgtttgctggcttggaaattagtttacctaatccgttgggggacctgtggttcctttgggtgcctccaagttttttccttt

SEQ ID NO: 78464 - DNA, 1699 bp, Zea mays
  Clone ID: MRT4577_171584C.1
aaaaattccagccgccacagccttcttcctcctcacgccgtctccttcttccctgttttccacggcagccagcagggaggatcggccaacagccatggcgtcctccctttcttccccagcgccaccctacttcagccggctccccctccatgctccctccctagccgagcttctctctcccctgttgtttcccatgcgtgcaaggagcactaaggccagcgcccttgccctctgctccagccatggcgtgggccttctctggtccgggctcgcagtcgcccatggcgctctccccttctccgcggcgttcggtagcaggaaagagtagcgccccttccttctctcccatgaccggcgctccctgtcctcctccccatggcgcccgtgcccctgctctaggtgctcgcctcctccatttcggatggccggccttggtagccgctgttgccatgagtgccatggtcgagcgccctattccctgctccatggctcgagctcgagtttcctcatggcgctgcctccctgtccatggcgacgcagcagctccctcccatggtgccccctgctcttcctccttggcgcctagaaattgcagcaacatctccctcccccaaactgctcttgtcatggccgattcttccctgcgccctactctcccatggaaatccagcaagagctccatttcctccatggccggcgccccgcgcaacgcctctgcgcgactctccctccccaaacagcgagcccccttcctcgctgctcgtcgtggtgcccgtcggctgttcggcaaaatgcgcagcaagccacgcactgcagcagctccgtcccttgccttgcgttgtgtcgagcttcgctactgcacatctcccatggaaaacagcagcccctccgcgtcacgcgctcgactcgctgcgctcgcccgcgtggtgtcgcagtaggacagcagtagtgtcgcattcgccatcgacttcgccttcgtgtacaccccctagcacgccaacatagcagtcgcgacactcccctccaccccgcactcgccacgctccacaaaaatgccccctcgcgtagctacacacttgttgtcgctgcccgttgttcgtcgacgcgcagccccttcgcgccgtgcccgtgatgtcatcgttcttgctgttttgtcgcgccaatcgacagtcgcagcagcccctccgtggcgtgtgctccaccttgacacgccctcggtgcccgtcgtgctccttcgacttcgcttcggtctcccgtgatcgacgacgcgttcgtcttcacgccacatgtgtagcaaccacgaccgaggtttgatatggaccgagagaggacgatcgtgcaagtgatgtggtgccaaccacaagatgcagtcgatggacgacccaagaaaggatggacataaccagtggatgctcgccaagcgagtacctcccccagcaaacactatctaagtgttaaactaaaggtgaggaagtagcagacttttgctgcttctgtgctaaggtggttcccaacaaggaaaaccaagactgaagtgcgggaggactcggtcctccatctaggatcttttgtttattgtctttcgggagatgttggtgtctccctggtttgtataattattactttttggcacccacttatagtctggtctgtaataatataactcaagcttacttttgaaataaatgtaagattatgt

SEQ ID NO: 78465 - DNA, 229 bp, Zea mays
  Clone ID: MRT4577_171585C.1
cgggacgaacagcttttcctgccagatacacagcactacgggtctcggaatcttcaagcgtgccaccatgacatgctcatcgaacatgacgagatgggcgacgcacacattgacctgcagccgaggaccagcgcagctacagtgattggggatctatgatgtgatcgaggacatgacgatcgccacgtgcctcatgaccccctgataacgccctgccccggcacagctc

SEQ ID NO: 78466 - DNA, 1159 bp, Zea mays
  unsure (1)..(1159): unsure at all n locations
  Clone ID: MRT4577_171586C.1
agtgcccccaccaaaccacccctgtgcgattcgccgccatcattgtgagcaagctcgagcgcgtctgccgccagccaccaccgcttccgttgctttagctctgttctcccgccaagaaggcgaaggggagacggttggttgagttgaggcagccagccagcaagccagtggcggggcgtctgctctcggttgctttgctatggggatctgcgcgtcgtccaagcgcgtggagcaggaggaggacgagaacgtggtgtacgtggtggtggacgggcagggcggcggcggtggagggggattgggaggggacggccgtggcgcggcggtggagcggacggtggccgtctccctcttctcgcagaagggcaagaaggggcccaaccaggacgccgtcatcctctgccaggcactttccaaccacggaaacgagtttcgtcgtcctacggatttcctcgcggttttggtttgctacgacagcggaacagatcagaattatcattagttccctgttcttgccccctttattttcagaccctttttttaaaattcccccaagaaccaaccagtctcatctgccgtttgggctcaattgtcaacgatggccactgatgctatcatttgatattcatcacaagctgtcggcttgttgctcgagtccatgcaatctgaatgcgtgtaatcaagctattcggttcggaccacgattctgacgcccaccgtgcgctccacgtctccagggattcggcatggaggacggcgtgttctgcggcgtgttcgacgggcacggccggtgcgggcagttcatcagcaagctggtgagggactacctcccgttcatgatcctgagccaccggaacgcgctcctcatgggctccgacgacgacgacgatgatccggcgcagctgctggaggagtggcgggaggcctgcgccaacgcgttcgaggccatggacaaggagctcaagctccaggccaacgtggactgcaacttcagcggcaccaccgccgtgtgcgccatcaagcaggggaaggacctcatcgtcgccaacctcggcgactccagggncgtgctggcgaccatgtcggacacgggctacctcaaggccgtgcagctcaccaccgacagaagcccaacgtgcccccaggagctgagcgtatc

SEQ ID NO: 78467 - DNA, 2130 bp, Zea mays
  Clone ID: MRT4577_171587C.1
ccgggcgcgcatccgctgctacccgtccgcttttccacccacccgcccacccctcgtttcctgcaattcgccgccatcgttcgctgaacttgagcgcgtctgccgcctgccaccaccgctctctgcctctctgctgctctgttctttctcccgccggggcagaggagggcggggaggcccgttgagcgagcctcggtcggtatggggatctgcgcctcgtccaagcgcgtgcggcaggaggagcaggactccgacgagaacgtggtgtacgtgatggacgagcagggcggcgggggagaaggcgaggacggccgtggcgcccgcgcggcggcatcccgcaaggtggcctccctcttctcgcagaagggcaagaaggggcccaaccaggacgccgtcatactctgccaggtccgcgctcgcaccaccacccctcctgctgctgccttgcccgaggaattctctcgatgtctcagctttttcttcttcttcttctctcctatatctgtttgtttatttattttgctacacagcgctggtagatgtagatctgtactgatacagattttgtttggtactccaccgactgtactgcactgctccgtatagtctcttgcagaggaaaaccactagttttttttcctcctgggtactctgtccttgcaagggactttgacgtggtgggaggtcatgaaattccaggaactgtcctctgtattctgcaattattatcaggacatacgtacacagctgccaccccaccacaaccaattcaccatacagcgggggggaaatcgtgatggttcactttccaaaccacggaaacgagtttcgtcgtcctacggatttcctcgcggttttggtttgctacgacagcggaacagatcagaattatcattagttccctgttcttgccccctttattttcagaccctttttttaaaattcccccaagaaccaaccagtctcatctgccgtttgggctcaattgtcaacgatggccactgatgctatcatttgatattcatcacaagctgtcggcttgttgctcgagtccatgcaatctgaatgcgtgtaatcaagctattcggttcggaccacgattctgacgcccaccgtgcgctccacgtctccagggattcggcatggaggacggcgtgttctgcggcgtgttcgacgggcacggccggtgcgggcagttcatcagcaagctggtgagggactacctcccgttcatgatcctgagccaccggaacgcgctcctcatgggctccgacgacgacgacgatgacccggccttcagcgacgcgtcggcgtccgcgtcgtccacggacggcagcgggcagtcgtcgccggcgccggcgcagctgctggaggagtggcgggaggcctgcgccaacgcgttcgaggccatggacaaggagctcaagctccaggccaacgtggactgcaacttcagcggcaccaccgccgtgtgcgccatcaagcaggggaaggacctcatcgtcgccaacctcggcgactccagggccgtgctggcgaccatgtcggacacgggctacctcaaggccgtgcagctcaccaccgaccagaagcccaacgtgccccgtgagtgtgtccgtcatagtcgatcgtcggatgattggatcgtatccctactccctagcggatggataactaaaccgtatcatgcactacgcagaggaggctgagcgtatcaagcgctgcaacggccgcgtgttcgcgctcaaggacgagccgtcggtgctgcgcgtgtggcttcccgacgaggactgcccgggcctcgccatggcgcgctctctgggcgactaccgcctcaagcgccacggcgtggtgtcggagccggaggtgacgcaccgccgcgtcgcgccgggggacctgttcatcatcctggccacggacggcgtgtgggacgtgctcagcaacgaggaggtcgtgtccatcgtctgcgccacgccgcggaagcagcacgcgtccaaggccgtcgccgaggccgcggcgcagcgctggcggaccaggtacccgacgtcccgcgtcgacgactgctccgccgtctgcctcttcctgcgggaccaggactgggccagcagcgtcgccgcggccagggccaaa

SEQ ID NO: 78468 - DNA, 1390 bp, Zea mays
  Clone ID: MRT4577_171588C.1
aattcggcacgaggggcttgccctgcctctctccgccccgcgtcgcctcatcgccaacaaccgacgagatccggcgcgggaaaacgagccctagatccggcggcaccctcatgcgaccttgttgagtccgggccttcctcctcccgccgctggtgtcgccatggcggggagcgacctcgagccgctgcgcgcgagcgcggcggcgctgccgtcctcgtcggacccggactcgcccgcagtgaccccgcgccggagccgcgtgcgggacctgctgcgcaacctggaccgccggctctccaaccggagccgcggcggcgcggccgcggggcacggcgacggtgaggccggggcgtcaccgaggaggcccgaggaggacagcgacgagctcggcgacggcgcgccgcccgagtgggcgctgctgctcgtaggatgccttcttgggctcgccaccggcatctgcgtcgctgtgttcaatcgcggggtacatgtcatacatgaatgggcatgggcaggcactcccactgagggtgctgcttggcttcgtctgcagaggcttgctgatacctggcataggatattgttaattccagtgactggtggagtagttgtgggcatgatgcatggattattggagatttttgagcagataaagcaatccttatcatctcaaagggagggtattgatttcatggctgcgatttttcccacaatcaaagctatccaagccgcaattactttagggacagggtgttcactggggccagaaggacccagtgttgatattggtaaatcatgcgcaaatgggtgtgcggaaatgatggagaacaatagggaacgaagaattgctcttgttgctgccggatcagctgctggaatcgcctcaggtttcaatgctgcagttgctgggtgcttttttgctatcgaaacagtattacggccacttcgagcagaaaattctccatcatttactactgctatgattatattagcatcagttatatcatcaactgtttccaatgttctgctaggggaaaaggcagcatttattgtgccgacgtatgaactaaaatctgctgctggtattttactttattctgattatttttggtgttaataaggtagttgtttcttagttaccttcaagatatagggaagtatgtgttctcaccttatttttggctctaattttcatccatatttttgagataatttcagtctgtcatttttgtgatacatggcctgtacgttttttgtgcttttgctattttggggaacattcatgttagtgaatatctgtaataaactctgttgcgaacatccgattgtaagtcatttatagctactgttcatcaccatgccaaaaaaaaaaaaaaaaaaggcccctagggcc

SEQ ID NO: 78469 - DNA, 668 bp, Zea mays
  Clone ID: MRT4577_171589C.1
cggacgcgtgggcgggtgcggtgcggctcacagtgcccccaccaaaccatccttgtgcgattcgccgccatcattgtgagcaagctcgagcgcgtctgccgccaccgcttccgttgcttagctctgtgctcccgccaagaaggcgaaggggagacggttggttgagttgagttgagccagccagccagccagtggcggggcgtctgctctcggttgctttgctatggggatctgcgcgtcgtccaagcgcgtggagcaggaggaggacgagaacgtggtgtacgtggtggtggacgggcagggcggcggctgtggagggggatggggaggggacggccgtggcgcggcgtgggagcggacggtggccgcctccctcttctcgcagaagggcaagaaggggcccaaccaggacgccgtcatcctctgccagggattcggcatggaggacggtgtgttctgcggcgtgttcgacgggcacggccgctgcgggcagctggtcagcaagctggcgagggaccacctccccttcatgatcctgagccagcggaacgcgctgctcctgggctccgacgacgacggcgacggcccggccttcagcgacgcatcgcccgcggcgtcgtcgtccacggacggcagccgcagcgagcggtcgtcgccggcgccggcgc

SEQ ID NO: 78470 - DNA, 124 bp, Zea mays
  Clone ID: MRT4577_17158C.1
attcctcactgttacctgcactcgtacgagctttagctatagtgagccgtattagagcgtgacgtgttcatggtcatatctgtgtcctacgagaaattcgtcatctgttcacaatgagacagag

SEQ ID NO: 78471 - DNA, 251 bp, Zea mays
  unsure (1)..(251): unsure at all n locations
  Clone ID: MRT4577_171590C.1
gaaagttccagcgagcgactgtgtctagcaggatagagcgcgctggggaatatgcggacacttttctgcctcgtggacggcgtggccgtcgcggccatactcctgacagcgtcatgccataagtgcggctacagtacctatcttcatatctgcgtctagtacaagcatgagtcatgtacgctgcaagctcacanatgtgactaaattaaggtccactatcgtgggacactgactgatggatcagatttata

SEQ ID NO: 78472 - DNA, 278 bp, Zea mays
  Clone ID: MRT4577_171591C.1
ggattcggctgaccttcaatctatagacgtatacctagcagaggttacatcttgtgcgttagctccgcacttgccatgggacatgaccactgattgcatctacttcccttgagtaagtatgtatgcaagagagatcacatgtgactttgttagtactctttctgatcttgaacaaacacctaaggcatcctttggctgaccatctagatgaccctgtgactagatagccggactgcccactgtatgcataccagttattcctcttctgaatacctttc

SEQ ID NO: 78473 - DNA, 470 bp, Zea mays
  Clone ID: MRT4577_171592C.1
atcaaatatgcaccacaacaacgacgataggtgacaccgaggacaagaacacacggggtagatagcattactaggaacgctagcttaagaacagactagttcgataaatttgctaaggacattgattacactactgctgttgatgaagatggggagacatctaacaataaccatctctgtcacacaggaaaacagcccaacggaccctaacacaagcctggaaaagctgtaccaaatacaactttaacattattaatagcactataggaaatcacaagggttttggtaaatttgttactaaaactaatgctaaacaaacactacaaggattaaatggatcacattattgaaaagcaggcatgttgaccttacatgggagaatcagacaatcacataagctatgaagatatgaactacgctaacaagacgaacaacataggctacactcacagcattcaacggctaatatg

SEQ ID NO: 78474 - DNA, 222 bp, Zea mays
  Clone ID: MRT4577_171593C.1
cactactgcactctacatacattaggttaataagacctaaaaaggcggaaaattggaaaacaaaggttagcacatggcacagcatgttccgggccgggaccggtctggccatgaagctagacgaaatggaagggagatcgaggaggctgacccatgccaactaggagcggcgagcaacaagtcgcatccgatcaagatcggaaaccgccgaccgaaagaccg

SEQ ID NO: 78475 - DNA, 127 bp, Zea mays
  Clone ID: MRT4577_171594C.1
cctagagggggacatggcgcttccattactgttcctgcagtagatccgaggaaccaccaacgccggctccaattttcgacggccgcaataaatttcccccatgcttattaagcccgcctcctcgctt

SEQ ID NO: 78476 - DNA, 384 bp, Zea mays
  unsure (1)..(384): unsure at all n locations
  Clone ID: MRT4577_171595C.1
aattattcgagaatcaaatggataatttccatgttcatcacaaatataatgttacacacatacaagccatgcaagaatcttaaagtagaatttatcactcgaagcacaacatatagctattgcaggcagctgcggcaatgcttgttatttaattcagaatcatacagtagttcgatctcatggcaaccatgggggcaggaaggtggtcatgcatgagctagtcagtgcctctgaagggtaccctatctgaagggtgggttcaccagcagcatcgaggggatggaagaagttattgccgtgtagctgctgcggctgcacttcaggatgccgctcgccttgttgctcgttctagatcgcgagcggccgctcgcgatctanaactag

SEQ ID NO: 78477 - DNA, 465 bp, Zea mays
  unsure (1)..(465): unsure at all n locations
  Clone ID: MRT4577_171596C.1
ctcaggtaccgntctctaattcctctttggcggacgcgtccgccaaaccttnccatttttcctaccgtttcaagccacaacagccccactctctctaccctggggggggtgcctgctcgaaggagggattctacccttacacatgccttctccatcctatggggcgcgccctcgtctccacgctcatcgaccaggggaactcttactctacacacgacttagtaccccgacacctcgccatcgctggcgtctaatggatggaccgaccagcatatattacataaccagggacggatcagcgcgatccctgaccttgggcgttccaagacttcgtttcatgccacaaagcggttgtatacaacagattactatcatatgctttgactaatcaatgatacttctgcaccggatataaagaacgcatattattcgctcgcaaaacaaatccatcctgatactaaataa

SEQ ID NO: 78478 - DNA, 259 bp, Zea mays
  Clone ID: MRT4577_171597C.1
acgcccacgcgtacggccgcggaccaccgtggtagagagccccggctgcccgccgctccgcgcgctcaccaccgacatcctcggcctcgtcaaagtcgtcgaggcccacgcgaggccggcgggcgccggcaaggtcgtcgagacgtggggcgcgcctgacgcttgccgtgccatcgttgctggctagctagccgatcgtgccgccgaacccggcttggctggggcgaggaggaacagcgtggttgagctgctgaaaacc

SEQ ID NO: 78479 - DNA, 330 bp, Zea mays
  Clone ID: MRT4577_171598C.1
gctatatgtcggagatgcattgttgcatacatacgtggggattcacgctgccggaggtcacgcacgctgcggcgccctttgaacaaccatctgtgcctgttacaagaagggcaccccgcgtcacgtatttgacctgatcaccggagacaagtggctttgtcctgagagaacctgatcttacatcacgcctgtcaaaaatgtttacgattcgtgcttatgattccaaaatattttcaagtgcacgtctctgattaggctcaaagatgctaagctacttctcttattcatagaagggcttgagacatatggctggtcactcatgctcttgta

SEQ ID NO: 78480 - DNA, 277 bp, Zea mays
  Clone ID: MRT4577_171599C.1
tttagttttttatttttgtgggtttgggggacaaaggaaatagggatactactttaggcactcatcaaaaattcaaggactaggaccggtatcaaatgataagtcggggaccaacaaaatcaactggaaagctctttcctggtaacaattttctatatatacaaaaaaaacaccacagacttgtgaacacaccaagcttgactaaaaaaatcaaggacgtggtcaaaactaaatcttgcactgaggatttccctcaagaaggtccattttccacctt

SEQ ID NO: 78481 - DNA, 381 bp, Zea mays
  Clone ID: MRT4577_17159C.1
gagcagcatggcacaagaaaaggcccacgttcctacccaatgctccgcacttcgcaaaggaggcttcgtaatgctcaaagaacacccctgcaagatcgtcgacatgtccacttccaaaaccggaaaacacggcggtgctaaagtacatcttgtaggcgtagatatctttaccgagaaaaaagttgaagatatttgcgtctccactcacaacatggacgtacctgttgtagagcgcaaggactatcaattaattgatatcgatggtgatgacgtaacttatttggatgaaactggttcaagcttcactaacttgaaaatgcccagcctctgtgagtctgatcttactctggctaccgatctgagagaaaaatttgagaacta

SEQ ID NO: 78482 - DNA, 398 bp, Zea mays
  Clone ID: MRT4577_1715C.1
tggatttgtcaggaatcgatggtccacagtctgtcggagtgtttaaatcatcaacactgcttgcccaccgtgattgtgtaacaggattagctgttggaggtgggttcttgtttagctcttcttatgataaaactatcaatgtgtggtcactgcaggacttctctcatgtgcattgtttgaagggtcatgaacacaaaatcacagcaatagttgttgttgacaatgatagccattctctttgtataagtggagacagtggcagcggaatttttgtttggcgtgtggattccactttgaaggaagaacctttgaataaatggtatgaacataacgattggctctatcgaggggttaactgcttggctgtctctggaactggttatctttacactggtagc

SEQ ID NO: 78483 - DNA, 391 bp, Zea mays
  Clone ID: MRT4577_171600C.1
gcgtcccgcggacgcgtgggtgagggtgtacgtggaccgcggtctcgtggacgatggcatctcgctctatgagacgacgtgtgggtcgttgaaacctgatagcttcgtcttgagcgctgcgtttcatctgtatgagcgtgcgggcagggagtgtgaagcccagggtgtcctggagtccatcagtgcgagtggtacctccttcctgaggaacatgaagattggatttggatcgtctttaagaagttagaacttaaacatgctagtttttctcttttttttcaagtgtttgggttaaatatcttaacttatattctagcttttccaatattttgcttaaatactgctagacattcccacacatgtaaatattttagtagggacttcctcttag

SEQ ID NO: 78484 - DNA, 380 bp, Zea mays
  Clone ID: MRT4577_171601C.1
ggccccccctccccccttggggggggtttttttgggcccacaaaccatgggtccaaggtttaaacgtccccccccaaccgggttttggggggggggggggtccccaacaaaaattgtttgttgggaaaacaaaacccggttttcaataatttaaaagggtaccttccgccccctttaattttggggcttggaggggtaatccccggcttgttttggtttgcaataaggccccaaattaaggaaaaagcaaaaggttctcccgggcccgggggttaacccggaatttccgggccgggccctgggggggtcccaattttcccttttggggggggttttaaaggtggggggaataaggggaataggtggttcctgggggaaat

SEQ ID NO: 78485 - DNA, 185 bp, Zea mays
  Clone ID: MRT4577_171602C.1
gcctccggccaaaccaggagttgaagcaccataattaatgggaaaggaccgaactggatcacataattgccactcactactgatggcaagaatggtcaatcaaaacacacagtgacctacatgagctgagcgcattgtagggcaaggctctttcgacataggattccaagccaagtgtttgcaaa

SEQ ID NO: 78486 - DNA, 298 bp, Zea mays
  Clone ID: MRT4577_171603C.1
cgcgtcactcaagctaatgagagtgtcatcaccaacatctagtgctagtccccctttctttcatccagccatggtatgcatcaacaccttccataactgccccattgccataagagcaaagatcaacacgaggtccaagggcttcagcagtaacgtgacgaaagggttaccaacaccatccttccatttcctgtgcagggcgtctactttcgcggctgacaccatccctcctctcgtgctggacgaaaaccccaaagcgatcattttgggggcgtggtcctggaacttcttccttctt

SEQ ID NO: 78487 - DNA, 1368 bp, Zea mays
  Clone ID: MRT4577_171604C.1
cccacgcgtccgcggacgcgtgggcggacgcgtgggcggattctggattcatttcatgttggggtttcgtttattctgtttgtaattgcccattcattcatgccgttcgtgcccacgcatgcagcccatgaggatcgagcatatggaggagcctagttcttgatccaatctcccagcatgcttgacgaacgcgaagacgaacgtggggcgaacgctgcatgctaacgcggttgatcttattcctaataatccgtagcgattcgggagattgatttttgatcatgcacaagcgatccaaatcctgcgagccgtacaggaagatggaggagcgcgtcgggtgcagcaatgccgcgacgtccttcgacgactccgccaccggcaggacggcgggcgccgcggcggcgcagtgctccacggtgtcggtgttcctcgccaagatcaacggcgccgcgcgccacgtcaccgccgtctggagcaagagcctcatcaaccagtccttcaccgtctccatcgaacggccgggcgacggcgacgggccggtcacccacagggtggagctgaagccgtggccgttctggagcaagaagggcggcaaggcgctcgacgtgggcggcggcgaccgcgtcgacatgttctgggacctgcgctcggccaagttcgcggcggcgggcagcagcccggagcctgccggcggctactacgtcgcgctggtcagcaacgacgaggtcgtcctcctgctcggcgactgcaagaaggacgcgtacaagcggaccaaggcccgcccgtcgctggaggacgccgtgctggtgtgccgccgggagagcgtgttcggccgccgcagcttcgcggcgcgcgcgcggctcgacgccaggaggagcaaggagcatgagatcgtcatcgagtacgcgctcgccgccgcgggctccagcagggacccggagatgtggatcacggtggacggctccgtgctgctgcatgtcaagagccttcagtggaagttccggggcaatgagacgctgctcgtcgacgaggagccggtgcaggtcatctgggacgtgcacgactggctcttcgccgggccgggcacgcaggcagtcttcgtcttcaagcccggcgcaccgccggagatccaagaggacagcggagggaacgccatccagggtgacgggactgacttctgcttcttccttcaggcatggaggacggaatgaggcggtgaaatttgaagggcaaggcaatgatcttgtcctcgcgctactgatctgttgatgtgaatgacattgaaagcgtatccagctttacaaatttgtaaccaggaacacttcgtcaatccaagtttctgtcactggaaatttaatccaagcacac

SEQ ID NO: 78488 - DNA, 546 bp, Zea mays
  Clone ID: MRT4577_171605C.1
ccggccgggtctcagatcaagctagcgcacctgacacccaccacctccctcccagatccaccaccccagccatggacaccgtctttgactccgcgacctcctaccacggctgcgcgaactttgacggacgacccttctcctccattgacgacggactcaggctgcctggcgcctggcgactggcttcgcgtggcttcccggcaccattaccgggcctcacgctaacggatgctccactcgagatgatgacctctgggaccgagcatgtacttcatcttgatgaatgcgacggaggcgccaatctcctgctgctcaccgataggcggagtcaggaagaacgactgctgctgcatcggcatggacctgaaggtaactgccacgaccatcaagataacaatgaaacagacctgaggactggagctccccggaggctgcaagagtaaggagacgtcgctcagacagagcacaggtgaacgtggagaaaatgaacggacaacaccgcgacaggcagaagcttttcctaacgaccaagaaaacgaccatgct

SEQ ID NO: 78489 - DNA, 353 bp, Zea mays
  unsure (1)..(353): unsure at all n locations
  Clone ID: MRT4577_171606C.1
gttctgtcatgagcagctggaggcactctaggtgcaatggtggaccgataaagtcttatggaccagacctgccgccggctacaggttgtggggcctagatgtnaagntcatggctaacttggcagggcggtttttaattcctcatgtattagagacaatgaagtaatcgtactatgggtgaaagacgctgagtttacaaggtgtgtccttgctatctggaatattgtgtgggggatataggtcgtcaaaattcttctcccagaaggctttaagattggatctgacatggacactgacgttgatgctggcatgtacgatgtactcttgggtcttattctcgatcctctcaccac

SEQ ID NO: 78490 - DNA, 434 bp, Zea mays
  Clone ID: MRT4577_171607C.1
caagcaacatagaaagtggcatccagtttcaacaacagagcagcaatggcgaccaagatattttccctccttacgctccttgctctttctgcatgtgatgctaacgcgacaattttgcctcaatgctcacaagctcctatagcttaccttctttccgcataccttacatcaatgctagctccagactgtgaaaacccagctcttcaatcctatacgctccaacaagcaatcgcagtacgctacatacctttatcacccttgttgtttcaacactgcggcagtcctatctgtggggcaacacattggtacgaaccatcacggcacactaactgcagcgactcgtgctacctgtgattaacacgagttctctgtcaaacctttctccctactctcagcaacaacactatcttccattcaaccaactgtctacactg

SEQ ID NO: 78491 - DNA, 421 bp, Zea mays
  Clone ID: MRT4577_171608C.1
tccacacgttctacactcgtgcgaccaggcttacgtttattcgtccgcccacgcgtccgggggggcgggcttctgctgatcgtacggatcaggttcgggatccagaggttctacgctgctcggtgttgtgggtgagccgatccagacggcgacgtccaatgtcgagtaccgctgcttctgaagcgacctgcgctggaccacggtcgaacactcaatacacaacaccttcagcacctaccgtgaagcgctcacgtggacgataatcctggatacgtacagacgcagacagacccgagggttcggttgaactaaccttgtccacgcaggagggctaacgcagacggcctcgatgtcatcaactgcaatggatcaagtacgtcgcagcatgaccgacaacgaggcccattcccgccgacgacca

SEQ ID NO: 78492 - DNA, 2335 bp, Zea mays
  Clone ID: MRT4577_171609C.1
cgattctcaatatgaggatggggaacttagagaatctggtgattgttattgggtggatgatggttatgaagatgttaaacatgccaactggcattatcaggtatcagattacaagaatgaagaagctactcctggcctcacgtctctccatactgattctgttgcaaataatgtggttattcctgttgctaatgacaatggaccacaatctagaaaggaggacattgctgtttcacctgtgtcatctaagtgttcatggttaacaaactgcttagatggtggatctatagctgatggaaagtctcaaagtattcatttgagaggtgatactaacatgtatgggtcaaacccaagccgtgtagcagttagatctgctacaacagtaagccagtctgaaaggtgcaacgatgccctaggtgatatgttaaatatcagaatgaagaacacaggttgggatatgatgcctgaagatcaaaagcactctcaacatgatgcaagggatgtgactgattcgtctaatcggtgtgttttgagctcagatgcggctagagacgatgattcactgcaaaaaaagggactattgaatagagatcttcaaggagtggaacggcaaaaatcatttgacagaccccagaggaatgaattgagcagatctgacgatggttatggctcaggctcaaaatctggaagggcaatggactctcatggatcgcatgacatgtatggcacatcccgtcatgttcagacaagcgctcgggtggagtgggtggaaagttcaaaacgtcctcgttctactcggcacaaatcacctgaatattataattatggcacatcaggtccaaggaatgctgcagaagctgctgtggcaaagatgcagagcagtggctttgttgttgcacgtgatggcactttagtaagagctgttgatgctgcaaatgctggtcagatgcccagaaggatgcgaaatcctttaagtagctcatgccacctgatttctggatggggttccccagttgacagggatgaagcctgtgggatgtccagaggccccgtgcatgctaggaaagcatctccagagcgtcactttggtgcaaatagtaaccggtccagtcgatatggttctgaaatggagaaaaatcatactactgatgcaaatttgagttctgtccattgctcgctgtccagtagacaacgaggcaccccgacatctagagcatcacttaacctttcccgtgctcacagcagatctccttctgggtccaggtctcgatccccacatgattgggcacctaggaacagaggcaagatcatggcaaatggaggttcaactttatggaagcatagtagatctccacctaatcacatgactaaaggtgaaattggtagaatggcttcacctcggagacaacctggatatgatgatcgagctatgtgttacagtccactatcaagaaacaacacatactccaagaatgcttcgacatgggttgatggaaggaatggttcagcagtggatatttctgatgatcataataaaaggtattcaaggagaagctcacctctgagaattacctcacggaatgacagatttgatgtcatggactcccaaggacgaccaaggtctggagaattctaccgtccgacacaaggaagacttctttatggttacaatagggaaaataagcatggcagaaatggtgaagatggaagggaatgcactgatagatatgcgaataattctgtcaagcgatatgaccggagtggtgcagtaaagcaatttagaaatgatactggtgataaatttcggactcgtatttctgctcccagatcgccagatctccaaaggggggtgagtcctcggagatttgacagaagctttgagaggtagctgactagctggctgtgaatttgccttatagaactaaaatggaaaataaagacctgtctggatgattgagccaggaaatgttgcaaaaccttgatggagttcaatcataggggttgatggaggactcttggcagcactgtttttttttctgcttctgctgcatatattcaaggcacagaaatgttggaccatgcacttctgtacggggaattcagattaacttcataattttcctgtttcagtctgtaaatatttatgttggtagcagaattacaatcactcctttcagctttattatagctgttcttttttttaatttctgatactttatcatgtttgtcccttttgttttttcaatgggtattgtccctgtacgaggtccattttaacatgatgaatcaattaaattttgagctcaaaaaaaaaaaaaaaaaaggggccctcaag

SEQ ID NO: 78493 - DNA, 623 bp, Zea mays
  Clone ID: MRT4577_17160C.1
attgggtacctcgaggccggccggggagactctgcagaggctccgatcgctcctctccactttctctttgccagctgcactccgcctccgctgccggtcgccgcctccgaaactcccaccgtccgaccactggaacgatgagtgtagaggattaacatgctgcttctgctgagcagccgacagggcccctaagctcaatgaaaggatactctcttgtctgtccacccggaccgccactgctcgttcatggcctgagcttgagatctctcctgatgctcctgctgcattcaaagttgttgttgagatcacaaaggcaaccaaagcttaatatcatcttgcctagaaaactggagtgatcaccgtcgatcgaggcacgtgctcatcagtcgcatgccctcacaattatgggttcgccccaaggactcttgtgtgaagacaacgaccccatgaatggggtagccctgatgcaggagactggtgtccctgtgtctttcctgggagcaatagctatcggccttatagccatgattcagcagggtgactaggctgacaagataatagcagtctgtgctgatgatcctgcatatcggctctacaacgagatctctgagctgtctcctcat

SEQ ID NO: 78494 - DNA, 381 bp, Zea mays
  Clone ID: MRT4577_171610C.1
aaacaaacttaaacaaacataatataacactatttattacccgtcacattacaattatgacagcacctatgtgtcctcatggtaataacaacagctcgcacgcgctgctggtttgttccgggacactgctggttctccggtggatcacttttcaattgtaaacactgaaccgtgatggttcggacacctggagtgtaaaatcttggatgctggtgctgctagcagaatatagtaatatacaacacgcttcctacttttggtatcccaaatcttgaatccagctactgaaaatcttggggtcaatcagaagtgtttccctgcagacacaaagtgtcatttccacccacagggaagtacgttcccgctcctgtcgactgaaaa

SEQ ID NO: 78495 - DNA, 412 bp, Zea mays
  Clone ID: MRT4577_171611C.1
gaggggggaaacaaacagagcccaataataaacacgtttttttgtttaacttgggcaacaacaatacttagggctagtttgggaaccccattttcctaaaaaaatttcatttttacaagggaaaatgagctaatttccctttgaaaaaagaaaatcccttgaacggggtttaaaactagccctaaatggctgaataggccgttgccaaaagaatacctttacattttgtttttggcgaagttgggctgcctagcccaacgaggacccattaatgggcccatggtgtgaccccttgtggtgggagccacagggggggagacataaattttttttaccgttggaaataggcccgtttgatcattattaggcacaggcagtgcgagccccctttagtttgaaccaaattcctcgt

SEQ ID NO: 78496 - DNA, 357 bp, Zea mays
  Clone ID: MRT4577_171612C.1
aggacctgatactaccacttggatctggatttttcatttttatgctcacaattaacaaagtggcaccaggtgatgttaggaaaactttaacacaaaatttatggcccatttcggccaactctctatcatctttctttggctgagtggcatgtatttccatggtgctcgcttttccaattatgaagcatggctgagtgatcctactcacattggacctagtgctcacgtggtttggccaatagtgggccaagaaatcctgaatggagatgtgggcccaggcttacgaaaaatacaaataacctcaagcttttttaaaacttgtcgagcattcaacataacatagagaattacaccttt

SEQ ID NO: 78497 - DNA, 256 bp, Zea mays
  unsure (1)..(256): unsure at all n locations
  Clone ID: MRT4577_171613C.1
ctcctctatcnacgcaccaccccaaagacctccctccgcactcccagggtgttcaaccctgcnccctttccccctcactacatgtcctactccctctccccccgccgccaaaaccgccacgtctttcccccacaatgtccaaaataagcttgcctccccggctcatcacctcacagtcttgaccctccgtaccaatccttgcaacttacgctccttgatttatccccatcttcccccccattcccctttttttcaa

SEQ ID NO: 78498 - DNA, 725 bp, Zea mays
  unsure (1)..(725): unsure at all n locations
  Clone ID: MRT4577_171614C.1
ccgggaccctacttaaaaccttcatcattgattttactgttggtacactcgctttgtaaatggcacctgtacattgccatctattgaatgtgtaaacaaatacataaaatgttatactgcttacaagttacaatgccattcccatgacagatgcaacaggtcctaactatagattgagggaggtctagagaatgtagaattgtagattgatagtgagaaggtgaaaaaaaaatgctgagattgcagcagaaaagctattaacgttgcatgttgcacccgagggtttattgctatgtttattcctttttgtcatcctctatgtgttatataaactatatctgtacaacaactttgtggagggaagcagatattttcatgtgcagatcgttactgacataaaatttgtctctagtgttcttttatcttctgataatatgcgttgacccttatctatttctcataatataccccttcaattcatatgttttataaaccatgaggagttaaggaatcttttgtctgatgcaaccaaatgcttggaaatttcaagcatttaggcttgttagccagttcctttggccattgatttgttaaatccattgcatacatgcttggaaaaattccaagaaccagttntagccttctgaaatgtcttaagatctgcgcattgacattttttttttctcgaacacgtgggagaaccacgcatcaatatatattaagaa

SEQ ID NO: 78499 - DNA, 188 bp, Zea mays
  Clone ID: MRT4577_171615C.1
gatgggcatgaagcttgacacaccccccctgacagcagccaatgcgctactgaatgccacggccccttccgtcatcaagcatactacgagcaaacggaacctaaacagcccagagtacatgctggcggactgccgactatacctcagctcagtgagcatccaggggcacactcatggggcgcaggcca

SEQ ID NO: 78500 - DNA, 608 bp, Zea mays
  Clone ID: MRT4577_171616C.1
ctcgaggccggccgggaccgtatccaactacgacttgctctcgtcgcctggtgccttcgctgatcaactgcctcttcccggcctctgtaactagagaggtcaggacatggcgcctctgttctttggctctcttggtgcaactgtcttcgtcgtcgatgctgctgtgagtgtgaccatgagactgagattcaccgccggggactatgtccagaaagacactgaagacaacgaggagagagactgcgacagcggcctggtcgccgttctccaacgtcctgcgcctcctcttgctgaaggaccaagagatctccgtgctctgcgtcgacgacgtctggctcatagtcttctcctcctgcaccaacctctcccagatcatcacgctccttgacgaatgatgtaattgacgaggaccacacgcattctagaaacctggggaaaacacaacacttcttccgctggaattgcacttagagcatagccaatatgcttgtgtgaatgttcctgttgcggaagcatgccttctactctgctagatgacacgtgaatagcttgagggattgaatgttcaagaactccacagattggagactaatctggcatctggactg

SEQ ID NO: 78501 - DNA, 150 bp, Zea mays
  Clone ID: MRT4577_171617C.1
tctctccgacgcgtgggcgacctcagcgatcggggacccaaacttttaaatacgggccgtcacccaagcatgtaaggtcctgacgtttaccagccgaccttgtgacccgcttcagtcccggcatccttcacatcctacacactcaaacag

SEQ ID NO: 78502 - DNA, 513 bp, Zea mays
  Clone ID: MRT4577_171618C.1
ggggcaggagggaaaccggggacttgacaccagcgattaattacgttagttttttaaaaacgagggggggggggggatggcttgcaaaccagcccaggggcgggagccggcaaataaaagccccccaaagtcgtagcccgccatgggaaccagggttttggacagaagccaaaaaaggaacctgtccctgacaaacctgaccacggggttgttgctttgctggataaacccaacaaccaagggggggggaaaaaactggatgctgccccaccccctcgccgccgggtactcctccagggccgcggggacaacccgcccctaatcccgttcctggccaagaaggggaaaggccttgcccaggcaccgggccagaacgaccccgtccttaagcgccgggcacccgccctgcccaagctccggggtaatggggggcagggggtccccccccacccacaccccgccggggttgatgctgccggggaccagcgccaggggggaccggaaccgcagggg

SEQ ID NO: 78503 - DNA, 505 bp, Zea mays
  Clone ID: MRT4577_171619C.1
aattcggcacgaggcgcgtgtgcgtggccacgtccctgctggcatcctctgtggtctggtccctgagagagattccgtgcccgctcgctgattgtgaggacggaggaccgtgaagcagccttgaatccggtcagctgttcccacgctaggatcgaggcgatcgtgttgttgtgggggagggcgttggtggccggccacgctcaggtcacgccgctgcccctgggcgcagtgctggctgcggacaatggcgggatcctgcggcatgccttcactggtgcgtcggtgtgcgacggagcggccggcgactcgttggagcgcgtgctgatcatctcgctctagaagctgccgttgcggtccccgccgccggactccgggccggcgtcctcggcgctgatcatggtcatgcggcggacgctgtccgctcttaagaaacgcggggactcgcacctcggcgtctgccagctgctgctcggcctgctcgatgattcccagatctccgactgcc

SEQ ID NO: 78504 - DNA, 585 bp, Zea mays
  Clone ID: MRT4577_17161C.1
ttgtgggtttttttttttttttttttttttttttttttttttttttttggaaagaaaaacgaagcagcatcccatcaaaactatttttttcagcgggctggggtactggccctggattttttataattggggacaccaataccaccgcccggctaatatctcgaaactaacatcacccaatttattattatatcccgaaacaaaaattctgccgctgcgagggaacgaagggcagctgaccaatttaaaacccaaaaccggggcccccccccatggccatggggtttgcaggaaaggagggggcttgctcacccacctggggggcaacaacaacggcatcagaggggaggaagggtttcgcccccgaggcagcaggccccaagcagcaccccacaacctgggggggaccaaggatcccagcagccatcaaggcctcataccccccgggggccgcatgggccccataccggaagttctcatgggcaagaaccttctcagaaaccacacggccataaacgccggcatttttggcaaccaattaaaggggatagctcagggacttccttacaatttcagccccaacct

SEQ ID NO: 78505 - DNA, 184 bp, Zea mays
  Clone ID: MRT4577_171620C.1
gctttgagaccattctacgtggaggatctccctgggccaccagttctgccacccgtatggtcaacgtgtttcaccatcggcatgggtaataagccgtgggtgagcctgtcctagggctagggaatcaagcttagcatcataaaaaagcaaaggaagcgggatgccgctttccaggcttgttgtc

SEQ ID NO: 78506 - DNA, 348 bp, Zea mays
  Clone ID: MRT4577_171621C.1
aaacgaatgctgggtttttattccccaataaaaatcaacaaattggtttagggttcagcttttttttctaaaacagtttacatgtggtaaattaaaaatatacccaattggggccttttttgatttacaaaaaaagggtaaaacttgtcccaactttatctgctaagggatgggttgaaatacatgcaaattgggggggcaatcctaaggattgacagttttgcaaaaggaacaatccaaatccctttaccacaaataaagccagagggaaccccccctgcgaaggaataaaacttcttgggggtcaccctttcccaaacgaaaaggataactgtcccaacaaacatt

SEQ ID NO: 78507 - DNA, 1607 bp, Zea mays
  Clone ID: MRT4577_171622C.1
cccacgcgtccgctcgtccttgataagtgagcaagcggcaagaaccggcggggcgcccatgtcgtcgagagacttatacttccacgacgagctggcgtcgctgttcgcgcagcggccggcgccggccggagaggcgatgatgacgcaccagcaccagcagcagcaacaggcgccggcgtcgtggttcgcggactacctgcacgcgggcgccccaggcatggggatggactacgacctgctgtgccgcgcgctggacctgccgctgccgggggacgacgtcgtcaagagggaggaggagctgctgctggtggacacaggcggggacggaggaggcttcgccgcgcccacgcccacgcccagcgggggcggcacggcgccggtcacgcccaacaccacgtcgtccatgtcctcctcgtccagcgaggcggcgggcggcgccgccggaggaggaggaggaggaggaggaggaagggaggaggactcgccgcaggggaggtgcaagaaggaggaaggggatggggaggagagcaaggcgctcgacaagggggaggaagacgctgacaagggcaagaaagggtcagcggcggcaggcaagggcaagggcaagggcgagaagcggcagcggcagccgcggttcgcgttcttgaccaagagcgaggtcgaccaccttgaggacggctaccggtggcgcaagtacggccagaaggccgtcaagaacagcccataccccaggagctactaccggtgcacgacgcagaagtgccccgtgaagaagcgggtggagcggtcgtcccaggacccggcggtggtgatcaccacgtacgagggcaagcacacgcaccccatcccggtcacgctccgcggcagcacccacatcctcgccgcgcagctgcaccaccaccacaaccaccacctcggcgccttcccgacgccgctgccgcagacgggcgcggcgccgttcgggcgggcagcaggcggggcgaggcgtcatcgacatgctggggctcctgcccccgcgcaaccacggcatgagcggcggcccgatgagcgccgtggctggcgccgcgacgacgacggccgccaccattactactacctccaccacaccgtcgtctcccccctcgctccagatgcagcacttcatggcgcaggacttcgggctcctgcaggacatcatgctgccgtcctttccacggcggcggcggcggtaacatccagccctgaatcgatcccaattgctcaccgccatcgcaagcgcagcaagctaatgaggaaggaagctagctagataagagatagtagtttggttcttgttgatgcttaccctctttaatccttcgttttttttttcaccgacgacgatttactcctctagacgggaccgcgcgcgtgccatgcatatcggtccttgatttgcctttccgcctgcagctgtactggcgccggcaggcctggtctcgtaacgtttcttaattatgcatgatgatctagctagtccttgcaggtagtactagccgttcttgtacatgtacctaattaatcaactcccccgccggctcgtcctggccatgagctatgataattttatgctagctcctctttgcatt

SEQ ID NO: 78508 - DNA, 387 bp, Zea mays
  Clone ID: MRT4577_171623C.1
attcggctcgagcacacaacacggggcctcattttggcatgggtggtgctcgacggacgaggggggcatctgaagctgctcgcgggggcttacgactgacacaaatgttgattagactcttgctacatctgtatcctggcacacgcttaaaattaaagggaattgtgaattagacatgtttggtattgtggtccactatatgcattgccaattacaatttttgcaacttgcattttaactagtccgctacgttcctagctgacctgcactttgtgtaattgatttcttccatgtgcttgccaccacaaatgtttttgtacactcttgtgaagataatgaatggcgcgacttgccccacatcagctgattgccatggatcaggggggc

SEQ ID NO: 78509 - DNA, 381 bp, Zea mays
  unsure (1)..(381): unsure at all n locations
  Clone ID: MRT4577_171624C.1
ccgggtncgacccatcgcgtccgactgttttacttaggaataaaagagttggtagctatctttttaaaaaaaaaaaaaaaaaaaaaaaaaaaaaaaaaaaaaaaaaaaaaaaaaaaaaaaaaaaaaaaaaaaaaaaagaaaaaccaaaaaaggggggccaactctaaaggaccccatgcttgcggaccccatgcttccctccattgggcgggggggtatcaaatccaccgacccggaattccccaagcctcgccccctccaaaacccctggccggaaccccccctgaatcgcctggccgcaaatcccccttatcgccaccccccgtttcacccgttggggccctaccccaagcgcccttcccaacagggccccccccccga

SEQ ID NO: 78510 - DNA, 190 bp, Zea mays
  unsure (1)..(190): unsure at all n locations
  Clone ID: MRT4577_171625C.1
aancncggcgcncgcaccgacgaagaacgaagttaaangcgacacccggagcgaaaagcagaagcccgcgaaccaccgaggagacgaacgcaaggggcgcccgaagccaacaggcggagggcacgacggccagggcgacacgccaaaagacacacccaacacccccccgcggggcgagggacgaggagaa

SEQ ID NO: 78511 - DNA, 696 bp, Zea mays
  Clone ID: MRT4577_171626C.1
tccggaatacacccacttccccactgtcacgagaccctaacgatgtcgcttatttacccgccatgcgctcccttcgccgtccgctcccggaatacgctggacatccatcgtgtcgcccgcacgtccctctctgctaggacgcttgccgtcgacaatccgccaggccatgctctctgcacacaccgcgcaccccccccgctgcccaaatacctgtatgacagcggctactcttaacctcgacgacgtcgtacctcccactctgtctccgcgagaccactaccactctgacatcccactgcaccctaccacctcctacacaccaagcatctatccagacgttgcaccattccggtcaacgattacagcgactagcatcatcaagttcctagctgctgtctggcgactctcttatgtactacgtcagcaccgccgccgtaccacaacattatgccgatgaacatccctgcatcagtgcatacggctctgacgctgccaccaggacacatctactgtctccttctccatttgtctgaactggtagcttgctactaccttgtcaccaccatcgatcctgagcaaacgacgtagaacatctccctatcgtcctatgacactaggcataatttggcctatctgccactacactattgtgctaccttcgaggtacatacaataactcagatggacattcttact

SEQ ID NO: 78512 - DNA, 331 bp, Zea mays
  unsure (1)..(331): unsure at all n locations
  Clone ID: MRT4577_171627C.1
accataactagcacaattctttcatcctcatctgtggcagactatagcgtgcggatcggagatggcgacaagcgggtggaggaggagagcggatttatnacatggactcanaggatgaacaatggctcattcagttgtatcatgcaaattcagattcaaacagctgttaaaggaattatctctcttactaagactttgaaaggataataagcatatttgaaaaggatgtctacaacaatgcctaaggaaaaaatgatttgagtgagtttttttatagatatgctgttttaggaaagggtgattacctgcatgctgtgtataaatattggtc

SEQ ID NO: 78513 - DNA, 745 bp, Zea mays
  Clone ID: MRT4577_171628C.1
gccggccggtttcgaaactgtttctttttttgggaaagattgcaactgtttggtagtgaactattaacgagcttattagcagttggacttaactatgctgcaacattcatcttgccttcaagttctttattaaaagatcccataacaacactttcaacaactgtacccattttatttgttggtcatttattgttggttgcattatctaatgtcttgcgtggaacatcatataaacttttgaaaacacttttatacagtgcaatagcaagtgttttagcaacaagtatactttatgtcttgattgtgttatttggtgcacccttattagataaaataccaaatacatttctcttttcagcttatttatctattttaaccatcatgccttgttttcaatcacttgaaaatcctgtttggattaaggtcttcatacagcacagccctacaacaacctcagaaatatatgcttatgcacaagtagtctgcacattgactggggcatggattggtgcgatcgttttgcctttagattgggaaagagattggcaagtgtggcccatttcatgtattatatcgacttatgttggccatgcagtgggtgtattagccgcttttgtttggtcctctttaaaaggcatctttagcaaaaagaaaagcgaatgaatgctaaaaaagatggtttaatgaccctctgttgaggaataaatagttttagaaggaaaaaaaaaaaaaaaaaaggccccta

SEQ ID NO: 78514 - DNA, 2808 bp, Zea mays
  unsure (1)..(2808): unsure at all n locations
  Clone ID: MRT4577_171629C.1
ccacgcgnntccggagngtaggtatagacgccggtagtagaccgggtaagcatatttgtttattgcacctgaggaggaagacgccggagagacgggaagctatgtttttgcacaggagtgtctggaccggctgtcattgctgttggtggtaatacgattctgtccgtggcagctgagttgctcccatcgtttttctcctctgaagattggaagagacgccacgcggcactagtgaccatagctcagattgcagagggctctgctaagatgatgattaagaatctggagcaggttgttgggatggtgctgaattctttccaggaccctcacccacgggtgaggtgggcagcaattaatgcaatagggcagctttcaacggacctggggccagagttgcaaaatcagttgcaccatgttgtgctaccttcattagcttcagcaatggatgatgtccagaacccacgtgtacaggcacatgctgcatcagctattctgaacttcagtgaaaactgcagacctgatattttgacaccatacttggatgtaatagttgggaaacttctattgttactccagactgggaaccaaatggtgcaagaagctgctttaactgctttagcatcagcagcagattcttctcaggaacacttccaaaaatattatgatgcagtaatgccatacctcaaggctattctcatgaatgcaactgataaatccaacagaatgttgcgtgccaaatccatggaatgcatcagtttagttggtatggcagttgggaaacaaaagtttaaggatgatgctaagcaggtgatggaggtccttatgacactgcaaggatctcagatggaggctgatgaccctataacaagctacatgctgcaagcatgggcaagactgtgtaaatgccttggtcaggatttcttaccatacatgaggggggttatgccccctctgctccagtctgctcagctcaaaccagatgtgagtgtcacttctgctggaccagaagatgaaaatggtgaatctgatgacgagggtgtcgagactattacactaggtgataagaggatcggcatccgaactagtctactagaggagaaagctacagcatgtaacatgctgtgttgctacgctgatgagctcaaggaaggatttttcccatggattgatcaggtcacgactacgcttgtacctctcattaagttctattttcatgaggaagttaggaaggcagctatttcagcaatgcctgagcttctacgttcagcaaaattggctatagaaaagggccaagctcaaggtcgtgataaatcctatcttaagcaactgtctgattacatagttccagcccttgttgaggccatgcataaagaacctgagccacaaatttgtgcaagcatactggaatcattgaatgaatctatacagctatcaggaacacttcttgatcaaaatcaagtaagatctgcagtggaaggtgtcaaagaagttatagttgcaagcactaacaggaggatagaacgaacagaaagggcaagggctgaggactttgattctgaagaagaggagctactcagagaagaaaacgaacaggaagatgaaatctttgaccaaattggtgattgtctaggcactctcgttaaaaccttcaagacttcttttattccgttcttcgatgaactctccatgtatttgacacctatgttgggtaagaataaatcaccagaagaaagaaggattgccatatgcatttttgatgatgttgctgagcattgccgtgaagcagcagttaggtattatgatacataccttccttctctattagaagcctgcatgagtgaaaatccagatgtcaggcaggctgcagtgtatggaattggcatttgtgccgaatgtggtggttctgcatttaggcctcacactggggaggccctatccagattatacaatgtaatcaaacatcctaatgccctggatttggataatgcaatggcctatgacaatgctgtttctgctcttggaaaaatatgccgatttcatcgtgatatcattgatgtatctcaggtaattcctgcctggttaagttgccttccgataaaaaatgatttaattgaggccaagcttgtccatgaacagctgtgtgtgatgcttgagcagtctgagagggagcttttgggtcataataatcagtatcttccaaagattgtgtctgtttttgcagagatattatgtgcgggcaaagatctagcaacagaacagactgccagcaggatggttaatctactaaggcaacttcaggcaacattgcctccttcagtattagcctcgacatggtcttctctacaaccacagcaacagctcgctctacagtccgtgttgtcgtcatagctaacctaaaatagcctcaactgtgtaaagcatatgagtcttcacagcttgacctttcgtgttctatttatgcgcttttgagccagagccagggttcctggggtttgctttcgcgttcatgtgcccttaggttttgtacaaggggcactgcttgcatccggtgtgtaatatcggctgcagttgcagaactgcacggatgtgtacgagactgggctctctccacatcgtcgattaagttgtaaagcagtatatcttgctcgcttagtaattttagttgggttgaaagaattgtaaattaaaacaattttggtagttgattttaatgtcgtatttcttataccatcagcatgggaaattttgtgttcaaaaaaagaagagaaaaagcagcttggttaaaataaaaaaaaaaaaaagancgnc

SEQ ID NO: 78515 - DNA, 232 bp, Zea mays
  Clone ID: MRT4577_17162C.1
aacaataaattccagtcctactccggacaaagtaaatttcaaccaacaggcctacaccctatttgaccgcgctaacaggaccctatatgtgcacaatcggctggttgatacagaagccccacgggctcaggcccttgctctgtcaattaattaccaacacaacaaaactctccatttaatgatatactacaggccaagaagtggttacttcctataagtcatgccattattt

SEQ ID NO: 78516 - DNA, 151 bp, Zea mays
  Clone ID: MRT4577_171630C.1
ccctcgcgtccgatcgactctcgagagagcgcgtgagtctctacaggaagggaaaaagagagcggcacagcagaacagatgatgccatggaggctctgcgatagacccctcgccgagataatggctagtagtgctggccgcgcaggctctt

SEQ ID NO: 78517 - DNA, 139 bp, Zea mays
  Clone ID: MRT4577_171631C.1
cgcgaagaatatgtatgtatgtgctggcactggcagcaccacatgtgagacatgccagttgatatattcattgtgataaagagtttctcactcgagagctgggtgaagatagataactctggagttgaagtccgagtta

SEQ ID NO: 78518 - DNA, 1880 bp, Zea mays
  Clone ID: MRT4577_171632C.1
gcctgcaggtgccgtaccgattcgccgtttcggcccaggcgtccgcccacgcgtgcagagcaaaggttttgagtcaaagcagaagattttttccgaggagtttgaacttgttactcaagctctttttacagatccaagtgaccaaagtggatggttctatcacctctggcttttagctcaaacatctagtccagataacccacagctgattgcttcatggccttctaatgctgcaaagctcagtttctcttttatcaaggaaaaggctgagcagcacacactgtcatccgtctggtcaaggactgtacccattgttctttattttaatgagcctgtcaaaggattaaatcattcaagtgtgaacttaaagtctgatttggagttcggtaaggatatcatatggaggcccctcacaatggcagactctgggtattctaactgttgggccacatatctccaaattataaatgaatgtagcagtttgcaggaatattctgttgaagtgagcataccctgctcgaatggcattgtatctagaagtggctctaactacaattgtcctgtgcattttacattttgcattgaattgatcagcaacgatccagtacagggtttagatatgtttgataagccagttgcctggaattgctcagaatcattccagcctcatggaaaccgtgatcctatcccttttgatctgctaaagattactagtgccttggtcgagcatgactcaaattggcattttgaaaggctgtctgaggagatagatcttttcagagagttagctgatgacaatagcaagtttgggaagttgacattagcccggctattgcttgcttgtgctgctataaaatcccgtggaagatctctaattgaaaggaagggatactgtgaagaggcactggggctcttcactgacttgattcacctggatccatctcataagcagtactatgaggatgaacggagcttagccctgatggataagttaacatgtgacatggagactttcacgaagcattgttctgttcaggttcaaccaaattcagctcccctgcatcatgtgcagtttcgcagattgtctgtaacacgcatcggatttgctgagcgtcctgggtttcacagcactagaaacccctacgaagataatctcattgaaagttctgtatttatctttcaacaagattggagctcactcaattgacacaacacggtatatctgctcgtctccattctcacacaaaatggaagcaagtgaagcttgtgaagcgtaccaagaggtaaatatcaacgtggaggatttgtcgttcaacgagattggtgtcagatctctgaagttagcacggtatatctgcccgtctccgttctcacacaaaactgaagcaagtgaagcttttgaagagtaccaggaggtaaataatatcaacgtgacggaatactgggacgccatattgttcttcagatctttgaagctggcacagcttgatatcagaggaaatgcagttgccagcaaggacggcttcagaactcttgtcgtgacgctcattccttgtctaaaatggtttgatggtgaaggtgtcagttaatcggtggagttccacttaggagttgggcaatcttggtagtgtcaaggctcactatgtgaactattttttgctagaagccattgatttgcttcatatgcagtgctgtatttgtttatgcgaatctgagacatgatcatgatgttacagagttctgaattttcaggattgaactgtcataggtcatacaagaaagaagatgttatctaattgcaagttgttctactttcagaattctttaataagtttatttattaaaatagaacagagctacactgctaccatttacatttt

SEQ ID NO: 78519 - DNA, 670 bp, Zea mays
  Clone ID: MRT4577_171633C.1
aaaggctgagcagcacacactgtcatccgtctggtcaaggactgtacccattgttctttattttaatgagcctgtcaaaggattaaatcattcaagtgtgaacttaaagtctgatttggagttcggtaaggatatccaatggaggcccctcacaatggcagactctgggtactctaactgttgggccacatatcttcaaattacaaatgaatgtagcagtttgcaggaatattctgttgaagtgagcataccctgctcgaatggcattgtatctagaagtggctctaactacaactgtcctgtgcattttacatttggcattgaactgatcagcaacaacgcagcacagggtttagatacgtttgataagccagttgcctggaattgctcagaatcattccagtctcatgggaaccgtgatcctatcccttttgatctgctaaacattactagtgccttggtcgagcatgactcaaattggcattttgaaagactgtctgaggaaatagatcttttcagagagttacctgatgacaataggttatgctctaaatccattctgaatctcctttttcataattataaccccatttccataacatactcccttttccagcaagtttgggaagttgacattagccccgctattgcttgcttgtgctgctataaa

SEQ ID NO: 78520 - DNA, 766 bp, Zea mays
  Clone ID: MRT4577_171634C.1
acctcgaggccggccggggctccctcctgccacctgcgcgcagcctcacggcgatgtcagcggctacgtcgacggcgccgtcgatcggagagtatccttccccggtgtcccctccctacccggccacctccaaggacctggagctccggcgcgccatgaccgcctccgcgcgctccgcggccttcgcgtctgcggacgtcgtgttcgaggacgagtggctcgccgtcgtcgacaaacctgccggcgtctactgcgacgccctcctcacctccttcccttgctctgccgtctcaggctggaccgtgatactagtgggctcatggttatcaccaaatgcaacaaagttgctgggaagctagtgaaggcattcactgaccataaagtcaagaaaacatatctagctctctgcataggtttcccaccggcatgggaaaagatcaagatatgttctggccatgggcgatcgaaacacggcgcttggcgtgtatatgctatgtctgatgttggccgttcactcccaggcggctctgtcgtacgggacatgagcacgcggtttgaagttctaggcgtcaacggtaaagggcagttcagagaaccctacaacttggacaccgacgatatcgagccaattactgtgcaagaaaaggcgactgaccagacttgtggcggtgatgcgaacagcagtgtcatcttggttagagcctatccccagagcggacggacacaccagattcgtctacactgccagtatcttggtctccctatc

SEQ ID NO: 78521 - DNA, 1115 bp, Zea mays
  Clone ID: MRT4577_171635C.1
atcattccagcctcatgggaaccgtgatcctatcccttttgatctgctaaagattactagtgccttgatcgagcatgactcaaattggcattttgaaagactatctgaggaaatagatcttttcagagagttacctgatgacaacagcaagtttgggaagttgacattagcccggttattgcttgcttgttctgctataaaatctcgtggaagatctctaattgaaaggaagggatactgtgaagaggcactggggctcttcactgacttgattcacctggatccatctcataagcagtactatgaggatgaacggagcttagtcctgatggataaattaacatgtgacatggagactttcatgaagcactgttcagttcaggttcaaccaaattcagctcccctgaatcatgtgcagctttgcagattatctctaacatgcattggatttgctgaacgcctgttgtgggttcaaatgctggacctaagccataatagtctgagatcagtcgaaggattggaggctttgcagcaccttgtgttcttgaacatcagcaacaaccagatcagtggtttcacagcacttgaatcccttacgaagataatctcattgaaagttctggatttatctttcaacaagattggagctcactcaattgacacaacacggtatatctgctcgtctccattctcacacaaaatggaagcaagtgaagcttttgaagcgtaccagaaggtaaatatcaacgtggaggaatactgggatgccatactgtttttcagatctctgaagttggcacagcttgatataaaaggaaatgcagttgcaagcaaggagaacttcagaactattgtcatgatgctcattccttgtctaaaatggtttgatggtgaagatgtcaattaaaatggagttgagcaatggtagtgtcaaggctcacgctgtaaaccaattttttgctagaaggcattgatatgcatcatatgtactcggccggtaggggaaagaccgtccccctgtattatatcaataaaaagttcaatcgcagctccgagtgagtaaagtgactaaagctaaaaaaaaaaaaaaaaacaggcgcacttttgctaactac

SEQ ID NO: 78522 - DNA, 1305 bp, Zea mays
  Clone ID: MRT4577_171636C.1
gccggcgccgcctccccgctccgctccctcctgccacctgcgcgcagcctcacggcgatgtcagcggctacgtcgacggcgccgtcgatcggagagtatccttccccggtgtcccctccctacccggccacctccaaggacctggagctccggcgcgccatgaccgcctccgcgcgctccgcggccttcgcgtctgcggacgtcgtgttcgaggacgagtggctcgccgtcgtcgacaaacctgccggcgtctactgcgacgccctcctcacctccttcccttgctctgccgtctcagagaatccagcaactaaacctaaccttcaccttgcaaacaggctggaccgtgatactagtgggctcatggttatcaccaaatgcaacaaagttgctgggaagctagtgaaggcattcactgaccataaagtcaagaaaacatatctagctctctgcataggtttcccaccggcatgggaaaagatcaagatatgttctggccatgggcgatcgaaacacggcgcttggcgtgtatatgctatgtctgatgttggccgttcactcccaggcggctctgtcgtacgggacatgagcacgcggtttgaagttctaggcgtcaacggtaaagggcagttcagagaaccctacagcttggacaccgacgatatcgagccaattactgtgcaagaaaaggcgactgaccagacttgtggcggtgatgcgaacagcagtgtcatcttggttagagcctatccccagagcggacggacacaccagattcgtctacactgccagtatcttggtctccctatcagaggtgatgtgaagtacggcggggtgatcgagtgggacggcgtagagtgtgagggccatgcactgcatgcggagagcttgtcatttgtacaccccatcactggattgcccatcactctccggtcacctctccctccatgggcaaaagattgcatatcagcaatggaataaagttcccttggcctcaatgtgatgcacgatgctccatttggcactgaaatgtccaccaaggatgtaactctgagatctcaaaaggcatcatctcttgaagaccttttctgggagtagcgttgggaaatagcactatcaaatatactgagtccactgttacaggcagttctacttgagactgtaattttagcacgtgtaccgtagagatattgagttgtttgttgtagttttgtttcaaattgtgagtacccaaacgcaggcacacacaacacatgttgtaccatggatatttatttatttatttggtcgttcaaccaacaaggc

SEQ ID NO: 78523 - DNA, 395 bp, Zea mays
  Clone ID: MRT4577_171637C.1
ggaaaaacttcggcccattaagagaatcaaaccccagaagaggtaatttataggaacccaaccaattcgaaggaatacagggataaactaggaaaacgggcttaaagggggccatggtacagcaacagcaagacatttaaaaaaaaaggggcaaacaaaagggctagacaaaaaagcccccgtttcatcaaatggctcacaccaaaatggcaccagtcctttactaccaaatccagggggggactgagcttatcgccgggttggctttccaagagggggtttcccaaaaaaaaaaggcttgggttttaaagggggaaaaacacgggcagcctttccacgaagaggttccttggtcctggtcctaggagcggcccttggtttcttgatagcctttt

SEQ ID NO: 78524 - DNA, 386 bp, Zea mays
  unsure (1)..(386): unsure at all n locations
  Clone ID: MRT4577_171638C.1
gccaactatcttctcaggcattcttacactcacgagcgtgcggatgctggggcgggccaagagctacatttacccccacgcaccacactcatagtgtacatgaggccgagntcncctcttcaaggccggcaagaagaatatcctgtctttttctattaaccactcttacgaggaagcttcggtgcacctgaagaacaccttcttgcagagcaccggactctcccaccgcgctttatttacgccatgatgagatcaaatatatatatgacacattcgccctcctcattaggcatcccgcccatacagccagtcattcagtgattacacgcacaatcaccagatatgatgccatccatgtatgcatgtatgcatctataaaatataaa

SEQ ID NO: 78525 - DNA, 517 bp, Zea mays
  unsure (1)..(517): unsure at all n locations
  Clone ID: MRT4577_171639C.1
ccgtccgtctcgtctcgtctgcnncttctnngcgcctcnncattgtcggcggcgtctgtcnnccttagcataggtgtgcagtgcgtcgcnnctccaacncnnatgggtataaggagatnnagtcccaccatcatacattntngtggttattggggcccatgtcngtnactctggcaatggtcgacccaccacatggtacatccttatctaccatagcttgtgagtgcattgacaatgcgtgtgtatccgagaaggtttgagataggagagctgctgataatgtacaatgcggtctcttcaatgtaccgcctgggtgcttcgacaaggctcaagagctgagcgttgagagaggttatcaccattgatatttgctctgtggaagttttgagaccaccaagtactactgcacggtcattgatgcccctggacaccctgacttcatcaagaacatgatcactggtaccttccaagctggctgtgctgtccttatcattgactccaccactggtgggtttga

SEQ ID NO: 78526 - DNA, 308 bp, Zea mays
  Clone ID: MRT4577_17163C.1
gggaaaaaaaaaagggccattttttactggccaaaatttcctgaaaaaacccaatggtaagcccacaagcgggggggccctcctgggaatttgggaaacaagggggtttttaaaaacaccccccgggggttgaaaccccctttttacccccagttattttcccccgcccttcaattttcccccgggatgggccgtgggaaattttaaaaagggaagcccccctgggtgtgactgggaggggacggatcccttaaataagggaattttaaaaccggtttaagggggccttgatccaggccaggaaaccc

SEQ ID NO: 78527 - DNA, 785 bp, Zea mays
  Clone ID: MRT4577_171640C.1
gaacgagctgcagcaaaccaggatgttccacatagattcactggtccagctgatgcattggctaaaagaaccggctctggtctgggtcataccctcgaacacacacaggacagaactctgttggattcccttatggcatccaatatgggtgttgactcggataaaagaaggcattcatcgtctcgcaatggaagcacatcaaggaaggctcttctgtcaagcaaccgaggttctggagaccccagtgaaccaaatcgcagcagccacctagttccgaccaccaccagcagcagccgtccatcgaccaatcaaaggcttcaccactcaactggacttgagggcaggaccccatcatttccaaaacctggaagaatcggctatgatgatcccacaatgaggagttttgaacgccttactattagcgcagagaggaggaaatgaatctttggaagagcaaacgatctgagctgctcccggcgagtatacttcactgaatggattctgtgctgtgcatggtgctgagctctgcacatagcggtgctcgttgattcttggcacagatgatttgagttatgtacattcgtttaactcttccaaaaggttagcgaagcattttacaccccgctatgagggaccggggatcggctgcaatgtttaagccgtggtgatttaagatgatgttgactctaatacttatataatgacaatgaaaaaaagttccctagaaaaaaaaaaaaaaaaaaaaggaaaaaaaaaaaaagaaaaaaaaaaaaaaaaaagcggcc

SEQ ID NO: 78528 - DNA, 531 bp, Zea mays
  Clone ID: MRT4577_171641C.1
cgcctgcatgtaccgggccggctaattacacggctgtactatgcatcttgcattacctgatagactgtttacctagttgatgctattgagggacggaaaaggacttacacaagctcgtaagcccgtactggattttgcacatattaccaaaatatttatgattgtaaaaagcacagtgaggcttggtatcatcagttggacttaaaactgcatactgtgaaaggaatacacaaattgctcatactttgatataagagccagagcagaacagaaaaaatagacgtccgttgattacaacaacatatattttagcagtcttacttgctgataacacgatactgtggcatactatattctgaaaaggaataagtccatacccttataaggcacgaccctaactgtcggacaattaggtccttgaacaatatcatgggtctagctgccacaaatgacaggcggtagcttctaccaatatatgcaatgatggtggataaagcaaacacaccttctgtacagcttactgcaaactgc

SEQ ID NO: 78529 - DNA, 588 bp, Zea mays
  Clone ID: MRT4577_171642C.1
ttttttttttttttttttttttttttttttttttttttattttttaatttttttattagtaagaaaaattaaataaaaagaaaaaagaaaaggaaaaaaccaaagggaaaggaagagggaaaaaaggggggcgggggggggaaaaagagagggaggggggaaaaaaaaaaaaaaaaaaaggggaaaggaaaaaagaaaaaaaaaaaggaaaaaaagaaaggaaaaaaaaaaaaaaaggagggggggaggaaggccggagaaaaaagcctgagaaaatgctaaaacagacggaaaaggaaaagggaaaaggggggggggggaggggggggggaagcgtggaaagaacaacagaggaaggagagaaatcaaggaaaaaaaaaaggggggggaaaagaggggttagggaatagagggaggcgtaaaaggagggcggagcgatgaaaaggagggggcaccgggcggaaacatccatagaaaacgggcagaaggggaggtggagacagcacggaaggccgaatagaaaggggcggtagaggtcggagggtgagagaggggagagggcgggcgccgagagcccaagaagggaag

SEQ ID NO: 78530 - DNA, 843 bp, Zea mays
  Clone ID: MRT4577_171643C.1
aatttcaaaaaagactaccgccgtaaccctatccctaacccctagagcagatccagccagccgcagtgcgagcgtcaccggcgtctcctccgcgccctacctcaaaaaagataaagccggagaaactggaggtaggttctttccgcctcgtcgtaacaccctaagccatacatcagatctagcccgccgcaatgcgagcgtcgtcgggatctcctcctatcccgacctcgaagggggagggtttgatggaagttgaatcggatcaagatcaggatgattgtgatgtgatgattgagcctgccgctgccctcaggggtctctatgcgatgatggtctcatggtgtgaccaattccttgatattgatattgatattgaggaggaaggggatagatccgttcctcccttgttgatgatccactttccccgtctttttgagagagcatggggaaataatcgcctatatcctcaagctttagatgactggtgtccgtatcgtgcatacctccagaagttctgcgatcataatgctcctcgttatcatgatcccgatgcctacaagttggaagtgtatggatcaggaaattagattgaagtctgagtggctgtacaagcacacccatgtcccccatgatgagatcagtctgagtgacaatatccaaaactgcgcttatgaacttatccgttccaacagcggtgaaggagattctcctatttccatgatcgctgccacatgtgttgcgaaggagagcgagttgatcgttgagaggctgagctgtcatcccagtcttctggaccctgaagaatcaccccacgagagacacccagatacggatggttgcctt

SEQ ID NO: 78531 - DNA, 149 bp, Zea mays
  Clone ID: MRT4577_171644C.1
gcagggctggctttactccccctctataccaagtcctcctcgagttagggtgcctgtagtgttttgccagagcagcgagaaccgcgcgtgcagtccaatatgctcgctcactgtgtagaatatcctatgacttccacaccttagacctg

SEQ ID NO: 78532 - DNA, 392 bp, Zea mays
  unsure (1)..(392): unsure at all n locations
  Clone ID: MRT4577_171645C.1
gcgtccacccacacgtccgaataaaccaaacagggtagagactaaactttagttccgaaactaaaggaaccaaacaggtaagaccttgcctctcagcaccctgcacgtcataacactgaatatgaaggacagaatagcagtatagtgggaaacagcaagcctcacaccttggtttaggaacttatttaaggattcgaggttcttggtgcatgtactgacggacagatcatccacagtaactttaatacattgatgtgcttgttcccaggcagaggaagggcatgtcgagcttctgggcaatcttctgtatgctgcaaaggttgtagcagagcaggaagggcttgctgatggcttcagaattgtcatggacgatgggcccagangatctcaat

SEQ ID NO: 78533 - DNA, 430 bp, Zea mays
  unsure (1)..(430): unsure at all n locations
  Clone ID: MRT4577_171646C.1
ctttgggctgatttatgtgcttggagtgataaacaagggccttctgggttgcccatcgattattcgatgttcttagtctcacgagctggttcttaatgatttgtgtagtaaagtagttggcttctttgttgttgttgttgatacgggtgggggttgtgtgtaggcgaataaggtttataagagttgtcctgtgcttaaggtcctttgttatatgtataagactgataaggctaggagtgggaagctagagattagttattgtgttgtcgcaaagggggtttgtgttgnttgtacttagtagagtaaggtgacttgcgacaaaaaatgcgtcgtcccgtcgaaggagaagtgtctgctaatcggattcctaagtgtattatgtgctaccgcctctgccggttccctcctactaataaacgctggactatcc

SEQ ID NO: 78534 - DNA, 206 bp, Zea mays
  Clone ID: MRT4577_171647C.1
gaaccagccggttattcctaatttgcaagctccgtattgagacggacagacaccgcccatctgattgtgagagaagatgacatgatggcccatcttgacagtgaggacgagcccgatatgttgccacggcatgatactatattactgaacggtgcttgaggttgaaaacgaactgcgctcaggatggtcttgacacaggcatctaa

SEQ ID NO: 78535 - DNA, 578 bp, Zea mays
  unsure (1)..(578): unsure at all n locations
  Clone ID: MRT4577_171648C.1
caccacccaccccaccaacccatatttataccaaaggctctctggggtagggcgcaggggtacatacactgagcgagcgagcgatcgatgcacactgatctagctaaacatagcacacctatagaaaagcaagatgtttaacgggacggagacctgcatcgacattatcctctacattattctgtcgccactcggcgtggtgggggggtttgtctacagtgttgagttctggatctgccttaccctcaccttattcggctacctccccgttatcatcatacgccgctctgggccatcaccaactagccgaccggtgcgttaccatgcaatgcgcgcgcatggtgatctcgtctcgagggacaccttgtgctcgtgtctagacatgtgattccttccttccttgnttagatgctgctgctcctgctcgtgtaggactggagtctccagaccttttaattgcttgattagattgctctgctgaagaaatcagtactcgtgcctggagttactgctcaactcatgtacttgcacaaccgttcctccctgcacgtgcagacccttctctctttttgtttacc

SEQ ID NO: 78536 - DNA, 261 bp, Zea mays
  Clone ID: MRT4577_171649C.1
tcttctcccgctattcagtttgagccgcaggaatctacctaggaaacaaacgcaccaaaagatacacgaaaggcttacatcttcctctcctccgtatcgaagatggcggatttgagccgccctagcgatgccatcgcaatcgctcgcctgcccgcccgcccactcgcccactgcgcgtcagcctcgcctcacccctgggcagtcgcgaagggcgctggaacacgacgacatccgcgtcgaaccctaaccccgctacgtgta

SEQ ID NO: 78537 - DNA, 358 bp, Zea mays
  Clone ID: MRT4577_17164C.1
cgagttctcctcaaccaaattcaaagtcacagcggcgaaactctctgcgatttctggccgcggcaagggcggaaagggtctgggcaagggcggctccaagcaccaccgaaaggtgctttgtgacaacatccatggtattaccaagccagatatccataggttgacgaggaggcgcggacttaatcgcatctacgttctcatctactataagacccgcacttgtttcaagatcttgtttgagaacataataccgtacttcttatactacaacaaacatgtccgcctgtagaatataaccgtcattagcttatcctactgttttaacctccaatgctctaccttttattgttatagctgt

SEQ ID NO: 78538 - DNA, 288 bp, Zea mays
  Clone ID: MRT4577_171650C.1
catccgagacctacgcgtccgcagaaaccctaattggaagggcactgcacggacgaaggagatggcggaagacaatcacatgctcctacacgagcccttacaactcgccttcgaacttttccccgccaagcctaaaagattccgcatcacttaccaagatagttggtacgctcgggcccaattcacactcgggtgagataattcaggaaagcctcactgctggaatgtcacatgcaccgtttgatttctcatggatagatgctgcgtatcaccagaagacccttgata

SEQ ID NO: 78539 - DNA, 292 bp, Zea mays
  Clone ID: MRT4577_171651C.1
attcgggtcgagaataatgctcggagctttcttttaatgaacgccctcggtgccatccagggccacgaagtcatccacggggcggatagtcccaccatcctctgctggtgccatggcgcaaccctatctgttggttttgatcacatcccccagcgcagcatctgttttgacgagcgcctacgacttcccgtccaagatgaacgcacaccgtggtgggatagtacctctgccaattggtcccctagactgtggcttcatcaggcttgtactggtactgaccttttggccatac

SEQ ID NO: 78540 - DNA, 116 bp, Zea mays
  Clone ID: MRT4577_171652C.1
caagcaactggctctcatggttaacggtttagatcgggcacagggggcttcaacagggggccttctatggggtttagtcttcatggttcctctttcttgcccgatctcttctcctc

SEQ ID NO: 78541 - DNA, 417 bp, Zea mays
  Clone ID: MRT4577_171653C.1
actcttgctttattttttttcttttttttgttcttttttggtggacttcgaaaaaaaaagtgggggcttgggtaccctactctgttttcttaagaatggttaacccaatttggatttccatgtgccatggcattggatcttcttggctaactttctaatgaggtttttgccacctgtgttaaatgtggcattgctttggaagtccattctttgggcgcaatgaaacaggccccaagaccactcaaccggttatgtggggcattaggcttgaacagttgccttcttccccattaaacaaaaaacatattttggggcggcggaagacatttaacgggttgcacactgcgtttttttgctgagtttccatgatacaccccggggctctagtaggttcgattgttttttagggggggctta

SEQ ID NO: 78542 - DNA, 804 bp, Zea mays
  Clone ID: MRT4577_171654C.1
tcgctcttgtgttcgctcacgcgtccgttccgtgcaagggggtctctagacacgctatagccagtctagctttgttgaacaccaggatgttgggggtgcgtctttttgatgttcggtgtttcctttctcgggtctcttggttcccccctcttgcttggtactacttggatcttgtgctcgtcctgttggtttttttgtttagccgcgtctaatgccttgtcctttctgttgtttatcgtttggtcttatatgcactttctttttgctggttttctttttagcttgttttgtctttttgttttttctctgttttgcttttcttttttgcttttggtattcttctttgccctgttttttttcctctgctgttggtctttatccccctttcttgtgtttttctttttttctttcctttttttttcttttcctttcttctttcttcttttactttttagttttttctcttgtttttttcctttattttccttttttcctcttcttttttcctctcttatctctttttttttcttctttttttcttttcttttttttctttccttgtttttttttcttttttctttcttctttcttctttcttccttatttctgcatcttctttttttctttttttcttttttcttctttttctctattctttttttttttcttttttttctcttctctctttctatttttttctctttcttcttttcttcttcctcttttcttctttctcttttttcctcctttttttatcttctttttctttctttctttccttcttttcttttctctctttttctc

SEQ ID NO: 78543 - DNA, 613 bp, Zea mays
  unsure (1)..(613): unsure at all n locations
  Clone ID: MRT4577_171655C.1
ctgcgnaaaaaaggaacgtcacccatcaccattggcttgctctctgctctcaccgtggacgaacactaggagcggtcatatccatattctctgtgctgtgtgctctgcgtcacccgccatgttcgaaagccgtcacgcagcagacagataccggctgcatctgcatcgcgcccgctccgttgtactgacaagcgatgaactggttgagattcgggcggcccagcgcacgtttgagggcgcctatatgcgcacggcaatcggccagttctcgtttgcactcgttgtgctcaaaatcttcaccgctgagttctactcgattggcgcgctgtttgcagtctatggagtcggtatcctcttcaccagcctgttccgtcgccaacaaggaaacaaacagttcttctccgaagtcggtgccgacggtctatgccacaagaagtttcgcaccagcggaaacgttgtcgttgccttgacagcactgagcatttctgcatatatatgtctactggttctcacactcaagcttgccaagtgaggttgggctgttctgttactagagtaccgtacttctgtcctgctctaaacaaacgcatcaatcatagcacgacgctatacc

SEQ ID NO: 78544 - DNA, 398 bp, Zea mays
  Clone ID: MRT4577_171656C.1
tttggctacactagctcgtttcccaacgcggacccaacatgggcggtgcaaccggccccttcgacactggccccccggcttcttcttccttggcagaagccgcggctgcacctgtactggatcaaaagggcttttctgctggtgccccttaacccgatgcgcccgcgcccgcgcccgggccgaagaagcggaagctcgaggaagcggggtttcacaccttccaatactacaagatccgtgccggcgtcgccgatctgcgtgttcggttcgtccaagttcaccaagctactgattttcgcaacaccgatgctgcacctgagaatattagagggatattaatgaaacctatttctggcttggtaggaagaccattggtggccaaatgaaaggattcgagc

SEQ ID NO: 78545 - DNA, 334 bp, Zea mays
  Clone ID: MRT4577_171657C.1
aaaaacgcccccttttttaaaactataaagtttatgaggcaccatgattttcaaaatacggggaaaaaaagtgttttttaaatttgaccctttttttgttcacaaaatgcccccgaacttgatgggcttccccgatcgggtgaaggggaaagatcccaatcatactatggttgatatacaaaaaaagtctatagcacagtggggtgcataagagggagaaaaaaacacagatgctcatggggggttttctaaggggaagaaaaaaaacaggagcttggaaaaaatttttgcagaagaggagggggggggggcgtgacatcactgtttttaaggc

SEQ ID NO: 78546 - DNA, 408 bp, Zea mays
  Clone ID: MRT4577_171658C.1
cccttttacttattgttgcatgttgctcgcccaggaggacgtgcgagggtcgcgcgctaaaaggctgtctatccgctgagccagtatgattggcaggtgagttgacagacactccttagcagacactaactaacatggcgaccggcctgctggccgtaatcgacccacccactttatagcccctggggttacccacaaggtgttaccacaacccagataacggtggatccctgatcaacagacatgcataccggagatggcccacttgtagcagccgatgccggggcacggctttactctatatcagtcgccgcctgcccataaatgattgcaaagctacaagcaacatgttcgagggcgagggcgccccacggtgcctcctaatcataggctccactccgatagaac

SEQ ID NO: 78547 - DNA, 341 bp, Zea mays
  Clone ID: MRT4577_17165C.1
ggggacttgagcagcgagcgccacagatctcgatcctgaagcttccgagcgagtgcttccgtcctcctcgcagtcagccatggcccgctcctcctcgcagtcgcagtcctccgtcggtggcggcggcggcggcggcggtggcgcgcgctcaggcaccgcgggcccgcgccagcctgacagttaacccacctgaacgtgcacaacacggaatgaaacaggcgtctgaaactttgactgtcgatttgggaaggacagcctctgctctcagtggcaaccctattaagggccataacttaaaagcgggtgttggatcagtgctagctactgaaatctgtggagca

SEQ ID NO: 78548 - DNA, 420 bp, Zea mays
  Clone ID: MRT4577_171660C.1
ccggggccgggaaccctttttttcctttttgggccaacaaaaacaggccggggggtttgggttccccacctttgacaaataacccgcccgtttgcctttttttcccccttttttgaggctccgggccccaaacttgggggaaagtttttttttgccccccaatttggttcccagggccctttgaagctttttaaaaatctgggggggggggattgccttcccttttttatcccccggaatccccgggggttttttttttttcatctgaccaagttggccctgggtaaattttttttagacccttttttggataaaattttttttaaaatcatttggaaactcctttttgggggaggtttttgggggtcccccccaaggcccttggttttgggggatttccccttgggtcccccctttttc

SEQ ID NO: 78549 - DNA, 570 bp, Zea mays
  Clone ID: MRT4577_171661C.1
aagggatcagttttacaacgtattagctcttttcttcatttttgcttgatttacaagatattgttgttttcataaaaaagggcggtaaattttacaagccattaagggggcgtttgaatgcactagaactaatagttagtggctaaaattggttgagacatccaaacaccttagctaatagtttagcactttagctattagctattattggtaaattagttaatagttgggtagttatttgttagctagctaattccactaacaatttttagccaactaactattagttatagtgcattcaaacaccccctaactcttattctgcatttctgcgcgaatttacaagataatgttatgccagtagagaaagcgaactgttttgcaaacttgctatcttcataatatgggtcactggtcgtttagagctcttaaggccgttgatactactgtcatgttaatgtaccattgtttgaagtgccacagattgctatgctctttatttgcttgttttatttcgtccctggcagagctctcacatttgtctttaaaaaacatcttggtcccttttta

SEQ ID NO: 78550 - DNA, 298 bp, Zea mays
  unsure (1)..(298): unsure at all n locations
  Clone ID: MRT4577_171662C.1
ctatttatgaagtgttctagctcccgagagctgtttgtagnttttatggctatttttctggtctttcnacnccttgcggccgaaagccatgagcatgcgagagcgagagcactacctccagcagggggcccgagctaaacacactgcgcgccctggaacgcgacgccgtggagcagctgtagctgtcgcgggccgggacgtcccaaaaaaccaaggggtggtcctctccagggggcgggagccaggacaacctacaacggcacgggaagacagccaaagagaagcaccttcttctatc

SEQ ID NO: 78551 - DNA, 1779 bp, Zea mays
  Clone ID: MRT4577_171663C.1
atggtgggtgaggaccgtcgatggatgtatgaaggttggcgtatgaatgatccctcagcagagtggataagaaagacagaggcttttattgctcgtgcttttactttgtcaagaactggcacagatgtgcggtgtccatgtagtatgtgtcgtatttatagatgtcaagacaagagaactctgtcgggacacctttgcaaatatggctacatgcctgactatgaagtctgggtgtatcacggcgaggagtttccccgtgaaaatgcatcggaagcccacaacaatgacgacgtggaatacgatagaatggatgagatgcttgaagatttaaggggggatcctgatttagtgtttccaccaaatcctgaggaggtgcctcctccagaggttaaaaagttcttcgaccttcttaaggttgcagaagagccgttgcacgaacacacaacagtttccatccttgctttcgtgactcgacttatggctattaaatctaagttcgtgttctcgaacaattgttacaacgagctcttgagcttaatcagcgaagtgtttccaccaaatcacaagatgccgaaagacgtgtatcagtgcaggaaactgctctctggtctaggtatggactatcagaaaatcgatgtctgtccagataattgtatgctgttctggaaggatcatgagaatgatagtaagtgtctaaagtgcgacaagtcgagatatgtagaggttaaaaacgatgatggtgaaatggtcacatcaactgtagcccaaaagcaacttcgttatatgcctcttgcgcctcgtgttaagcgtttgtttctttcgaggaacacagctaggcacatgagatggcataaagaacatgaacgaggggacactcatgtgatgacgcacccgtctgacagtgatgcgtggaagcctctagatgactttgatccagaatttgctagtgaagcgagaaatattcgaattgggttggcgacagatggtttcacacctttcaatacgaacgcgacatcatattcttcacgggtccggaagccgcggaagactagttgggtcccccctcctaaagaaccagttaacaaggttgagataatcccgagtggagatggggcttggctggatagtagtttcaccggcaaagatcgtgtaaggcaagtaaataaagtgttgggcaatatctatcatatgagatggcctggattggtgattgaggatggtattgaggtccctgtcacaagatgggatcaatacggccttgcggttaacgcgcaacatgggaatgcgcaaggtgtagtttggcacgacttctggaaatattataagttgcctgatggagatactcataccgagcatgcacactccgtgttccataggaacgcggcagatgttgttgcggatatgatatactatgttagaatccagcattcgattccatggatagccgccaatggtgctgcttggcgtgccttatgccgttattgggcttcggataatttcaaggcaaagtctatacgacaaagttccaatcgtggaaccgagtcgtatcacaagtatggaggtgatgatcactttcgtttggcaaaacgaatggaagctagcagtggtgtagtgcctagtgatgttcaaatatacctgagggggcacagaggaccagatcctgcaaatccagatgtgttgtgtagccaacaggcaacagatcgtctgatgagtgttttgaaatgcttggctgcatatgctgaggcgatgtctagtcagcacggatcggactatgactag

SEQ ID NO: 78552 - DNA, 4200 bp, Zea mays
  Clone ID: MRT4577_171664C.1
atggacccagacggccgcatcacaggagaaagaaaaaactatgatatcatcaccggcgagaagaataagataaggaagaaaaaagattataggaggacgtgggaagcattggcatcacgtgccgaccaggaccgtcgatggatgtatgaaggttggcgtatgaatgatccctcagcagattggataagaaagacagaggattttattgatcgtgcttttgctatatcaagaaccggcacggatgtgcgttgtccatgtagtatgtgtcggatttgtagatgtcaagacaagagaactctgttggggcacctttgcaaatatggctacatgcctaactatgaagtatgggtgtatcacggcgaggactttccccgtgaaaatttgccggaagccaacaacactgacgacgtggagtacgatagaatggacgagatgcttgaagatttaagggaggatcctgatttggtgtttccaccaaatcatgaggagccgcctcctccagaggttaaaaagttcttcgacctccttaaggctgcagaagagccattgcacgaacacacaacggtttcagtcctcgctttcgtgactcgacttatggctatcaagtcaaagttcgtgttctcgaacaattgttacaacgagctcttgaacttaatcagtgaagtgtttccaccaaatcacaagatgccgaaagacgtgtatcagtgcaggaaactgctctctggtctaggtatggactatcagaaaatcgatgtctgtccagataattgtatgctgttctggaaggatcatgagaatgatagtaagtgtctaaagtgtggcaagtcgagatatgtagaggtaaaaaacgatgatggtgaaatggtcatatcaattgtagcccaaaagcaacttcgttatatgcctcttgcgcctcgtgttaagcgtttgtttctttcgaggaacacagctaggcacatgagatggcataaagaacgtgaacgaggggacactcatgtgatgaagcacccgtgtgacagtgatgcgtggaaggctctagatgactttgatccagaatttgctagtgaagcgagaaatattcgaattgggttggcgacagatggtttcacacctttcaatacgaacgcagcgtcatattcttgttggcctgtttttgttattccatacaaccttccacctcatctgtgcatgaaatatgattacatgtttctttccctaattattcctggtccagaccatcctgggaaagggctgaatgtgatgatgcaacccttgatcgatgatctcaaaaagttatggaaaggagtcgaagcatacgattgctacaaaaacgagaaattcacacttcgagttgcatatttgtggtccattcatgatttcatggcatacagtttatttgctggatggagctgccatggaactctgacatgtccaatatgtggtaaggatacagattgtttccgccttgagtttggagggaagatctgttactttgactgccacagatgcttcttgccccaaaaacacctgtataggttcgaggttaacacctttaagaagggcactatcgtgacaaagggaccgcccatgcgtcttagcggaatagagattgaggctatgcttaataatttgaaagagaatgaaagtggtaatggatacataggttttggaaccgagcataactggacacataaatgtggtttatgggaactaccttatgttaaggcattgattctgatgcataacattgacgtcatgcatcaggaacgtaatgttggtgaaagcattctaagtacctgcatgaatctagatggttatgcggccgggtttaggagagctgtgaacttaaagacaaataaaataactggattgaagagccatgattatcatataatgatggaaaggctcctccctgtaatgttccgagggtacttgaaagtcagtatctggcaggctttagctgagttaagctacttttataggcaactttgtgctaaagaaataaacaaagatgtgatggagaagttggagacagaaattcctgtccttatatgcaagttggaaaaaatattccccccaggattcttcaatccaatgcaacatctacttgtccaccttccatatgaagctaaggttggtggtcctgtgcaatacaggtggatgtaccatattgaaagggcattaaagaagcttagttcaatggttggtaacaaaggaagagttgaagggtgtatagctgaagaattcaaatataaagagaccaaatttgaatgtactcgtccatttgcggcgacaaaaaatactggagttgtatgcagggcagtcgatgatcgtggaagagagatgaattattatggagttattaatgacatactcgagtacgactttgccgggagcaaaaatcttaatgtggtgtttttcaaatgtgattggtttgatcccaatcaagggactgtaaaaaaccaatttggcatggtagaagtcaaacatgagctcaaaacaagtgcatgtagcaaatttgttcttgctcaccaagttgaccaggtgtactacataccgtatccatctataaagctggaagccacatgggtagtgtacaaagtgaatcctcgtgaacagttacacaccaggggtgaatggttcgaggcggaagttgaagaaatttaccaagaagatgaacttccgaccaattttaatatagatactgaggttttgccagaatcattagtgggagatcctgaagatgtagatgagcctgaagatgaggaagagacagaggagtggagacaagtggaagatgaggaagagacagggtggggtgaatggcccaatgatggagggtcgggagttgggggagctagtgggtcaagggaaggagaagctggtgtttcaggtggaggttctggaagcgggggagttggagggtcttcacgggtccggaagccacggaagactagttgggtcccccctcctaaagaaccagttaacaaggttgagataatcccgagtggagatggggcttggctggatagtagtttcaccggcaaagatcgtgtaaggcaagtaaataaagtgttgggcaatatctgtcgtatgagatggcctggattggtgattgagaatggtattgaggtccctgtcacaagatgggatcaatacggccttgcggttaacgcgcaacatgggaatgcgcaaggtgcagtttggcacgacttctggaaatattataagttgcctgatggagatactcataccgagcatgcacactccgtgttccataagaacgcggcagatgttgttgtggatatgatgtactatgttcgaatccaggtgattaatcaagctatgttgagtagtgaaggacgacgagcaaccagtaagagcgaggcgtcacaatatggactttctatgactgagcaagattttcttcagcattcgattccatggatagccgccaatgatgctgcttggcgtgccttatgccgttattgggcttcggataatttcaaggcaaagtctatacgacaaagttccaatcgtggaaccgagtcgtatcacaagtatggaggtgatgatcactttcgtttggcaaaacaaatggaagctagcagtggtgtagtgcccagtgatgttcaaatatacctgagggggcacagaggaccagatcctgcaaatccagatgtgttgtgtagccaaaaggcaacagatcgtctggctgcatatgctgaggcgatgtctagtcagcacggatcggactatgattggaggaccgcacctattgatcctcaggctgtgtatgcaagtggtggaaaaccccatggaaggtactcgattttcgataacgtcatcgactcgagccaggtgacggttcagaggggaggttcgtcgaggtctgctgctcgtagctcccgtcgctctactcaggatactgcagaagttgagcaactacgagaagagcttaggcaacatcaggagcggcaaagggttcaggaggaatacttgaggcagcatgctgctcaacaagaatactatgctactcagtttcaacaacatcaagcactgatacaagtatatgagactcctccagctaccttgccggcgcagcaacaagatgatgggttagactttgtcaatacgctcttcgcgagtggaggtagcaagcatcactctttgatatttcctgatgttgatcgacagtag

SEQ ID NO: 78553 - DNA, 154 bp, Zea mays
  Clone ID: MRT4577_171665C.1
cccacgcgtccgcagaagaccagatcattgcgtagcattgtgagatcagtctccagaggctgtgaaaccctcatatgggaaccactctgatctttccaaagctaccgcttgatatggcctcaatttgcaagcgattatgcaagttataaaacct

SEQ ID NO: 78554 - DNA, 4583 bp, Zea mays
  Clone ID: MRT4577_171666C.1
atggtgggtgaggaccgtcgatggatgtatgaaggttggcgtatgaatgatccctcggtggattggataagaaagacagaggattttattgatcgtgcttttgctatatcaagaaccggcacggatgtgcgttgtccatgtagtatgtgtcggatttgtagatgtcaagacaagagaactctgtcgggacacctttgcaaatatggctacatgcctgactatgaagtctgggtgtatcacggcgaggactttccccgtgaaaattcgccggaagccaacaacactgacgacgtggagtgcgatagaatggacgagatgcttgaagatttaagggaggatcctgattttgtgtttccaccaaatcatgaggagccgcctcctccagaggttaaaagttcttcgacctccttaaggctgcagaagagcctttgcacgaacacacaacagtttcagtcctcgctttcgtgactcgacttatggctatcaagtccaagttcgtgttctcgaacaattgttataacgagctcttgaacttaatcagcgaagtgtttccaccaaatcacaagatgccgaaagacgtgtatcagtgcaggaaactgctctctggtctaggtatggactatcagaaaattgatgtatgtccagataattgtatgctgttctggaaggatcatgagaatgatagtaagtgtctaaagtgtggcaagtcgagatatgtagaggttaaaaatgatgatggtgaaatggtcacatcaacggtagcccaaaagcaacttcgttacatgcctcttgcacctcgtgttaagcgtttgtttctttcgaggaacacagctaggcacatgagatggcataaagaacgtgaacgggaggacactcatgtgatgacgcacccgtctgacagtgatgcgtggaaggctctagatgactttgatccagaatttgctagtgaagcgagaaacattcgaattgggttggcgacagatggattcacacctttcaatacaaacgcggcatcatattcttgttggcctgtatttgttattccatacaaccttccacctcatctgtgcatgaaatatgattacatgtttctttccctaattattcctggtccagaccatcctggtaaagggttgaatgtgatgatgcaacccttgattgatgatctcaaaaagttatggaaaggagttgaagcctacgattgctacaaaaatgagagattcacacttcgagttgcgtatttgtggtccattcatgatttcatggcatacagtttatttgctggatggagttgccatggaactctgacatgcccaatatgtggcaaggatacagattgtttccgcctagagtttggagggaagatctgttactttgactgccacagatgcttcttgccccaaaaacacccgtataggttcgaggttaacacctttaagaagggcactatcgtgacaaagggaccgcccagacgtctgagcggaatagagattgaggctatgcttaataatttgaaagagaatgaaagtggtgatggatacataggttttggaaccgagcataactggacacataaatgtggtttatgggaactcccttatgttaaggcattgattctgatgcataacattgacgtcatgcatcaggaacgtaatgttggtgaaagcattctaagtacttgcatgaatctaggcgacaaaacaaaagacaatataaaggccaggaaggacttagcaaaactttgtaaccgaccaacccaggaactcgacgaaaatggaaaaaagccacgtgctcaattttgtctaaaacctaaacagaaaaatgaagtaatggaatggttgaaaaaattgaaattcccagatggttatgcggctgggtttaggagagctgtgaacttgaagacaaagaaaataactggattgaaaagccatgattatcatataatgatggaaaggctcctccctataatgttccgtgggtacttgaaagtcagtatctggaaggcgttagctgagttaagctacttttataggcaactttgtgctaaagaaataaagaaagaggtgatggagaagttggagacagaaattcctgtccttatatgcaagttggaaaaaatattccccccaggattcttcaatccaatgcaacatctacttgtccaccttccatatgaagctaaggtagcagccttcacgagtgtatactttgcagacgagcacaatatcaatgcccctacattgaggtatcatgatgccaaagtacggactcgcagcaatctccaaatttttgagattgagggcaagactgttggagcatccacggaatatcatcctgagtgcgaagaaaagttggacgctttgctctatatgtatgaaaatatggatgagatgaccccatatttcaaaaatctaatttcaccatctgattggcagtgtgacaaaattccaaatttagacgaggacttgcttcagatgtcttacgcaatcgtaaaagtcagaagctacggtcgttacgacattaaggggtttcgttttcgttcgaccaaatttgaatgtactcatccatttgcggcgacaaaaaatactggagttgtatgcagggcagtcgatgatcgtggaagagagatgaattattatggagttattaatgacatactcgagtacgacttcgctgggagcaaaaatcttaaggtggtgtttttcaaatgtgattggtttgatcccaatcaagggactgtagaaaaccaatttggcatggtagaagtcaaacatgagctcaaaacaagtgcatgtagcaaatttgttcttgctcaccaagttgaccaggtgtactacataccatatccatctataaagctggaagccacatgggtagtgtacaaagttaatcctcgtgaacagttacacaacaagggtgaatggtttgaggcggaagttgaagaaatttaccaagaagatgaacttccggccaattttaatatagatactgaggttttgccagaatcattagtgggagatcctgaagatgtagtcaagcagctcgctaagggactagcgaggagagcctccatttttgggagaaaggaggacttagtgttccagggcactagttcaagctcgagcaggcgtagagctttgttggagcatgttccagagttgcagggccagccagtcggcgtactaagggatgagaatgagtctgaagatgaggtagagacagaggaggggatacaagtggaagatgttgaggatgtccagggtagggaggcggagagagggtgggatgaatggcccaaggatgcaagtgggtgggcaggagatggagggtcgggagttgggggagctagtggaggaggttctggaagcggcggagttgtagggtcttcacgggtccggaagccacgaaagactagttgggtcccccctcctaaagaaccagttaacaaggttgagataataccgtatggagatgggggttgggtggatagtagtttcaccggcaaagatcgtgtaaggcaagtaaataaagtgttgggcaatatctgtcgtatgagatggcctggattggtgattgagaatggtaatgaggtccctgtcacaagatgggatcaatacggccttgctgttaacgcgcaacatgggaatgcgcaaggtgcagtttggcacgacttctggaaacattataagttgcctgatggagatactcataccgagcatgcacactccgtgttccataggaacgcggcagatgttgttgcggatatgatgtactatgttcgaatccaggtgattaatcaagctatgttgagtagtgaaggacgacgtgcagccactaagagcgaggcgacacagtatggactttctatgactgagcaagattttcttcagcattcgattccatggatagccgccaatgatgctgcttggcgtgccttatgccgttattgggcttctgatgatttcaaggcaaagtctatgcgacaaagttccaatcgtggaaccgagtcgtatcacaagtatggaggtgatgatcactttcgtttggcaaaacgaatggaagctagcagtggtgtagtgcccagtgatattcaagtatacctgagggggcacagaggaccagatcctgcaaacccagatgtgttgtgtagccaaaaggcaacagattgtctggttgtgtatgcgagtggtggaaaaccccatggaaggtactcgatgttcgataacgtcatcgactcgagccaggtgacggttcagaggggaggttcgtcgaggtctgctgctcgtagctcccgtcgctctactcaggatactacagaagttgagcgactacgagaagagcttaggcaacatcaggagcggcaaagggttcaggaggaatacttgaggcaacatgctgcgcaacaagaatactatgctactcagtttcaacaacagcaaacactgatacaagtatatgagacccctccagctaccttgtcggtgcagcaacaacatgatggcttagactttgtcgatgcgttgttcgccagtggaggtagcgagcatcacttttcgctgattcctgatgctgatcgacagtag

SEQ ID NO: 78555 - DNA, 1271 bp, Zea mays
  Clone ID: MRT4577_171667C.1
cattgggtacctcgaggccggccgggatgttccagagttgcagggtcaggcagtcggcgtacagaggaatgaggatgagcctgaagatgaggaagagacagaggagtggagacaagtggaagatgaggaagagacagggtggggtgaatggcccaatgatggagggtcgggagttgggggagctagtgggtcaagggaaggagaagctggtgtttcaggtgcaggttctggaagcgggggagttggagggtcttcacgggtccggaagccgcggaagactagttgggtcccccctcctaaagaaccagttaacaaggttgagataatcccgagtggagatggggcttggctggatagtagtttcaccggcaaagatcgtgtaaggcaagtaaataaagtgttgggcaatatctgtcgtatgagatggcctggattggtgattgagaatggtattgaggtccctgtcacaagatgggatcaatacggccttgcggttaacgcgcaacatgggaatgcgcaaggtgcagtttggcacgacttctggaaatattataagttgcctgatggagatactcataccgagcatgcacactccgtgttccataagaacgcggcagatgttgttgcggatatgatgtactacgttcgaatccaggtgattaatcaagctatgttgagtagtgaaggacgacgtgtaaccagtaagagcgaggcgtcacaatatggactttctatgactgagcaagattttctttagcattcgattccatggatagccgccaatgatgctgcttggcgtgccttatgccgtttttgggcttcggataatttcaaggcaaagtctatacgacaaagttccaatcgtggaaccgagtcgtatcacaagtatggaggtgatgatcactttcgtttggcaaaacgaatggaagctagcagtggtgtagtgcccagtgatgttcaaatatacctgagggggcacagaggaccagatcctgcaaatccagatgtgttgtgtagccaaaaggcaacagatcgtctgaggctgcatatgctgaggcgatgtctagtcagcacggatcgaactatgactggaggaccgcacctattgatcctcaggctgtgtatgcaactagtggcaaaaccccatggaaggtactcgattttcgataatgtcatcgactcgagccaggtgacggttcagaggggaggtttgtcgaggtctgctgctcgtagctcccgtcactctactcaggatactgcagaagttgagc

SEQ ID NO: 78556 - DNA, 376 bp, Zea mays
  Clone ID: MRT4577_171668C.1
aactagaaacgacatgcgttatggtcaatggacagaaagaactggaatccatgcaattatgataaaatatggcactgcctgagtatgcaacagggaccctaaccaatgacacgcggttatcaacaccattagcatccagtttatattcaaatggagcttcctttatacctgaacgaacccgtcaactccaagcgataggtactgatagctaagaactatgatacgtacgacacacacatgcttattgagacgcctggttgcgcatcatggttaatcagaaactgccttggtatgacggcatgtacgcacggaacgactacccggtcacgcacgcactcataatccctgggtccttgtcgccgccggtgtgtacgca

SEQ ID NO: 78557 - DNA, 376 bp, Zea mays
  unsure (1)..(376): unsure at all n locations
  Clone ID: MRT4577_171669C.1
accccgggggccccccgcgcccgccgtagtcacgaaaaggaaagcctaaccggaaaggggccatctaagaacgatcctgtacttgcgaccggacagagaggcctacaagattctggtattgcacaaattatgccatgtgatcaactaccgcaggggccgggtgagactgcaccatcagaggggcaaacgaaggcaacacggatccatgttagaggggagccacaatgctagaggagcactatgctgcaacggaagaaggaaacataaaatggattatggaacaatttggcgtgacgaaattactaggccatcangtcctgagattcgtcaaagaacagcgtgagcagctgatggacacacaaatgcactggtacta

SEQ ID NO: 78558 - DNA, 287 bp, Zea mays
  Clone ID: MRT4577_17166C.1
aaaacacaaaaaccggggaaatttgaaaagcccacatccacaggataagggcccaagccaaagaaaaggaactgggggctcacaaaaaaacgggggggaaactaaaaatttcacaactccctttccaaaaaaaaccctttcaaaacactgaaaaaactcgggccccagcccaaaaaacacgggaaccccgccgaccttggtggggcgctgcggaacaaaggccgggcccttcccaaaaatcggggccgggcggaaaaaccgtggtgggccccccccaaagggggggc

SEQ ID NO: 78559 - DNA, 397 bp, Zea mays
  Clone ID: MRT4577_171670C.1
gcgttctttttcagtggctgtggtataagctgcgggggggggggagcgtcaaataccgggagctttattctgacagtgatggtccagaccaacctctcttatccacagatgggattgaggcagcattccaggcaatgtaccatacactgagacacgagtgtctaaccagaattccggggttgtccgggagtgaactgattggcctaaatgtcgttgcccagtccctcctatattccacttgcaaaggaaaagttgctccaatgtacttgttccatggcccccggggtacaggcaagacatccacggcaaggatttttgccgcggcactgaactgtgtatctcttgaggagcaaaggccgtgtgggttctgtaaagagtgtgtcattcttttctctgg

SEQ ID NO: 78560 - DNA, 1800 bp, Zea mays
  Clone ID: MRT4577_171671C.1
ggccggcaacaacgaacgggcccacgccaccacctccacctcgtcctcctcggcacctcccccgtcgcgtccagcgttccaggtccagctccccccgcgatcccgacgaccccgtccgcctcggcctgcgcctccccgctacaactacaagggtccgcccgcgggcgctgcggtaccagcgagcccctcctcctccacactcagcggcgcggagatcctgtcctgtgccccggaccgagagaagccaggcgccggcgtctggaattcggacatggaggcggcggcggcggtcgtaggcttcggcctgaccaggtggcaggcggcggcgctgtcggcggtggccggctgggtgtgggcggcctccttctacgacctcacgcgccgggcgcgcgcgctcgtccagccgtgggtcacgcgccgggtgcacgccgagacggcggccatcctcaggttccagaggctggagcacaagttgctggacaatatcttctctgtgctgtcatgcgttgtctccgtgcccttctacacgggattcctccctctcctcttctggagtggacacggcaggctggctaggcagatgaccctcctcatggctttctgtgactacctcggcaactctgtcaaggatatagtgtcagcccctcggccgtgctctcctcctgtaagaagagtgacggctacagaagacgagaaggaaaatgccatggaatatgggcttccatcatcgcatgccctcaataccgtttgtttgacgggatatttactacactacgtcctcacgtttggagaacatggtagtgttacagttgctgcgggtttatctctagctttcttgcttgttatgctagttggcatcgcgaggatatatctgggtatgcacagcttgaccgacgttgttgctggaattggttttggcatcgtcatccttgcattctggttgtctgttcatgaccgtgtcgatgccttcgttgtctccggggaaaatgttgcgaccttctgggcaggcctttctctgttgctgtgctttgcgtatccgaagccggaattccctactcctagcttcgaataccacacagcattcaacggggttgctttcggaatcgtgtacggcatccagcaaacatacttccacttccacacccctgacgccccggtcgtcttcagcgccgagctgcccctgctcacgttcgccgggcgcgtcctcgtcgggatcccgaccatcctggccgtgaaattctgcagcaaggcgctctccaagtggctgctgcccgtggtgtgcagcaccctgggcatccccaccgtgtcgtcctgctacgtcccggccctgagagccgacagcggcagcggcaagaacaggcagggcgccgggcacctgcagcggctgctgttctcccacttcccccggaaggcgtacgacgtggacacgggcatcaggttcgtccagtacgccagcctcgcgtggtccgtggttgacttggtgccggccatgttcgcccatctgaatctgtagccagctgcgtagaatttctgcttctttctcttttcgatgagctcccaatgcggcgcatcctgctcgtaagacatggatcagcttacgaggctgtaaatccgatggtctgtctgtttggcttgtccttctcgtatcgtatgtacctagctgttctcaccaggggtgttgtttctgtacaagtttgtgtgtagtaagtagcaaccagtagtattgattgatgatgggtagctatgagacattcttgacgtcttgattgatgatggatagctgcgacctcccttgacgtc

SEQ ID NO: 78561 - DNA, 179 bp, Zea mays
  Clone ID: MRT4577_171672C.1
ttcggcttgagttcccgccgtttttttacccaccgaccccctcgactcataggggcgggtctactaagggtgtgcccgctcaaactgcatcaaaaataggccagataccgcagatagtgagcattttattccataactacatcgtttatagcttcaaggaaaacaccacgctacttcaa

SEQ ID NO: 78562 - DNA, 391 bp, Zea mays
  Clone ID: MRT4577_171673C.1
cctttaaggaaccgactggccggggccagaaagagagaccgccccccctgtttttccaaagctaaccctaaagggggaggagggcgcccgaaggcggcattgggtttaatattggccttgggggagaatctgttcctccgtttgttggaggacccggccatgcccgaccagtttcggcggaagcttttttccaagttaaaggagcgttccaagccccctaaggcgggttggagcctccttttgggcccttacggtttttgagaccttaaccgtttaaactggaagttttcctgggttcccaaaataatccaggccgccggccgttggtacccttacaacaacctaatggaacgccattttggttggccgccgttttcttgaacacccgttc

SEQ ID NO: 78563 - DNA, 817 bp, Zea mays
  Clone ID: MRT4577_171674C.1
gccggcctggtcggggaatcagagaaggggaagaacacacttcaccggcctcctcctccttcccgtccatcgccgtcgccggggcttcctacaacttcaaaatggcggctaccgccaccgccatggctatagcaactatctcccccgccgctccgattccacgttggtgtcggcgtgggaaaggccaaggaggtcacggaggccatcaccaaggccgccatgaacggccggcgcaaccttgtcacagtgccgctaactaagtactccacattcccgcacagagctgatgcggactatggagcagccaaggtgatgctgaggcctgcttgccctggatctggtgtcattgctggtggagccgtgagggttgtgctggagatggctggtgttgaaaatgctctgggcaagcagctgcgcagcaagaaccccctgaacaacgctcgagccactatcaaggcgacgcagatgatgaagcagttcaaggatgtcgctgaggagcgtggtattccaatggaggagctgtggaaatgataaaaacaattcgaaaccaagaccccccccccctttgtagcattctttctcctgtcgctgtaattttcttaaggtcttcatttttctgctgtatctatgggatgaatcccgcctcacggtttcttttttgcatctctcttctgagattctgtgtgtgagaattgagtccatgagatctgaccctatatgcttgctcttcacttctgtacactgctactggtggaaattcagaccaaagaaatgacagatttggcgaaaaaaaaaaaaaaaaaggccctagggccgc

SEQ ID NO: 78564 - DNA, 625 bp, Zea mays
  unsure (1)..(625): unsure at all n locations
  Clone ID: MRT4577_171675C.1
gtaccctgttggctttcagggagggtccccacgcgtcgggttcaccacagcaacaagaagaaaaggagccagatcagagaagaagtggtggcgatgccgccgagggcagcgccgtcgtcgtctcccttgcctcttgcactcgccgccgtcgccatagtcgtcgtagcacttgccgtttcctcctgttccgcgaccaccgatgctccaggcctgggagtgggagcgagagagatggtggcacgggacgaccccaagtgcgaggagatggtgccctgcaccttcaggcgctgcatccagtactgcgtcagcatcgggctgcagcccaaggggttctgcaactccaagcccaacatgcaggtctactgctgctgcgtcatcccctagcatcatagctcctcgtcaacacacctaaatctgcagccctgctagagaagatacgatctctatgcagattagctgcagcgatatatatagatggatgaatcgtgcaagcggttgaactatggtgctggaatctgtaatatatataagcggatcatccaaagtgcaaaacatatagtttttgcattgccgnnnnnnnnnnnnnnnnnnnnnnnnnnnnnnnnnnnnnnnnnnnnnnnnnnnn

SEQ ID NO: 78565 - DNA, 575 bp, Zea mays
  unsure (1)..(575): unsure at all n locations
  Clone ID: MRT4577_171676C.1
ggccgcttttttttttttttttttgggtcagatctcatggactcaattctcacacacagaatctcagaagagagatgcaaaaaagaaaccgtgaggcgggattcatcccatagatacagcagaaaaatgaagaccttaagaaaattacagcgacaggagaaagaatgctacaaaggggggnggggggtcttggtttcgaattgtttttatcatttccacagctcctccattggaataccacgctcctcagcgacatccttgaactgcttcatcatctgcgtcgccttgatagtggctcgagcgttgttcaaggggttcttgctgcgcagctgcttgcccagagcattttcaacaccagccatcttcagcacaacccttacgggttcaccagcaatgacaccagatccagggcaagcaggcctcagcatcaccttggctgctccatagtccgcatcagctctgtgcgggaatgtggagtacttagttagcggcactgtgacaaggttgcgccggccgttcatggcggccttggtgatggccttcgtgacctccttggcctttcccacgccgacacc

SEQ ID NO: 78566 - DNA, 626 bp, Zea mays
  unsure (1)..(626): unsure at all n locations
  Clone ID: MRT4577_171677C.1
gtgngngtcaggccgacgacacgcgaagggtgaaccgagattagcggcggcggcgatggcactcccggcgtcgagctccggcctcttccgattcgtctccccgcgcagccgcccccagtccaccgacatcgtggccgccgcctcctggggagtcttcgccggcaccgccggcctctacctcgtccagccatttgactggattaagaaaactttctttgagaaacctgaaccagaggcatgattctccaggcataaaaggctgcaagtctgcaactgcaactttgatacaccacttttgtccgggatgattcctgattgaagagaacttgtataactcagcaaataatatgagaccccctcatgtttccttgtttgattttattcagatgtaggcattcctcttgcatgtaatcctcacgaggggagtgatcatttgacttgtttttcatcacacagaaactgcttggttcaactgtgttatatgatcttgatggcatttctaaaatattggtccaaaatgggtgtgttttaaccctgtggcctgattattgtatttgttgcagtccctgtgtccgtataaattgatccccccatatttctagggccccgtttggatgtcgatattt

SEQ ID NO: 78567 - DNA, 1553 bp, Zea mays
  Clone ID: MRT4577_171678C.1
cacacacctcacagagtcgcaacagcatcagctgccacctccttccttccttcctgcataggttgctacacgtatatattctgaagaagagatcgagatgaccagcgtgtcggaagaccaaggcttctgcctgtgcctccacgacatctttgactacgatggccggcctgctcgaggccggccgggccgggatccccgcacttcaccggcctcctcctccttcccgtccatcgccgtcgccggggcttcctacaacttcaaaatggcggctaccgccaccgccatggctatagcaactatctcccccgccgctccgattccatccgcgcccttcccatcccttcccctccccctcggcctccgcctccgctctcaacccctcctcttcgctgcttcccgccgccgcttcctccatgttcccaaagccgcctcctgggacgaatccgtccccgaggatggtggagatgcggaggaatccgttgccgctggggacgacgaggacgaggacgagaagccgcggcccgagccggtgtcctcctccgagttccagttcgcggcgccacccgagggctacgtcgagcccgcggcgtttgacgagctaccgccggagtccccagaagacgtggcggcggcgtacgaatctctctacgggccggccttcagcggcgagacattgctggggaacaatgtctttgaggtcaaggtggtcgaccccatcgacatggaccgggagcagcgcccgaacgacgatttcaccgagcgcgtcgtgcaggtcaaccgcgtcaccaaggtcgtcaagggagggaggcagctctcctaccgcgcaatcgtcgtcgttggcgacatgaagggccacgttggtgtcggcgtgggaaaggccaaggaggtcacggaggccatcaccaaggccgccatgaacggccggcgcaaccttgtcacagtgccgctaactaagtactccacattcccgcacagagctgatgcggactatggagcagccaaggtgatgttgaggcctgcttgccctggatctggtgttattgctggtggagctgtgagggttgtgttggagatggctggtgttgaaaatgctctgggcaagcagctgcgcagcaagaaccccctgaacaacgcccgagccactatcaaggcgacgcagatgatgaagcagttcaaggatgtcgctgaggagcgtggtattccaatggaggagctgtggaaatgataaaaacaattcgaaaccaagacccccccctttgtagcattctttctcctgtcgctgtatttttcttaaggtcttcatttttctgctgtatctatgggatgaatcccgcctcacggtttcttttttgcatctctcttctgagattctgtgtgtgagaattgagtccatgagatctgaccctatatgcttgctcttcacttctgtacactactcgtggaaggaaattcagaccaaagaatgaacagatttagcgcgaaaaaaaaaaaaaaaaaagcggccaagccaaataaccatactccatctgctaaatgtaaaaacttcttctaaa

SEQ ID NO: 78568 - DNA, 512 bp, Zea mays
  Clone ID: MRT4577_171679C.1
gtttgattatctctcgacttgccagtcagttagtgggctacagatcgacgtctcatttcctatggtcagagtcccatcgtcatattcacgacacagcctacgtcacttcatctggcattgacacataggactcgcatgcgcagctgctggtcgagtcgtctattgctctattgctcatgagctctgcatgggcgccgtgatgtgtttattactcgagactgaacgacaagttcacgaccgagggcaacgggcgcgcggacttcagcgtgcagacgcagctagagacgactgtgatcgctgacgcaggaagagcggcggatccttaaagatcgagctagaagaacctgtacggagagttcgcatgcagatgaagctgctccggaacagctgcgggaccaccgtgaccttcttgtacatgtagaaggccgacggctacgcgcacgacgagatctacgtggagctcatgggcaactacagcgggcagtccgaggagatgaacaccaacgtgtggg

SEQ ID NO: 78569 - DNA, 294 bp, Zea mays
  Clone ID: MRT4577_17167C.1
accacaacaaccgcctcctcgccatgtcggaggacgacctcccctaccacgtgcgcgtcaccgccgacggggacctcgagaccgccgggcgctacgacttcggcggccagctcgacaccgccatgatcgcgcaccccaagcttgacccggccaccggcgagctcttcgcgctcagctacaatgtcgtgtccaagccgttcctcaagtacttctacttcaccgccgacggccgcaagtcccccgacgtcgagatccccgtggacgcgcccaccatgatgcacgacttcgccgtca

SEQ ID NO: 78570 - DNA, 280 bp, Zea mays
  Clone ID: MRT4577_171680C.1
acgctagggttttagcccggtacccctaatcctgctacttcgacgtctcgcgtacacccttggggttggggcgctcccatccaaaagatggccgtgccgctgctgacaaagaacatcgttaataagcgggtcaagcacttcaagaggccccatcttgaccggtataagtgccttaagccaagctgtctcatgccaaacggtattgacttccttgtcaggacgaactttaagggatgcacctagatgcccaacattgcttacggttctgacaaatcaacca

SEQ ID NO: 78571 - DNA, 467 bp, Zea mays
  Clone ID: MRT4577_171681C.1
gctcaggcgaaccaaaattttagccaacagtccaacacaaaccaactaaccggatgccacaggggcttaagggggagtcacccccctggtcacaaataaagcgcccctattattaaaatgtcacggaggcttaggggaggtattctagcccgctggagacgggacttccgggcgcccccgcaaagccaacggccatttgttacaggtaaaccctggagtccgagggacccccaagaaacacggccggcagcgatttcagtgctcctcctgcaatcggggccaccctttggaaaagcattgggagcagggtgaacaacaagagttatttcaattatatgagtttggcccactcatggggatctggccgcctgtaacaaaaatggttgaaacaccatttgcttcagctgttacattttcaagatcaccgccacggcgggtttcaacttttggtgctccatggtccttgc

SEQ ID NO: 78572 - DNA, 631 bp, Zea mays
  Clone ID: MRT4577_171682C.1
cccacgcgtccgcccacccggcgtcagacagagaaagccgagattagcggcggcggcgatggcactcccggcgtcaagctccggcctcttccgcttcgtctccccccgcagccgcccccagtccaccgacatcgtggccgctgcctcctggggagtcttcgccggcaccgccggcctctacctcgtccagccatttgactggattaagaagactttcttcgataaacctgaaccagaggcatgagtctccaggcagaaaatgctgcaaatctgcaactttggtacaccacttttgtccgggatgattcctgatgataactcagcaaataatatgagaccctctcgtctttccttgtttgattttattcagatgtaggcattcctcttgcatgtaatcttcacgaggggagtgtgatcatttgacttgtttttcatcacacagagaaactgtttggttcaaccgtgttatatgatcttgatggcatttctaaaatattggtccaagatgcatgtgtttaaaacctgtggcctgattattgtatttgttgatgtcactgtgtccgtataaattgatccaccaatatgtctagctgattaaaattggattatgagcaaaaaaaaaaaaaaaaaa

SEQ ID NO: 78573 - DNA, 874 bp, Zea mays
  Clone ID: MRT4577_171683C.1
gggcgattgggtccctcgaggccggccgggattcctcaccggtgaccttcctcacctgcgtcagacagagaaagccgagattagcggcggcggcgatggcactcccggcgtcgagctccggcctcttccgcttcgtatccccccgcagccgtccccagtccactgacatcgtggccgctgcctcctggggagtcttcgccggcaccgccggcctctacctcgtccagccatttgactggattaagaagactttcttccagaaacctgaaccagaggcatgagtctccaggcagaaaaatgctgcaaatctgcaactttggtacaccacttttgtccgggatgattcctgatgataactcagcaaataatatgagaccccctcgtctttccttgtttgattttattcagatgtaggcattcctcttgcatgtaatcttcacgaggggagtgtgatcatttgacttgtttttcatcacacagagaaactgcttggttcaaccgtgttatatggtcttgatggcatttctaaaatattggtccaagatgcatgtgtttaaaaaaaaaaaaacctgtggcctgattattgtatttgttgcagtcactgtgtccgtataaattgatccaccaatatatctagggccccgattggatgtcgatattgaagaggataaatttgaatttggttgaataccgaatcaaatcagatatggtattgaaacaagatgtaattctaattatattggttttggacgtcactgaattggagttttgaattgtgcggtaattctacgcaataccgagaggtgaggctttgtatcgggagagggggattctagttatagtccaatttcagggaattgagctgatttcaaat

SEQ ID NO: 78574 - DNA, 228 bp, Zea mays
  Clone ID: MRT4577_171684C.1
cttccgtcgtggtcttagcaatttcggttggcaatatttcctcggcttttcctttggctgctacgaggcttccaaatcattctgggaagccctctccacttccaaaaccaacttctccattctctgcatagagactaaaagatttctcttgtggtattcaaagtaataaatcaaaccatttccaaagatcttaaagccctaacttgtgaaattttcttaccgaccgtt

SEQ ID NO: 78575 - DNA, 236 bp, Zea mays
  Clone ID: MRT4577_171685C.1
cccatacgtccggagtgccagagacgtgacctgcctgcgacgagcgagttggtactttggtagcatagcaccgaatccatccaaagcttcgttagattgctcacggtcccaggctgacttgttcggttcggtgcctccttccgttccgctggccatggcttccttgttccggtttaatttggcgtctgattgctcgaccttacctgatccatcgccccatcgactacacagttgct

SEQ ID NO: 78576 - DNA, 514 bp, Zea mays
  Clone ID: MRT4577_171686C.1
ggccgggactcacattccactgacaggtccaacacccggcgtttttcaactgcgatagccgaccctggcaatgacgacgagcctgacgaagaaccggacaaaatgcggcgacacgcccagaagcaacgcccgtatccctcagcactggactgactccgtcatgctcgcgcccaacgcctcgtggtcactgcaccccccactgcaagaactctgagaactgccaccccagcaacatcacccagcgggtcttgagctcacttcttctcatgaggcacaaatcgcactggccatcaacatgggcagagcgactctgagcgaggccgcgcaccggaacgactaccaaccgtcccgccccaacaaccgccacgacccacccaaggaaccctgaacagctagttcgaacgtgctctcgactggactggtaccacccaataatgcttctccttcggtcatgtcactctttaccagcagtatatataaagagctttgctaccgctcttgtattctaccccac

SEQ ID NO: 78577 - DNA, 397 bp, Zea mays
  Clone ID: MRT4577_171687C.1
acccacgcgtccgcccacgcgtccgcccacgcgtccgcccacgcgtccggatgagatgctggcatcatatctatcttttgttgatctgatcccttagcttgctgttgatatacatgcatgcataatattattattagtagtaattccgtcgtcaggccagcgttcgttgttcacgcttggttcgccgtcgttgacaaatatcggcgaattgaagctttaggctgtgctcagcagaattagcaagtgcaacgcgcagtgtccaagagcatcccaacaaggaagatatatcgaaggctgcagtgatcgatcgatcgatcgaggatggaaggcgcggcggctgggtggccggagccggtggtgagggtgcagtcgctgtcggagagcggcgcggcgacga

SEQ ID NO: 78578 - DNA, 470 bp, Zea mays
  Clone ID: MRT4577_171688C.1
gcaggcgcggatacccgattgaaaatcccagcataacagccctgcataggcggttaaatcatagaacgacctacaaattactgagaacatacatgcgctgctgggagcgaacgaacactggcgcatgacactgtgtacatgcccaggagccagtatatgaaacaaactggagtgcactcgaatgctactcgacgatgactacgcagaacggatcaccggacatctaacgtgtaataagcagctcacgctttcctgcagcacgcattagaaccagacagcagccaaacatcctttgaggaacccacaggagctaccactggtttccctggtggtggatgtgctgatgctctccatgctgcggagggtagtaaggacgctgcatgggcctttaagtagccctgttaacccggcggacgatgatgctgtgggaggtaaggaccttggccgggcggacggtacacaccatgggg

SEQ ID NO: 78579 - DNA, 457 bp, Zea mays
  Clone ID: MRT4577_171689C.1
aaaaaaaaaaaaaaaaaaaaaaaaaaaaaaaaaaaaaaaaaaaaaaaaaaagaaagggcggtctgtgtagggcgtcctatatagaggagcgtgcatacgatcggcttgttactaaatagctccacctaaattcaatccactgacacttcattaaacagcgccttgaataaaaaaaaacgtgacagaaaccaaacttagtcgcaaagaataacattcgctttaaaccagctgttgtaaaagagaagaggcccgaacgaatcgcccttcaaaagagctgcctaacatgaatggagaatgctacctgccgagtagcactcattaagagcgattaatgtggacgctacgcgcagcttaatcactacaatagccaccgctttaccggccgcttatttagctttctttcctttttttttcgtaactttcttgtgctttccccgggatgttttaaagggggggt

SEQ ID NO: 78580 - DNA, 323 bp, Zea mays
  unsure (1)..(323): unsure at all n locations
  Clone ID: MRT4577_17168C.1
attccagttccactncgnctgcgntgccggtcgccgactccgaaactccgacagtccgaccacaagaaggatgagtgaagaggataagactgctgcttctgctagcagccgaaagggccctttgtattgaaaggtggtgtcttctctgtccaggaggtccgtattttgtttttccgcggcatgatcttgagatcggncctgatgctactgcccggcttacctgntngccccccccatcacaaagggaaacaagaaaaatatgagcttgacaagaaaactggactgattaaggctgatcgagtcctatactcatcagttgtata

SEQ ID NO: 78581 - DNA, 176 bp, Zea mays
  Clone ID: MRT4577_171690C.1
tcgatacaacagtgtcccgtccacatcactggctgctttatcacagtgtactggctatccttatggacaaccaggccatatatgacatctgccgtcgttccctcgacattgtgcgcccaacctacaccaacctcaactggctcgcgtcccacgtcatcttatccctgactgcctac

SEQ ID NO: 78582 - DNA, 717 bp, Zea mays
  unsure (1)..(717): unsure at all n locations
  Clone ID: MRT4577_171691C.1
ggccgcttttttttttttttttttcttgttttccaccacgggaaagctgaatttcattatttgacagtaacaaaattacaaaggtttgtaactaagaaaaaaggaactaaacaaaccgcataaaaacacattggaatgaaaagaaaactaatcaaaccgcaaaaaaacacattggaatgaacacagagggttcatccaattggcacaacatgaactacactgagaggcgttacctcacaacgtaaagcgttcatagccacacacaacatctgaacctttacatggccagatggcttttaacagcgcacaggctgtgctcagttttcaacaaaagtctctcagcatggaatgctctgccttcagatgatcgtcaccctattgtcacctccatccattcgatctcactgatgaaagtgcagcgccgtcttcttgaaatttctgcgccatgctccagctgagctgagatgactcctttttataaacctcattagtactcagcgctctaagctcagtaggtttcctgtgtacctagcaactgcagagaaatgctttgactccagtaaatcagcaagtgtggttggttccttggatcataaatctgcaggtaatcatggtccttgtttatacaggnatgatccttcccgtcgccaaacacaaacaagggatgcacgggcttaagaatggtgtatttctcaaactgtatgctgtacattttga

SEQ ID NO: 78583 - DNA, 1129 bp, Zea mays
  Clone ID: MRT4577_171692C.1
gattacctgcagatttatgatccagaaccaacacacttgctgatttactggagtcaaagcatttctctgcagttgctaggtacacaggaaacctactgagcttagagcgctgagtactaatgaggggctttggaggattgggggccctgttcgtgggcaccggccacacatgcgtccgcccgggcctgcatgaagactcaaaaccgcgatggctctttcttgagcggctgcgataactgaagaaagatatgaatgagattctttcgatgaataattccagcaaaaataatggtttcttctgttgtgtatacttggcagaaggaatggataatccatgctatgcagcttgggtgattgcaacagtactgcaagtgcttttatttttcttttttgctaggttgttttccagtttgctttggtgcatttgtggtactgcctcttctggttaattaaatggtgttacatttttggcttacatttttgtggtgacggtcaggccaaattcttccaccctattctggttaattaaatggtgttaccaagggacagacaaattcactttatcggtttagctgatgtttgctggacagtgtggaagacccaaaaaaaacggtgtgtgctttgaagggaaaagaacaagacacctactgaaatcatattgtgctatgctaacatattggacaggtttataaaaaggagtcatctcagctcagctggagcatggcgcagaaattctcaagaagacggcgctgcactttcatcagcgagatcgaatggatggaggtgacaatagggtgacgatcatctgaaggcagagcattccatgctgagagacttttgttgaaaactgagcacagcatgtgcgctgttaaaagccatctggccatgtaaaggttcaggtgtgtggctatgaacgctttacgttgtgaggtaacgcctctcagtgtagttcatgttgtgccaattggatgaaccctctgttcattccaatgtgtttttttgcggtttgattagttttcttttcattccaatgtgtttttatgcggtttgtttagttccttttttcttagttacaaacctttgtaattttgttactgtcaaataatgaaattcagctttcccgtggtgg

SEQ ID NO: 78584 - DNA, 224 bp, Zea mays
  Clone ID: MRT4577_171693C.1
tttgattgtgagtcaaggccttgagattttcattcagcagattaaggtctggaaatacaggtcagagcgccagggttgcacttcacaggcgcgcacaacagggaggttcatgcacaacctataaacaagagattgccacacatagtatacagcgcatgttaacacaagagagcggctgatggttaccatacatgtggcgacacgtgggctccgtgccgtaatcc

SEQ ID NO: 78585 - DNA, 130 bp, Zea mays
  Clone ID: MRT4577_171694C.1
gaggctgtccgtataaacttacttagcacaggcatatgcttcacctgattaaactgatgaacaatctggtgcaactcatggatgacaacgacaaagcagtcatgacataaggcatgtatctgtgtaattg

SEQ ID NO: 78586 - DNA, 273 bp, Zea mays
  Clone ID: MRT4577_171695C.1
cggctcgagctaaacacgccggcacccttccttgctccctccccacgcagatgctgcagcactaaactgcctcctctgttagccacgctcggctcctgggcatcagcccccacgccagaagctagggcaccaccctcttgatgtttcccatggccgcctccagctgctcctatggcgagctcgccctccctctgtgccctgccctctcacgacgtgcctgcgcagcccggcagcgacgtcgtccatcccattcggcgtgctctaggtgttcga

SEQ ID NO: 78587 - DNA, 774 bp, Zea mays
  Clone ID: MRT4577_171696C.1
atggatggagtcacacaagctgttgaaaatcttaagaaagaatggggccaagcagtttcacagcttgatgagaacattactgcaattgaatcatgtggaaaaacagggaaagggacagaggaagcaaattatcttccaaggttgaatggttctgcacaggatgctctgcagttgctgaagtcactgcagttccagcttgatcttctagcacagcagcttcccacttttgatgaggtgcagtctggtcaagcaaccttgaagtcatgggatgaacaatacaagaagacacttcttctaggcaatggtgaagagtctaccatccgtaggcgtaatctccaaacctcggcccttgctcagccaaacaagcgactgtgttcattgtctgagcacgttcctcatggttaccgtaggaaatcactttttgaaggtctaattcgatataatgttctgttgctaagagcaacatggtttattaaagtcacatacctaaaccagctacagacccgacagacacctaacagtatttcagtagcgggttctgataaccaacgctctcagtggacaaaggatgttgttgaatatttacaacatatgttggacgaattttgttctaaagagggtgcattcgtgcatccatcctttagagagcagtcatcaccaggacctactgctggaaccaatcagataaaaatgaaaactaaagcatctccagctgctggagacattgaagaacacttggtgcacttcaaatggtggtatatggttgcaaagtag

SEQ ID NO: 78588 - DNA, 212 bp, Zea mays
  Clone ID: MRT4577_171697C.1
caacctcctcgccgacgtgtgcgcgcacctggagcggcatcgcgcggcgggggcgcggcggcgcgccctcctccgcctggtgagctcgtcgctgcgcagcgggggtcacgacgcctccgtctgggtctcccgctgggagaagtccccgtcccacccggtcggcgacgacgcttacatcgacgtgctcctcccggcggcctcggaccgcggcg

SEQ ID NO: 78589 - DNA, 891 bp, Zea mays
  Clone ID: MRT4577_171698C.1
gacacacggcgtcgcatttggaacgctcctgctcgtcgcacgtacgaagcccacgcgtccgcgcacgtgccagagccgagcccccgcgccggcgccccgccggagaggatgacgcggcggtgctcgcactgcagcaacaacggccacaactcgcgtacctgccccgtccgctccgccggcggcggcagcggcggcggcggggtgaggctgttcggcgtgcggctcacgacggcgccggcgccggcggtgatgaagaagagcgccagcatgagctgcattgtgtcctcgctcggcggcggcttcggcggctcgtcgccgccggtggaaggagtgggtgctggcagaggaggggaagacagtgggaccggctacgtgtccgatgatcccgcgcacgcatcctgctcgacgaatggccgcgccgagcgcaagaaaggtacaccttggactgaagaagagcatagaatgtttctgatgggtctgcagaagcttggtaagggagactggcgcgggatatccagaaactttgttgtttccaggaccccgactcaagttgcaagccatgctcaaaagtactttgttagacagacaaactcatcgagacggaagaggcggtcaagcttatttgatatggtcccagaaatgccaatggatgagtccccagctgctgtggaacaatttactctccaaaatactcaagatgaggatacaagttcaaatcacgtgccaaccttacatcttggacaacggaaggaaacagagtttgctaagcagctacaaacttttcagccagggcaccatgagaaatctgaatacgcagaaccttcattgctgctaccaaatttggagatgaaccccaatgtaccattcaagaccataactgatccaacaaga

SEQ ID NO: 78590 - DNA, 820 bp, Zea mays
  Clone ID: MRT4577_171699C.1
gacgcctgcggttccggtccggaattcccgggtcgacccacgcgtccggaacctttgaattgtaacggctgagctaccgggatcgcttggaggcttcggtcgggagcaggttcctgcctgtgacatggacagatgtaaagaaaactgtgtctccaggcctgttaagaccactgttcccttcggtccgaaacgcgtcttggtgactgagcagattccatctcagaacctaggatctgctagcagtggccaggcccagcgggtcctgtgtccttctaactcccagcgtgtcccttcacaagcccagaaacttggagcaggtcagaagccggcaccaaagcagttgccagctgccagtgttcctcgacctgtgtcccggctcaataacccccagaagaatgagcagcctgcagcctccggaaatgattctgaaaaggagcaggcatccttgcagaagaccgaagacacaaaaaaaaaggcagtggactttggaagattttgacattggccgcccactaggaaaagggaagtttggaaatgtctacttggcgcgggagagacaaagcaagttcatcctggctctgaaggtgctgtttaaaacacagctggagaaggcgaacgtggagcaccagcttcggagagaggtggagatccagtcgcacctgcggcaccccaacatcctcaggctgtatggctatttccatgacgccacccgagtttatctgattctagaatatgcgccccttggaacagtctatagagagctccaaaaactctccaagtttgacgagcagagaacagctacttacatcactgagttggc

SEQ ID NO: 78591 - DNA, 709 bp, Zea mays
  Clone ID: MRT4577_17169C.1
taaattccttttttttttttttttttttttttttttttttttttttttttttttttttttttttttcaaaaaaaagggggggccgggagtttttttctttgtttaaaagctttacaacataagcagaaaaaccaaaaacagccctaaaaacccccatttattgggggagaacaacaaaaacaaaaaggggggggcaaatcaaaaaaaaaccacaactgggaaaacccatataaaagcttgattaagcccaggaaaccaccaaaagctttttactgaaaaaaaaggcccccttaggcaaaaggtttctccgactgggggggtttcccccccccccaggggaaggaagggtcgccccttccaaaggggccgaaggcccccgttttgaggaagcccccgttgcccccttttttgaggccaagggtgaggaagatcatgccaggcctgaaataaaagttttccttgcaaatcttgaggatctccttgggggggatcgcgccggggccgtacgtgtcaacaaacacggaaagaggttgggccaccccgagggggaaaaacacctggaaaatggcccggaaaacaaggcccttggcaaaaatgcttttggaagcctgccttggaaaaaaggctccgggggggccaaccttgggtggggtccttgccggaaaaagcgccccccccgggggcctcccccccccgggagggggcaaag

SEQ ID NO: 78592 - DNA, 420 bp, Zea mays
  Clone ID: MRT4577_1716C.1
aaaaaaaaggagggaaaaaaagcttaactcctttccttttgacaaactgacacaacaagtttatccaataattttttaattttcccaacccctcccccgtttttggcctggaacactaaaagggcctcaacggggcggaagaaaacgaaaaaaaaaaccccctgccccggcccgggggggaaggccggcgggaacgggtgcggttggccctgccccggcccctggaatttggtccggggaaccccccacttaaacaacccggcgtgggtcggggccccccaaacccatttggccccccccccccccccgccttgtttttgcccccggaagaacccgaaaaaaaaactcccccaaaagttgcccggaaattccgccgccgccgccgtgccgaccgtgggggtcggcctgggccttgggctg

SEQ ID NO: 78593 - DNA, 400 bp, Zea mays
  unsure (1)..(400): unsure at all n locations
  Clone ID: MRT4577_171700C.1
nnnnnaacgcgtccggactaaggatgttggttcactcgatatgtctactgagccactaagacatagacatcatgtgctatctgagacaagactagctaccttaggccatcgaaaccaacaatttgaagccggcattgcaaggaacgtggctacagtgaccgaggatatttgtgacgctatggaagaagacgattggacacatccccatccgaatgcagagctccacaacaatggcatggttgaacaaggagtggaccatacacatacgaagccaaaagtcatttccaaaggtgatgatgatgagggtgtcatattcgaagaggatgaggatgatgatgagaaccatggatacctattcgctgggcaatatgatgagatcgacgaggacatcgagatcgat

SEQ ID NO: 78594 - DNA, 382 bp, Zea mays
  Clone ID: MRT4577_171701C.1
ccacccacccacccactcgcttcagccgcctccgccgcgcgtacaagcaggtgcgagacaggatgccggctggccacggcctgcgctcgcggacgcgcgacctcttcgcgcgccccttccgcaagaagggctacatcccgctcaccacctacctccgtacctacaagatcggcgattacttccgatgtcaaggtgagcggggccgtccacaaggggatgccgtacaagttctaccactgggcggaccgctcgcgtctggaacgtgaccatcctctctattggtgctgacgacaaattcggcgtctatgggacgcatcattgctgagggactccttctccttgccaagcatgggcatttgtctcgctgagcctaagaggcccc

SEQ ID NO: 78595 - DNA, 369 bp, Zea mays
  Clone ID: MRT4577_171702C.1
gtcttttcaaggagagggcccttgacacttaccaaatggagaagtacactcggtcattttgggcgggtctcatagctgaacgtagctagaacaagttttcgccttcctagaacagtggtgacgatcttctattccgcatgccatctactagacgagcgcattatttgccttagaacatgggcaacccagcctcttgatgcatcgaatgacctaaacgtccagattttccacaacgatgtgaatagtgttgcacagtgccaacaaaggctactgagtccaacatctctgtagatacaagcagaactcgatgctggtttctaggaggatctgcatagcgtctggctacacaccgacgagtttgagcgaggc

SEQ ID NO: 78596 - DNA, 442 bp, Zea mays
  Clone ID: MRT4577_171703C.1
gagaagaccaaggagaaggacaaaaagaccaagggggtgcgcctgcacggactccgccaactcgccacctttttcgagaagcagatccccaaatgctagccgttcctatgtcagcagtttgagaagaacttcactgatggcctcttcccagctgacgacatgcaagacatagaggtcatattcccgccaccatacttccagtgggtccagaagaagaaagaattcactgaatacacaaatcggaacgagtgcattacatatcgaggagactacatgatgcaaaaacggacacttttgttgttttgcttagaatgctcccaccgcgtaacactttatggaccttttgatagggtaccaagcacagagacaagaagctgagcgaccatccaccaactaaggttcatgggccgcaatatgcggcagccaagcacaaagacccaac

SEQ ID NO: 78597 - DNA, 3896 bp, Zea mays
  Clone ID: MRT4577_171704C.1
caaccagtgaatgctggtcaagatttggcgtgggggatgcacgctcaagattctagtagtacaaacccgttcctggatcctgcctacttgatgagccacactcaaatttattcatcttccagtatgagtagccaaccatgtttccctgaagaagaggatttcctttcagagcttgtaatacaacatgacaatatgggagtaactgctgatgccctttgggaacctgcaactccacctgatgatgcgccattaccatcagaaattatgactgaagatgatttcagatccttctgccaagaatatcatgagatagatttttcatctgtcactaactgttctcacagtgaaccagcctcagattctaacaaaattccaaatgcttttctgatcagagagtcagattttccatgttataactctgccttgccagtgaagttagatcaggaagcctgtattcattctaagttctgttctgagtgtgtcgaatattcatgtgctgtggaaagacaaggcactacatcaatggttgtttctggtaaagaagatcgcgtggacaaggacgagacaccaggagtagatttccatttaaattttctcgagttttccaatgataacagaagtcctgaattaaatatgctctccgttccagtggatttacggcaggaactgcatggcttgcctgaagttgattctcgtgatagttcccctttgctgcataaggagaagactagtgaagaatgctgcttttctttaagcaacaacgttgttgaagtgaaacaagagctggaaatccgtgctgaccttgttccacattcttctattaatgaaaaagtagatggattagatgaggctgtaccggtggaaccagaggcccatgcctgtgccttggatgaatatgacaaccaagatgtcccacacatttcaactagtgagaagaatgaaacccttactttgggcaaacctgttttagtccaggggccagaagtttgtgcctttggtggatttgaatgtgatcctccaatcattccatcaccttcagttgatgagactaaggacaatctagaagtcagaatgaatatgatcctccaatcattccatcattctttgaggacttcttttcaagcagaacagaagtcagaatgctacacctcaggtgaacatgattctcaaaccgttccatttcctttgcatgatgagaatatcaatgaactggatgatcctcctttgagcaatgctgacgaactggaccgggaatcaaaagcttgtgtttccacatgaatgtgatgctcaaatcgctccatgttcaactgatgaggatatacatgaattggatcaccctcctttgagcagtcccgctttagtggatcttgaatcagaagaccatgtctcggatgaccgtgattccgaagtcaccccatgtttggttaaagataagattgatgaatctgtagatgctcaaccaaacctgcttcctggggagctagagcaggaaactcatgcaccccctgaattagactttcgagttgctccacaatcagcgaaagaatctgattgctcaactgaatttgattcccaggccgcaccatgttcttcaaatataccagtactagctaacacaacagtgtcgacttgtatttctgccatgcctagcagtgaggaaacgtatcagttgtctcctgttccaccacctactgtacaatttcaaaatgattcctacaaagatcctcaagctctactcgctgattcctacaaagatcctcaagcgccaccccctctccctcctctccagtggaggcttggaaagcctcggctaggacttctgagtagaaaaggctgtatgactgaacctgcaagggtaatagatcctgttttgcagatatcaagccaagagatggatattaggccaggtttgcttgatccaacggatagatctatagaaccagtatcctgtcaagaaatcaaagaagatagatgtgagagttctttgatagatcataatgatcaaaatgtggattttgatagattatcgaccagggttgcagtaactgatgttgcaaggactgaacacaggctatccttagagacttcagaggacattaagcaacaggggcatatttcttcatcggcaacaggagttggggaacacctggatgctgggttcacatcaacaatggcagatgaggaacatctggatgattctgggatgacacatggaacagctctatacttatcagaccctctgtttccattacctacatatgaactgcaggaccctcaaccagatactcgagaaaatagcgagcatcccagtcaaacacatggagctgcatctggggatgataagtcaatggatgctgttggcagcatggaaagcaccctaacaaaaggacatgtttctggaaataggtgctaccagcaacctcagcatggtgaatcgtcctcagagacttcagaccataaagagcatattacaaatgcatcagaggatggtgttaagcatcagtcaggtacaagtgaggcaccttcagacacagcaaagcattctgcaccaggcacgctgttgaaagggaatgtccaagagagtcaaattttacaggaacataatgtggggagttccgaggacgatcaaccaggaggcctgttgtacagcttagaaccagtggcacctcaaggggaaaacaaaaaccaggttaacaacccaggcctgttactggaatggcctggagatacaagtgagttggtcactggccttgaaaaaagttgctatgcgcatgctgagcagccacctgtgatgggatggactgttggacctcagatgcttcatcctaaatatggtattttagaagaagagagccaatttgagcctaatatcgccgacaatcatttaatcaggaagcctatttcgataaaaaacatcccaaggaatccactggttgatgctgttgctgctcatgatagaagctcgatgagaaaggtttcagagcttgcaccaccgactgacaagccgaagcctaacgagagaaacatgttgctagaacagataagaaacaagaccttcagcttgaaacctgttgctccagctcagcaaacagcaatgagatcccctgctagaaccagtactagaaacttgaaggttgccgctatcatagaaaaggcaaatgccatacgacaggcagtgggaagtgacgatgaagacgacgcagatagttggagtgatacataaatcccccaccgttttccctaccctcttggtgcttctttccatggctgaaagggtaccgattcatcaagagcattggggacaggttggggatgcacaaccatgtcatcgtttttgtttgccctaccctcttggtgcttctttccatggcagaaaggtaccgattcatcaagagcattggggacaggatggggatgcacaaccatgtcatcgtttttgttagtaatataatgctagtcttgtgtatagtatacgcccataatccttttcattttttgtatgtgtattctttcgaccgattgtttgtatacctgcctctctctcccacagcagcaaaggctgttgcggttggcatgatcctaggatagcatgcatggtctatgtaaattaaacagtagtagttaagtaaagaattgttccatcttttctgggttagtaaaataaagctagtcttgtgtatagtaaacgcccataatccttttcattttttctatgtgtattctttcgaccgattgtttgtatacctgcctctctctcccacaacagcaaaggctgttgcggttggcatgatcctaggatagcatgcatggtctatgtaaattaaacagtagtagttaagtaaagaattgttccatcttttctggaaaaaaaaaaaaaaaaaaaaattttttttttt

SEQ ID NO: 78598 - DNA, 482 bp, Zea mays
  Clone ID: MRT4577_171705C.1
ctgggttggggtgtgctaaaactcgagtgtcccgccctgcacctaccatctctttcctgcattgcgttccggatatcatatctgacgaggatatgatggtacaacgccgtgcctgtaactgaattgtccccgacaggtatcactaccatttcccgtacctagatctggatgggctcaccgccgaccacaaccgtgtcaggccactgtagcagcacatgttcccgacaatgtacctctcaagactgccatctcctgttctaccagacaacacttccagagccacatcgagaagcccaagctgctgcgaatccaaagctctgtgcgggcctgtccacaccatcgtcttccaggagctggagcaagaagcacattgtgtatccggcgtgctgttggggccgccgactctcacaagcgaggaagacatgatggcgtccgtgaggagccactagcacctattgtacgaggccgggaagcccaagcgc

SEQ ID NO: 78599 - DNA, 724 bp, Zea mays
  Clone ID: MRT4577_171706C.1
taggggccttttttttttttttttttgaaaatgagacgaagatatatatatagagttgatacctaagttacttagttactttgtatacaggggaatgtgtagaaaaaagttgttcagttcaacagtaccaccactaactaattaagagaatccaaggaaacagaagagcaagcacgtaccaatagtggagtcaagttagcccataacagaagcatggcaccacaggccaccgtcattgtgcgacaggatgttataagttctaacaacgctggatggcaattcatttgaagacaaagcagccaccgacgcggttcttctcgcgctagctcgcgccggtgaggaggtgcgtcatgtgctggcatgtgggagggccatggaaccaccactcgaggtttggtgccagcagttcttgtgcccgacgcgcgtcgcaggcgttgagcgcctcgtacagtcgcaggctcgcagcactaggaaacagttctcttcttcagcgagcaccacctccgtatccaccgttgtctcgtgcgatcgcggcgaagccgctctcggaccagaggtgtagatagctcttgctgcgagtgccgcttagacagtcctctccatgcatgagctggccggcagcttaaaccagcaacggagtcaagcccaggcaccggctctgctggtgtataccgactccctcgtcatcgtaggcgaagcagcagaggatagatggattgggcta

SEQ ID NO: 78600 - DNA, 275 bp, Zea mays
  Clone ID: MRT4577_171707C.1
aaagaagatgacccaaacaggagtcacatatcaatatatcttctcttggtataccaaaaccacatgaaattcatggtgggcttcccaaacccattcaacacaccggaacctaaaaacgtgtagattggcaacgcagccaccattccccccaatctggatttggttctttttgcttataaccacccaccaaatttccgagtcaatggaaacatgatcaaccaacaagcagtgagcattctacctcttcattatgattcaaatgaacaccaatatca

SEQ ID NO: 78601 - DNA, 371 bp, Zea mays
  Clone ID: MRT4577_171708C.1
caacctcacaccacaaacgctcatccagtgctcttttcttctagccgccgccgcaaacgcgtgccaacgctctgcgctcccatcctcccgttcgttgaaggtccttctcaacatggcctccaagacggataagttccgcctccaggcggagatcaacaagctgctatcgcgcatcatcaacagcttctactcaacaatgagatcttccttaaggagctcatttcacactcctctgatggcatggataatatcaggttcgacagtttgacggacatgagcaagctggatgccgacccggagctgttcatctacatcgtctctgacaagagcaacaatattctgacaatcattgacattggcattggtatgac

SEQ ID NO: 78602 - DNA, 599 bp, Zea mays
  Clone ID: MRT4577_171709C.1
ggccgcttttttttttttttttttaagttctaacaacgctggatggcaatttattgataaaaagtagcggacagacttgtttcggcattccatcaagcagcttgagaacatagaacgtacaagggcataaaatgtagaagtttgtcacacttcgaagacaaagcagccaccgacgtggttcttgtcgcgctagctcgcgccagtgaggaggtgtgtcatgtgctggcgtgtgggagggccatggaaccaccactcgaggtttggtgccagcagttcctgtgcccgacgcgcgtcgcaggcgttgagcgcctcgtacactcgcagcactaggaaacagttcccttcttcagcgagcaccacctccgtgtccaccgctgtctcgtgcgatcgcggcgatgccgctctcggaccagaggtgtagatagctcttgctgggagtgccgcttagactcaacagtcctctccatgcttgagctactgggcagcttaaaccagcaacggagccaagcccaggcaccggctctgctggtgtataccgactccctcgtcatcgtaggcgaagcagcagaggaatagaaggattgggctatcccggccgg

SEQ ID NO: 78603 - DNA, 309 bp, Zea mays
  unsure (1)..(309): unsure at all n locations
  Clone ID: MRT4577_17170C.1
gaaagctaggaacgccatgaaggataccggatccgaaaattcccggagatcgactacacgcgatccgggacgtagaacacaancagaccatagagatacccagcacatgcacgacaacttcgcataacattcaccaggcgaagcagaggctacccggagcaggcaagatatcttcagacccgaatcaggccatcgccataaaccagatcaaagaaagaaatatcaaataatcacccaaataataaaacaagataaaaaaaagaacataaaacaacgaaaaagagaaataaaaaaaacacactaacaatc

SEQ ID NO: 78604 - DNA, 245 bp, Zea mays
  unsure (1)..(245): unsure at all n locations
  Clone ID: MRT4577_171710C.1
gtgaccttcctccctgttatctttttatcagatcagtttggtggaccttccagtatttcatgacatattatttattatacatgctatggagtatttcattgtcaataaagtttacttgttatctcaaaaaaaaaaatagtggggggggaggcgaaaaaatataatttgtactttnaacaacccttatttgagtgggcctttttggctcggctgtggcagatgattccttttccagcctctttcgt

SEQ ID NO: 78605 - DNA, 377 bp, Zea mays
  Clone ID: MRT4577_171711C.1
cagtatatggcgggatccatggcatacgcgtaggatgatctgcctctagttatattaggagactgtgctacaaaggatcctatggccagtgggctttaggaggccgttactgggtgattactggggttagtgctccccgaagagggcaaccctactctgtgcttatgctgaagctgtgctcggatgtcactgctcaatgactggcgagcctatgggtgaagccaccactggctggggacaaactagttggcgttctactcgggcgagagagaggtgctacttcagaccttaactcgacgagcaaaggcgctgggctatgcatgcccacgctggaggggttgtcatgttcaaggctccatgagcgatgaacgtttttc

SEQ ID NO: 78606 - DNA, 358 bp, Zea mays
  Clone ID: MRT4577_171712C.1
ggctggtatgcagagaactatacggggcgaggcgacagcatgaacaaggtgaagtgttaggatacacggattgatttggcttccaagggccaaagctacaaatactaaacaagatgattgggttttaaaggggggacctaactcccactttgttggaccaacatgtgggactacagcttgtgaacacattaataagaaacacccaactgtgtgacaaagctggtatccccgatgggcatataaggggtgggaaggcatactatttatggagggaccacaaaccacagcttgcacctgagagagaaaggttaatgaaagcagggggcttcttccatatgggacgagtaaatggaagttt

SEQ ID NO: 78607 - DNA, 959 bp, Zea mays
  unsure (1)..(959): unsure at all n locations
  Clone ID: MRT4577_171713C.1
ggccgggnaaaaaaattacaaaaaaaaaaaaaaaaaaaaaaaaaaaaaaaaaaaaaaaaaaaaaaaaaaaaaaaaaaacattgggtacctcgaggccggccggtctcttttccgccctccacccctcgcgagctctccacccctccgccgcccatggtggccgcgccaccaccgccgccgcagtttgccaagcacttcgctgctgggccgcccccgccgccccaagctggtgctgggcgccgcacgccgaccccgccctcgtctggatccggcgggaacgggtgcgaagaaaataaaaccatttgggtcggtgacctccagtactggatggatgaaaactacctacataactgcttcgggcccagcggcgaggtggttacaataaaagttatccgcaataggcaaacaggacagtcagaggggtatggatttgttgagttcttttctcatgcatcagcagagaaagctcttcagaattttactggtcatgtgatgccaaacactgaccggccatttaaattgaactgggcatcgtatagcatgggtgaaaagcgatctgaagtggcttctgatcactcgatatttgttggcgatctagctgctgatgtcactgatgaaatgctgctggagcttttctccagcaagtaccgctcggtgaaaggagctaaagttattattgatgcaaacacaggccgttccaggggctatggatttgtcaggtttggagacgacaacgacaaatctcatgccatgtctgaaatgaatggtgtatattgctctacgaggccaattcgtataggacctgcgactcccagaagatcttcaggtgattctggctcctcgactcctggtcattcagatggtgattcttctaacagaaacgtatatggtggtgggcttgaccccaatgtcagtgaagatgaactgagaaaagcctttgccaatatgatcttgcctct

SEQ ID NO: 78608 - DNA, 429 bp, Zea mays
  unsure (1)..(429): unsure at all n locations
  Clone ID: MRT4577_171714C.1
gccggccgggtccggctcttttccgccctccacccctcgctagctctccacccctccacacgaccctcctcggcggcggcggcggcgatgcagattacataactgcttcgggcccagcggcgaggtggttacaataaaagttatccgcaataggcaaacaggacagtcagaggggtatggatttgttgagttcttttctcatgcatcagcagagaaagctcttcagaattttactggtcatgtgatgccaaacactgaccggccatttaaattgaactgggcatcgtatagcatgggtgaaaagcgatctgaagtggcttctgatcactcgatatttgttggcgatctagctgctgatgtcactgatgaaatgctgnctggagcttnttctcccagcaaagggtaacccccgcctttcccggggggggg

SEQ ID NO: 78609 - DNA, 1745 bp, Zea mays
  Clone ID: MRT4577_171715C.1
tgggtacctcgaggccggccgggctctcttttccgccctccacccctcgcgagctctccacccctccacacgaccctcctcggcggcggcggcggcgatgcagatggcggcgaccaccaccgagtcccaggcggccgtgccgcctcaacaccctcacgcccacccccacgcgcccccgcagcatgctcacccgcaccaccacatgccgcagccacggtgggtcgtcatcccgtacccgccgccgccgcccatggtggccgcgccaccaccgccgccgcagtttgccaagcacttcgctgctgggccgcccccgccgccccaagctggtgctgggcgccgcacgccgaccccgccctcgtctggatccggcgggaacgggtgcgaagaaaataaaaccatttgggtcggtgacctccagtactggatggatgaaaactacctacataactgcttcgggcccagcggcgaggtggttacaataaaagttatccgcaataggcaaacaggacagtcagaggggtatggatttgttgagttcttttctcatgcatcagcagagaaagctcttcagaattttactggtcatgtgatgccaaacactgaccggccatttaaattgaactgggcatcgtatagcatgggtgaaaagcgatctgaagtggcttctgatcactcgatatttgttggcgatctagctgctgatgtcactgatgaaatgctgctggagcttttctccagcaagtaccgctcggtgaaaggagctaaagttattattgatgcaaacacaggccgttccaggggctatggatttgtcaggtttggagacgacaacgacaaatctcatgccatgtctgaaatgaatggtgtatattgctctacgaggccaattcgtataggacctgcgactcccagaagatcttcaggtgattctggctcctcgactcctggtcattcagatggtgattcttctaacagaacggtatatgttggtgggcttgaccccaatgtcagtgaagatgaactgagaaaagcctttgccaaatatgatcttgcctctgtgaaaattcctctaggaaagcaatgtggctttgttcaatttgttagcagaactgatgctgaagaagcactacaaggattaaatggatcactcattggaaagcaggcagttcgcctttcatgggtccgcagcccatcgcataagcagtctaggggtgactccgtcaacaggaggaacaacatgtactatggcacaccattctacggcggatatggctatgcctccccggtgccacacccaaacatgtacgctgcagcgtatggcacgtacccgctatatggcaaccagcagctagtgagctagagagctcccctccgacgtgtcccctctgacgggaaacaaaggttttggtccggtgagcatagtagcgtcaggtgagaaggtgcctttataaggctgtcctaagaagtgggcgagatatgttgttgcatcgttatcgttatggtgcctgtaactgttgtgtgtgccgtgtgcgtccggaagaattggatggaatggaactcgtggcttgttgtagtacatcagagagtcatgttattctttcaagaaattttgacttggtaataaattaaactattgtttgtgcgtccaaaaaaaaaaaaaaaaaagcggacaaaagcacagacatgctaggtaccacatgtattttgtatctttgtcatacacgtatctgaatccagaagaaaaa

SEQ ID NO: 78610 - DNA, 636 bp, Zea mays
  unsure (1)..(636): unsure at all n locations
  Clone ID: MRT4577_171716C.1
gagactccacactaggaaacggatgtctcggctctcgcatagatcaacaacgtagcagaatgcgatacctaggagtagaattgcagaatcccgcgataccatcgagtttttgaacacaggttgcgcccgaagccttctggctgatggtacgtctgcctgggagtaacgcagcggaccacataccatgagcaggcatagcatccaccatctgcccgtggtgctagcacgagtgcaacaatggccaccgcgctgtccttcacggccttggcactggccgcgctcctctgagtggccgccgtcacctctggcgctggcgccgagcaagagatcacgtgcaaagcccccaccgcctcgcaagagagatccttgttgtcctacagcactggatggctgccgagcgaggccacctggtacggtacccccaccggcgtcggccccgtggaccagggtggtgcgtgagctatccagggcaccgaccagtacccgttctcgtatcatgacgtcatgtggcaactagcccatcttcgaagactgcaagggttgcgtgtcaagctacctgatactgcgcctgaagagcaaccaccccgtctgctccgntatgtagcacacagtgataatcacggacgtgaactacta

SEQ ID NO: 78611 - DNA, 662 bp, Zea mays
  Clone ID: MRT4577_171717C.1
cctcgaggccggccgggagagcgcacaccagccgccgccatgtctaaatgacgtatagcgagggtctgtggttaacaagttccggatgacgatgagtctgccggctggcgcgacgatgaactgatcgtacaacacggccgccaagaacctctacatcatctccgtcaagggcatacaagggccgcctcaaccgcctcacgaccgcctgcgttgaagacatgggcatgatcaccataaaaggagaagcccgacctcaagaataagcgatgaccagccgtaatcgtccgtcagcgcaagtcgtgctgccgcaaggacggtgtctacatgtaattcgaatataatagctgcagcgactgtgaatcccaagggagagatgaaaggttccgctatcaatggacctatcggcaaggagtgtgatgatctctggtctaggataggtagcgaatgaaacgccattggttgagagcttgccggaatatgttcagacttatatgatcatcttattatcagatgctaacaatgctattgagcttaataggccctttagggatgatcacatcaattacgtgaagaacagaatctagtataccaaggggatctatatacacatgtatggcataaattttctgactaccatttctcatgacagagtacccaatctt

SEQ ID NO: 78612 - DNA, 337 bp, Zea mays
  Clone ID: MRT4577_171719C.1
tttgttgtcaccaccaacggggccaggacaggcagggagaccagaagatgataattagaacgagaccgccacaaggacagcacgaagggagagacatagcgggaggaagaacaagaggaaaaacaaaagcgctaggtctggaaccaaatgcgggcttgaggaggcctgtaaagcaagatgaacagagttacgcatacaaaccacggatgacggcaccgtaggatgcccatcagggacaaacacactgttatgcgagagtgaggcgactagactaatatggtaacaaaggcagcgcgggctcagacgacgacaagaccaccgaatgcacatggaaccc

SEQ ID NO: 78613 - DNA, 197 bp, Zea mays
  Clone ID: MRT4577_17171C.1
ctttggcagtgagtaaatagcatattttgaagtagagttcgatactttttcataagaggttggggaagaatgctcctgaagtaataatgtattccacatctacatcagtgaaagctatctacctatcctgagtctatcttaaaggaatgcaagataataaccttatctcttgcccttattatgaatcttccactctt

SEQ ID NO: 78614 - DNA, 496 bp, Zea mays
  Clone ID: MRT4577_171720C.1
tttttttttttttttttttttttttttttttttttttttttttttttttattttttttttttttttcattttttttttttttttttttttttttaattttaattgtttttgtcttatatttatgttttttttttttatagaaccaaaaaaaagtttggaaatacaatgcttgcaaaaaaaaaaaaggataattactggtggcccaaaaaaaaaaaaacccccatcccatttctctcttgctggcgccggggctcattatttttaaaaaaaaccgtttgtccattcatgtttccggaatcactcaggaacagacggtttttttacagaaggggcccttctaatataattttctaaaaaacactgtgccagacggtttttttaccccgatggacagaaaaaaagaggggggggcgggtgacaattatttcaaacagagatagagcgttaaccctgccctggtgtatgttttcacctaccaaggacagaatcgtcctgg

SEQ ID NO: 78615 - DNA, 570 bp, Zea mays
  Clone ID: MRT4577_171721C.1
gggatgttctccctttaactagagtagacatattggtgctgatcctgctctggttcgtctgcttcaatggctcccgcttcgcttccgacgtcttcgaaaggtatgcaaacagggtagtttacatttgtgctaacctctagtagatctgtaagttcctaaatcgagagacggggaacacagacttggtcaaagtttcctaacaagtcagagaactgcaacatgatgtctgatatttttcttctttctgttgtctgggcaatgggtacctagctatgagtgcaggggagtattctacttcagttttatcagcaaaagttcagtgcaataaaaacaaagagaataatagaaaaataaccactatttgcaagttagaactagaaagttggaatgaacaagctcttgggctctaactcagacaaccatttcagaacatttggactgtgttagtgtagttcagcagtgaagttagataaatattttcttagattgatagcaaatattccaacgcactcttcttccgtgcaggttttgttgaaacaatcattcgtgtggtgatgatctaccaatgta

SEQ ID NO: 78616 - DNA, 375 bp, Zea mays
  Clone ID: MRT4577_171722C.1
taagaattggaagttcaaaattggtccgccggagaatttctgtgcatcttagagcatctccaagggaggtcctaaacaaggttgtatattgaaatttagggcttgagaccataaaactctttccaacagtggccctatttcataaaaaattatcaaatgattatagggtttggcatatgaggttctaaatatagtatcacatatattgaagtcatgtccctgttttcccttaatctacaactattttgttttctaataacttaatttatttcttagatagcattatttgaggccaaactgttggagtaaatttcttttgatgcactaaacactttaattatggttctatttcaattttaaggctctattttagag

SEQ ID NO: 78617 - DNA, 2091 bp, Zea mays
  unsure (1)..(2091): unsure at all n locations
  Clone ID: MRT4577_171723C.1
gcacgaggtttggaaaattcagacttgagctagaaccagaggaacaccaaacacgcacgcgcccaccccccgaaacggagagaactgaccccgcagagaagatggccggcgagatgagctgggtgggcaagaagatccacctctacaacgtcaccatgggcctctacatgctcgattggtgggagcgctgcctattcagtatccttccgccgtgtcttgatccaattcagtttatgtattactgtcccctttgcagattccgaccttgcttttctcgacttcgtcatcaactaaggcttatgttagatccccgtctgattctggcggggtatctttgcctctgtcccggcagggcttaggtttgggtaggcacttgttggatccgttctttggggaaacgttttgtcggccaggcaatccgttgattccgcgttcggcgccagcatttcttcgaatttgttgggcaatgtttctgatccggtgttcctttcgaagtaactggattttatgttcatcctttaactagagtagacatactggtgctgatcctgctctggttcatctgcttcaacggatcccgcttcgccactgatgtctacgaaagccacctgaaggcacggattttccaaggcgcaaattacggcatgggaattggcatgccctcctcctaagccttcaacgcaaaacacagaagcagcaaaatctgctagttctggaatctgaactgggttccaacaagctgtagtgatgtgtatgatgtagttccaatatgtaagattcttaacattattctttattttaatgtactttgtgtaagtgtgtaactaaggtttgagcgcacgatatcacatcctgagttctactgtaattatatccatttccttggtattatgttcttctcgacggttgtgactgatcaaccatggagcaccggccgcagcagagagtttggaaaattcagacttgagctagaaccagaggaacaccaaacacgcacgcgcccaccccccgaaacggagagaactgaccccgcagagaagatggccggcgagatgagctgggtgggcaagaagatccacctctacaacgtcaccatgggcctctacatgctcgattggtgggagcggtgcctattcaacatattggtgctgatcctgctctggttcgtctgcttcaatggctcccgcttcgcttccgacgtcttcgaaagccacctgaaggcgcggattttccaaggctcaaattacggcctggcaattggcacgccctcctcataggccttcagcgcaacacacagaagcagcgaaatctgctggttctggaatgttaactagttcccacaaactttagcgctgtcgtgatgtgtatgatgtggttccaatatgtaagattttttttacagttattctcttctctttattttcttgttttgtgtttgattacacgatatcacaccctgaattctactgtaattaaaaaccattttcttggtaaaaaaaaaaaaaaaaaaaaaaaaaaaaaaaaagtatgcaaacagggtattagggtttacatttgtgctaacctctagtagatctgtaagttcctaaatcgagagacgggtaacacagacttgtcaaagtttcctaacaagtcagagaactgcaacatgatgtctgatatttttcttctttctgttgtctgggcaacgggcacctagctatgagtgcaggggagtattctacttcagttttatcggcaaaagttcagtgcaataaaaacaaagagaataataggaaaataaccactgtttacaagttagtactaggaagttggaatgaacgagctcttgggctctaactcagacaaccatttcagaacatttggactgtgtagttcagcagcgaagttagataaatattttcttagattgatagcaaatattccaacgcactcttcttccgtgcaggttttgttgaaacatcatcgttgttgtgatgatctacgaatgtattcttgctagtcaattaatcactgttttaagacttaagcgtgggtttgattgttgntatggtaatgttagctgaactcatttataagaaatgtttgctg

SEQ ID NO: 78618 - DNA, 390 bp, Zea mays
  Clone ID: MRT4577_171724C.1
gcactgtaacttctcaattttcattttggtttgggggaagtaggcaactgtctctcctctttgtccaaaaggcatgcatgatgccgcgaatgtggacaagaaactttttttttttctggggacacactctctcggtgttcaacaaaaccgtgccggcgtcattgatcatcgtgaaccgggggctcctttaccatgacaactcgcctgctcctccccacccaggagacccagtctggatcccttggcacgaccctgtcccctgccttggagtggaggcctgaagcgccggcgtcatcctggtgcgccctcataaccatgaacacgtgcctacattggagccccaatgcctcgaaagccttcatcggtgcggtgccctaccttcctactgct

SEQ ID NO: 78619 - DNA, 491 bp, Zea mays
  Clone ID: MRT4577_171725C.1
gaagcacagggccaaaattcagggggcttggtaggcggcccattttccaaatgttcatttaaagggatcatgcttcgacaaaaagggcaggtgaatatttttccccacacaagcaagtctcaagaaggggcaaaaagggggggcaaaaaacccctatggatacaggtatacttgggatatccaacaggggcccgggttttcgctacaaaaaacaccaggggccaccctgggaggtcatttacaaatggatatgggctatgggaacaccggcccggcataacgggcaggacccgtgccggaggagccaactggcgatgccccgcacggggaatatgggttggcactggggcagggccctcacaaattgccgggctccaaaatcctggaggcaaactgggcaacaactgctatcaatttcctgatcacaggtgctagcagcactgaacctcgtttttgggaacctatcaaacaaaacccttgacatgcctcct

SEQ ID NO: 78620 - DNA, 266 bp, Zea mays
  Clone ID: MRT4577_171726C.1
attcggctcgagggaaccacccgcgcctaattacgactatccacgggctcgcctcgcgccaagggataattgttctggggggcgccgccatctaaccggaaggaggcctgcagtcagcatccgcatgctatggcgagctcggctcgatggcgctgacatcgagttggaccgcccctacctggaggactacatgccgagcgacttgtttatgcaggacgcgcccaggaatcttcatctgcgcaaacttcatggcatctcgtcgcagc

SEQ ID NO: 78621 - DNA, 354 bp, Zea mays
  Clone ID: MRT4577_171727C.1
ggatcgttcaaattcaattcgctgcattgcatgcatatatatatatataaaatcgtcaggaacgaattgattgcttatattatatatctacaagaatattggtgtatttatatatcctgctcctgcagctgctgctggcattctcttggatcgtgatcgcatggttaatagcgctttcgttcattatatctgtgtttcaaatccagtccgttcccttcccagtcaagtcaacaagacccgtacgttcttctctccattcctcagatgcccgcgcgggctacgtctcgctatgccatgagcgaggcgagctcctgcaggtcgaaggagccgccggaagcggcgtagacttgtcgc

SEQ ID NO: 78622 - DNA, 575 bp, Zea mays
  Clone ID: MRT4577_171728C.1
gccccactgttattcttttcgggccatcgcaagctcctgcggggttgactacagaggcatacacccttctgccacaatcgcccactcaagacactggcccaggcccatggagactagggtcaacggcgtccgccaccccaacaaggaggcgcaggcaccccaacaccgcatgcaaaacggcactctggttatataggaacaacgggcacgccgagaagaaaaacggcttaggctacctatgccccgggatcaacggaccccttcgaattggattagaacgagcccctaccaaaacagcgagtccctatgctacctacaagcaggaaacagcctccatcttccgcgccgacccaaggcccataaccttccatgctaggcgaatgcgccccacgttgacccaaaggcctcctgctaacctagccacaaataaaatatcaccccggggtcccaccctcccgaaaagaaaaccaagaagtcccctgccccgcaccaagctaagctagcatgcagaaataataacctcccctccaccaataacaaaaaaacgacggggctgagccccctacttttgctcc

SEQ ID NO: 78623 - DNA, 454 bp, Zea mays
  Clone ID: MRT4577_171729C.1
ctgtttattagcagcctgactgtggagacctgatcagagggtggtgagtggtgacctacgggctacggctacgcacattaatctagcagtggtcagtggatgcaagccccagtcccagcctcgccgccaagaaacacaaagtcgtgcctgctgcttttggttctgggagctaagataacggagggaagtgacaaacaattaaattatatgtagcggctgctgcttcggcctgcaaattttgttgcgctaacggccatggacatgcatgggcaccatcccctgtgttcgataatcgtgcggaaggggaaaagaagaagaagctgtagataaaaaaaaggacaggcggctaattgttaatttccgcatggcttaagtctggcaacgacctgctggctcaatcaaaaacctgtgacggacagacggatggatcaactgatgatgatgttggtttggc

SEQ ID NO: 78624 - DNA, 441 bp, Zea mays
  Clone ID: MRT4577_17172C.1
cgcgtgcggccggtgtcttccactccgtccctgggccaaccgggtggtggtgtcagcgccggtgtcttcctctccgtccctgggcttgggtttccatggcggtggcgagggtaacgccgacctcagccctattactcggaggtccaaccagatagccttttgtacttctacagtgctgcgagagcaaggagagtaggagcccaaagccccaaacgctctttgtttcgctctgcgtgcatgcacgcgtgttcgatgcattaggacggactttgaagaggctagagcaacagttaccgtgtaggtgagctgaatgaaattggccaggagaggaaacaatcggtctataaaaaagtttatagctaatttagataagatcatactttcttatgattgaataattctctgtctgtgttctaactgcgtcctttctcagtgttatac

SEQ ID NO: 78625 - DNA, 507 bp, Zea mays
  Clone ID: MRT4577_171730C.1
gggacaacactgatatttctcggatattatcaacctacaagcctacgtacggtacaccaagatattccctacgaatattggtcttggcggagacagagccctgctcacaatctagcacatacccgaagggatatcgagttttacacgtattatacaaccaaactaccggggcatcgaaaagaatggatagtcgctcgggggacaacaagcatttttcacctctgtacacacgaaaaacaattctcatagcttgaatttggatgaggatagctagatgagatccttcctcagaatcttgacgaaggtgttattgggaatctgcgacacaaacgccatctatataaccttattgtaacgcactacctgtttgcaaacacaactgcatgaactcgtggctctgacaaatgaattccttacttgctcactacggaggacaatgttaactgatcgaactcacagcagagaaacggtgtaacagggacatatttgatttctggatgagaaagc

SEQ ID NO: 78626 - DNA, 821 bp, Zea mays
  Clone ID: MRT4577_171731C.1
acactcgaaccctcgacctctcccccagctcagcctcgccgtcgccagggagcggggcagcctgctccaccactccggccggcgaccgcgcggcatcctgcagcgaggtctgaattggtcattatggtgaggaaaagtgcagagaaaagttatggtcgtatggctgcatgcacatcaagtcctgaaccctcagaaaataacccaaggcagaatttctgtttaggagatataacatgggttaagcatgatggctcctcatggtggccagcccaggtcattgatgaagcatgtgccagtagcaaggccaagaagaagaccagccatgacgctctggttcgactgtatggcacatgcctagacttgtatgttgacccttggaagtctaacatggaattcgaaatgtttctgaagaaagaaaataagacagccatggaagcattccatgaggtgcttcagaaggagctctctcattttaagtcggccagtgatgacgaggaggaagctgtcaacacaaaagccaagacgtctactaagaaagtcagaaagcaagaagccttagagcaggaccaagaagttcggagcaatgcagaaggtggaggtgctgctcagaaaggaaaaaagcagaaaggtgtgaggcaagcaagtgctcttgacaaagctttgagtatagattctgctgaaggtttaagagataagacacccaagcaagcttctgctgtgcgagataaaaagagtggtaagaaggcatcatcaggaacatcggtggccaaaaaggaaggatccctcaagcggtcgggccgtaccaatctgaagggacattc

SEQ ID NO: 78627 - DNA, 282 bp, Zea mays
  Clone ID: MRT4577_171732C.1
atgggattatgggaaggagactgggagagggatctggaagcttcggggccaatcccagcaagcaaaatggacgaggggaagggaagagagctcttcgggaaggggaatgtggaggggacgacgaaccctagcaaggaaaacgaatgggggagaaggggaagagccgccgcgcttaccgggactattggagcactggcggcggggtctggagccttgtcgccggagtcgcgggcgggcgaggaatgtcgccgcagtcgcagacgagcgaggaagggtgggtag

SEQ ID NO: 78628 - DNA, 496 bp, Zea mays
  Clone ID: MRT4577_171733C.1
gggggggggggttggggtaaacatatcctcctttgccctaacagggcgctctatgagcttatgaggtgcgggctgttaactataaccctgaggcttcaactttgtggttctgaaccccgttatcaccccttggcataaactctgcctatgggctatttcacagggcacctgggacccttgactttttctgtacccaactctccctgtgcagcctatcctagtcctattgtctaacggggaggctgtacttcaccgtgagtatatgaacaaatttacccgtgagtcctaggctcggccaccctaacaccacccataaatcaactaggccttagtgtttcacctgctgagcattactgcactgctaacaggaaacacatgctatctcctatgcctgatactaatcatacttataccagtgccagacaagaccaaacagataacgtctcgtccagaacagcaacacaccacatgcgggaccaacaaactagcgcgagct

SEQ ID NO: 78629 - DNA, 492 bp, Zea mays
  Clone ID: MRT4577_171734C.1
atggggaaaaactgatgattttcctcgcactggataaagaaaattgttaactgtgacgctcggttttcaggaccgcacaacatgaccgttaagaaagagacatcagggcattccaaaagccaataatggttttcattttcttgacaccgctccaaaaaaggcaactagaccagccagctcctcatgaacataacacggagcagcttccggagcaccttcttcttttgcattaacggaacaaagccggccagggcaaggggccgtgttctcgttgatgacccaaacgataaatcatcctgacacgcgaatggatctgaactcagacaactcaatcacacatctgggcatgctgaacatctatcagctacacagccgtcctactcaagatactgcgcgacaaaaggcccctcatgtgtggccggtctgactccaaaatctactaggactactccgatagtgaccagaaggacgacagcctcttgtcctcaacca

SEQ ID NO: 78630 - DNA, 126 bp, Zea mays
  Clone ID: MRT4577_171735C.1
ggcgagcataagagaggcggcggatgttgaaggcagtgccaaggctggggttcttgggtgttgccttccccggtctgccgcttgtttgtgcgtccgtgtccttgtctcggttggtctgcggcgtgg

SEQ ID NO: 78631 - DNA, 544 bp, Zea mays
  Clone ID: MRT4577_171736C.1
tctctctgctgttccttgcgcgccgccgccgccgtgaaggaaggaagaggaggagcgaagagcacgacgcgatgggccactccaacgtctggaactcccaccccaagaactacggccccggctcccgcgtctgccgggtctgtgcgaatcctcatggtctgatcaggaagtacgggctcatgtgctgcaggcagtgcttccgcagcaacgccaaggacattggcttcatcaagtaccgttgaagaatctactctgtgtagtggagaacttcctggatcaaagaaatggatgcttcattagaaggcctaaattatgtgcttaagcattttgttcagaacttgagactcatgtgctagtaaacttgttaaaatttttgatgggtaccatgtgcctgttggaccatctgtaatcagaagattgaaatattttgttacgcttgatatttggtgttcttatcttgtttgtattggttcttacatgtgttattggtgtcaaagatgaatgatggctattacactcaaggatattgaagtgtgaatgtaat

SEQ ID NO: 78632 - DNA, 335 bp, Zea mays
  unsure (1)..(335): unsure at all n locations
  Clone ID: MRT4577_171737C.1
tataggtgagtcgtattaaatcntgtcaggttgctgaacgtgcgttgttcttgtggaacaatgatcatactgtaagcttgatagcacagagtcgtgttgtcagaggtcgaatgatatgggaagctcttgataggaatagacagacgccactggaatcctgcagttcatggtcgcacggccaatgtgcgcacgatgtttttggacatggacagtgaagtagttgaacagtgcgaccagcagtacatggagaaacaggcgacagccaaagagatacaggaacacgcgataagcagcatggagacacttggaagcagttgttgctgccacaggtggcg

SEQ ID NO: 78633 - DNA, 961 bp, Zea mays
  Clone ID: MRT4577_171738C.1
ggggaaactcgaggctcctcatatattctttcatgggagaacgggagccttgatgattggcttcacaacaagggacaatgccgactcatttcttgattggccaacaaggctcaagattgcaaaaggagcaggccggggcctttcttatatccacaacacctgcaaccctaacattgttcatcgtgacgtcaagtccagcaacatcttacttgatagagaattcaatgcttatgtcgctgattttggccttgcaagattgatccttccttacaacacacatgtcacgacagagctggtaggcactctgggttacattcctcccgagtatggccaggcctgggtggccacgctgagaggtgatatatatagttttggagtggtcttgcttgagctgctcacagggaagaggcctgtccaggttttgaccaagtcgaaagaacttgtccaatgggtaagagagatgaggtcccaagggaaggatattgaggtcttggatccagctctcagaggaagaggacatgacgagcaaatgctgaatgtgcttgaagtagcctataagtgcatcaaccacaatcctggattgaggccaaccatccaagaggtggtgtactgcctggaaaccatagttgagccccagcaggtgcaagtgcagctgtagttaaaggagaacatattgtaggtggtgatattgtactccacccgactaggtgtaacttcagtagaaggaagagtttctaacaaagagcacagtagtgtacattttttaaaaaaaaacctcgctccctcgctgtcatgaggcccccccttatacaattttactcattccttccgtggaaaaattgcccctcctagttcaaacaattgaacatgaaaagtgcaaaaaaaaaagcatggggctcttgtcaaaaaaaaatttgtttaaaacccaacgaagttgtacaggggtgtatgttaatttttg

SEQ ID NO: 78634 - DNA, 336 bp, Zea mays
  unsure (1)..(336): unsure at all n locations
  Clone ID: MRT4577_171739C.1
attgaatagtagggttcttactggtggaacgacgaccgtagagtctgtccacgacacgagcagctgagcggcgggagggatgtcgacggtgtgaaattctggccgccccgatggtcgttacttccttctccggccacgagcgccctccaagcaacatagtgaagccccccagactctccnctcccccgtggaactccgaacactagctgaggccgagggcggcgttggtggtactctcagctgccgttctcccctcggtctggtgttggcactcggttccagctcagatgtgacggaacggggaggcaggaggatcatggctggtggctttgtact

SEQ ID NO: 78635 - DNA, 231 bp, Zea mays
  Clone ID: MRT4577_17173C.1
gggtctgattcgaccaccgatgagggaggcccacgtaggtttcaccccacgcggatgcatgaatttgtcctctaatttccagcttgcgcgtgtgtctgaggattacttcccgcttccctgctactgcctactatgggcctttgatccggggcttcgtggatcttgggaagaggaggtgtggtagggcacctcttcggcgatctggcggcgaggatataagcggcgttattg

SEQ ID NO: 78636 - DNA, 659 bp, Zea mays
  Clone ID: MRT4577_171740C.1
actaagcaagatcccagtgctctttttatgcactttccatgttcagttgtttgagctaggaggtgcaatatttccacggaaggaataaggaaaaccgtatacaaggcctcatgacagcgagacttttctttcagaaatgtacactactgcgctctttgttaaaaactcttcctttactgaagttacacacttacacctagtctggtagagtacaagattgccacctacaatatgttctcctttaactacacatgcacctgctcccgcacctgcagcggctcaactatggtctccaggcagtacaccacctcttggatggttggcctcaagccaggattgtggttgatgcacttacatgctacttcaagcacattcagcatttgctcgtcatgtcctcttcctctgagagcaggatccaagacctcaatgtcctttccttgggacctcatctctcgtacccattggacaagttctttgaacttggtcaaaacctggactggcctcttccctgtgagcagctcaagcaagaccactccgaagctatatatatcaccttttagggggggcacccaggcctggccatactcgggaggaatggaacccaaagggcctaccagctcggtcgggacatgggtgttgtaaggaaggatcagtcttgc

SEQ ID NO: 78637 - DNA, 286 bp, Zea mays
  Clone ID: MRT4577_171741C.1
ccgggagtcagcgccaccacagtgctgcccttccacaccagcaccgagatgttccagggcatgagagtcaggtttcccaacctctttcccccactgaagccggagacggtggcccggaggacagtggaagctgtgcagctcaaccaggcctcctcctcctcccatggacaatgcatgtcctcgttatcttgaaaagcatacttccacaggctgcactcgaggagatccacaaattctcaggaacctacacctgcatgaacactttcaaagggcggacatagagaca

SEQ ID NO: 78638 - DNA, 282 bp, Zea mays
  Clone ID: MRT4577_171742C.1
cttctcactggcgtccttttctagcggccccgggcgccgtcccaaccggggcgtacccggggccagggctgcctcccgagggaaaccggcctccggtcccaaccccgcgcaacaaccggcccggaggcataccggggaaaacccggggtccctaacgagggcgcaaacccacataaacggcagcacacacactgacccctggggagccaaaaaaccgggcgggcccacagtaatagggaagcccccaaccccccgggaccggcggggaaaccattgggcccc

SEQ ID NO: 78639 - DNA, 323 bp, Zea mays
  Clone ID: MRT4577_171743C.1
cacccaataaaacaccaaatctttatttttttttttttgtaaaaaccaatcccatcttacaccaaggtcttgctttcatttttaagcgtaattccaatatcccttacttcttaaaaaattttcacaaaacatggtgttaaactaaaatcaaacaaaccaaccttttttgtcttactttttttcggacccttgggtttacccctgaattttttacccgtccctgaagtcctaccacttttcccttataattaatccttttataacttttctttattaattttataaccattaacctttttaaaatatttatccatacaatttct

SEQ ID NO: 78640 - DNA, 1492 bp, Zea mays
  unsure (1)..(1492): unsure at all n locations
  Clone ID: MRT4577_171744C.1
gtttcacgcacattcgnctgnnctccgctagtggtttattaagtgacttggtctagggatctctccagcgcttcgagaaagttttaggcccctgcacgcgtccactgaccagacctggccagcccaggcgtggaggtgctcgtctcctccgccgcgccgggaccggcgatgaacggcgggctccctggattccacaatgcgccggcgtcaaaggccgtggtcgtcgccgcaggtctcttctccgtcgcctttggcttccgcggccactccctcaacctcggccttgcctaccagagtgtttatgaaaagctgagtgtatggagactgatcacctcattttttgctttttcgtcaacccccgagctgatctttggagcagtcctgctgtactactttagagtgttcgaacgacaaataggttctaacaagtatgctgtcttcattatcttctcaaccatggtgtcggtactgcttcagatccttgctttaggttacatgaaagatccttctctaaatcctttgacatcaggaccatatggcctcatctttgcatcttatgtgccattcttctttgacattccaatctcaatgaagtttcgcatatttggactgagcttcagtgataagtcatttgtatatttggcaggactccagcttcttttctcatctggaagacgttccattgtacctggactttctggcatattggctgggcttctgtatcgcctgaatacatttggcgtccgtaggttgaagttcccagagttcgcaacatcgctcttctcgcagttgtcattgcccttttcaagcaatccatatcaagggttaccgatcacagaaaatgatggaagcatcccttctcatcaggcacgtcaaattgaggatgcacgcacagctacccaagatcctacggagtcttctattgccgcactggtgactatgggctttgatcgcagtgcagcaattcaggcgcttgcattgaccaactacgatgtcaatttggcgtcgaacattctgcttgaagcacaagctctacagcaatgataccctggcatcgagtcacaaaagacgggcagatgcactgtacattaatgagcgttaagtgtttgatactccgattcattcttctgttctagattttatcacaggtttccttgaaacaagccactgtatatgaacgtgaactatgggaacgaaagacaattgatgcaggagctttctctatttgcttgcagcgattctgaatggtggttgactagtgaatgtctggcagtgtgcattggcaatagtgttggctttaaagattgccagcagattatggtggtttgtggatatgtagccaagtagccaattggtgtcaggaaagaaaagttgctataatcgagaaagcgaaaggttgatgtcaaacagctcgcactgattttcctccagttcccccctttgtggcagagcgagaacttttttcatttttttnanaaaaaaaaattnantn

SEQ ID NO: 78641 - DNA, 538 bp, Zea mays
  Clone ID: MRT4577_171745C.1
atatccatccatccagctagctagcgtccctactaatctctctttttctcctcagtacgtcacacccgctagccctcctcttggtctgccgtgcataaaggcctcttgctcctcctcacagcagctcaacgatgccctcaagcccgtgaacaatgctgatactaggtgcaagaggcaggccataatcaggccgccgcccaaagctatcatcaagtgcctgacgctcatgcaccgtcatcgtcatacattggatagttcgagcacgtgcatcactcacagagctgctaaaattgtgggggaactgaccgcaacactaaacaaatgtggtgtaatcagccccccacctgatgctgcctcaaaagaatatcgaaggctggactgccaggctgcttccatctccaacagtctgcatatatcctgcttacaacttctgctccgaattatggatcactaggacgcccgacgcaagaacctcgaacgaaaaatccatggaatcttttattaaaggagtctccccagtttcttctactaaatggtg

SEQ ID NO: 78642 - DNA, 1275 bp, Zea mays
  Clone ID: MRT4577_171746C.1
agggatctctcgagcgcttcgagaaagtttcaggccctccgcccctgcaagcgtccactgaccagacctggccagcccaggcgtggaggtgctcgtctcctccgccgcgccgggaccggcgatgaacggcgggctccctggattccgtacgctaactcatctctcgtccctcctgttctacttttctttctataaagagaaacgtctcgacttcccttaactctgttcctctgttgtcggcatcgatcatggcgcgattcgatctggttctgcgcagacaatgcgccggcgtcaaaggccgtggtcgtcgccgcaggtctcttctccgtcgcctttggcttccgcggccactccctcaacctcggccttgcctaccaggattagtagcttggaattacatggaaactcagtgtttatgaaaagctgagtgtatggagactgatcacctcattgtttgctttttcgtcaacccccgagctgatctttggagcagccctgctgtactactttagagtgttcgaacgccaaataggttctaacaagtatgctgtcttcattatcttctcaaccatggtgtcagtactgcttcagatcctttctttaggttacatgaaagatccttctctaaatcctttgacatcaggaccatatggcctcatctttgcatcttatgtgccattcttctttgacattccaatctcaatgaagtttcgcatatttggactgagcttcagtgataagtcattcgtatatttggcaggactccagcttcttttctcatctggaagacgttccattgtgcctggactttctggcatactggctgggcttctgtatcgcctgaatacatttggcgtccgtaggttgaagttcccagagttggcaacatctctcttctcgcagttgtcattgcccttttcaagcaatccatatcaagggttaccgatcacagaaaatgatggaagcatcccttctcatcaggcacatcaaattgaggatgcacgcgcagctacccaagatcctacggagtcttctattgccgcactggtgactatgggctttgatcgcagtgcagcaattcaggcgcttgcattgaccaactacgatgtcaatttggcgtcgaacattctgcttgaagcacaagctctacagcaatgataccctggcatcgagtcacaaaagacgggcagatgcactgtacattaatgagcgttaagtgtttgatactccgattcattcttctgttctagattttatcacaggtttccttgaaac

SEQ ID NO: 78643 - DNA, 386 bp, Zea mays
  unsure (1)..(386): unsure at all n locations
  Clone ID: MRT4577_171747C.1
gaaagaggaanccagcagcaccaaaagagcaacaacggcgaccaagaaagggggccaagcgggcgccaagcggcggcggcaggggaagcgaacgcgacagagaccccncaaggcccacaagcggcaanagccggccancgaccgccagaccgcccagcaaggacagcnacagnaggagaaaacccagcccagcaacccaaaaggcnccaacaagcaagcgcagcaagcaacaaaccnnaagcacccnggcnncaacaancgccagccccaacnggggggcagncanggggacaaaccaacagggcacagcagcngcagcaacncgcgcgaccggggaacaaccaagnagcgccggcaaaccangcgcccaacacncagcaacaaca

SEQ ID NO: 78644 - DNA, 322 bp, Zea mays
  unsure (1)..(322): unsure at all n locations
  Clone ID: MRT4577_171749C.1
acggggaccaccnacacancggcngcgcccaccggnggcggcgccggcgcggcccaggggcaggggcaggggcaagaccaccaggagagacggcagacnccgcggacggagccccngggtgggcgcgggagcgcnnncngccngncangaagcnggaggacacaaacaaagaaaccgcgggcaagggcgggccggngnncggcgccggcacggacgacgggaagccggancncggggncaccggcaccggcngaagccagccgngagngccccnngangngacgcgcagncaacgagcgaggcagcaagggaaagcacaagg

SEQ ID NO: 78645 - DNA, 346 bp, Zea mays
  Clone ID: MRT4577_17174C.1
attcggctcgaggttagtcgcctctttttctttgtggtacgcttgcggggcgacctcagcgggacgttcaggacccagtacgcatgcaggtgggtcctgggtctcaccaaggacaggctgcacggtggcgcgctggaggaggcctgggctcacggccagtccttcttctgcggcggggtgaacatgatcatcgacaggcgctgctgccgctggggccgcaaggacaacatcttcatgagcacgcacgagcgggagcagatcatggaggtggagagcctgatcagcatcatgacgctgcagcgcgacagcgattggtgcggcttactgcttcgcctgctccgtctgg

SEQ ID NO: 78646 - DNA, 708 bp, Zea mays
  Clone ID: MRT4577_171750C.1
ggccggccgggccgcccaaatactaagatgtgcaatgcggtcaacatggtggattgtcatcgaatggccgagtgcggaggcctcctcctcctcaggagggtggagcctgcataagcacgggcaatggcgcgataccacgagtgagatgacaatcatcgctcgttcatacacctccagggtgagaggaacacacgagggaaggcacgtacacccggcctattacgaacggggccgatatttcttccaggaacagacgactccggcgcggtccaactgctcgctgcagaagaaagcgcagtggttgttccagagctgccagacggaggtggtgtcataggggcaggcctaatcctacaagaacggcaacatcctagaacaactctgccagcagcaacgccaggatggctatgaccccgtgctagatgatggtgatcaccgactacaacgactacctgcacaccaggctgtgcccgtaccagcgagatctacaacacggacacggagaacgtgtgggccgacatggtgatcttcgccaaggacttgctcggcagctacgccatcgacgtgatcgtacgaggacggtcgcccgtactgcatcgcctacaacatccgccactgcgggtacatgtatgggcccttcaaggtacaggagacgacaggacacacggctgaactgtatctggtgtgcgtcttgcatggtgtcgaaga

SEQ ID NO: 78647 - DNA, 272 bp, Zea mays
  unsure (1)..(272): unsure at all n locations
  Clone ID: MRT4577_171751C.1
ctctaggtgatgatctggtgggatgctacctgcatccaatgcctgtcttgtctgtcttgttnaacactagaaatcataacagcctctatatttatgtattgtgtggccttttggagagctgccaaaggttcctttatgtttactctatcactcccaaagaccagaaaaatgtgtcaccatgtattgttggttacactccccttgtactgcccaccttggaccattcttcaacaggagattttctgtatggtagatatggttgcattttacac

SEQ ID NO: 78648 - DNA, 797 bp, Zea mays
  Clone ID: MRT4577_171752C.1
cggaccggccggaattttttgttgccacgcgtgcgcccacgcgtgcgcttgtattctagcagcaaagcaaagaggatcggatcagaagaaaagaatagttaggtcccggtggtcgatcgaacgaagctgctgctgctaccggccggccgggcatgacgatgacacggacgatgtgcctaggcctgctgcttctactactggcggcggcgtcgacagcgacggcgcatttcacggtcggcgatgtggatgagtacgtgtccaagcgcacgcaggagtcccgccacaggaacaacggtggcgcgggcatcgatgacctcatctccagtgcggcgcgcttccacgccaacgtggatgcacgcgcctatggccgtcgatccgacctgcaggaggaggcaacagctaccgtaataaccaaagcggaagcacaagaggcttcagctgaaggtggcgattaacctacctaaccatattatttattcattcatatgcatgcatccttgttgctatgccagccattcttctatcttcttctattttaagcatccttgctggatttccctatatattaagcattcactatatgcatgcatgtgtaagcaatcgaccatatattttataatatgtatacggtgtattatcaataattgttctacgttttcttgttaaaaaaaaaaaaaaaaaaatttgtagcatatgtgttgtgtgatgaaaacaacttgtgttctgtgacaccccttatcaatttaaataatcgtccacctttgtgaggcaaaaaaaaaaaaaaaaaatttgcggcc

SEQ ID NO: 78649 - DNA, 160 bp, Zea mays
  Clone ID: MRT4577_171753C.1
cagtgaaaggctgccattttaaaaccttgctctccggtataaaaaaaccttgctctccttctgcgctcgattcccaacccacccgcacggcaccaccaccaatccatccatccttacgcattagctacactcgccggcgtcgagcccccgcgaaccctag

SEQ ID NO: 78650 - DNA, 1199 bp, Zea mays
  unsure (1)..(1199): unsure at all n locations
  Clone ID: MRT4577_171754C.1
gtacacctccgaggtcggccgggaagcaggtggaagatgatggaggtggcgggggctcaggcccgcgcggttcccctcctgctccgaacaccgcctcccgccggagctgggtggcggcggccacggcggagggggacgagacccgcggcttcgacaaggtgcccatggacacccccggcgcgtaccgcctggtagaccgggacaccggccgtagcgtcatccaggagacgtcggttgcttcatttgaggacttggaaattgttgaatactaacatcatatgttagtagacagcaaaaggaagcaagcagctcaacctccattttattacagattttgttagtagacagcacaaggaaggaagcacaaggaaggaagcacaaggaagtttgacctgtacagcacaaggaagcaagcaactcagcctccattttatttggaaaagtcttatacttattagaagtcgttgaaacctttcctgactgcgaggtgatcatgggacccggtgtccaccgaacaagctctcgccttgaagaggattgattatataatgcactgaagctctcaaagtgtggggctatggcatttgcggagatgacaacgaaaaaaagaatccagaaaccgccttttcgaacaagaaaacagcgcttttgaagattatcgaggagtctcctgtccgcaaaacaattgttttctgcaacaagattgagacatgtagaaaagttgagaatgcgctgaggcgggttgacaggaaggcctcacagatcaaagttctccccttccatgctgcgctggatcaggcccagcgcatcgcaaacatcaaggagtttctgaacaagcaaacggctgactccatgttccttgtgtgcacagatagtttgctgcaaagatatgtctcctaacatcattcagagatacatgttttgttgaaattgttccccaatatcaagctccacagagagagatttggctgacaggcatacaccattaagtatagagttccaatgctgaacctgacccttgtgaatagatagatattcctaaaacaggttgcctgtaatggagatccctaaaatgttagtaatttaacttctattccccctttcaattccatcgtccgtgaaaatttgataaatatgaatgtgttgtgtgggcccccgcccaaannccaaaaaaaacaccaaagaaaaaattttcaaaa

SEQ ID NO: 78651 - DNA, 2205 bp, Zea mays
  Clone ID: MRT4577_171755C.1
cattgggacctcgagccgccggccgggaaacccactgtcttggttgcgcaagcaccaagcaggtggaagatgatggaggtggcgggggctcaggcccgcgcggttcccctcctgctccgcaacaccgcctccctgcggacctccgtctccgtctcctgcacgggctcccgccggagctgggtggcggcggccacggcggagggggacgagacccgcggcttcgacaaggtgcccatggacacccccggcgcgtaccgcctggtagaccgggacaccggccgcagcgtcatcgtgtggggcggcaccgacgacagcgacgaggcctccatgccgtccccggcggtgctctcccggaccaccgaccgccgccacagccaaggtgttgggggaggtacaggtatcgggaatttcggcaggttcaaggcacagaaaataaaatccttggtcacgaggtcagctcaccgcaagagggagagttctaatcgctcaagcactgcctggtctgatgaatcttctttcaatggctctgatgatgaagaggaaagctattttgagagaagaaagcatgtctcagactctgaacgccacccgaagatgagcagtggctccagagatggaagaactcgaagtgcacattctctgagttctgttttgagccaatacagaggcgatgatgatacagacttccctggttcagaggctacttctggttccaaacgatggggtaatgttgccgatgttacttatggacggcagaaatcagaagcaaagggagcctctgaatttccctcaaagaaaagggcctcctctacggcggatttttcagtcgcagatcttttacggagattggctgcaacgatgaaatgctaggtgcgttgagaaattttgatttccctcgtccgtctcatatccaggctatggcatatgggcctatcttagaggtgaggagttgtgttgttgctgatcaaagtggatctggcaagacactggcatatctttgccctataatacaaaacttaaggaacgaagaagttcaagggctccataaatcatcccctaggaaccccagggtgatagtattgacccctactgctgaacttgcttctcaggtccttaacaactgccggttgatatcaaaatctggggttccatttaggtctatggttgcaaccggaggatttcgacaaaagactcagttagagagccttgaccaagagctcgatgtaattatagcaacacctggccgtttcttgtatctgcttcaagaaggctttgtgcaactagctaacctcagatgtgttgtgttggatgaagtggacattttatttggtgaagaaggtttcgagcaagtgcttcatcagttgatcaccgaggcaccagtgacaacgcagtatcttttcgtgactgccactcttcctcttgacatctataacaaggtcgttgaaacctttcctgactgtgaggtgatcatgggacccggtgtccaccgaacaagctctcgccttgaagagatccttgtggactgcagcggagatgacaacgaagaaaagaatccagaaaccgccttttcgaacaagaaaacagcgcttttgaagattatcgaggagtctcctgtccgcaaaacaattgttttctgcaacaagattgagacatgtagaaaagttgagaatgcgctgaggcgggtggacaggaaggcctcgcagatcaaagttctccccttccatgctgcgctggatcaggcccagcgcatcgcaaacatcaaggagttcctgaacaagcaaacggctgactccatgttccttgtgtgcacagataggcatccgcatcccttttattttgttttttttttagctgtgctggttggtcggtgcagggcgtcgcggggcatcgactttgcgaacgtgaaccacgtggtgctcttcgactacccccgcgacccgagcgacacggaggagggtgatggagaggaacatgaaggggcacccgctgcacgacgtgccgtgcgtctagagaccctggagggggaggtgtctgatgcgtgcaattgctgcctaaactctaagcatgttttttgtttcggaacgttgtgggtcatctatcctatccctcgcttgactcttctcggaaaaggttctcgttcccatgaatcttgatctgcctcctggtattgatagcgattgatcgaatttctactctggtttgaga

SEQ ID NO: 78652 - DNA, 643 bp, Zea mays
  Clone ID: MRT4577_171756C.1
cagtcagagctgaacgacgacttctgggcagagcttttggtcgaaaattttggagacaaggcaggacagccagagttggagggaagaactgaagacgtgaatgaccttgctcaacaactggggtatctgagttcttgtagcccaaaatagagccagttcctaatggttgccccccacaatcactggtgctttccctacactactgttgcagaccatcctgatcaaaccgttgactggtggtggagaggtgttcacactgaaggcgtgctgtggaggtcactgccttgacgttgaaggcttagtgctgtactgctgtgggagttacgcccagggtgtcggctaaatgtctcttccggcgtcgactggcaaaatgatctcgtggacggtgactgccaaagatgcctagggggccaacgtatacgtacacagctgttatcagggttctggccttctggggttgggttgtagaattgactggctgatctagtgttctccatgtatgactggtgtaaccttaaaacaccctcagcttgttgttgaactgtgacaagcatctcgtttttttttgttgtactccattttcatcatcattgtacatcaaattgctgaattatgaacagatcccgaataatttggtggactg

SEQ ID NO: 78653 - DNA, 294 bp, Zea mays
  unsure (1)..(294): unsure at all n locations
  Clone ID: MRT4577_171757C.1
gcaagagaatttcccttccaccacagtgctatgcggagaagcagctcctcggaaaggcgagccaagagttcctggacatgagaatcaatccagcaatctgggagctcagtggccatctggtactgaagcggaggaaggactacgaggaggcctctgaagcanacatatgcaggtttttggttgaagcagctctttctgaaacagaatttcaggagctgaacctatgcgtgctcgacttcctgaacagctctcttggttgaaactcggatgtaggttcctatagatagtaacagt

SEQ ID NO: 78654 - DNA, 556 bp, Zea mays
  unsure (1)..(556): unsure at all n locations
  Clone ID: MRT4577_171758C.1
gccgccagnttgtgatggcatactctgcagtaatnntcgcccttnagtcngatggtacgncaggcccgaaggtacaaaaagctttttattttttttttattttttttttttttttttttttttttttttttttttttttttttttttttttttttttttttttttttttttttttttttttttttttttttttttttttttttttctttttaatggtctaattggaggaaactggcggccgtaaggggggattcccaccccgggcccaaccttggtttaattttggccatatttgccccctgggggaaattgttttcccctaaaatttccacaaaaaaaaaaacccgggagaaaaaagggaaaaacctgggggccccaaggagggagctaaaaaaaattaattgccttacgctaaatccccctttacaagtcggaaaacctgccctccccccttctttaaggaacagaccaaccccccgggaaaggcggtttgcctttcccaccccctcccgctgcctccctcactgactcccccccctcggcctttcgccttcgg

SEQ ID NO: 78655 - DNA, 1674 bp, Zea mays
  Clone ID: MRT4577_171759C.1
ctcagactctgaacgccacccgaagatgagcagtggctccagagatggaagaactcgaagtgcacattctctgagttctgttttgagccaatacagaggcgatgatgatacagacttccctggttcagaggctacttctggttccaaacgatggggtaatgttgccgatgttacttatggacggcagaatcagaagcaaagggagcctctgaatttccctcaaagaaaagggcctctggacggcggatttttcagtcgcagatctttcaaggagattggctgcagcgatgaaatgctaggtgcgttgagaaattttgatttccctcgtccgtctcatatccaggctatggcatatgggcctatcttagaggggaggagttgtgttgttgctgatcaaagtgggtctggcaagacactggcatatctttgccctataatacaaaacttaaggaacgaagaagttcaagggctccataaatcatcccctaggaaccccagggtgatagtattgacccctactgctgaacttgcttctcaggtccttaacaactgccggttgatatcaaaatctggggttccatttaggtctatggttgcaaccggaggatttcgacaaaagactcagttagagagccttgaccaagagctcgatgtaattatagcaacacctggccgtttcttgtatctgcttcaagaaggctttgtgcaactagctaacctcagatgtgttgtgttggatgaagtggacattttatttggtgaagaaggtttcgagcaagtgcttcatcagttgatcgccgtggcaccagtgacaacgcagtatcttttcgtgactgccactcttcctcttgacatctataacaaggtcgttgaaacctttcctgactgcgaggtgatcatgggacccggtgtccaccgaacaagctctcgccttgaagagatccttgtggactgcagcggagatgacaacgaagaaaagaatccagaaaccgccttttcgaacaagaaaacagcgcttttgaagattatcgaggagtctcctgtccgcaaaacaattgttttctgcaacaagattgagacatgtagaaaagttgagaatgcgctgaggcgggtggacaggaaggcctcgcagatcaaagttctccccttccatgctgcgctggatcaggcccagcgcatcgcaaacatcaaggagttcctgaacaagcaaacggctgactccatgttccttgtgtgcacagatagggcgtcgcggggcatcgactttgcgaacgtgaaccacgtggtgctcttcgactacccccgcgacccgagcgagtacgtgcggcgcgtcgggcggactgcccgcggcgcgtccggcaacggcaaggcgttcgtgttcgcggtgggcaagcaggtgtccctggccaggagggtgatggagaggaacatgaaggggcacccgctgcacgacgtgccgtgcgtctagagagcttggagcctggatcctggagggggaggtgtctgatgcgtgcaattgctgcctaaactctaagcatgttttttgtttcggaacgttgtgggtcatctatcctatccctcgcttgactcttctcggaaaaggttctcgttcccatgaatcttgatctgcctcctggtattgatagcgattgatcgaatttctactctggtttg

SEQ ID NO: 78656 - DNA, 297 bp, Zea mays
  Clone ID: MRT4577_17175C.1
agcgggaccatacccggaaaatggccagtccatgggtgacgattatgaagatcaagtgggagaatactcaataggctattctaccggctagaggcaccatgtaatgatgtccatgatggaccaatatagtcactcggagggtgcagatgctctacgcgtatgtaatgtgcatgaagatgcaaaccttacaggttaccattccgacgttgaaacctacggacatgatatacttggtgtttattgacaagatagtgtcgtgggacaggtaatgtacacagatcaacacacgcattctaa

SEQ ID NO: 78657 - DNA, 685 bp, Zea mays
  Clone ID: MRT4577_171762C.1
gggcctatcataagcctatgaccaaatgtcgtctagaaaagggtaattaattgaggtttgataaattgtaaccacctgcgggacctgaaaactgcatcgtagctgctgtaatccacagactaggatcgacatcatacacatatggagaaatagtcctcacgcctagactgccatagtttagcatttttgccaccaaagtgtaacaccctgaatttgggggtataaaatttctttcttatgatcatccaaatttaggtgttactcttctctatctcactttagtttccctctctctctagttttctctctctctcttttaattagagttagttgtattagtgagggattatttattttattttgcccaaaacatatgagtcatggaatgttgcattatattgagcctaaatattctttgaattgttgctcatatttgatttggtttgaatttgaaacttgatttgaatttgaattgaaaaccctagagaaaataaatagaaaagcaattagaaattccctggaaaatggaaaaccgaattcgggccaaggcagcccacttagcccagtccgggcgcgcccgggcccacgcggccccctctggctgacaagcgggtcccgcctgtcggggccaccttgggcgcccccttttccccgttcctctccattttgattcttttttctttta

SEQ ID NO: 78658 - DNA, 281 bp, Zea mays
  Clone ID: MRT4577_171763C.1
atcattccattcctcatcatcactttgctcttcaatctaccaattcaatccaattgaaccgtctatatctataccctgtatgcctaactacaacctagtcacaccttccgcttaccataatcctactatatcaccactcatctgccctcataatcctaacacttagactcctcattccaacatatttcccagatcgctttctctctccagatcactcacataatttcccacacttatcctaatcccccatctagagaaccgtagactacccatgtttcacc

SEQ ID NO: 78659 - DNA, 560 bp, Zea mays
  Clone ID: MRT4577_171764C.1
ccttctccaatatttgacgctcaagctcttctttacgtttttcaatgatggacttccttgcaagcagccttttatgttcattctccactattgcagccaaactaatgagactttcaccgagtttagatggctttttcactgggggacagatatgaatccttgctttatttaatgaatcagcaagaacactaaggtgatcacttaagccatcagattctatgtcctataaagaggaatcaggcataatcattagtgttcaatctcatcatgaagtaatgcatccagcaccataaaaatatgacagatatcagcaatccaattaaattctggcaaatataagagttaataagagttaaagggttattacatgtattcctaaagaaaagggtatggcagtgtagcgcatgctcatagtacctacagttggtgataagtaccagtatattaaaaataaaataattgaacattaacgaatagtaagaaccagtgttgtcactatatatagttccactgaaaaccacgagtactgtacccaaacgaggtgagtaggtgacaacgtg

SEQ ID NO: 78660 - DNA, 335 bp, Zea mays
  Clone ID: MRT4577_171765C.1
ggttctcgggctctcggccttttcttttcctcttacggcctcggtccaccacctcctcttctcgcctgtgccttttgcccctgtgctcgccacacgcggcgcaaccgcccacccacccagccaggagaagaagatctccgtcgcctgctcttcgcttcgcttcgaatcggagtcgtttttgtcttttcgtcatctgtggctgcgcagcgatcccaaccttctttcaaatattcgataataacataaacaatcggcctggcaggcaaattcgggtgtttttttgcgcaattgcacggcaggcaggtcagatcggcctgcgcttatgtgctagggcc

SEQ ID NO: 78661 - DNA, 2114 bp, Zea mays
  Clone ID: MRT4577_171766C.1
ggaagtgttagtggcaaaatggatatattgaccctgttggctaatgaaagacaaaggcctcacgttcccatgagccatgagattatgatcactcctaacaaacgagcaattgagaaagactctcgggttggtcaggcttcaaaaacaatttcgaagactgtcaaggtgacttctagtaatgtttctgatcacacatacgtttccaagggaccctgttcaggcgagcctagtgtgataaaccagatggcgaaaccagaaaatatcctgtcattgcggaggccaagagaagcaaccagtgatttagttggcaccacagcaagaagtggtattacaggtgtaagaagaccttcagcagcattacaacggccctctaccaaagaacggcgacctgtcacaaaagatgcttcaaggaagcatgctgaagttaccaccccatgccgtccatctacttctgaaagacgcacggtgaccggagagtcggcactaaagcctgaaaacaatgctattccatgtcgacctgttaccgctcacagacgccctatcaccaaagaatcagcaacaaggcaatgcagcattgctacaccacgccggccttctactgctgacaggcgccctgccaccaaagatctaacaccaaagctatccaacattgctgccccacatcgaccttctactgctcacaggcgccctatatccaaagagtcggcaccaaagcatttcaatgttgctagcccacatagaccttctactgttgaaaggcacactagtggcagagatatgacatcgaagtatgttggtattgctacctcatatctgccatctgctgtcaaacagcgccctatcactggagagggtgcacataagcatgctgatgttgtcaccctgagctgttctactgctgataggcgccccattagagacgttgcaccaaagtatgccactttagctctgccaaggagaccgtctactgccgagaggcaccccattgctagagatattgcaccaaagaatggtttatcactcagaccttctactgcagagaggcgaaccattgctagaaatgttgaaccaaagcatgcaccggcacagaggccttctactgctgagagacgtcctgttaccagagagactgtactgaagcaagctaatgttgccaactcatgtttacctttgacgccagatagacgcctcaccaaaaaaggtgacatttccacccttgagtgcccttctacaggaggaaggtgccctatcaccagtggtactgcactctggtcaagaacaatgccgtactattcaaagggtgctttggtcacagaagttactccccagaagacaataactcccagggttgttagaaacagcaagctagaaaacctaagctatgcaaaagaaagggtggaacttcaagtggatagaaagcaaaagtcaagtccttttaacctgtcctcgaagaaaacattgacttccaacgttagagatgaccaaggtcttgaaatgttcaaaaagccaaacaaggaggggggagttcgggctcatgcatacaaatcaaataatgcaactccttcacggaccggaaatgtaaagataaaggctcctgtgcctccgcctctgccaccgcaccgaccgtactgcactgagaagaaaccgaatgtcaacagttcacctgttggtggaagaaagacaaaggcctcagctccacactggcactgaccccattatctaggatcctgcagcataactctgaagccgtgaaggtaaaagctatgcgtctgacgtgacctagaaggctgcatccatcaagcaacgattgatgttatctattgtagcttaccagcagtcttgtgacttgtcacctgtgttagaataaccgtagtagttagtgtatgtagcaacgcgtagcatatatatatatatatatatatccactaatgtctaattgaaccgtagtagaactgccctggatttaactagaacattgtatatacctggaataattggagcttgagtatcgaaccaggagttatccgcacggttttgcaggtcaaggaaaaaaattattatctttagctacacctaataatcagcactagtaccttaatgttcgcgttatttca

SEQ ID NO: 78662 - DNA, 270 bp, Zea mays
  unsure (1)..(270): unsure at all n locations
  Clone ID: MRT4577_171767C.1
cgcagcaacggcttgatatcttttgttataaattacttctctctcgtatatacgcgaccagattagcaccccatgtggacaccatcgtaaggaccagagtggtcaccagnctctcctgagaagatgttggggacgtagccaataccgcacngggagttattgttgccttgtcctgggtgggtgatttgtgccaaagagtcgaggatattgttttgtgttnattatattgagcagatccaaggaaacgaccagggaggatagggacaatgt

SEQ ID NO: 78663 - DNA, 635 bp, Zea mays
  Clone ID: MRT4577_171768C.1
ggtaccggcccctcttcaggtttttttttttttttttttttttttttttttttttttttttttttttttttttttttttttttttttttttttttttttttttttgggggggggggtcatcttcaccccgccccaaatgggttttttcggggccaaaaaggcccggggcggagaattaatcaaagcaaaatccccctaacaaggagggccatttgggggggcatcgaaattttcccacaaaaaactgggtttaaaaactggggggggccaaaaaaaggcgggccccgggccaaaaaaggggggcgctggagtctgcctgcccccaatcccccccccgtttcccgtttccaaaaagcaacccgaatccccccgggggttttttgggccaaccacaacaaaaggggttttttgggggggggaaaccgccgccgccccccccaggggcccgggaaaaaaacaaaaagggggggctttgggggagcccccggaaagtccttttccggaggccccggttgtccaaccccttaaacccgggccccccaaatctttcccgggccacccccccggcgaggccctggggtttaacgggctgtttgttgaggaagccaaggctcgggaggaggcccgggaccccc

SEQ ID NO: 78664 - DNA, 645 bp, Zea mays
  Clone ID: MRT4577_171769C.1
gggtacctcgaggccggccgggagcagtactgacattacagctacggctaatacgacggcaatggcggcggagctccacttcgttctggtgccggttatggcgcagggccacttgctccccatgcttgacctggcgcgcctcatcgctggtcacggcgcgcgcgtcaccgtcgtgctgacgcccgtgaacgccgcgcgcagcaggcccttcctggagcacgccgcgcgggcggggcttgccgtcgagttcgtcgagttcgccttcccgggacccgcgctgggcctgccccagggctgcgagagcatcgacatggtgacggacttatccctcttcgtcccgttctacgaggccacgtggcttctcgccgcgccgctcgaggcgtacctccggtcgctgccccggcgccccgactgcctcgtcgccgacacgttgggcccctggacggcgggcgtggcgcggcggctcggcgtcccgcgattggtgctccacgggccgtccgcgttcttcctcctcgctgtgcacaatctggccaggcacggcacgtacgaccgcgccgccggcgacatggagccgttcgaggtgccggacttcccagtgcgcgtggttgtcaacagggcgacgtcgctcgggttctttcagtggcc

SEQ ID NO: 78665 - DNA, 1999 bp, Zea mays
  Clone ID: MRT4577_17176C.1
ggaccaattcggcacgagggtcgtcgtccgttgtgagctcccgcaacatcagcagcaaggacatcctggtggagccgtcgcgcatctcacgcttccttcacctgaccaacagccaagccgggaggcacgcttgagagccacacactgagacctcacgcgcggatggccgccgccgcgggcgggaccggcggctgcggctgccacattgtagcggtgccgttcccgggccgcggccatgtcaacgccatgatgaacctgagccgcctcctcgcagcccggggcgcggcggtcaccttcgtcgtcaccgaggagtggctcggactcatccgctcctcctccgccgccgccgctgccgagccggccggcatccgcatccgcaccatccccaacgtcatcccttccgagcacggccgcgccgccaaccactcaggcttcctcgacgccgtcgccacagagatggaggcgcccttcgaccgccttcttgacgggctcgaaggcccgccgcccgcggcgctcgtggccgacgcctacgttccctgggtggtcggcgtcggcaaccggaggggcgtccccgtctggtcgctcttccccatgtccgccgcctttttctttgcctactaccacttcgaccgcctcccggcctggcttaccaactctgagcacgcgccggaatccggtgagactattggaaactctgatcagagacttgggcactatatcgctgggcaggcttcaagttcaatacggttgtcagatctcgagcccttaattcacaacaagagaacagtgaagcatatcctaacaactatctctagcatcagaaatgctcagtctctccttttcacaaccatgtatgagcttgatcctaacaactatctctagcatcagaaatgctcagtctctccttttcaccaccatgtatgagcttgaggccagtgtcattgactcgctaaggtcagtactctcttgtccagtgtaccgcaaggagattatttcacatggttggattctcaacctgtgaactcagttttgtatgtctcccttggcagttttgtttcagtctcagcctctcaacttgaagagatcgcattgggcctaatagccagtgaggtcaggttcttgtggattcttcgagaacaatcccctcgggtgcaagaactcttctctggcatcaataatgggatgatactgccatggtgtgagcagcttgaggtgttgtgccatcattcagttgggggcttcatgacccattgcgggatgaactcgacacttgaaggcgtcttcgctggtgtgcctatgcttgccttaccactgttttttgatcaaccgattgatgggcgattaattgtggaagagtggaagattggccttgccgttagggattgggctagcaagggtggtctgatcgggagagaggatattgcacgggctgtgaagaagctgatgtcttctgatgaaactgggacaaaggcgctgagggaacgtgctcttgagttgaaggaggcttctcgcagagcagtcaatgagggtggatcttcatactgcaatctgagttcattgatggagacggtatgcactccaaaataattggaattgtatttggtatgtgctaaaacactgtagtggtggtgtaacctgtaaccatcatgcttcaaatatcaattctacaatcaacccttgcgcagctcaactctttagaatttgtgcaactttcggaaagggtgatgatgcgattgatgtacgatttgttcaatacgttgttattttgtccgagctccatttggattgtacttatagcaaaatgtcttcgtttcaagatagctgcgaattagcttgaagtttcaaatttacagcagcctttgaattgtacttatagcaaaatggattgtacttaccattttgatcctgaagacttgagcagcctttgaaggacaagggtgtttgggtctggtttttgtaaggaaaaataacatttgatcaatgaattttggtgtttaat

SEQ ID NO: 78666 - DNA, 253 bp, Zea mays
  Clone ID: MRT4577_171770C.1
cggccttcccgggtcgacccacgcgtccgcggacgcgtgggctttgaagtattatggtacatattatagtattaactacttactaactttattaacttagagcgtgaatgtacaatttgtggagtatgctatacattgtttgattttttttcttcttcttctttttttattatctagatcttccactgttattgtaagactgaaatatactgctgctaaacactaattaaaagtaacaatatgaaagacaaat

SEQ ID NO: 78667 - DNA, 573 bp, Zea mays
  Clone ID: MRT4577_171771C.1
ttttttttttttttttattttttttttaaaaaataatttggagtgaaattttgaagaaaaaaaaaggtggtaaaccaataccgtcggtcatttatgtcacctctctctccctagatgtgatcaaataataaaataatcgatgtggtgtcttacagcaaagatatatgttttcataatggtattggacaaatttcttggttgaggctgtgtatcagcaaatacaatgtttttctccactccgatgtcccttagactacattcacatactacattcaacggtgtgcactcccatacccctgttgccgtttagggggttcaaatccctttgaactcctctctacacgctacagtttaagtggagtttacaggaaaccaacagatgtgggggtgcggcagtaagccccctgcctcagtttacgtgtgcagcagtgtttgttagttgggaaaaattgataatagatgatgaataggtatggaaaatgatattttatggttgtagtggggtcaggaggagaatttaggggaaccgctgtagagggtggagatatagggggagatagctgacaaagcctt

SEQ ID NO: 78668 - DNA, 287 bp, Zea mays
  Clone ID: MRT4577_171772C.1
cccacgcgtccgcgacgcatgcattgaattctaaggaacgcactaaaaagactctatgggggagtttcataatctaaatatgatcaaaatcagagcctatgaagataagtgagccattcagaaaataacgaaaggctctctcaaagtcaccgctatgcatccgtatctttcatacaacttgcttgccattatgtgtacatcaattgactaatgatgaggctacttctgaccgacctgaactggaaaaaccttattgtcaccggactgacatccatggtctacaattc

SEQ ID NO: 78669 - DNA, 549 bp, Zea mays
  Clone ID: MRT4577_171773C.1
ttttttttttttttttttttttttttttttttttttttttttttttttttttttttttttttttttttttttttttttttttttttttttttttttttttttttttttttttaaaccagcaaaaggagaggaaaaaacttggggaaaaaaaaaaagggaaactttttaaaaaaaaaaaaaagagggttttttttttttaagttttaaagttttggttaactggaagttttggaaatgggaaaaggtttggaaaaccggacggggctgtttcctactaaaacaaaggacaaggatggcaaaaaaaattttccccccgggagaaatggggggggggggcgcaaaaatggtaaagcttttaaaaaggggactggttttcgggggggaggccagcgcccttgggttaaaaaaattttcaaaaaaatttttaaattttggggtaaaaaaaagggggatcacgcataatagggggggaaccctccccttttaagggacaaaagggattggggcccacaaaaagtggggaaaggaattcttaaaaaacttttctcg

SEQ ID NO: 78670 - DNA, 626 bp, Zea mays
  Clone ID: MRT4577_171774C.1
gcccctcctcgagttttttttttttttttttttttttttttttttttttttttttttttttttttttttttttttttttttagaccccgcaaaaaccaatttttttttttgctttttccaaaaacaaataaatcaaggccgacaaaaaacttttacagaaaaggggcccccaaattgaaggatcttgaaaccgttttggacctaaaaaaacccctttttttgggcccctcatccattttggggcaaaaaattggcgggttctccttgggctaaccggaaaaaacttgttccttggcccaaaccccggcattaaaactaaaaacaaatggggccccaagggggggggcctttatgtcagggagccgggcaaaagggctgtcaaaaaaaacacccttctcaaagggcttaaaaggagcttcttttatgggaaaaaatgggagcttttgcttcacgggggcaggggaaacaacttccttcataagattaaggccaaggcccgcgaaggccttttaaaaatttcgggataataaacttggatctggtacgggaaacttcaacggggggggggaacaaagttccccaaatacaaaaactaaaacccggcgggtaaaacccctcccatcaac

SEQ ID NO: 78671 - DNA, 453 bp, Zea mays
  Clone ID: MRT4577_171775C.1
gccgcgccgggacagaaccctgaaacttccaaacgatcggtgcaaggaaaccatggtgggggatctgcagggaaggaggtttgagcaacatggaatatatatatgatgaagcttgtgtgaagtgtggtgacgttggttctttggagacggtgtcttgctctgttggtccgagcttgcagtctggtgatgctacaaggaatcaatcatggagggtgccttctgttggtcaggagagcttaagtaatataatcaactagcatcctattaatattgagtcggtgccagagtagtgtggtgaataaagtgcctgtgagacaggcggtcgtgttggcctagtcgttaaggttggtttgagcggctgcgttgccgatgcagctgtctttttttatttgttgatgaatttcttgaactgaggtcgtggtgtgcttgcactctatagtcctggtgttctac

SEQ ID NO: 78672 - DNA, 2039 bp, Zea mays
  Clone ID: MRT4577_171776C.1
ccggccgggccgggattcgaagtcccctcgaaagctgagtcctgaaccaatccaccgccgctcttcaccgccacgccggagctaccccccgccgaagtgcccgcttcccgctctcctcattcaccaccttcgtctcgcggcacgcgcttatcggaggcaacagcggtcgcctcctgccccgccgcggagctatacgtggaggccggcatccccgtcgctgcccgcccgttcccaggctacccagggcagattgatctctgtaatctctgaggcggagaagaccaccccgaggcccaaacagtccgggaaccgattggggcgccgctcggccgacgatgtcgtcgagcaggttctcgccggtgctgcaggcgtccgacctcaacgacttcatcgccccgtcgcaggactgcatcatctccctcaataagaacacctcctcctcccgccgcctccaggtcacacagctctccgccagtggctgtataacatcagcagagacggttatgctggagaaacaaagcttgagtgacttcattgatcacataaactctgataaagctgttattgtatctgtgtctccccagtcaagagcatcactagctgcattcttcggtctttctcagtcacaggttctcagaaagctgactgctttgttcaagtcgattggtgtaaaggctgtctttgacacaagctcgagtcgagatctatctcttattgaagcatgcaatgaatttgtttcacgttatcagaaaaaccattcatgtagtggccaagaagctggagccaatcttccaatgatttcatctgcatgcccgggttggatatgctatgctgaaaagactcttggttcatacatcctaccttacatctcatctgtgaagagcccgcaacaggcaattggtgcagccattaagcaccatgtggttgataaacttggtctaaagccgtatgatgtttatcatgtcactgtgatgccctgctatgacaagaagctagaggctgtccgggatgatttcactttctcagtagacggtaaagaggtcaaagaggtggattcagtactgacaactggtgaagtgttagacttgatacaggttgctacttggttaacaaatgttgatgaggaaggccatctatatggggtttctggaggttctgggggctatgcagaaacagtctttcgctatggagcaaaggtaatttacaaaagagaaatacagggtcctcttgacttcagaatcttgagaaattcagattttcgtgaaattacattggaggtggagggcaaacctgttttgaagtttgcactttgttatggattcaggaacctgcagaatattgttaggaagattaagatgggaaaatgtgaatatcactttattgaagttatggcgtgcccttcaggttgtcttaatgggggaggtcaattgaagcctgttcaaggccaatctgccaaggaacttatccagcaattagagagtgtgtacacacaagatatattaatatctgatcctttccgtaaccctatcgcgaaaaaactatatgacgaatggctggggcaacctggttcagagaatgcaaagaagtatttgcacacagaatatcacccagtggtgaagagtgtggcctcccagttacagaactggtgagaggtttcttgttgcactgggagttcctatgttcttcaagagccaggagggacttgctaagcaaatattggtcatacaggaattgaaacttgtcccttttttgcattatagcgaagaagtttttgttagccctataggttttcagctgctttctagttaatgttgtacgctgccaacgggaaacaacctttaaactgcaatgtgtaaaatgaacggagtaggtcttgacgaccttttcattgtttgatactcgtcctttggcgttttttttttgtctggaagataaaagagctttgagggcaaaaaaaaaaaaaaaaaaaaaaaaaaaaaaaaactggaaaaaaaaaaaaaaaaaaaaaaaaaaaaactcgaggaaaagcgccggtaccc

SEQ ID NO: 78673 - DNA, 991 bp, Zea mays
  Clone ID: MRT4577_171777C.1
ccggccgggatccgactatccgaggggcatttcgtgcgctcctccccttaccggcgagctcgtcggtctggccccgctctggtgaccgctgcggccatcgaagatgcggtggattgcggctcctcatctgtgagcgggacgggtgtgtggaagagggctcccgccggcgagaaggtcccctcccttctcaatttggcaccgcttaggggtcaagttctgggttgtggcgatgaagcggtggcggcgacgcggcagcagacatggtggttccggccctccatccgccttgacggcgcgtgctccggtgccagcgaggggccagtaaagcttggtttgagcgatttgggagcaaccatcctcaacctcgacgacgacgcatctgacctcggtggcagcgatgtctactggtacagtctcttccccttctctggcgcttgctggtttgtagaggagactcgaccccggtggcggcaactgacggcgacgacggaggtggcggcggttgttgaggattggagattcatcctgaagggtcttgtagttcttagtttatctagggttggtaggtttcgtcctagcgggtctagggttaggtttctggctggcttggtgctggttcggccggatctagggtttgccgggggatgccagtcctcagcggcttgcttttcctggcgtcatcggcgaggctgaggtggcgatggtgcagaggaataacatcttccgacctcttcctcgcccctgtgacgttctgctctggcatcaacggagaggttgcggagatcctcttaggagtcttcggctggcggctcatcgtcttgacaggagtcttctggccatttgctcgacgattgtgcgacatttgcgatgtagtggtagtggtttgtgttggaaggtatgtggatctagcgttcccttttgtcgtttacaggcgatgtgctcagatccaagactaagacagagtggggtgcgtcccccagccgttgtgttc

SEQ ID NO: 78674 - DNA, 1113 bp, Zea mays
  Clone ID: MRT4577_171778C.1
ggagcccacaacaggcaattggtgcagccattaagcaccatgtggctgagagacttggtctaaagccgtatcatgtatatcatgtcactgtgatgccctgctacgacaagaagctagaggccgtccgggatgatttcactttctcagtagatggtaaagaagttacagaggtggattcagtactgacaactggtgaagtgttagacttgatacagtccaaatcgatcgatttcaagacagtagaggaatcttcattggacagattgttaacaaatgttgatgaggaaggccatctatatggggtttctggaggttctgggggctatgcagaaacaatctttcgctatgtagcacatgtaatttacaagagagaaatagagggtcctcttgacttcagaatcctccgaaattcagattttcgtgaaattacactggaggtggagggcaaacctgttttgaagtttgcactttgttatggattcaggaacctgcagaatgttgttaggaagattaagatgggaaaatgtgaataccacttcattgaagttatggcgtgcccttcaggttgtttgaacgggggaggtcaattaaagcctgttgaaggccaatctgccaaggaacttatccagcaattggagagtgtgtacacacaagatatattaatatctgatcctttccgtaaccctatcgcgaaaaaactatatgacgaatggctggggcaacctggttcagagaatgcaaagaagtatttgcacacagaatatcacccagtggtgaagagtgtggcctcacagttacagaactggtgagaggtttcttgttgcactgggagttcctatgttcttcaagagccaggagggacttgcacacagaacaaacatggcgacctgtccatgctaagcaaatattggtcatacaggaattgaaacttgtcccttttttgcattatagcgaagaagtttttgttagccctataggttttcagctgctttctagttaatgttgtacgctgccaacgggaaacaacctttaaactgcaatgtgtaaaatgaacggagtaggtcttgacgaccttttcattgtttgatactcgtcctttggcgtttttttttt

SEQ ID NO: 78675 - DNA, 235 bp, Zea mays
  Clone ID: MRT4577_171779C.1
ccttcaacacacttgttattacgggtggagggatttttagaactatagtgaccgcgggacaaaaacaaacggacagaaaccaccgggcccccaaaggaaagccaggacactaggaacaccacgcttacaatgatcagctgcgtgttttcaggcaccggagaaaaagtccggatcagggaaggaaaggaaactgccctccacgagggcctgaatttcaaagagaacaggtggcaaa

SEQ ID NO: 78676 - DNA, 407 bp, Zea mays
  Clone ID: MRT4577_17177C.1
ggaaccacggaaccagaggattaaaccctaacggggggaaaacctttttgggggcaaacactcataatttaaaaaacatgaaaggggggagggggggttttgtacatataaagggggcaaaaaaaaaccaatttattcctcatcgaaatagggggggggctggggatgtctcgagctccatcgggacaggatggtcccgaaaacgtcgaaaaaaaagaagggggcctgggcttggttcaactggagggacaagaacccttgcccggcgaaaaaaaaccggagtttggccttgtttggagggaaaactcctctccatgccttggaaccgcctccggtcgggaaaactggaggggactggctctggtgctaatgggccccaggcagggatcgggtccattggtgtaaaa

SEQ ID NO: 78677 - DNA, 553 bp, Zea mays
  unsure (1)..(553): unsure at all n locations
  Clone ID: MRT4577_171780C.1
ggggggggggggggtttttttttttttttttttttttttttttttttttttttttttttttttttaaaattgttcctatatgggtgctttatcaaattctaagttttagcccgaacacagcccttacaatgtaaaaaaaacctccggaggggggggggaaaaacacgaaaaaacgggggaaagccagaaaaaaaagaaagaagccccagggcatggctcaaaaaaaaaaaaaaccagaaacccagggaaaaaaaaaaaaaaaaaccggggaccggccgggaaaacaaaagaaggcgattacaaccaacgaaaaaaaccccgcgccaaaagaacccgggcccccaagaagacaaccccccccccccaaaaggggggggggggcccgccgccaacaaagggagggaaaaactgccccaggggggccatcggccccaaaaaaaaaaaaaaaaaggggggagggggggggaagaaagaaaaaaaaaatggnggggaaacgagcggcccccaccgggaaaagtcttcccaagggggggcccccccccggcgggggggg

SEQ ID NO: 78678 - DNA, 464 bp, Zea mays
  Clone ID: MRT4577_171781C.1
atgctccctgccgccatggccgcgggatttgcatcggcccccccgtcaggcacattacatgtatgaaaggaggtgtccctgctccattgcatgttacgggaacagcttacagaagggctttacagtccctttcgacatttcttaattttatcgagggaaaattggcactgtgacttgaataaattaatggtgatgaatgtgacctacttgactgggttctgaaaaataccaatctttcaaaggaacaaattcttgatttgctactaagtctggtttttgcttgccatgaaacatcatcctgttccattatgtcttgcttgttatttcttgaaaagttgtcctgctgctgttcaacagcttacagtataactctttatagatttcatagccaaaaaggagtttatgagtcacatgaatggcttgggattgactttaacaaaatggtattcacccaatgctgtttg

SEQ ID NO: 78679 - DNA, 701 bp, Zea mays
  Clone ID: MRT4577_171782C.1
gagcccgggaggttacttcgctgcctgaggagtccccggcaccggaggtcttgctaccggctggcggcttcttcttccgttcctccccaagtcctcttcccggaggaatcatgatcgtctgcgtcgccgttgtcggccaccagaacaatccgctgtacctgcagagcttcacggaggcggacgacgccctcaagctccaccacatcgtccactgctctctcgacgtcatcgacgagcgaggtagctaagcgtctcacccgccgccgccgctgaggaccatcgtgatccagatctagacgtccttctttttagcccggctgtgaatagctgggagctctagttagtttatatctgttcaaatctctagtttgcagtcatttgagaaacggaggagatcatgttcgttaaattgtgtgcttgttgctctggagttaaattaaaactgaaatttagaagctgcatcaccagtttcaggtcagaagaatcaaaatctactcttccaattatatggggcctggcatttgcctgccactggaatgagcattaaaacttgagaatcgatccaacttgtacaaaagggggcaaattcaaatcatgtggcatatgcggacaagagcagacctgctttgtgagggcttggacatgcatagaagcttagtggttctagatgattattatggacaaaatgcatggttgattca

SEQ ID NO: 78680 - DNA, 1024 bp, Zea mays
  unsure (1)..(1024): unsure at all n locations
  Clone ID: MRT4577_171783C.1
caataacaaaacaaatagatacctgccccatcttatccaccgcctcatgctcaagggccccaggtctcacgaaccccaanacagnactgggggactaaaaactatactcaccatgcgcctccaccattccctcaggacaccctagctttcctgtacactccccatccccttcaccagcctcatcgaggggtcctgcgaacgcgaagaaaagaaatcatatttctcctactcttccttcaatccctcccctaccagagccaaaagcaccatcagcgcatcctatttggacattacctccaccaccacctaattcagattgcaattccttatcatgcccagagcctctaacagatccacctgcgggagcaccatgtgcatgtgtgctatcggcacgaggtggaattcgtctaagcgttgacctttactcattttttccattggtctctgattttgctgaagaggtagcttcaggggtaaacatggcacagagacaggtccgtgtaatgggtgcgaatgttgcaggtgatcaacctgacaaaacaatggttcttgttgatctagttccagtgcaagtgaagttcgacaatgctacagcattttcagcatttgaaagcttgtggagcaaaaaagtttctttaaaaccatcagtctttgggaactatgagattctctatgttgtatatccagggcttcctccttcaccaccttcagggcaagaaggtgttggggatggggcatttggcaacaacagaaatgcaagggccgtgaagccccttggggtcgatgtaagaagtcccaagagaaaagtgaatggcagcctcattgctattgttgttttgtctactgttatagcattgattatttgctgtctggctgcatggtcgctgatcctcagattcaggggtccgagccacacggctcggngatttccacatactgtacttccaaaattttctaggtcatctggcacaggtcacacactttcagctggtgctggtcgctatagttcaccttctggtccatc

SEQ ID NO: 78681 - DNA, 1416 bp, Zea mays
  Clone ID: MRT4577_171784C.1
tatgatggcgtgcctcttggccggcccggccttcgcccggccgggcacgagcctacccaaagagcccagagcccgggaggttacttcgctgcctgaggagtccccggcaccggaggtcttgctaccggctggcggcttcttcttccgttcctccccaagtcctcttcccggaggaatcatgatcgtctgcgtcgccgttgtcggccaccagaacaatccgctgtacctgcagagcttcacggaggcggacgacgccctcaagctccaccacatcgtccactgctctctcgacgtcatcgacgagcgagtgagcaatcctaagaggagtgcacctacattgaatgagacatttttgggtcttctatacccaactgagaactacaaagtgtatggctatttgacaaacacaaaggtcaaatttatcatggtcacgactgatcttgatgtcaaagatgcagatgccagaaattttttcaggaagttccatgctgcatatgtagatgccgtctcgaacccgttccatgtcccagggaagaagattgcttcaagaagctttggtgcaagagtaagcaccatcgttaaatccttcggttcagggaccagttgatcgaatgctacttttgtcagactttctgtaatcaaacatatgtgttctctccctgtttgacaaaattactccctaccgtgtactgcttgtctggtgaacgagatgctattggtactgattgctgaacaaagaaaaatagtggtttattcattcaaaaaaaaaaaaaaaaaaaaggcccctagggcccgtacagcggtggcgaacactattctgattgcgaggggacctgcgtatcacccgccgccgccgctgaggaccatcgtgatccagatctagacgtccttctttttagcccggctgtgaatagctgggagctctagttagtttatatctgttcaaatctctagtttgcagtcatttgagaaacggaggagatcatgttcgttaaattgtgtgcttgttgctctggagttaaattaaaactgaaatttagaagctgcatcaccagtttcaggtcagaagaatcaaaatctactcttccaatatatggggcctggcatttgcctgccaggcctccaaccaaaacaggcccttagttactggaatgagcattaaaacttgagaatcgatccaacttgtacaaaagggggcaaattcaaatcatgtggcatatgcggacaagagcagacctgccttgtgagggcttggatatgcatagaagcttagtggttctagatgattattatggacaaatgcaatggttgattcaatcttattagtgtagttttaacccagtgatttattggcatacagaaatatcaatctcctttttctcagtgctgttaggctattgcttttttttttcatct

SEQ ID NO: 78682 - DNA, 309 bp, Zea mays
  Clone ID: MRT4577_171785C.1
ggagagccaccaacttgaaaggccgtgtacaaccataccatcaagcacacacactcgacaatagcagggggctaagaaaagaacaaaaacatctctagcttacctcgaaagacgggtatatatctgctggcaaaggtgacctgacctagggctgatatgcatgctcgtgctcaggatcagtcacacacacttaacgccactcttacattggtgcaattacatcacgcgaaaagcatgctgtgtatttctagaacaagcacatgactccaccagatctagaacaacatgggtagcatggctaaggagctt

SEQ ID NO: 78683 - DNA, 101 bp, Zea mays
  Clone ID: MRT4577_171786C.1
ctcgagccgccgggcacgctaccatactactgcgcgccgccagtccgtgtctcctcctggctcctgcgcgccgccagccgacagaccgacagcgagtggag

SEQ ID NO: 78684 - DNA, 409 bp, Zea mays
  unsure (1)..(409): unsure at all n locations
  Clone ID: MRT4577_171787C.1
ctaggacgatgacagtgcgatacacagtggctgcagaagagcgagatcagagagtggactactttcgacaagcgatcaaacttgcatatatatgtgatgctatgaataaggccaaccaagaaaganaacgagcgcggcctatcagctgtgatcaacttgatggcgcggtgctacctaacttcaatcactgtaaaagacggagaaagagaaggagaacacagctcttgtgatgtatatctcgcagtcggagcagagagcaaaacctcacgtatccgcgactaatacatgcttcattctatggatgacgctcttacgctctatggaaaagcccaggacagaatgcgagccgtcgcccttgtccgggacgtgcacgctgacgtgcacctcgacctggtagatctgcgtgacc

SEQ ID NO: 78685 - DNA, 101 bp, Zea mays
  Clone ID: MRT4577_171788C.1
cactgaagcagacatcatttcctgctacactgttgaacaccggtcaatgtcggacaaggcctgtgtccaactctcccttattttattcccacatcactacc

SEQ ID NO: 78686 - DNA, 411 bp, Zea mays
  unsure (1)..(411): unsure at all n locations
  Clone ID: MRT4577_171789C.1
tgcggggacacgnggtatacaaacccaactcataatggaattttacatttatcctaacaacataacaaatcctatgagatgttacatttagaagaaattcacccctactccccatttaacgagttatcaaagtacaagaaaggatactacatctcatctataattgaattcagaatagaaagattcaaaataaacaaattttatatgattcaaataatcaaatacactaaaggtaggcaaactataaccttatttatgacaagttacaaattactaaaatatacccctaagataaagaagaataaggggctctcaaaactctcatgaaacatttcaaccgatcggctacttaaattcnaacaagttttcaaagcacaaaaacacatacatatgtctgttttcaaagcacaa

SEQ ID NO: 78687 - DNA, 1637 bp, Zea mays
  Clone ID: MRT4577_17178C.1
caaggacatcctgttggagccgtcgcgcatattacgcttccttcacctgaccaacagctaagccgggaggcacgcttgagagccacacactgagacctcacctcacgcgcggatggccgccgccgcgggcgggaccggcggctgcggctgtcacattgtagcggtgccgttcccgggccgcggccatgtcaatgccatgatgaacctgagccgcctcctcgcagcccggggcgcggcggtcaccttcgtcgtcaccgaggagtggctcgggctcatccgctcctcctcctccgccgccgccgccgccgctgccgagccggccggcatccgcatccgcaccatccccaacgtcatcccttccgagcacggccgcgccgccaaccactcaggcttcctcgacgccgtcgccacagagatggaggcgcccttcgaccgccttcttgacgggctcgaaggcccgccgcccgcggcgctcgtagccgacgcctacgttccctgggtggtcggcgtcggcaaccggaggggcgtccccgtctggtcgctcttccccatgtccgccgcctttttcttcgcctactaccacttcgaccgcctcccggcctggcttaccaactctgagcacgcgccggaatccggaaactctgatcagagacttgggcactatatcgctgggcaggcttcaagttcaatacggttgtcagatctcgagcccttaattcacaacaagagaacagtgaagcatatcctaacaactatctctagcatcagaaatgctcagtctctccttttcaccaccatgtatgagcttgaggccagtgtcattgactcgctaaggtcagtactctcttgtccagtgtacccaataggcccctgcgttccatacatgatgcttgaagaccataccgtgtccagtggcaaagttgccaggcaaggagattatttcacatggttggattctcaacctgtgaactcagttttgtatgtctcccttggcagttttgtttcagtctcagcctctcaacttgaagagatcgcattgggcctaatagccagtgaggtcaggttcttgtggattcttcgagaacaatcccctcgggtgcaagaactcttctctggcatcaataatgggatgatactgccatggtgtgagcagcttgaggtgttgtgccatcattcagttgggggcttcatgacccattgcgggatgaactcgacacttgaaggcgtcttcgctggtgtgcctatgcttgccttaccactgtttttcgatcaaccgattgatgggcgattaattgtggaagagtggaagattggccttgccgttagggattggtctagcaagggtggtctgatctggagagaggatattgcacgagctgtgaagaagctgatgtcttccgatgaaactgggacaaaggcgctgagggaacgtgctcttgagttgaaggaggcttctcgcagagcagtcaatgagggtggatcttcatactgcaatctgagttcattgatggagacggtatgcactccaaaataattggaatcgtatttgttatgtgctgaaaccgatcttgtcacactgttggtggtgtaacctgtaacaatgcttcaaatatcaattctatattcaacccttgccg

SEQ ID NO: 78688 - DNA, 595 bp, Zea mays
  Clone ID: MRT4577_171790C.1
cctgtgcggcgctcgaggcggccgggttgcgctcttcccccttggccgccgccccctgcccatctcctcctctctcaattcttgcagccaccaaaccctagctgccccccctctcaatcccctcctcccaaggtgccaatccttgccggtcggatcatcgtcgtcgtggtgcgagtcttcaatcgttttggtggagggaagaagggaggaaggaaagggggagaatccaaggtacttgatacatgttgggaatgaggggagtagcagcacgtccactttcactctcacaataacgctgcccaggcgcagccatgatttaattagaaacttattgtcaaaggaagtttgtttattttttttatatggtcgtgcgcactggttaattcagttcaggtcgtatgtttatctttccttgctagccgagtaataatacttagtatgttttagtcatgatatatgtttatactctgttgctccctcttttatgcaatcttgcaaaggggatgctgccgaaattttatttatggacgtcggaagtgtagtacagtagcataccgggttgtttgtggaaaaaaaaaaaaaaaaaaggccccta

SEQ ID NO: 78689 - DNA, 1294 bp, Zea mays
  Clone ID: MRT4577_171791C.1
cctgtgcggcgctcgagccggccgggctggccttggccgccgccccccctgcccatctcctcctctctcaattcttgcagccaccaaaccctagccgccccccctctcaatcccctcctcccaaggtgccaatccttgccgctcggatcatcgtcgtcgtggtgcgagtcttcaatcgttttggtggagggaagaagggaggaaggaaagggggagaatccaaggtggtgggcttccggatcgtacttgggatttgcccgaacttccggtaaaggtacttgatacatgttgggaatgaggggagtagcagcacgtccactttcactctcacaataacgctgcccaggcgcagccatgatttaattagaaacttattgtcaaaggaagtttgtttattttttttatatggtcgtgcgcactggttaattcagttcaggtcgtatgtttatctttccttgctagccgagtaataatacttagtatgttttagtcatgatatatgtttatactctgttgctccctcttttatgcaatcttgcaaaggggatgctgccgaaattttatatatggacgtcggaagtgtagtacagtagcataccgggttgtttgtggaaccttaaggttaaccatactgctggctaaaacagattctgacagttatctgctgagatgttttagaactgatttaggcaaatttataatcagaattaaaatatgggtttgtaagagttgtagataatttaataagctttccagattgataacgagtgtatttatataacttttgaaactccagttatgtttattttactgtggttgttcctgcttgcctgacaaaaatgagcgggtcagtttactagtgggtttcatctagtaaatggctgaattggctcttccaactatggagacttttgtagagggataaacgttcttactgccagcagaattccgtattttttggttgagtagtttgagagatatcaaattttgaaattaactatactgctgtctgaaacatattcaatcagttatcttgtcagatattttagaacttatagatggcaaaacttaattatccattgaatatcgaagttgtagagtattttgtgtagatactcctagagtatttgtttgatatcatcactgttataattttaaagatacaaaattaacaaaaagcgctgctgctgtttggcatgtggttcagggtggaagtctttccaccgggtcttggtttcaagtgtaggagcgatttgttgattattggcaaatgtttgtgaaatatttgtactcg

SEQ ID NO: 78690 - DNA, 453 bp, Zea mays
  Clone ID: MRT4577_171792C.1
agaagatccagggagcgtacgccgtcctgtcggaccccaacaagcggatcctgtatgacgtcggggcctacgacggcgaaagcgacgatgacggcgccggggagatcctcggagacattctcgaggccatgagccaggcaggccctgccgccgacaacggcaagggggagagcctggaggacctgcagcggcagttcgaggagctgttcctgaggccgtcgccgtcgtccttctcgccgaatcgctgctgggttttaagtaccgtgcgtgtttcttggtcgcagcagaacgacgcagctgggaagtcggcttccaagagtaggcctgctgggaggaaatagacaggacactgcggcgaataggtcggtccagctactcctgttccagataagctacgacctacgaggtaccgatacctggccaggagcccaggacagcgacctgcgacggcga

SEQ ID NO: 78691 - DNA, 488 bp, Zea mays
  unsure (1)..(488): unsure at all n locations
  Clone ID: MRT4577_171793C.1
tcnggcggccgcccgggcaggtacaagctttttttttttttttttttttttttttttttttttatttttttttttttttttttttttttttttttttttttttttttttttttttttttttttttttttttttttttttttctttttttctttctttttttttttttttttgggtttatctgttttctgggtttcatttttattctctttcaatttcgcaaaactaaccaacccgaagcctaaaaaggaaaggcgggggggcctaaaaaaaaaactaactcacattgagtggggggggcccccggcccccctttcaggcgggaaacccggccggcccggttaattaaagaaaccccccacccggggggggagggggattacggattgggggctttttcgcttcctcgcttactggctcggtgcgcccggtccgtcgcggggtgcgagcggccccccctccctcgaaggggggcattcggttttccccc

SEQ ID NO: 78692 - DNA, 1199 bp, Zea mays
  Clone ID: MRT4577_171794C.1
ctcgagctcgcagcgacaggcacaggcagcaaggctggtttccttcctcgtcgaacgtctgccgctgctcgcgatggccggacgcggaggaggtagcaagagtagcctgtacgcggcgctgggcgtggccagcgactgctccgacgccgagctgcgcagcgcctaccgcaagctcgccatgggcggtgacggtgacctcgccacccctgattctgttactgactgcttcccctgtccgccggttgctctgtttcggtcgtaaacccgacgacccggctgctctgctgagtgctgactggtgttgttaccgccccgtgctggtgggcagaaatggcacccggacaagtgcgccggcgcagggagctccggcggcggcgcggacgccgccaaggccaggttccagaagatccagggagcgtacgccggtaactaatccgctttccattttgaatcatactcgactctacgcgttacttttgcttgtaggttgggtagctctttttaagagaattgtcatgtatgtacgtacacgtagtcgtcggccaagtatattttgcagcttgcacttatttggtgatgtggtttttaactgacctggccagtcctgtcggaccccaacaagcggatcctgtatgacgtccgggcctacgacggcgaaggcgacgatgacggcgccggggagatcctcggagacattctcgaggccatgagccaggcaggccctgccgccgacaacggcaagggggagagcctggaggacctgcagcggcagttcgaggagctgttcctgaggccgtcgccgtcgtccttctcgccgcagaacgacgcagctgggaagtcggcttccaagagtaggcctgctgggaggaaatagacaggacactgcggcgaataggtcggtccagctactcctgttccagataagctacgacctacgaggtaccgatacctggccaggagcccaggacagcgacctgcgacggcgacgaggctgccagtgctgcacgctcaagtacatgctccgagttgtagctactactgtagatcggcacggcagtcgccagaatggtaccataaggcggccgtacgcacacacgcatgaacgctgtttttaccatctcaggttcgctgcaaaatttccagcgtgttctctgtaaaatccctgcatgattgctataaagaaattcttcgtgggtact

SEQ ID NO: 78693 - DNA, 1091 bp, Zea mays
  Clone ID: MRT4577_171795C.1
cggacgcgtgggctcgagctcgcagcgacaggcacaggcagcaaggctggtttccttcctcgtcgaacgtctgccgctgctcgcgatggccggacgcggaggaggtagcaagagtagcctgtacgcggcgctgggcgtggccagcgactgctccgacgccgagctgcgcagcgcctaccgcaagctcgccatggtcggtgacggtgacctcgccacccctgattctgttactgactgcttcccctgtccgccggttgctctgtttcggtcgtaaacccgacgacccggctgctctgctgagtgctgactggtgttgttaccgccccgtgctggtgggcagaaatggcacccggacaagtgcgccggcgcagggagctccggcggcggcgcggacgccgccaaggccaggttccagaagatccagggagcgtacgccgtcctgtcggaccccaacaagcggatcctgtatgacgtcggggcctacgacggcgaaggcgacgatgacggcgccggggagatcctcggagacattctcgaggccatgagccaggcaggccctgccgccgacaacggcaagggggagagcctggaggacctgcagcggcagttcgaggagctgttcctgaggccgtcgccgtcgtccttctcgccgaacgacgcagctgggaagtcggcttccaagagtaggcctgctgggaggaaatagacaggacactgcggcgaataggtcggtccagctactcctgttccagataagctacgacctacgaggtaccgatacctggccaggagcccaggacagcgacctgcgacggcgacgaggctgccagtgctgcacgctcaagtacatgctccgagttgtagctactactgtagatcggcacggcagtcgccagaatggtaccataaggcggccgtacgcacacacgcatgaacgctgtttttaccatctcaggttcgctgcaaaatttccagcgtgttctctgtaaaatccctgcatgattgctataaagaaattcttcgtgggtactaaaaaaaaaaaaaaaaaaaaaaaaaaaaaaaaaaaacccacgcgtccgcccacgcgtccg

SEQ ID NO: 78694 - DNA, 318 bp, Zea mays
  Clone ID: MRT4577_171796C.1
gatgtatgttcttaatttcctggcgtggttattgttatcgaattaattgatactttatcagggtctgtttaacttacacctgtgtctaacttaattcgcttcacagatattcccgtgtctctttccatttttcatgcaatattgttctttttactcccacttttcctttattatttttttctttctttctatctttttattatctttttctctttttttttattttttttaattatttcttctattttattattttttttttctattatatctctttttttttttttttattcttttttttttattttatcctctttt

SEQ ID NO: 78695 - DNA, 269 bp, Zea mays
  Clone ID: MRT4577_171797C.1
gcaggcagaggggttgtgtaaatggatgttaccaggctgccagaaggggaggaagcctctatatagaacacttgaataaggatgaagagaaatagagccctcttaagtagactttggtgtacagtttggtgcagatatctcgtttcctcagcatgatcaaagttgaatgggcagcagagctctgaggtagggtttggattaaccctcaaatcctgtgttgacattcatctgaatcctcagagttcaaggaggccttccagctgtttgac

SEQ ID NO: 78696 - DNA, 293 bp, Zea mays
  Clone ID: MRT4577_171798C.1
tcccatccacccgtacctaagcttctatcctatatactcaacccactcgttctactaccacccgaaaattcatgagcgtgggggtttaatttgtcatcattctcactccattatcttcaaagcaaccgggtaatcataccatgctcttcttagacctatctctccaaatatatctcatatggcataaatagaacgacacacacccccataagtaagctcgattgtcaactcttgcacctaccataataaacaacttcaatatcacacatcttttcataacataaccaccataa

SEQ ID NO: 78697 - DNA, 379 bp, Zea mays
  Clone ID: MRT4577_171799C.1
aaaaaaaaaaaaccccctttataaaaagcccgtttttttaagggggggggaccttaaaattccccagggggccggggccccaaattggttctataaaaaactgggggaagggggccaaaaccggaacaaataggcccgggtcaagtattcctttaccccatggggtggggaagcctttaaaaaaaaattaagggttttgccttggtttggaattaaacccacttaaacccccccaaaccatattaaatgggggggaaccgaacatgcccttttacgggggggggaaacccccattaattaaaaacctttcccccaacccaactgatacagccctttatttaaaaaacactttgcccgcggggagaaccccaaatgaaac

SEQ ID NO: 78698 - DNA, 662 bp, Zea mays
  Clone ID: MRT4577_17179C.1
atgtcgagaagttgtactactatcggaacaaatactaggccacctgctggttgctccatgcaaagaagtgttaacccccctgaacatggttctgggttgttgagcagattgttctcatctcattaccatggcattgtacatgatgaaaagtctgttgcacggcatactgtaaatttattgacatcaaccattaaagttgatgctgaccaatcagatctgaggttctgcttcagaatcatttcacccacaaaaatctacacattgcaggcagagagtgcagtagatcagatggattggattgaaaagataactggtgttattgcctctttgctgaactcacaatccccagaacagtgttttttgtcaagccctaagggcagtggtcatgataggagtaccagcgatggaagctcttttacaagttcagtagaatttgaaccttctgtaagtgatgatttagtactggagaagaaatctggaaatgggcagcatgatgtcagaggcacacatcatcacagaaccagcacgaaacctgaaaaaccaattgacttgcttaggaaagttgatggcaataatatgtgtgctgactgtggtgcttcagaacctgattgggcatcattaaaccttggcgcacttctatgcatagatgttctggggtgcac

SEQ ID NO: 78699 - DNA, 413 bp, Zea mays
  Clone ID: MRT4577_1717C.1
cttacactactttttcattctttcatttttctagcgtatgcttccaatcattggagtcttgggtcattccatcctcccggtaaaacaccaaaccccaaaaaccaaacatccacaatatgcaacgccactaacccccacctatattaaactcgccccaaaaaaacccccactaaaaaaaagctaaaattaccatcaaaaaggaccaaaaacaccaccctttagaaaaaaaaaacccgcccacacagcactcccccccaaccaagccaaaaacaccccccccctaacctgtttattaaagcgcaccccccccctgaataaaaaaaaaaaccccacccaacgcggtgaaagcgaggggcaaaaccccccccctaggcgaagaaggtcttttccatcccggctggtgaatcatcccc

SEQ ID NO: 78700 - DNA, 372 bp, Zea mays
  Clone ID: MRT4577_171800C.1
gtatgccctttctacatgaagacgggttcccagtaacgggtgcccgggcttttgggaacccaacgagacagcccaaactcaaaaaaacatagttctctcgggcatgtacagcgaaactatgatgcattcgccccaattatttgagtacccgtttgtgacggagctcctatttcacacccaaaaaaatggttaggctcaggctggccatggtttcatttggaagggcctacatatttttggaggggtatttctgctctttaagggtggccatgcgaccacataattggatggtggctggagttctgcaacttcgactgtggcaatcaccactaggacgctcgcagggcgaataaactggctttttaacagctg

SEQ ID NO: 78701 - DNA, 176 bp, Zea mays
  Clone ID: MRT4577_171801C.1
gcgaactactcgaactctcgctgcagtttgctgtccaggggcgcacgcgcttagcccagcttggacaggcccgatgcgacgagcacccacaccggcagaacgcacgccgacttggggatcatccttatcgactgccttttctattctgcctccctgagcttaggttacaacaacct

SEQ ID NO: 78702 - DNA, 758 bp, Zea mays
  Clone ID: MRT4577_171802C.1
ttttttttttttttttttgcattcccaagctgattgtatttcatggagcactatcataaaatgcccatctctcagagcatcagacactagctgactcaatcagcttaacatgatcgtggcccaggccaactaacttcctggtgacaacctcatcaactatttcagatgagtcttagtcgttcaccgatagtaccgctcactgcaacatgagccctttcctagcaattgcatgcccaaaaatatggcggagccccctaacgcctgctgtctggtacatcgtgtggaatgttgtttcttctagtgggagatcatagggcccttgctgtcgttcttgggaccttgacgctcggggaactctacggtctgagtgtcgcccttctcaagaatctgcttgatgacatcatcgtcgacagaagtaccaaactcgttctcaagagcggcctttgaagcagcatcgagacttccctgagctccttggttgtgtgtcaggaagatcttgaaggaagaaatgaagtgagcaagaggaatgctcttgtcgctcttccacttctggtaggtctcaacatcatcaatgaagatgatgaagtcgtcgctacccttgtagtggaccttggtctgctgagtctcgccgcgagccattgtgattgtttattgagtaagggaagtggtagtggttgtattggtagtgaagattcgtcaaacgattagagtgagaagtcgcagagtggaattgttgataactgtttatcctcgtgccg

SEQ ID NO: 78703 - DNA, 269 bp, Zea mays
  Clone ID: MRT4577_171803C.1
tatttaattaaaaaagctagactagaagattttagtgtattttgttttcatgggagaagtttccttttatcggactagatagatgctatggtctatatatttgtatattttgtggctaaaagatcaaagaacagaactgcaacaactgcattgcagattcgcatgggaaagttgccagctccaacgtcttgtactcttatttttaattatatgtaaactatagcggtgattcagtttgcaggtatggtcctcctcaacacacgcatgca

SEQ ID NO: 78704 - DNA, 407 bp, Zea mays
  unsure (1)..(407): unsure at all n locations
  Clone ID: MRT4577_171804C.1
naggccggccggggcactttccatttgaaagcccccgacctgtgggtgggtgtcggctagaggcgttggattgaatggcgaggaccatgaacgatagggcgctgtgcctggccgtggcgaccgtcttntgcgtgctcttacggcagagcctcgacgacggcgagggcttcaaggaggcggacaggatcgacacgctgcctggggggggggcgaacgcggccgtgcagcagaactccggttacgtcagccttgatgacaaggtcggtaagtcgctcttctactactttatggaggccaccgttgatccggatacaaaaaccgattattgtctggataaatggagggcctggatgttattagatgggaatagaagcattacacgagatatgtaattaatatgtggacac

SEQ ID NO: 78705 - DNA, 380 bp, Zea mays
  Clone ID: MRT4577_171805C.1
cgttgctgtcggcaatcgccgacgtcgccggaggcttcgccggccggagcagcgccgacggtaagacattctcgccccccgcccgctccttccccttgtgtcgtaagctcctgggcgcgaagaatcgccagctcggctgtctccgatctccgttcgggcccgtaccagatgaccagatcccgcgtttcgatgggggccttgccgtgttttttttaaatcccctgttgctcgattttaatcaaattcgatctagtcgaccattggatgtcttgtttgcttaatccggcgcgcgctccgatgtgattgcaggttgttttgcccctccctcgtccggcccagcagcccaggcgagcatgccttcgattgcgccgacagcaacg

SEQ ID NO: 78706 - DNA, 388 bp, Zea mays
  unsure (1)..(388): unsure at all n locations
  Clone ID: MRT4577_171807C.1
gcttccaagaactttcgttccttctcgatcctttttcttgttggatacgcttatgggcagctctgatctgaccactagtatggagggaactgtctggaccttttgcttcaaataaaactgccagcacgcacacctgctcgctagagagaacacctgctaccttcatgaaccaaccacacgttgttgctcgttctaccaggactctgcgcctaacgccggcaccctgtaacaacaagcaccatttgctgccattcaaccaagttgatttgacaaacctancatngntctgccgacaccccctcattgttggtgccgtctcttagatgccttatgaggcatcgtttaacattacagtggtctgtcttatgcttgtggcttcccgggaaac

SEQ ID NO: 78707 - DNA, 738 bp, Zea mays
  unsure (1)..(738): unsure at all n locations
  Clone ID: MRT4577_171808C.1
nacananaggnctgctgtagnaaatgctacacttttccggggttttttctcttctcccgcgagctgactgacggctcctttatctcctcccgcgtgcatcccccagctactcgtcattcttatccgcctgcctccgccctccgccaccgctacctttatagctctagcttccttcctccattcccacctcatgccttcgtcttcgtcgtcctgcagccccgcaatagagcatcgtacttcatcgttccacttacatcgtttgttcgttcgttcttccgcgtgatctgcttgggagttggggggaatggaggcctacgtcctgttcgcgcgcgccaaggagcaggaggaggacatcggctgcccgtccgagtcgtccgcggcgcgttccacgtcctcgtcgtcggacggggtggacctcgccgacgacgccagctcgtccgggtccacctgccacttcgagatggcctccctcatgacgcacctaccgatcaagaggggcctgtccaagttcttcgccggcaagtcgcagtcgttcgcgtcgctggcggcggtgggcggcatcgatgacctgcccaagccgccggcgaagcggctcaagacgtcgtggagctgcggcgtcggcctcgaggacgcgcgccgcggccctccctccgtgacgaccgccaataagcaggcgtccagcagggcacggctgacgccgtcggcgctcggctcgacgccgagaaggctggtgcgagc

SEQ ID NO: 78708 - DNA, 837 bp, Zea mays
  unsure (1)..(837): unsure at all n locations
  Clone ID: MRT4577_171809C.1
tgggtacccctncgaggccggccggggtacgagactggctagcaggcgggagcgcaaagccaaaaccctatcttccttcccgagccgccgccgcccaaaacatccggccgccgcgcgccgccaaccgccgtcacctggcgagcgccctagccggacggccgccaaccgcgcgccgtctcctccccagtcgcgcgccgtcgtctcctccgatccgccaaccgcgcacgcagtccaccgtgtcccgttcccagccgcgcgcgcagtccgccgtgtcacgttcccagccgcgcgcgcagtccgccgtctcctccccagccgcgcgcgcagtccgccgccaaccgcgcgcagtccgccgtcccgtccccagcccagccgcgcgcgcagtccgccgtctcctccccagccgcgcgcgcagtccgccgtattgcacatcacagcccacaggtctacaacaacctgcagctccaccgcggcgtgttctccgtcgatcagaacctctacagggacggctctacgcgctggatggtcgaccagctggccaaggttctcgttaagctcagcgaggtcaacatgctcaccggcgtgtagggggagattcgaaagtatactggcttcctaaaggatcaatgtcggctatctctgatcagaagaaacgcaccttggaagcccttcaacaacagtatactgctgcaaaggctaagaaattgcaagatgaacaggttaagagtcagaagaagagcaattttaatacccctaagcctaaatgtgatgcaccaaggagaagcaaagtccagaaatcactcctcgacgaacatatgcccaaccttcctcataaag

SEQ ID NO: 78709 - DNA, 442 bp, Zea mays
  Clone ID: MRT4577_17180C.1
gggaagggaaaaaaaaaacattccttttccaaaaacaggaaaagggaaaatcgacgggggccctgggggggggaaacatcaaaaagggactaaaccccggggaaaacccaaatttttattcgccccgcccaaaagaaaggcaaaaatttccccccaagtcctgttccaggcaaaccaaaaattttaaaaaaacaaaaaactttccaaaaaaaccaaaaaaggggcaaaggcctttggccagttaaaggaaaaagggggccccggggccccaacggaaaaaccaaaaacattttcctggaaaaaacgagggggggcaaaaaaaagctggggaacttgggaaggggcccctggggggggaaaaaaaaaacccgggggagccaacaaccccgaaaaaaaagccggcctcttcaaaatttggggccgcaacccaaacagggggggc

SEQ ID NO: 78710 - DNA, 433 bp, Zea mays
  Clone ID: MRT4577_171810C.1
aaaaaaaatgtactcttgcggaagtgcaaaggactggacgctcattcttaaatagttaaaagtacatgcgagcccggttgacctgcgaatgaaactaacagcgactgcgcttggcatactctaaccttgatcaaggaacatggttgcccactctaactgcaaggggtcgtctattacacaacttgatgcacctggatagcatgagccttggaagcgtacaacatacttgggataactgatttccaccttgcaagggggtataagaggtactagggggccacctagggaaagtcgatatggggtggggccaccttttttatcataacctgtttatagatagaaaggtgtatggtctacagcggacgcgatggtctaacgccgggaatgccataacgggtccttcatgaattaccaactatccttataatgagtc

SEQ ID NO: 78711 - DNA, 512 bp, Zea mays
  Clone ID: MRT4577_171811C.1
ctcgaggccggccggattgcgtttgcgctccgatctgagacacaaagcgcacgttcaatgaaccagcgtgtgtaatcttctcgctggttcgatcgctggcgctcctctgttccgtcctcctgtcgatacccctgtctcctccgccctccgctgccccctactaccatgggcggctgacccctagccgatgccatgcacacgttgctgcccgccgcgcttcatactgtcgtactgcgccagaagaacaggagccataaggcgtcgctcaacggaattacaccccgctactcattaatgatgacttaggtaaatcagctctcgggaccagatttacgaatcacgacccgtcgaaccataaggatggatatgcatcatgcgactgagaatgactgagatgacattaacggagcagaaaatatcctacgcaaggtattatacgacagtgcatgacactatcatggactgactatgaaaccgctcacactccactgcagacatgtgatttgatagat

SEQ ID NO: 78712 - DNA, 321 bp, Zea mays
  Clone ID: MRT4577_171812C.1
ggaaagggaacacagttctttccaccaaacaaaatagggagggctcaaattttgactgtacaggcaatgccagacttgaaaacccttaaacaacgaattttgccccattttttaaatccatccctcaaattttggttgaattttttaaccccctaaaacgaataattttttaaaaagggggaagtttttgacaggggccatttgtaaaagttcacaagatttttaataacagatgtttggcaaaaacaaaattcttttttagtttccaacagcttacaactttgggtgacttctcccgaaacggggagccaaaatcttttg

SEQ ID NO: 78713 - DNA, 3958 bp, Zea mays
  unsure (1)..(3958): unsure at all n locations
  Clone ID: MRT4577_171813C.1
tccatacatcattcaacaatgctagatcttggtagcgagacaacgttcttcgatgtttttgatggtcatggaggtaatcacaatatatgccttttatgttccttgaattagactgcctcngaggaataccattatgccaagtatttatagaccctctctttaacatttcacaacctcatacgatcataccattgctttacttaggaagagtagctgtcaaattctgtacaaaatacccgcataatcaagttctcaaaagtgaagcctattcagttggtgacctaggtcctactgtcctaataaagcttaaatatttattatatgtatacaacaaacacaaagtcgattgtgtaaatgctctgttgatagtggctttctaattcaacattatatccctataactgcatatctgtattgaatatgataatgttatctgcatttaaatggacctgtgggtaagactcatatgaatgaacagccgtctagaggccattttgtatttacattaaagatatccaaatctaatgaggtagaatggaacattcactattatcataccaagatctaccaaaatatagtgttccttatgctctctttcagactcgcgacaatccctttttaaacaaatattttgcatgccaaataactaatcctgagaaagtatagctcccatttttttggttgaagaaaacagacctcgcggcctcatgccccgccctttctccccatctgccgcctccacctcatgggccgctgggtccaccctcgacgtccagcttgaatacatctttacctagcgaaccaccccccctgctgcagatcctccgcctcctcgtcacgacagctgccttccgtcttcatcgccttagacggcatactcggcatacaatagtaccgcgtacctagagcccgggtctgaacctgttgcaggcacatgtcatatataaatggacatgggcaggcactcccgctgagggtgcttcttggcttcgtctgtagaggcttgctgatatttggcataggatattgttaatttgtgggtatgatgcatggattatttgagatctttgagcagataaagcaatcactatcatctcaaagggagggtattgatttcatgcccgtgattccccctctcccagtcaaagcattcggcacgaggcctcgtcggcctcatgccccgtagccccgactccccatctgccgcctttatttcatgggccgcgcccacgcgtccgcccacgcgtccgcccacgcgtccgaccgtggtggcgacgagctccgcctcctgcaccccctccgccttctggccccttccgctgaggcccgcgtcggcgcgttcctgccatagtcggcaaccaataggagcgtaaaactggagctagggattgaagctgttgcaggtacatgtcatatataaatggacatgggcaggcactcccgctgagggtgcttcttggcttcgtctgtagaggcttgctgatatttggcataggatattgttaatttgtgggtatgatgcatggattatttgagatctttgagcagataaagcaatcattatcatctcaaagggagggtattgatttcatggccgtgattccccctctcccagtcaaagccatccaagccgcaattacttcagggacagggtgttcactggggttagaaggattctgtttttattgcacgacacatgacaacatatccaagtagtccttgattgatttagcagcagggagtaagcgtcttgctaaaagtggctccacaggtgaacttagcgatcgtcttgctaaaagtggttgtacaggtgatcgcttgaaggaaactcaggttcaagaaggacacataagtatccgagaaaaaactcctcaaatcctggaatagcctcgatggttccagacggcgaacgaacggggtgaggaaaagaacccaccggcctgctgtccattgctcctagaagcatcgcgtcgtggatcggctttctccgtgctccacctcgtcggcctcatgccccgtagccccgactccccatctgccgcctccacctcatgggccgccgggtccaccctcgccgtccagcttggcgacatctttaccgtggtggcgacgagctccgcctcctgcaccccctccgcctcctggccccttccgctgaggcccgcgtcggcgcgttcctgccatagtcggcaaccaataggagcgtaaaactggagctagggattgaagctgttgcaggtacatgtcatatataaatggacatgggcaggcactcccgctgagggtgcttcttggcttcgtctgtagaggcttgctgatatttggcataggatattgttaatttgtgggtatgatgcatggattatttgagatctttgagcagataaagcaatcattatcatctcaaagggagggtattgatttcatggccgtgattccccctctcccagtcaaagccatccaagccgcaattacttcagggacagggtgttcactggggctagaaggattctgtttttattgcacgacacatgacaacatatccaagtagtccttgattgatttagcagcagggagtaagcgtcttgctaaaagtggctccacagcgatcgtcttgctaaaagtggttgtacaggtgatcgcttgaaggaaactcaggttcaagaaggacacatgagtatccgagaaaaaactcctcaaatcctggaatagcctcgatggttccagacggcgaacgaacggggtgaggaaaagaacccaccggcctgctgtccattgctcctagaagcatcgtgtcgtggatcggctttctccgtgctccacctcgtcggcctcatgccccgtagccccgactccccatctgccgcctccacctcatgggccgccgggtccaccctcgccgtccagcttggcgacatctttaccgtggtggcgacgagctccgcctcctgcaccccctccgcctcctcgccccttccgctgaggcccgcgtcggcgcgttcctgccatagtcggcaaccaataggagcgtaaaactggagctagggattgaagctgttgtaggtacatgtcatatataaatggacatgggcaggcactcccgctgagggtgcttcttggcttcgtctgtagaggcttgctgatatttggcataggatattgttaatttgtgggtatgatgcatggattatttgagatctttgaacagataaagcaatcattatcatctcaaagggagggtattgatttcatggccgtgattccccctctcccagtcaaagccatccaagccgcaattacttcagggacagggtgttcactggggctagaaggattatgtttttattgcacgacacatgacaacatatccaagtagtccttgattgatttagcagcagggagtaagcgtcttgctaaaagtggctccacaggtgaacttagcgatcgtcttgctaaaagtggttgtacaggtgatcgcttgaaggaaactcaggttcaaggacacatgagtatccgagaaaaaactcccaagaaatcttcccaaaactgaatgttgccttctaccatcaacaacctttgaagttctcgggtgtttatttttgtatgttctctacaattatgtgtatatatatatatattcatccttttcaagacaatttttataaatataacaacttgatttcaaatgttgaaacacgataatttacctaactctatttagatgtagtatatcctgctcaaaaaaaaaaaaaaaaaaaaaaaaaaaaaaaaaaaactattattcttcccctcttttcacatattgtggtgagccccgatggtgcgtttctctgatttactgccaccgataggaaaatatatatgcacatatgtagtgatatagagggaggctcatgcgatctcttgtcgtatatgaacggacacttgcatggactatggttcacggcttttattggct

SEQ ID NO: 78714 - DNA, 379 bp, Zea mays
  unsure (1)..(379): unsure at all n locations
  Clone ID: MRT4577_171814C.1
tcgaggcgccggggagtctctcaccgcaacgcagctcctcaagagttactacccagccgggagaggcgagcgcacgcactgcgagaatgaccacgggcggcgcaggggcggctcctgctgtagctgctcgtctccgtggccgagcttcctccaaaccttcctatcccagcgattgccgccgccgcaggtgctagacgtggactcctcattccgncggctctccttgtgcgcttctcctcaccggatcactcacataatccnccgcgctgatgnaagtgncgaagctggagaaccgnagcntgccactgcctcagctgaatccgaagaggaggtggncgagggatctgtcgctgtggcggaggcggaggaaccgacgccg

SEQ ID NO: 78715 - DNA, 1157 bp, Zea mays
  Clone ID: MRT4577_171815C.1
tacgttcaacatcacactacaagcatggttattttttaaagatgcctaccatttttatcggtcagactatttcttaaaattgttccacgacataatatttaccaatctatacatccatacatcattcaacaatgctagatcttggtagcgagacaacgttcttcgatgtttttgatggtcatggaggtaatcacaatatatgccttttatgttccttgaattagactgcctacgaggaataccattatgccaagtatttatagaacctctctttaacatttcacaacctcatacgatcataccattgctttacttaggaagagtagcatgacagattttgtacaaaatacccgcataatcaagttctaaaaaaagaagcctattcaattggtgacctaggtcctactgtcctaataaagcttaaatatttattatatgtatacaacaaacacaaagttgattgtgtaaatgctctgttgatagtggctttctaattcaacatatatccctataattgcatatctgtattgagtatgttaatgttatctgcatttaaatggatctgtgggtaagactcatatgaatgaacaaccgtctagaggccattttgtatttacattaaagatatccaaatctaatgaggtagaatggaacattcactattatcataccaagatctaccaaaatatagtgttccttatgctctctttcagactcgtgacaatccctttttaaacaaatattttgcatgctaaataactaatcctgagaaagtatagctcccatttttttggttgaagaaaacagaccaacctatccaaagagtcattaacttgattgattttgctgcagcgagcgtcttgctaaaagtggttgtacgggtgatcgcttgaaggaaactcaggttcaagaaagacacatgagtatccgagaaaaaactcccaagaaatcttcccaaaactgaatgttgccttctaccatcaacaatctttgaagttttagggtgtttatttttgtatgttctctacaattatgtgtatatatatatatacttcttcatccttttcaagacaatttttataaatataacaacttgatttcaaacgttgaaacaaaaaaaaaaaaaaaaaaaaaactcgagggaaggccgcggtacc

SEQ ID NO: 78716 - DNA, 2904 bp, Zea mays
  Clone ID: MRT4577_171816C.1
aattcggcacgagggctactttctaattagtaatctcactatattgtatgccgaacagacgcttcatgtccaatgtgcataccatactatttccagtctaatgctctaattctaggacacaacaaacttcacaggcatcatgtatgtcatgttctactttgttaagacttaacaataatctataaaacaattgttatgataatggtgagtcaaaacctgcacttatgattctgcttaaagttcttcttgtatctttacataaagttccatttgtgaaaaaagatacaaatacaaatcagtccataaatgaaaatatatgtaccaactcactatttttccataattcaccaacaggttcaagaaggacacataagtatccgagaaaaaactcctcaaatcctggaatagcctcgatggttccagacggcgaacgaacggggtgaggaaaagaacccaccggcctgctgtccattgctcctagaagcatcgcgtcgtggatcggctttctccgtgctccacctcgtcggcctcatgccccgtagccccgactccccatctgccgcctccacctcatgggccgccgggtccaccctcgccgtccagcttggcgacatctttaccgtggtggcgacgagctccgcctcctgcaccccctccgcctcctcgccccttccgctgaggcccgcgtcggcgcgttcctgccatagtcggcaaccaataggagcgtaaaactggagctagggattgaagctgttgtaggtacatgtcatatataaatggacatgggcaggcactcccgctgagggtgcttcttggcttcgtctgtagaggcttgctgatatttggcataggatattgttaatttgtgggtatgatgcatggattatttgagatctttgaacagataaagcaatcattatcatctcaaagggagggtattgatttcatggccgtgattccccctctcccagtcaaagccatccaagccgcaattacttcagggacagggtgttcactggggctagaaggattatgtttttattgcacgacacatgacaacatatccaagtagtccttgattgatttagcagcagggagtaagcgtcttgctaaaagtggctccacaggtgaacttagcgatcgtcttgctaaaagtggttgtacaggtgatcgcttgaaggaaactcaggttcaagaaggacacataagtatccgagaaaaaactcctcaaatcctggaatagcctcgatggttccagacggcgaacgaacggggtgaggaaaagaacccaccggcctgctgtccattgctcctagaagcatcgcgtcgtggatcggctttctccgtgctccgcctcgtcggcctcatgccctgtagccccgactccccatctgccgcctccacctcatgggccgccgggtccaccctcgccgtccagcttggcaacatctttgaccgtggtggcgacgaactccgcctcctgcaccccctccgcctcctcgccccttccgctgaggcccgcgtcagcgcgttcctgccatagtcggcaaccaataggagcgtaaaactggagctagggattgaagctgttgcaggtacatgtcatatataaatggacatgggcaggcactcccgctgagggtgcttcttggcttcgtctgtagaggcttgctgatatttggcataggatattgttaatttgtgggtatgatgcatggattatttgagatctttgagcagataaagcaatcattatcatctcaaagggagggtattgattcatggccgtgattcccctctcccagtcaaagccatccaagccgcaattacttcagggacagggtgttcactggggctagaaggattctgtttttattgcacgacacatgacaacatatccaagtagtccttgattgatttagcagcagggagtaagcgtcttgctaaaagtggctccacagcgatcgtcttgctaaaagtggttgtacaggtgatcgcttgaaggaaactcaggtgagtgtttggttactataaattttcaaattttttagtgattctggtcaccatacaatttttttaattaaggaaacacaagtttagacagagttctactgctttactttgaagaaagtgactttcgttctcaatgggcctaaagagaatacttgatttaaagcattacgtcttgcctagctgctatttctaattagtaatctcactatattgtatgccgaacagacacttcatgtccaatgtgcataccatactatttccagtctaatgctctaattctaggacacaacaaacttcacaggcatcatgattcatgtcatgttctactttgttaagacttaacaataatctataaaacaattgttatgataatggtgagtcaaaacctgcacttatgattctgcttaaagttcttgtatctttacataaagttccatttgtgaaaaaaagatacaaatacaaatcagtccataaatgaaaatatatttaccaactcactattttttccataattcactaacaggttcaagaaggacacatgagtatccgagaaaaaactcccaagaaatcttcccaaaactgaatgttgccttctaccatcaacaacctttgaagttctagggtgtttatttttgaatgttctctacaattatgtgtgtatatatatatatatgcttcttcatccttttcaagacaatttttataaatataacaacttgatttcaaacgttgaaacacgataatttacctaactctatttagatgactgagaaaaacaaccaagcctacgtggtcttcctgaagacctttcccggggactaccgttgccggtcaaacaacccataaaaaaaaaaaaaaaatctggggggggggccgggtccccattccccc

SEQ ID NO: 78717 - DNA, 840 bp, Zea mays
  Clone ID: MRT4577_171817C.1
tggttggcagtaagatgaagagttcatcagaccttttgatcatcgtcggatcaatgtattttgctgttgcatttgttggctttgaaaactgtataactgctcaacctgttattgccgtggaaaggacagtcttttacagagagcgtgcagctggaatgtactcggctataccctatgctttctcgcaggttgttgctgagataccatatgtgttcgtcgagagtgtcatatacactgttatcgtgtacccgatgatgtctttccagtggaccctagcgaaattcttctggttcttctacatttcgttcctctcgtttctctacttcacttactatggtatgatgggtgtcgccataacgccgaaccctcaggtggcttccatatttgccgcttccttctacactctctttaatctcttctcggggttcattgttccaagatcgagaatcccggtgtggtggatctggtactactggatctgtccagtggcatggacagtctatgggctgattgtgtcgcagtatggcgatgtggaggatttgatcaaggtgcctgggaaacccgatcagcaggtcaaggctttcatcaaggactactttggctacgatccggacttcatgggcgtagtggcagcggtgttggctggctttactgccctctttgcttttatatatgtttactgcataaagagatttaatttccaacagagatgatagtacaagtctcagtttgccatgtgccttgagggtgtatgttcgataaaataaaacaatatatatctagacaaaaaagaagcaagagatgtacattgccgtttacttgttagttgtatgttgcacc

SEQ ID NO: 78718 - DNA, 164 bp, Zea mays
  Clone ID: MRT4577_171818C.1
atggccaaattaaccaaacgggggcgattaaaaagcgaatgccgcttgtgttaaccctgctacatccaaatagcgggtttcatgcctagcatgccaaacattttacctttcagggaggtttccatttccgtttcaaacatctttgctgccttcgatacctaaac

SEQ ID NO: 78719 - DNA, 573 bp, Zea mays
  unsure (1)..(573): unsure at all n locations
  Clone ID: MRT4577_171819C.1
gtggccgggcccgtcgataaacccctcctcgcctcctccgcccgagcctgcctcctcatcgacggatagcgcctgcttctcttaactcgacgcactancctcagccaattgtggcatttcgtggctatggggggcacagggggcgtgtccgtctccgcctcggggatcgcgtcccgcgggtgcgccanatccgaggctgcgcggggggcatggggaatccggggctgcggactccggagcgagggcctcacgtgtcactcgcttcggatctcgcangcgcccgcgagggtgacgggggcgaggccgccgccgccggcggggncgaccaatggcgcgggggcggggacctgcgggttcnactacgatctcntcatcatcggcgcgggcgtgnggggtcacggggcctcgctgcacgccggtnaaaagggcttaaaaacagcaataattgagggagatgtgtgtgggggggacttntgtaaacagaggctgtgtgccatcgaaagcgcgtcttgctggcanggggccaatgcgggagcttcatgatgaacatcatatgaaggctttggggctaca

SEQ ID NO: 78720 - DNA, 190 bp, Zea mays
  Clone ID: MRT4577_17181C.1
ccggacggggggcgcaagacgcgttcacccaggcggcggccgcagaggtaggcgagagaacataagaatatggctgccgcggcgtacgcctcgtggcccaagcggtggaccacgtcccgaggctgctacccgctgatacttgcgagaggcgccgctgctccaggccatctggctcgcccacacctgtgtg

SEQ ID NO: 78721 - DNA, 667 bp, Zea mays
  Clone ID: MRT4577_171820C.1
gaatcactaaaccgtactcggtgcgtcctaaaccaccgctcacctcgatatggctttctcccctcttccgactcgcttctctgtccggattccggattccctctgctctttccctaaccattgtagccatggcctctgacaggcacggcgatcggctcatgttcctccaagaaagccacgaacaggagttccaaggctggcctccagatccccgtgggaaggatcaccagaatccgcatggccgatgagaatgcccagagagacaatgccgtggccactgcctacctcgctgccgtgctccagtatattgctgctgaggctctgtgattgcgcggaatgcctgacgtgacaacacagaagacccgaatctgacggtgccacattctgctcggcgccagcaaaaactagaatgtctcgcggttgatgggcacggggaccatcgctatggatgccgtaatgacctagatgcataaacttttgatcccaataaatgtcgaccacatatctgccaaggctgcacctggagactaggactatgctgttgactactgctgatgacacctccaggatgatggcggagccacgtgagactgagcagtacgctacgtgttacacgtagatgatcatgcgtgatgctgcaacatgctacactaagatactgttgaga

SEQ ID NO: 78722 - DNA, 184 bp, Zea mays
  Clone ID: MRT4577_171821C.1
gccacgcgtcgccggcagctccctttgccgggtaggggagcggccgccggggcgctgtcggcccggcccgcccgtcggcggctacgccccgagccagggtcgcggtagctgcgggcgccggtcacacagctagtcccggcaggcgacctgaagactgctgagcggaggatcgttccgccatatt

SEQ ID NO: 78723 - DNA, 329 bp, Zea mays
  Clone ID: MRT4577_171822C.1
tcctctctttgccttgcaccaagcttcctgagcataccatgaagattggaggccaagggaagctcaacagggctttcagagagaagagggctaggttctacatcttccgccgctgcgtcgtcatgttgctccgatggagcgactgatgggtctccatggcggctcttgttttttccttccattctaggattttcttttttggcacagccattttttcagggtgtagagtattttaggtgtagttgctctgtataggctagacttcattgtttgaggtcctttttttctctccatggatgcctgctgtcacaggcaaagggggagagatc

SEQ ID NO: 78724 - DNA, 424 bp, Zea mays
  Clone ID: MRT4577_171823C.1
ggggggggggctttcgggccctttttttcttaaacattattggggcaaacattatttaaagggggggctttcattaaacaaaagcgggtccatgggtttgaaatttcgcagtttacaataggccccccttttttttttttttttttggggtttgaaccaaacttccttaacaaaacaaggccgggttcaaactcggggacctttagggtttaagacccaccaccacacgcttttagtttgggggcgtagagcttaaacaaaaggtttttccaccacaaaacctgaaaaaaccttccttttttaaacacgggggccacccccaacattaaaacctaactgaagcgaaacaccccttattatacccccacctttggttttctacacccgttcttggaccaccactgacagcacttctttttttagg

SEQ ID NO: 78725 - DNA, 403 bp, Zea mays
  Clone ID: MRT4577_171824C.1
atagaagagctatgacgtcgcatgcacgcgtacgtaagctcggaattcggctcgagacttggagtaccagtcttggaatggccatctagggttaaaattgcggctggttcagcacgcggaatagcctatcttcatgaagattgtaatgacatttttcattctttcacctgtttttgtgatgattttcactactctcagtctcatgcttttttgtttaattcttttccttggcaggtcaccccagaataatccacagagatataaagtcctctaatattttgctggataataacttcgaagcactggtaagaatgctttctacataatttcagtaacatcttataatggagtcatcagtcattgcattggtgcccatttgctaggttgctgattttggtcttgc

SEQ ID NO: 78726 - DNA, 351 bp, Zea mays
  Clone ID: MRT4577_171825C.1
gataagctcgcagctcccatgtatctactcagcttgcagaactacacgagcgaacttgtgcagggccatcgcatgtatcttgttacactctcaaaactgtcattattttaacctgagcacgactgtaatgtctaccatctggaaccagtgactcacctgtaagctcataccctaggaacgttgcacatcttattccaaacaatatcgggctgtctggtgatctttagagccttactctgttaaagtgattgtcagccaaacattatgacggatgtgactcaaattagtgtttcccacttctgtatttagtaccggtatttttttttgaagtggcatatgtgactattttaa

SEQ ID NO: 78727 - DNA, 1657 bp, Zea mays
  Clone ID: MRT4577_171826C.1
tgggaccctcgaggccggccggggctccccactctccgtcctgctccggcaagaggcggcacaccgcgcaaggatgccacctagggctgctccggcgctgcgggtgctcccgctcgcgctcgcagcggccatcttctcggggctcaccgccatcctcttctacctctccggcgtctcctcctcacatagcggctctcggctctcggaggcggacctggcggcgctcgccgcgctgcggggtggcttcagcaagtgcgtggatgcaaatgggctaggactgaaagccgtgaccggggaggactactgtcgtgttgtgatacaatacccaagtgacacagtttctaagtggagagatccaatcacccataaggctgaaagtctgtcgtttgagttcaatctgtgtgaagctgtggcctcatgggagcacgtccggaacagtacaacagtactcacaaaggagtacattgatgctttgccaaatggctgggaggaatatgcatggagaagaatcaacaaaggaatccttctgaataagtgccagaacagaagcctctgcatggaaaagctctcactagttctacctgagacatcaccatacgttcctcgccactttggtcgatgtgctgttgttgggaactcaggtgatcttctcaaaactaaatttggggatgaaattgattcttatgatgctgtcttcagagaaaatggtgcacccacccagaattacactgaatatgttggtagaaagagtacatttcgccttctgaatagaggatccgcaaaggcactagataaagttgttgagttagatgaaacaaaaaaagaggcactgatcgttaagacgacaatacatgatatcatgaaccaaatgattcgggaacttccaataaccaatccagtatacctcatgctaggcacatcatttggttcctcagctaaaggaaccgggcttaaagctcttgaatttgccctctccatctgtgacagtgttgatatgtatggcttcaccgtagacccaggttacaaggaatggacaaggtacttctcagaggtaagaaagggacacactccactacatggtagagcatattatcagatgatggaatgtcttggtctggtgaaaatccattcaccgatgcgaggagatcctggcaggacagtgaggtggctgcctaccaaggctaccatcgaggctgctagagttgcttccgagaagttgttgaagagacctggtgctggaagtgatgatcctctggggacttgcaccatgataaagaagcgcaggaaagggaaggcgccaaacagatctggtctacgagatgctgccatgaagcacctcgaggacatgaaaggtgccgctaggtatcccttggagcggaatgcagggggtggttacctctgcatgatcaatgatagataggaccgcggctgattatggcatcagttgccccctcccccctcccctccacttgagtcgaagaaaggaatgcagtttgagggaacgaaaaggccgattctttgatttatgcagctggtgtacaacgtttgagtgtagagaaagttaggtgtaatgttttgagtgtagagaaagttatatgttgtggatggatacaaatggtcaaattgtagcacttttggtgcttataatactaattcc

SEQ ID NO: 78728 - DNA, 651 bp, Zea mays
  Clone ID: MRT4577_171827C.1
tcgcgatctagaactagtgcgctgcgggtgctcccgctcgcgctcgcagcggccatcttctcggggctcaccgccatcctcttctacctctccggcgtctcctcctcaccggctctcggctctcggaggcggacctggcggcgctcgccgcgctgcggggtggcttcagcaagtgcgtggtatggtcttgctcgtatgcctccctctgggctgattacggttcgatttgccttactggtgttcctgctcatctcgtgccgcattgtcgttttcgcctctgggtatgggggcactacttcgtcacaaccacgagctgtggcggattgggaacgtggttgcctcgagattcttggttccgtgcgccaattgttccgagtccgaggttcactgtttagtgtaggaggtagcactgtgacagtgaggtctttgttctggcgtgaaataagatttcatggattgtagcgtatctgtagttgaattggatgacagtggctgcatagatttgcagtgtcagcagcttcaggatcttctttgctgtcttggttcagacagacaaacctcacttgcttaaaagtaactgcaggatgcaaatgggctaggactgaaagccgtgaccggggaggactactgtcgtgttgtgatacaataccc

SEQ ID NO: 78729 - DNA, 472 bp, Zea mays
  Clone ID: MRT4577_171828C.1
cccacccagaattacactgaatatgttggtagaaagagtacatttcgccttctgaatagaggatccgcaaaggcactagataaagttgttgagttagatggtaagtctgccatctatattttgtcccctatcagtgagatacaaatatgaaaaggcatgctgattttatggttgcagaaacaaaaaaagaggcactgatcgttaagacgacaatacatgatatcatgaaccaaatgattcgggaacttccaataaccaatccagtatacctcatgctaggcacatcatttggttcctcagctaaaggaaccgggcttaaagctcttgaatttgccctctccatctgtgacagtgttgatatgtatggcttcaccgtagacccaggttacaaggaatggacaaggtacttctcagaggtaagaaagggacacactccactacatggtagagcatattatcagatgatggaatg

SEQ ID NO: 78730 - DNA, 742 bp, Zea mays
  unsure (1)..(742): unsure at all n locations
  Clone ID: MRT4577_171829C.1
gccggccgtttcgggtacactgttgactaccaacaactgtgacacacggaacagaaccccctcgatctctgcgatcgacgacacagctaccaccgctagcatttcatccgctatcgataccctcctggtgctgctggcaccatattaattgtagctgtgtagtagtctctaaacaagccctaccagctcctcccctcatagctaagcgattcactgaaccactgccaaatatganttgatgattgattttgctataaggagctcatcctttcgcctctgctgcttagatgactacaaaaatatgaggctctaggacctcaccgcagctattaaaactctggtgaaccccgccgtattacaaaactagatcaaattcatcctataccgtaacaacctaggcattttgcgtcctgcagttccaccaatcgatgtgcagagaacttttgctccctggacgaaccattacaaccgaaggaatgtccaatgcactgtgcacaccattttgaataatcattgaatgcatccccctctcggatgttgtcatcctgttcaagattataccaacgatattgcttactctttcatgatgaaacctgacgtctgaatcaaacttactgacctgatatattgtgcttgcatacctgagattatatgatagcatatgctaattctgagcatgactgctcaacctcattgtactgctatgtgacttccgagtaatgcgttatgcggtagcctgata

SEQ ID NO: 78731 - DNA, 988 bp, Zea mays
  Clone ID: MRT4577_17182C.1
cgaccattaaagttgatgctgagcaatcagatttgaggttctgtttcagaattatctcacccacaaagatctacacattgcaggcagagagtgcagtagatcagatggactggattgaaaaaataactggtgttattgcctctttactgagctcacaatcgccagaacagtgttttatgtcaagccctaagggcagtggtcatgataggagtaccagtgatggaagctcctttacaagttcagtggaatttgaaccttccgtaatcgatgatttagtactggagaagtactctggaaatgggcagcatgatgtaacaagaggcacacatcatcacagaaccagcatgaaacctgaaaaaccaattgacttgcttaggaaagttgatggcaataatatgtgtgctgactgtggtgctttggaacctgattgggcatcattaaaccttggcgcacttctatgcatagagtgttctggggtgcaccgaaatcttggagtgcatatatcaaaggttagatctctgacacttgatgtcagagtttgggagccatctgtaatcaatctctttcagtcattaggcaacatgtttgtcaacaatatttgggaagacatgttgccagatgataattcaagtgctgatggatcagacacatcacagtacctctctgttagcaagcctaatctctttatgagaattttggtttattttgtttgattccggctctcatcaagtgactcctccccctcacgctgactaaaagaaacagatgtctcaattctagtggtggagctacgaacaacaatctgatgtcctgatcgagagcgatggagctaatgtttgaacttgttgtatctaaaaatatgaactatggatgtgaacttatgtatttggaattatgtgaatttgtgaacttatgtatttggacttgtgtgaatttgtgatatgaacatatatccatgtgtttgaaaaaaaaaaaaaaaaaaaaaaaa

SEQ ID NO: 78732 - DNA, 335 bp, Zea mays
  Clone ID: MRT4577_171830C.1
atcccgtgctgcttctttttcgtgactggagtgggatccttcctttcggggtacagccaaggtcggcgtggtggagttcttgaacggcgtcgggaagggggtggaagcgcacgccgcgaagctggaggaggctgtgggcggcgacatgcagaggctcctcgaggcccgcacgctgcgggggaggaagcttggcatcccctgcaagcatgtaatgccctgatttctcttcatttggtacctgtagtccaactgcggcgactcccgcgtcgtgctcgtatgcgtggatgaggataaggcaggggcaagggcaaatggtctccctgtctcttctattt

SEQ ID NO: 78733 - DNA, 220 bp, Zea mays
  Clone ID: MRT4577_171831C.1
gccgttttggaacctgccggggtcgaagcgtcgagcggtggggccccagacggcggcgtcgtggtgcatggtggagaccgggacgaagaggtaggtgcccttgggcgcgcggagcctgccgagctgcatgtcgcggaacaccttacgcaccacgaacgacaacggcgggaagaggcgcagcgtctccaggaccaccgcgtgcagcgtcttcatactggcg

SEQ ID NO: 78734 - DNA, 442 bp, Zea mays
  unsure (1)..(442): unsure at all n locations
  Clone ID: MRT4577_171832C.1
ggctaatttgcctctaggngaancancccttttttttttttttttttttttttttttttttttttttttttttttttttttttttttttttttttttttttaaaaaacggggccccccctttaaagagaaacccgccggggccgaaagggggaatttgggggccagggagggaattttttttccaaaaaaaaagggaacttcttgggggcggccccccaaccccaaaaagggggggggaaaaactttttttggcttttttttaaacccccccccttgggccccctaaaataaaaaaggggcgaaaaacgccaaattttggacccccctccagggggggaaccttttgggtctgggaaaaaaatcccgggcgggggtccccctaactttagggccccccttcccggggagggcccccctttaattttcaaacccctccccttt

SEQ ID NO: 78735 - DNA, 347 bp, Zea mays
  Clone ID: MRT4577_171833C.1
gggtttggacgttgaagaaggggcattgaaagaaacaacaccagatggtgagggggatcatgagaaaggagtgcctgcattttggcttactgccatgaaaaacattgaagtgttggctgaggagatctcagagcgtgatgaaggtgctcttaagtatctcaaagatatcaagtggagcaggatagaaaacccgaaaggattcaaacttgagcttttctttgacaccaacccttattttatcaattctgacttgacataaacatatcatatgattgatgaggatgaaccaatattggagaaagcaattgggactgaaattcaatgggccccaggaaaatgcctgacac

SEQ ID NO: 78736 - DNA, 249 bp, Zea mays
  Clone ID: MRT4577_171834C.1
gggggacaaaacccgaacctgggttcccttttttaccacaaggtatccctccttgaccggagccaacccccggtttattttcccccccccccaatttacaaaagccaagcgggggctaatatacattttgacccgggccggcaaaaatttaagcaaccccaggggtttttaaattaaaccgggggcccctttgaaacccccaccgcccttctgcctgtttaaaaagtcccccgccgaaaaaaaaaagat

SEQ ID NO: 78737 - DNA, 344 bp, Zea mays
  unsure (1)..(344): unsure at all n locations
  Clone ID: MRT4577_171835C.1
acatcggcctccactgcattttttaattgttagtagggcacttcatccggtcttttttactttttaagtaatgnnatgtttatttgagattataatctacgtagattatataattcaacaaactttaaattaagttagttcaaagtttattgtattatataatctgaatagattataatcctaaacaagtgatataatagctaaagagaaaactcaatgtcgtcatttgtcactgtggtccgtggatatatatacacaagccaggtctggccttgtcaaaaaaaaaatacaattataaatataaccaaaatataaaaaaaaaaaaaacccccccctcttttttt

SEQ ID NO: 78738 - DNA, 274 bp, Zea mays
  Clone ID: MRT4577_171836C.1
ggttgagcaaagtctagctagtgaaaaataaggctctagctcatcacgggcgacggctgcctcggccttccggactgataagccagactcccataacagctctgataatcatatatggcttgacccccgcggaagtggaagtgcacacaatcttcatgcagatgatctaatcacatgtacaagatatccactggtacttgtaattgatagtgaaaatacccatgcattcaatgtcatacatactgtacagaagggagaaccacctgctgtatta

SEQ ID NO: 78739 - DNA, 237 bp, Zea mays
  Clone ID: MRT4577_171837C.1
attcggctcgagccagaacgaagtttttatattacgcacatggtccttctttaatggatggtttctaacaagccaagcatggatccagaatggattgaacaaacggtggtgggtctcaaaacgaaaaatcggctcctcattactgagcgacccaagaaatattggggtaggaacaggtatctctactaacacccactgggatactagtagaatatacaaaaatttttagagtttaat

SEQ ID NO: 78740 - DNA, 308 bp, Zea mays
  unsure (1)..(308): unsure at all n locations
  Clone ID: MRT4577_171838C.1
tagcagcccctttctactatccccnctacggctanccgtgacgcttctcagggttttggggctcncctccctccccccatccccctccgccggctcctcctctagctccctccttaccccgagctttaagctcgtgctacctgcctacctatctctatggagagagagagagaggggagaacgttcgctcggtcggtctgaggctctcatatctcaacgcttcctcccactgtattcgttgggatctcgctcgcttcaggccatggccggcgtcgcgacaccacctaccccctctccctcctctcctt

SEQ ID NO: 78741 - DNA, 692 bp, Zea mays
  Clone ID: MRT4577_171839C.1
aaattctcgacggtagaaggaagaagaaaataaaaatccccaatccctccgcccacccacccaccactgctcccccggattaccccgtcctcccatcccagatctgccgggcacggccctcgccggcggcgttgggtccgcgatgcctcggacggcgcgggggacctcgcccctgctccgcgacgactgcgaccacggcttcccctccgccatctgctgctcccaccgcctcaagccctggtcttggcaccccaatatccactcctcctagcgcgccctcgtcctgcaaacccccttcttcctcccctctctccccttccccttccttgcccctctcgtggctgtacttttctttgttcttgtcactgccctgcctctgcctgtgggattggatcgccgccgctcgggccggggtgtttagcttgttgttactgctctagaaaccgagctgcttgatggatggtcaatcctgtgatcttgggagtgtgccagcagcggcatctgatggtactggctcctcttccgttgtcgctggcggcggcacggacatttctccagggaaacagtctgccctggatggagcttcgctgcaggggcagaatgcagatggttcgttggaggctggaatgtgtgcgggtttctccaagtcgaccggctcggggatgaagaaagacctccagaagtgcgcaacg

SEQ ID NO: 78742 - DNA, 456 bp, Zea mays
  unsure (1)..(456): unsure at all n locations
  Clone ID: MRT4577_17183C.1
cgggcctccaaccaacgagctgctagcccttctaaccttgctcgacccttgcccgcgctgtnagctcgcctgccccaaggccggtcccctgcatctgctcgccgcgccgcaacccggagtggagactactagcaccaccaggacaccaggtagcagtaattgttttgctgcaatctgacaaagaggagggtatatgtacaaatgcatgtttggggggggggtgaccaccattcccaccatcgttttcaatggtgaaactgttgagtacaagaacattagcttcactgtttgtgatgtcgagggtcaagacaagattatacctgtttggaggcattacttacagaacacccagggtgttatttttggtgtgggcgggaatgaccgtgaccgtgttgttttagacagagatgagctctacaggatgctgtatgaggatgagctatgcgatgctgtgct

SEQ ID NO: 78743 - DNA, 786 bp, Zea mays
  Clone ID: MRT4577_171840C.1
cattgggtacctcgaggccggccgggacaccaagctcatcatcgtctatatattctggagtacatatcaatggctgtgctggagcggcgttcccgcctcccggcggtggcgcagcttgccgtggcgttctggctggcggccaccagcgcctgcctgtgccgtagcgtcatccctgacccggacctggaaccgggccgcccgtgtgtcggtcgtctgttctgtcgttggccaccgctgccgctaccgtcgccgccgccacctccagtcgtcacacctcctccagctccggagacgacgactccgccaccgcgacaccaccatacccctccgttttgtccttcccctctgtgtcgtcatcgtctgccgccccacctgccgaggccgatctacccaccaccgacaccgttgtccccggagtccccgccgctgcctccatcgccgccggtcatcacccctcctcctccgacgccgcgacatccataccctacccctcgtccatgtatttatccgttctgtcctcctcggccgccggtctgcttaggctgcggcagccacggcggtcctccttaatcaccatcgacgacatcgtcttcactgatcgtatcgtccaatggaggttccacccaatgcaagtcagctaatactatgtatatgtatgcaaacataatcgtcatggaggatagatgatccatcttagaaaggtctacaaataaagtatcatggtggagagtcattatgtagtaaatctatgtttgaataaaaagtaataatgtagtatttgtacca

SEQ ID NO: 78744 - DNA, 311 bp, Zea mays
  Clone ID: MRT4577_171841C.1
aagcacgcatacgtcttgctcactagaacgcgactgaaaagcaatgttttagtcagggatagggatttgtcaatgcaccaaattgaaaaggctgccagggacaaggttccctgctctgcacctgatcaagaccaaaaataacattgaactaattaaagttaatgacatcagtaactctcactgggaatggctggacctactccaaaggatttcagccgttatcactttttttatatcccacgtggtgacaaaacgaagccgtttcatattcaaaacaagcggagtggcgagctttaatcgcatgcaattgc

SEQ ID NO: 78745 - DNA, 335 bp, Zea mays
  Clone ID: MRT4577_171842C.1
ggagttaaggccttcagattttcatacggcaggttaaggtttgaacatccaggtctaagcaccagagttgcactccacagacttgtacaacagggaggtgcatgcacgacctaaaaacaagagattgcaacatatagtatttacagcatgtgaacacaagagaccgactgacggtttactttcatgcagcgacacctggactcgcttccttgatccatgttaagagcgctagaaggacgaacatgagatgattctggccattcaggaccattttgacctgatttattgctgactgaatgggctcaccacatactaacatgctgattgtcgtgagg

SEQ ID NO: 78746 - DNA, 797 bp, Zea mays
  unsure (1)..(797): unsure at all n locations
  Clone ID: MRT4577_171843C.1
ggaccctcgaggccggccgggccgggatccaagctctcatcatcgtctatatattcntggagtacataccaatggctgtgctggagcggcgttcccgcctcccggcggtggcgcagcttgccgtggcgttctggctggcggccaccagcgcctgcctgtgccgtagcgtcatccctgacccggacctggaaccgggccgcccgtgtgtcggtcgtctgttctgtcgttggccaccgctgccgctaccgtcgccgccgccaccttcagtcgtcacacctcctcctccggagacgacgactccgccaccgcgacaccaccatacccctccgttttgtccttcccctctgtgtcgtcatcgcctgccgccccacctgccgaggccgatctacccaccaccgacaccgttgcccccggagtccccgccgctgcctccgccgccgccggtcatcacccttcctcgtgagtccagatcctgacggcctttttgcatggcggccggcacgcgctcttacgtgcgtctttgagcgtacgtacgtgtagcgtttgctagcaagtgcatcgtctcatgaactcgttttgcagctccgacgccgcgacatccataccctacccctcgtccatgtatttatcatccgttctgtcctcctcggccgccggtctgcttaggctgcggcagccacggcggtcctccttaatcaccatcgacgacatcgtcttcactgatcgtatcgtccaatggagggtccacccatgcaagtcagctaatactatgtatatgtatgncaacataatcgtca

SEQ ID NO: 78747 - DNA, 258 bp, Zea mays
  Clone ID: MRT4577_171844C.1
gcccgaatctttctgagcgatctctttaaaaactgtggcaaacatcacctattggtcttcgacttacactgtactgtatgactgaccctattacccctacctaatatgagttctaccgaatttggctcgacacatgaaccccctcggtgcgtcaaggcttactggataagggctacacaaaacggccgcaagctctcaggtcttctagttcttgaaggcccgatcagctcttggcgtctcccgttactgaccctggtt

SEQ ID NO: 78748 - DNA, 1103 bp, Zea mays
  Clone ID: MRT4577_171845C.1
cggccgtgccgggaagcccacgcgtccgcaagcccagtcagcctgtctccgtctccctgaatgccaccgaaccgcaagaggcgagcagcagccatggatcccgcggcaggaggcgccggccagcagcgccagaacaaagcttcggcgggcaagaaggtaaagaagggcggtggcagcggcgggagatggccggcggtcaagcccaagaaggatctccagatcaatcgcctcaagggcacccacctcctcaccattccagacttcttcacttctgcggaggcaaaggctttcattgatatcgctgagtcgatgggcttcacgcaccagggcagtttggggccactaaagggggaggcttacagagacaacgatcggatatctgtgacggatccattgcttgctcaagccatttgggaatcaggaataaacaggatttttacagacatcagcgtctctggcaaagtagcaacaggattgaatccaaatatcaggttctacaggtacactgaaggtcagcgttttggtcggcatatcgatgagagtgtctccctcgctgatggttctaaaacgtattacacgcttttaatatacctttctggcaaaggaagtgcaaaggattcatctgggcaagctcttgtcggaggggagactgtcttttatgatcaaagaggtggagttgtcgctgaggttgctccagtgcaaggtatggcactcctccacctacatggcgccaaatgtatgctgcatgaagctcgggctgtgaaaaagaatgccaagtatgtactccgttcagatgttgtattttcttagctgaagaaatgcctcaacttgtttcagatcaacccgtctagggcataatggatctggggctgggaagtacttctagttactttccccttttgtaagttgtcatacaaagagtcctgtaaccttttcaatgttggaagtgattcttttggcatcagaaccgtgatctgttatctgttgatgcatttgctgttgtctaagtacaaaagaaatcattatatttagccgcaaacattggctgacaaaggaagttcagtgacgtcttgaagccgaataaattgcttctagtttttggt

SEQ ID NO: 78749 - DNA, 238 bp, Zea mays
  Clone ID: MRT4577_171846C.1
ggggaaaaaaaaaaccaaacccatgtttaaaaaaaaaaaaaaaaaaaaagggtgtaaaaccagaaaaaactggataaaaccctaaaaggtggggttgttaaaccagcctttattggaaaagggtaaaaaactttgacaaaaccttaaaaggtttttaaaaaaccacaatacaacgaagcttttttggtgggaaaaacaagcacggattcccatcctaaaagggggccttttgtttttt

SEQ ID NO: 78750 - DNA, 374 bp, Zea mays
  Clone ID: MRT4577_171847C.1
gaaaagaattttaccagtccaccctaataattaagccaaaactgttactcaaaatacagttaaattacatttgaagttccttgtcataaaaaaaaaaaatgggaacaaatgatggccattcacaaaaaactggtgcaaaacccgctcctaaaaaaaaagggtttcccccttttttttttaaaaaaaaaaaaaggggggggggttggggaaatccttttttttaaataaaaggggggggggcataaaaaacccctttttaaaaatggggggggaaaaacccttccccaattaaaatcaggcccaattttttcttggaaaaaaaggggggggatattttgttttgaaaaaaactctccccttaaaaatccgggggg

SEQ ID NO: 78751 - DNA, 631 bp, Zea mays
  Clone ID: MRT4577_171848C.1
ggccgcttttttttttttttttttatttcttttttttttttttttttttttttttttttttttttttttttttttttttttctaaatactttttttttgtatttttcttacatgcatttctttttgagggcaccggacaatgaatggcaacgattggacgaacgtttggaggacaccccaaagcagggggggggaacggcaacaagtggaacaggagaaaaaggaaaaaagcggtccccgcagcgagcagggggaacgccaacaacagagggtgaataaaaaaagcaacggggctgacaaacaaagcggggctcaagggaggaagccgcccccaagggagcaaccccccccagtgaatgatagcagctggcgcaatgggagaaacccccgcgggtacgcaccaactaactgactgaaagggaagagatgttgcaaaaaagcccaaaaggggcaggcaaccagaaggctgaagggaagaaactactgtggctgaaagaaggcacaagggtagtctaggacaagttgccacaaacggggggccttgaagaaaagggccaacagatgcaccaaagggcacagcaggaacacggctgacagccatcggaggaacaaggaagatgaagggaagaag

SEQ ID NO: 78752 - DNA, 365 bp, Zea mays
  Clone ID: MRT4577_171849C.1
tccaggggcacgctgctcccattccgccgcgcccgtagtcgccggtcctcttgctgcttcgtgctcccgcgcaatcagtgaagacctccacgcgcagcgccgcccgtcgactccatggaagctgatccgtcgccgccgtcggcgtgcgcgctgactgagtagctcgtggagaaggtcgtgctgcgcaccccatctgctgacccggcgatcctcgtccatgctgcactcgtctgcgcacggtggcgcatcgtgaatggcccgcggttcacgcgatgctgtcgcaaccttcaccgctggtgcgagggtcgcagcccccgatgcttggctttcctcccagcaccggcgccgggattcgcttcgtgctc

SEQ ID NO: 78753 - DNA, 555 bp, Zea mays
  Clone ID: MRT4577_17184C.1
cgagtacaagctttttttttttttttttttttttcttatttttttttttttttttttttttttttttctttttttttttttttttttttttttttttttttttttttttttttaaaaaaaaatcccttcccattaaaagggttaattaggggaatggccaaccccgccccccaggggggggggggaacccccgttcccaatcgccgtaaaaaagggaaacaacctttggggggctaggaaggggccccattaaattataacaaaaaaccccgcccggggggccgttaaaaggggaaatcccacccccggggggccgttacaaggggacccaacctgggacccaagttgggggaaaaaagggcaaaaggggttcccgggggaaaatggttaccccctaaaaattccaaaaaaaaaaaaacccggaagaaaaaagggaaaacccgggggggccaaagggggggcccaccccaaattaatggggggggccccacggccccttttcaagggggaaaaccggggggcccagttgattaaaaaaaacgcccaccccggggg

SEQ ID NO: 78754 - DNA, 318 bp, Zea mays
  Clone ID: MRT4577_171850C.1
gagctctttattcggcggccgccgccgccgctatcggcttggacgttgtcccccgctggcgccggaggtcgtgggcgagcgcgtaggcggcgagcatgagcgccagcgcgaggtcgctgagccagacggcggcggccacgccccggacgcccatcctggcggagagcgagacggtgagcaggatgtggagcgccagcgccagggcagcggcgaacaagagtgggcagcgtggcctcctgcgcgctgaggtacgccttgagcgggttgagcacggaggtgacggcgaggtccgggaggaggcagagcacgtaggtcctg

SEQ ID NO: 78755 - DNA, 785 bp, Zea mays
  unsure (1)..(785): unsure at all n locations
  Clone ID: MRT4577_171851C.1
cattgggtacctcgaggccggccgggattgccatctagtccagttccagtccgagcagcagcaagcggcggcggcgatgggctctggatccaactccaaggagggagaggagcgggtgctgagccacggtgacgtggtgctcatccgctccgacctcgcaatccttcgcggtccctgcttcatcaacgaccgcatcattgccttctacttcgcacacctctccgccagcctccaggacgacgacctccatcgccgagggcggttcccactggaccctcctcatccttgataacatcactagcccctccgtgccccgctttgtccaccacgacagcatcgctggagcgcccaacctcccaatcgctgcccgcctcgccgacgcactccgccccctgctgtcaggcagcaattccaagagggatactgttccgcttatcgaggggcccaccccaaggcagaccaacggctaatgactggtggtgtctatgtcatggccatcgccagggctctgtngcgcctggtggaagagtggccaggaccaacgagngaggcgattggttccaggcggtgagnaancgggggtggacgcccacagcgtcgaggccatgaggaccgacttgctgcagctaatcagcactctcatccaagagaaggccaatgccaattccacacccatgggcgacactgacccagggtcattagaatgatangcagtagattagttgcntggtggtgatttctcaaatctgggacctcttnctgatcttaataagnnatttcttgct

SEQ ID NO: 78756 - DNA, 1119 bp, Zea mays
  Clone ID: MRT4577_171852C.1
ggcgattggggacctcgaggccggccagggttttgggtccacaattccgcattgccatctagtccagttccagtccgagcagcagcaagcggcggcggcgatgggctctggatccaactccaaggagggagaggagcgggtgctgagccacggtgacgtggtgctcatccgctccgacctcgcaatccttcgcggtccctgcttcatcaacgaccgcatcattgccttctacttcgcacacctctccgccagcctccaggacgacgacctcctcctgcttccgccctccatcccctacctcctctccaacctccctgactcggccgccgtcgccgccgtcgccgagccgctccgcctcgcctcccgccgcctcgtgctgcttcctgtcaacgacaatcccgatgcctccatcgccgagggcggttcccactggaccctcctcatccttgataacatcactagcccctccgtgccccgctttgtccaccacgacagcatcgctggagcgcccaacctcccaatcgctgcccgcctcgccgacgcactccgccccctgctgtcaggcagcaattccaagagggatactgttccgcttatcgaggggcccaccccaaggcagaccaacggctatgactgtggtgtctatgtcatggccatcgccagggctctgtgcgcctggtggaagagtggccaggaccaacgaggaggcgattggttccaggcggtgaggagcggggtggacgcccacagcgtcgaggccatgaggaccgacttgctgcagctaatcagcactctcatccaagagaaggccaatgccaattccacacccatgggcgacactgacccagggtcattagaatgataggcagtagattagttgctggtggtgatttctcaaatctggtacctcttcttgatcttaataagttatttcttgctgtttctgcttgtttgggaagaggaggaacagatggagcatacacacttcgtgtaagtaccaaacttttaaggaaaacacgtctcttgtgtgagtcaagtcttggcaaaatccagttgcaactctactattattattgtctatgatcaaaatgctgcaatcaatactgtgcttccgtttgc

SEQ ID NO: 78757 - DNA, 191 bp, Zea mays
  unsure (1)..(191): unsure at all n locations
  Clone ID: MRT4577_171853C.1
gccagtatgtcgtggatcccggccatcaagagcgacgccnagatcgtnaacccnccctggttcgacggctcggggtcgctcttggtggccgggctctggtcttgttggcggtggccgccctcgtggttttttgctttcgctcgcgttcttgttgggggggggcgatgtctttttgcgtttctcgctttttt

SEQ ID NO: 78758 - DNA, 141 bp, Zea mays
  Clone ID: MRT4577_171854C.1
caccgttctcgacactctttaatactcaatggtaccactttcaccgacatccttatcgccctcatcatgttcttcacactacacctactacctcttctgcatcttcctcatgactaacctcctttgccacatctactacac

SEQ ID NO: 78759 - DNA, 570 bp, Zea mays
  Clone ID: MRT4577_171855C.1
gacttcacgatggcatcgaataagcccacaaataagctaacgccggccagccatgaggcagtccctgacattggagatgctgagagcatgcagtcgcaccatatataggtggcgttctccgtcaagccgtcggtacgcctgggctgcggtggcgactaggtcgtccaggagctcgccaccaggttgcccaaacgtagcactatggtgagtaattgttctgttctgtgcctttggtctgcagacctcgatttcatgcttcctattatgttctgaatctggataggggtgcgctatgatggttgcttagttagtttggccacacggaagactggggcacagacgcgaacgctggagccttactttttcgttcaaagtctgggtgtatgtttgctgaattgctcacgtgaggctaggattattcacactgatattttgtcctcctggccaaagatcaataataacctttacagtacctaactcatgagcacctcggcaaaataccaggtatagattatcaattttcaacaacatccttgtccaaaaaaaaaaaaaaaaaaggcccctaggggc

SEQ ID NO: 78760 - DNA, 1944 bp, Zea mays
  Clone ID: MRT4577_171856C.1
cggcttcgagaaggatatctggggataggccaaggaatctcggatagcaatatcaaggaaatacctcagtcagctggtgctcaagtctccaatatcactggttttgggaggagtttggataatagtctgccggaggcatcatgtagagaggaccttactgtaaatgatactgttgtaggtagaggagaccatcaactgtgttctggtgaacaaaaggactttaatatggaggttcgtttaccactacctgatcagcattgttttggcaggattaacactgagtctggttctgttcgacatgaaagtaagaacattgaagttcgccaaggtagtggaactgctcagcggctgggcatgttatttaaaaaagaaaaatctcaccttagaatccttaatcgagatattcagaaccatgttaatcaagttgtcaattttcctttgaaaggaggtaaacaaaaggtctgccctacttcagtaaaatctgaatcgttgaaaatgaaagcaaagttagtgaggttcaatgttgaaactggagtgcaacatggcagtgttaagcaagtgacatcaagcactttggacacaagtccaatgaggaaggatggtagtatgattacatttgctctcaaggaagctagagatctaaagcataaagcaaatgatttgaagaataaaggacaagaacttgaaagtacaggtctgtacttcgaggcggctttgaagtttctgcatgttgcgtttcttctagaaactcctagttttgacatttcaagacaaggtggtggaggtcggtcaatgaagatgtactctgaaactgcaaaattatgcaatttttgtgcttatgaatatgaacggtgcaaaaaaatggcttctgctgctttagcgtacaagtgtgtagaagttgcttacctcaaggctgcatactacaaacaccgtactgctacaaaagatcaacaggaacttcaggcagctgtacagataacccgaggtgaaccaccatcgccttctgccctagatattgataatttaaatagccatggatcatcaaatgcctcctcattaaagggtgacaattcacctcatgtgccaggcaatcatttgcctctagctattcacaaccaagcccagctgttgagattacttgcctatacaaatgatatgaacttggcattcgatgcaactcgaaaagcagaatctgtgattgcatctgctactgggtgtccggaaagaggtgttgttggtgatggccttgcttcggtaaaagcagtcttggatcttaacttcaacaatgtgaatgaactactaaggcttgttcgggtttcaatggaatcaataagcagctgatgatgtgttcaaaaatcggaattgcacagaatgtcacacagtgaactgctgatattggattaacatgcaatctgtgctccgtgatgctggttgcagctatgtcagtatatttttacagtgcaaaacaaattaacttgaaatcaagcattccctttcctaaattggaaattatgtgaaccaaggttctggaattcgggagcggtactgctgcatcttgtggtagtgtaaccatgcattgatgtgtgtttgtttcaatgggtcagaggagatcgattgcgattacctgcactacctgtcatgtacgggcgctcgtacgccaggcagcgtcgcgcccgtgacaggcgccgcgcacaggagcgcgatctgggagatcagcaggaacctatggaaagcagtggccaggaaggaaattagaagaatggaaagttgagggaaggaaaggagagattgattagtgattgattaagtgattgattagtgattgattagtgttaccatgtttaggcttgcctaaaataaaggctctaggacagcaggccgatggctatatatgcggcacaaggagacaggaataaagggcagcaaacaagttatctcctctcc

SEQ ID NO: 78761 - DNA, 217 bp, Zea mays
  Clone ID: MRT4577_171857C.1
tcctttcgtccggtaggcttctcctccccctggggttttttttcaggtacgctggggttccccaggcttcgggttcgtgggtgagcagatcgagatggcggcataggatgttgagtaccgctgttttttcggcggccttgcctgggccacggacgaccacttcctacacaacgctctttagcatctaccagcgaggtccaacgagttctcaaagatc

SEQ ID NO: 78762 - DNA, 407 bp, Zea mays
  Clone ID: MRT4577_171858C.1
gcatgattgagacatctagctagaacttttagatttcaatgatggaagaaagctcagggggcagttatataacattatgggcttccagttttggcatcttctattgtgttaagaaaacttcattttaactgacaaagtgtcatcttactatttagtttgctaaagggatgttactcatggttagtccacaatattttacatttttacatatcttgtagctcttcactttcaggtttcttaaggaactagacttacaaaagagttgtgtgaaacatcaagaccatcagtggattaattgttttcccaagtcttcaacatcactagaatgcttgaatttttcctgcttgactggggaggtgaatgcttgtgcactggaggaacttgttgcaaggagtccaaatcttaaa

SEQ ID NO: 78763 - DNA, 517 bp, Zea mays
  Clone ID: MRT4577_171859C.1
ccggccgggagggcttgctagctagcaaaactgttggtatggtcccccgtcaatccgccggaaatggtgttcggcctcctcgcccacaatcgcggcgaaaggcagtccgccatgggcgtcgccgtcggctgtcaaattcaccggtccggtcatgatgccaaggctttcccgccttgctgctcctctcggaggcgcgtccacaggtcacggcggcggacgggtgggcgggcgtacggtgcgagtgcaacccgagtcagggtcgggtttcccagcgccgtcgccctctcgtctcgccgctccggtggatgatggagcgcgtcggcgtcggcgtcgttggatccctctctttgcgcggctgcggatgggttggagcgacagcgaccgagggcgatcggatgggtaaggtcttgttcgtttgtaccggatttgtgggtcggaacgattcctagccggattgcttctctaatttatataaattttgatttgttgaaaaaaaaaaaaaaaaaacccgcggccc

SEQ ID NO: 78764 - DNA, 693 bp, Zea mays
  unsure (1)..(693): unsure at all n locations
  Clone ID: MRT4577_17185C.1
accctcgcggncctgccggggtacccgtgcgcagtcctggagatttttctacggagcttatctcattcttgcagcgctcggtgcccagccgtgggcttgccgcaccgtcgcccagctccttcccggcttctccctggctcgccgctcgcccatgggagtcacgtcccggccaagcccccagcctggatcccctatttctctccttgcgcgcgcgtctccagttgcatggccgcgcctggttccttgctccatccctggccgaagctcctccctgcacgccagcctgcagctcgccccagtccctggtcgctccttcggccgagttctctgttttttcttctcccagttttctgcgctcgccgagcaacctccatggccggatctccctgctctttgctgctcgccccaagctctcagccatggccgtcgagtccccctgttcccatggccgatctcggttctatttgccgcggcagccgactctgctgcttgctcccctgcgcgccgtgctcctctgctctctatctgcgcgcgtgctgtgctcgacgtcttcccatggcactcgatgctcttctgttgtctgcgccgnggagtctgcgcgctcggtcatgcctatctcgcagtgtttggattcagcgtagctcgtgtcctattttctgctcaccagcgtgtcctcttggctcgcttggcccg

SEQ ID NO: 78765 - DNA, 112 bp, Zea mays
  Clone ID: MRT4577_171860C.1
caaagaaatttattacaattgttcagaaagagcgaacggttcaggttcatatgcagctgatgtaaaattatgtttcaaatcctccaacatatgataaataccctcactttcc

SEQ ID NO: 78766 - DNA, 1426 bp, Zea mays
  Clone ID: MRT4577_171861C.1
cctcgcggtccggaattccggggtcgacccacgcgaggtgaactgtaatttcagatttcagagcgcgcaagaaccctcttgaccaccgccgccgccgccgcgaagccaagccaaactgagtaagcagctatggagggatccgccgccgctccgctccgcacgcgcatctgcatcatcgggagcggtcccgctgcgcacacggcagccatctacgcggcccgcgcggagctcaagcctgtgctcttcgagggctggatggccaacgacatcgccgcgggcgggcagctcaccaccaccaccgacgtcgagaacttcccgggcttccccaacggcatcatgggcgccgacctcatggacaactgccgcgcgcagtccctgcgctttggcaccaacatcctctccgagaccgtcaccgccgtcgacttttcggcctgcccattccgagttagtgcagactccacaaccgtcctcgccgatgcggttatcgttgccacgggagccgtcgcgcggcgcctccacttccccgggtccgatgcatactggaaccgcggcatctccgcctgtgccgtctgtgacggtgccgcccccatcttccgtaacaagcccatcgccgtcataggcggcggcgactccgctatggaggagtccaatttcctcaccaagtacggctcccacgtctacatcatccaccgccgcaataccttccgtgcttccaagatcatgcaggccagggcgcttgagaaccccaaaattaaggtcctctgggactcggaagttgtcgaggcctatggcggcgcaaacggcggcccattggctggcgtaaaggttaagaacctactgaatggtgaggtctcggatcttcaggtgtctggcctcttcttcgccatcgggcatgagccggcgaccaaattcctgggcggacagcttgaactcgattcagatggttatgtggaaaccaagccaggttccactcacaccagtgtaaagggtgtatttgctgctggcgacgtgcaggacaagaagtaccgtcaggccattactgccgctggatcagggtgcatggctgcattggacgctgagcactacctgcaggagatcggtgcacaggagggaaagtctgattgactatatttaggtgtagcaaccagcaatccatcgaatagtcagttgtcggtgctgaaagccgctctctgatgcgcgtttatgccatgggttgtcatgagctcacgattgagatacctgatgatttatgctgcttagtagcatgctattcttatcgttaggatccagaagtatgtctgaactctgaactatttactggatacctattcgtgattactgccttgaagtttttccttagatatcaaaaaaaaaaaaaaaaaaaaaaaaaaaaaaaaaaaaaaaaaaaaaaaaaaaagcggcctac

SEQ ID NO: 78767 - DNA, 291 bp, Zea mays
  Clone ID: MRT4577_171862C.1
gacgcacgcgtccgttgaatacacagtaaccccaggaatcgattaaatcaccggaaagacaatactagggcttgatcatataccccacatgctggagcacatctagctaaccaccctatgctataacctctaaatgcacgacattaaacatactcaccagcagtcacagaacaatttttcaatacccaatcctcttcaaaatatttcttgaccgtgcataacattttacgcataaatcaacacattacaataaccatttatggtcaactgcacagcctctgataaaaccta

SEQ ID NO: 78768 - DNA, 341 bp, Zea mays
  unsure (1)..(341): unsure at all n locations
  Clone ID: MRT4577_171863C.1
gcttacataatctccgtcgaggacgccaggaggctcaaatacatgccggaaggagacaaccctgttccgagctgcctcgacctccaggacgatgaggaaggccgaggcttaagcacccaacacgacccactctgtataagccgacgacgttcttgtcgagtcagttccgtacatttcgatgtcggttttttggtagttaaactgcaataggcctttcctcataaggtcagtaataaaatgggttatatgaaaaaaaaaaaaangggcggccgctctagacgatccaagcttacgttcgcgtgcttgcgacgtcntagctcttctattgcgtcccctatctt

SEQ ID NO: 78769 - DNA, 239 bp, Zea mays
  Clone ID: MRT4577_171864C.1
ttttaatttttttttggtcacaacgtccattattgttacggttttgatgtttgacaggggaacaaaccaggggcccctcacatatcaaccgggtgaaccccgccactgaaatctgttcctaaagttcaggtgcacactttcaaatataggagacaggcttccgttccacccggcagccgaggcccaatgtgttaggagcaaaaatttacagcaccctggaaggacacggccgaagacaa

SEQ ID NO: 78770 - DNA, 337 bp, Zea mays
  Clone ID: MRT4577_171865C.1
gaaatgaataggatgcaaaaaaaagggacgcgcagcgcgccgctcggactgaaaatgaaaaaaaaaaagtgacggaagcccttttccctccccaacaagcaatggaacgcaacatcccccgggctttttctttggaggcggggcgagcaaaaatccgatccatgggcccctattgtccgccccgcggaagggcagttggctcaacacctccaaaccggacctcggagccggtccccgacgaaccggacacaacacgggcaacacaacccaaacgacatgtttgccccccggttgcacacccccggcggccaagaccaagaggatcctggcgcgggcc

SEQ ID NO: 78771 - DNA, 289 bp, Zea mays
  Clone ID: MRT4577_171866C.1
aaagggacacagggaggtacaacgtactgtgaatttgagatacaagggcgtatataagacgacaccccggggttagaaacccattaataccaccaagtaaattcaccctgtcctgaattatacacccggtatggccaatggcaaatataaaaaaggcaagcacccatggttgttactgtgagtggacggatcgttctaatgagggagttttaaaaccggttaatgaggcctttgttccaggccaggacaccgatctcttttttttaaaaatttgcttgctttttggcct

SEQ ID NO: 78772 - DNA, 391 bp, Zea mays
  Clone ID: MRT4577_171867C.1
gtgccgctgaacgccacgctgctggccatcgacaggaagggcgtgggcgggaccaagctcagcacgggggcgccctacaccgtgctgcagtcctccatttacaaggccgtcaccgacgcgttcgcggccgagacggccatgatcccgcgggcgccgcccctggcgccgttcaagctgtgctatgacaggagcaaggtggggagcacgcgcgtgggcccggccgtgcccaccatcgagctggttcttgggaacgaagccacgtcgtgggtggtgttcggggcgaactcgatggtggccacctatggcggtgcgctgtgcctcggcgttgtggcccgcggcaaggctcctcggacgtctgtggtgatcggcggtcacatgatggatgacaacc

SEQ ID NO: 78773 - DNA, 166 bp, Zea mays
  unsure (1)..(166): unsure at all n locations
  Clone ID: MRT4577_171868C.1
ctcgccnatccctaaaatccagcgcgtcgcctagctcgggggggggccattgcctccaaatccgtgggcgactcgcgtgctcccagatcccgctcgccggattccccgcggtgacctctgacaagagcattccgcgcgcggggcctgccgccgtttccgccggctc

SEQ ID NO: 78774 - DNA, 107 bp, Zea mays
  Clone ID: MRT4577_171869C.1
acctcctctaccaacgatgtactctggtgcatttatgggactcgtcaaaagcatgctgcgcaaaagtccagatcatagaccaagagctgcagaactgcttaagcatc

SEQ ID NO: 78775 - DNA, 1909 bp, Zea mays
  Clone ID: MRT4577_17186C.1
gggtaccacttgccgggacctggaccgccaatggcaggcgccatccgctttcatgacctcactgttacacggctcgagctgcctagctgtggctgtgagccccttctaccttcttggctgtttgctagctagaggccgagaacgaagccagccccgttttctgatccttcgcacagtggcgctgcacgtgcctctctcgatctgtcgccttctcctcttcttcgccttgtaccgtctgctgagcagtgagcacggaacaagatcgaaccacggcctcacatactcgcgcatatggcgacaatggcagggcgtcttgttgcccggacgtcgtcctcctcggccaagcgccagcggttcagctccgctgttctcctcctcgctctcttccagagctcgtggtgctacgacgacgcggcggcgacgacgacggtggattacggttacaacaacgagcacgaggccgaccgggtggcgttcctccccgggcagccgaggagccctccggtgtcgcagttcgccgggtacgtcaccgtgaacgagcgcaacgggagggcgctcttctactggttcttcgaggcccagacgtcgccggcgcacaagcctctcctactctggctcaatggaggacctggttgctcgtccgttgggtacggagctgcttctgagttggggcctctcagagtcaacagacacggggcagggcttgagttcaacaattttgcgtggaacaaagaggccaacttgctcttcctagagtctcctgctggggttggcttctcctacaccaacacatcatccgacctcaccaaactggatgatgctttcgtagctgaagatgcatacagcttcctagtaaattggctcaaaaggtttccgcagtataggagccacgaattttatatctccggggagagctacgcaggtcactatgtgccacaacttgctgaacttgtctatgacaggaacaagggcaacaccaacacacacatcaaccttaaaggtttcatggtcggtaatccactaactgacgactactacgactcaaaggggctggctgaatatgcttggagccactcagtagtgtcagacgaagtttacgagcgcatcaagaaggtctgcgacttcagggtctcaaactggaccgatggctgcgatacagcgatgagcgccgtgttcagccagtaccaggagatcgacatctacaacatctacgcgcccagatgcaacctccctccgtcgtcagctgcacttgcacttgctgttgacaaggcagtcgtagccaacagacaggaacatttcaggcgaaggatcaggatgttctccggatatgacccgtgctactcttcgaacgcggaaaagtacttcaacgatgcaggtgtgcagacggcattccatgcgaatgccagtggagctcggaaatgggaagtttgcagtgattcaattttgaggtcatacaatttctcggtgctttctgtcttaccaatctactctaagctcatcaaagcaggactgagagtgtggctctacagtggggatgcagatggtagggtcccggtgatcggatcgcggtattgcgtggaagccctgggcctgcctgtcaagacgcagtggcaaccatggtacctgaacaaacaggttgcgggcagatttgtggagtaccatggcatgacgatggtgacgatcagaggagcagggcatttggtgcctctcaacaaacctgcagaagggctcgcactcatcgacacattccttcagggcaaacagcttcccacacacagatgacaagagtacttagggttgtgattgtgatgagggttattgttttcaaaaaaaaaatcaaggattggacaaactatgtgccccacacacacgggctaatcagtaaggatttcatttccagtttctgcat

SEQ ID NO: 78776 - DNA, 267 bp, Zea mays
  unsure (1)..(267): unsure at all n locations
  Clone ID: MRT4577_171870C.1
catcacctcaaataanccatanctctancntnntnnaantaaanctttctttncntntattacatntctaatgccaacccaatcntcanctttnnaatnaancnttctttttttcatatactcaaattttttgattgggggaattcttttttttttttttatnnattattatattaaatnaaaaaaactnatnnanaataaatncttctccccctttctacaanttcaaaaaattnnntaccttcccnnncnnccnctcnaannnca

SEQ ID NO: 78777 - DNA, 1850 bp, Zea mays
  Clone ID: MRT4577_171871C.1
ttgttaaactttcacaaaaacattttctcatctctttcctttttatcttaatacatgctaatagtcaacttcctcgcaaatgatcacctcaccaaacaatgggatctacacatctatagcagtataaaacaacatcaagacatacatacacctctgctcaaatgctggtatctttgtgccgaatcgcactgattacaacgctgagtttggagctccccccatcagacttcacttctggatgccattgccagccaacaacaactcatccatccatacgatgcatgccacgatttccacgatagcggctacgctcgaggtctcctgtattctcatcgcacaagcacatcttgtgactgttgcttccatacatcacaaggctccacctcaaccttgaacggtttatcgatccactggaaaacacagccacgtgcctcaacattttttatcgtatgaggaggcatcatggatctgaatgcttcatgaagcttcactttcgtcaaaccaccgcaaaccataagagttgctgtcaagccattgggtgttatacccgctaaatggacgatggtcatgttctgcaggccggatatgctagaaagggaaaggagcccaacatcggtgactgaacagtatgacaagtttatctgacggaggctatgagcgaactgggaaaggtaaagcattccagcatcattaatcccaaagcatttcttaatatcaagcttggaaagcagcctgcaccccatcgctaatcctgagagcccaatcgatgaaacactggggcagccacgaatctccagagtattcagctttgcgcattttgagagtgaaatcagtgagcggtctgttatttctgtgcagtatgataggttgatagactctagcatcggacaactctgcgcaatttgaataattccatcatcgctaagaactccacacctgtacaaatcaatctcgcggagttttgggcaagaccttccaatgtggctaagaccttcatcacttatcttcaagcaaatgccaatttttaggctcgaaagttcgctacatctggcaagagctttcaatccttcatcatccaaatcactgtcagtaaggtccaactcttccaagtgagaacagtgcttcccaatcagttggagtgctccactggaaacatggctacaagactccatcctcagagagatgagggaagtgcacgaactagttatggccgctagtgaaacatcagtaatactgcgacaacaggtaatgtccagcttcagcaggttctttagccttgacacaacaaaagagagttctgtatctgtcactccagatgacttgctaagacttagctcccttaaagaaacacaagaggtcccaatggctttaggtccattggccatgaatttgcagccttccagcttcagggcctgcagtttaggaagcttctggaagtttctcaccatagaaggagtaacaggacagcagtatgaaagatccagttccaatagattgggtaccgacttcaggatggatgaaactcctacatcggtgatattctgacactgagacatatcaagcacctgtagtgatttactgcattctctctcaagactaacaagagcaccatcatcgattccaatacaccccaccagtgtcagctcttgaagattgggtagcttcatgatagaaggcaagctatcctttgtgatctgaaacagaagacacatctcgattttattattactccagcacgataagataagtgggtcgctaggcactaggcacaaagctgcaagagaaactagagttggctactagtacggttctgctgatccattgttgcaacgatgacttttcttgcttac

SEQ ID NO: 78778 - DNA, 752 bp, Zea mays
  unsure (1)..(752): unsure at all n locations
  Clone ID: MRT4577_171872C.1
tcttccgggttaaagagatgcttggtttttcctactactcttatcccctacgtaatatactcgatggtccagcaactaagcgccacactatccatcctccccttgatccctcacttttttccgttgacacagaaataataatagtagtagtagtaatataacaatattattattattattaattgtaaaaaactgtggtgccttccaaggctgtttgtatgtaataaattcattattgttggttgctctagaagcatcttcaatagtcattctagatttcactctctagattgtctacactctttacattatcatttagagagtcattgcataacaactattttctatatattttcaatttccaacattgtttctacattttgttcgtactctagagagttattcatattttctatatttagttagcgaaaacccaaaatagaacatagctatatttaaataaaaattcacataagatgttggatgatatttttttacaaatatatctatttatatagattagaaaataatatagatagtgtcttagaatttctctaacgggctcgcgtggatgaagaacaccagtggaagactgatgttcactttaaattaaagtcggttatttagactgttgcagctgcagtctataaagaaaaaaaatactagaaacagtagaaatcagtatgaattaaagccaaacaaacagtaccatctnctgtccggctgtcatcatggggcgatctcactgcact

SEQ ID NO: 78779 - DNA, 216 bp, Zea mays
  Clone ID: MRT4577_171873C.1
gtctactgacggcgcaaaaggcgccaagtaccggtgtgatgtgaacattgtagacatggctcgcgcacacatactatgcctggaacattttgctatggggactcataagatctatgccaatattgtggtgtagatgacaagttctaacttgcatactgcctcagcgagcaaagttaaagcaccaccttccatagtttggataggcggtatgacatg

SEQ ID NO: 78780 - DNA, 296 bp, Zea mays
  Clone ID: MRT4577_171874C.1
cccacacgtctcgagattatcagacgctttcattacaaatttcttctttttaacccaggatcttggaggatctcggaacaagaagctggtggtctattaatatttaccaaataacacattgcaaatccacttacatgcaaaagatctaccatcaaacaatttgactaatagattatagatcaatttgggaactaccaacgatttagattatcttcatcaaaacaaccatccaaagaacatccattgccacataaattcatctaacctttcttcattactaacaaaataaaacttaa

SEQ ID NO: 78781 - DNA, 275 bp, Zea mays
  Clone ID: MRT4577_171875C.1
cggctcgagttttttggttcgggtgaaaaaacattttgctgctctcagcttttcaccccttgtttccacatgctttaggtcggactcgctacatgaaattcctagcctagttactagtggctcgcaactcgcaaatcatgcgccatccattgcagcattgcgctgcgtggtagcagctcgaccagcaactccagtcggccagtcttacttgcactggcagtgggccacacgttcctaatccccttcccagcgccgcaaaaaatatctcgtttctg

SEQ ID NO: 78782 - DNA, 354 bp, Zea mays
  Clone ID: MRT4577_171876C.1
aggacttgtttgggtactctatttttgaggtggattagagtgcatcttaaactcactcaaaagctgctccatattggaaccaaccaactaaaagggccggaacagggagtccaacgagggccggccattttttgggatgaattttgcctcgggtgccacggggcaaacacataccttggggaagcctgaaatacaagctaccatggccatgcaagcgtacgttcaaacaaagaaagatttggtttagctgaacatatccgtacacaaggagcccccggtcactacgcgtagattgatagatattatcatcacgacgatcgattatcccgccggtggctaaagaggaatggttgg

SEQ ID NO: 78783 - DNA, 152 bp, Zea mays
  Clone ID: MRT4577_171877C.1
caatcaaatatttaaatttccttgagaattaaatttaaactctgaaacttgagccaacaacacaaattattcaacggcatccactatttttgtgaaaaagccaacaaaaccagccctttgggttgtctaccaaaaattaaaatccccctttt

SEQ ID NO: 78784 - DNA, 391 bp, Zea mays
  Clone ID: MRT4577_171878C.1
actacgcgttcgcccacgcgtgctggcacgcgtccgactaatctactctacaccagatatggttctcagttctttggtgcgcagtcagagaggcagcggcgatgtctgggcgcgtcaaggtcggcatgggtctgatccagggcggcgcgaagcgccaactgaaggtgctacgcgacaacatccatagcatcaccaagccgatgatccggaggctggttaggatgggtggcgtgaagctcatctaggagcttatatactaggagacccgaagcgtgctcaagatctttctcgagaacgtcatccgcgacaccgtcacctacaccgagcacgctcgccgcatgaccgataccgtcatgtacgtcgtctacgcgctcaagcgctagggacgcac

SEQ ID NO: 78785 - DNA, 604 bp, Zea mays
  Clone ID: MRT4577_171879C.1
cattgggtacctcgaggccggccggggagccctgttcccgtcatctctctagggtctccttctgcctgtgcctctcgccggcccgccggggcgatgacgaccgccaccgccatcgtttcccttcatgtcctcgcgctgatgcatggcctccccctccccaacccggcaggggctgccacgcaccgcggctccctctccgcgctccccgaagatcacagcccgctgcatgactgcccccactaatccgaccgccttcacagcacctcgaagacaatacgtctgctccgagtatcccgacctaggaaaccgctgcatctgtacatgatcatagttgtaattgaaggtcgagatacctagagtgccacgcacgattggtgtgactacctggacgctgacgggaacctccgcagacatccaagatggaaaatctgatttctgctcttatccacactcctgtgacgcctgacaacctgaacagtcgtgagctcgctcgcgtgagcaattccacatgcggtctctgcagcttctgctgcccaggctgcggcccaagctggtgatgctccggaacattctgatcatccgtgctgagacttgtctctggaga

SEQ ID NO: 78786 - DNA, 257 bp, Zea mays
  Clone ID: MRT4577_17187C.1
aagctttggcggatgaagtgccacgccatatgatggattggcttcattggtcaagaaaggttggcagaaaccaggaccaccacgcccgaaccgtgctggacaaaatcatgccgccagaagttgtagggagaagcttggtgaagtccatgagataggaatttggtgagatcacatagcagattgccagaaaagtgctctatgaaatattggtagaagcactgggtgggttcgggatattggctccgcggccacaaatg

SEQ ID NO: 78787 - DNA, 266 bp, Zea mays
  Clone ID: MRT4577_171880C.1
cccacgcgtgcgagcaagacggtccatgatgtgatcagaatccatattatccagcttggaagagggactttattcacatgtgttaccgcctctccaagaagtttgccctaccagccttaaggcggagcgtataagaatcggccaacgaagagggggtgcactgccttcccaagacgtcctacgtagacgtgcggttgtcgcaagacaatagataccagacgaagagcatgccggaggacccataaaaggtgaggtgacactagcaa

SEQ ID NO: 78788 - DNA, 2394 bp, Zea mays
  unsure (1)..(2394): unsure at all n locations
  Clone ID: MRT4577_171881C.1
ccggccgtaccagtcagtccaccacacagcctacggcctgccctgcctgtagagggctagagctacaagctacaactctgaaagtctgaacagtgcgccgcccaaccagagatggcgccgcataccaccgccgacgacgacggggaggggaacgcgctgtcggtggagcgcgcgttcgcggaccaggcggtgccatcgtggcgggagcagctgacggtgcgcgccttcgtggtcagcttcttcctggccatcatgttcagcgtcatcgtgatgaagctcaacctcaccacggggatcatcccctcgctcaacgtctccgcggggctcctcggcttcttcttcgtacgcctctggaccgccgccatcgagagggtcggcctcctcaggcagcccttcacgcgccaggagaacaccgtcatccagacctgcgtcgtcgcagcctacgacatcgccttcagcggtgggtttggtacatacttgtttggcatgagcgaaaccatcgccaagcaagcaacagaggctgacaatcctcagaatgtcaaaaaccctcacatcggatggatgatagggtttctcttccttgtcagtttcattggcctatttgctcttgtgcctctgagaaaggttatgatcgtcgactacaaacttacgtatcctagtggcacggcgactgcttatctcatcaacggtttccacacgccagagggtgccaagcttgcaaagaaacaagtgaagactctggggaaattcttcttgatgagcttcctctggggcttcttccagtggttctacactggtggagataattgtggattccagaacttccctacattaggccttcaagcttataagaacaagttttacttcgatttctctcctacctatgttggagttgggatgatctgcccccacattgtgaacgtttctgttctactgggaggcatactttcctggggaataatgtggcctctaattggcaaccagaaggggaattggtacgacgccagtctcccagaaagcagtctccatggactgcagggttacagggtttttatatccatcgcaataattcttggagacggcctgtacaacttcgtgaaggtgctcattcgcaccaccgcggggttcatatcgatgatgaagaaaaacagcacgcttccggtttcaaacaatggcagccccatcactgaaggtgtttccttcgatgacgaacgccgcagggacctgttcctgaaagaccagatccccagatcagttgcctacggagggtacgtggctgtcgctgccatctcaatcggcacccttcctcaggtcttcccgcagctcaagtggtactacatcctggtggcgtacatcttcgcgcctgtgctggccttctgcaacgcgtacgggactggccttaccgactggtccctcgcgtccacctacggcaagctcgccatcttcatcttcggcgcgtgggccggcgcgtcgaacggcggcgtcctcgtggggctcgctgcctgcggcgtgatgatgagcatcgtgtcgacggccgccgacctgatgcaggacctcaagaccgggtacctgacgctggcgtcgcccaggtccatgttcatcagccaggtgatcggcacggcgatgggctgcgtcatcgcgccctgcgtcttctggctcttctacaaggccttcgccgacatcggcctcagcggcagcgagtacccggcgccctacgccatcgtgtaccggaacatggccatcctcggcgtggacggcttctcgtcgctccccaagaactgcctcaccctctgctacatcttcttcgcggcggccatcgtcgtcaacctggtcagggacctggtgccgaagaaggtcgccaggttcatcccgctcccgatggccatggcgatcccgttctacctcgggtccttcttcgccatcgacatgttcatcggcaccgtgatcctcttcgcgtgggagacgatcaacaaggccaaagccaacgccttcgcgccagcggttgcgtcggggctgatctgcggcgacggcatctggaccctgccgcagtccattcttgcgcttgccaaggtgaagccgcccatctgcatgaagttcttgtccaggtcggtgaatgcccaggtggacggcttcctcggaagttgaactgttgaaatcgtgacgtgcatgtatattgtgttgatgcaccacgcgtgctgtaaaacgtaccgggtaatgttgtgtcgacacgttctggttttgatgtacatgagtaagtacactagtcgtagggattgctaaattaatgtttggcgtatacgcgtcagcattagtaatgtacatgagtaagtaccaacatctgtatgttacctgggttcaaatttcataactactttcccgtnnaaaaaaaaaaaa

SEQ ID NO: 78789 - DNA, 602 bp, Zea mays
  Clone ID: MRT4577_171882C.1
ggggcccctcccaaaagggggggggaaaaattttttttccaaaatataaagcaaattttttgggaaaagggacaatcccccaaccttcccccttaaaaaaacaaaggggcccctttttaaacaacttttttcgttaaaaacaaggggggggaaacaaaaccttgttttccgtccaccccatgcttttttaaaaaaaaaattttttttttttttacaaaacattaccccccataaaaaccaaaatctacctacctccttaattttaaacaaaaaattccagttttaagttaaagctttcccctaaaaatggccttgccaaagggggttaacaaagggggggggataaacccccccagttgggcaaaaagccaatttcaggggcgaaaaaaagttttttccatgctccccccccaaataaaggaacaccccatttttttttttaggcggggatagaacaaaaaatttttggggacgaggaaaatttcctaacaccctcggaaatcctgaaacccatgacggatttttttgctggaacctttgcgtttgcaaaaaaaaacggggctttgttgcccaaccaaatagctttttttacaccctgtttt

SEQ ID NO: 78790 - DNA, 1413 bp, Zea mays
  Clone ID: MRT4577_171883C.1
cagtgcggcgctcgaggcggccggggcaccagtctgtccacacagcctacggcctgctctggctctgcctgtagagggctagagctacaagctacaactctgaaagtctgaacagtgcgccgcccaaccagagatggcgccgcataccaccgcagccggcggcggcggcggcgaggaggaggcggtggaggaggccagcactctccggcaccgccacagcgctgccaaggacggcggcgaggagggccaggccaacaacggggtcgccgcctcccatctcgtcgccgccgacgacgacgacggggaggggaacgcgctgtcggtggagcgcgctttcgcggaccaggcggtgccgtcgtggcgggagcagctgacggtgcgcgccttcgtggtcagcttcttcctggccatcatgttcagcgtcatcgtgatgaagctcaacctcaccacggggatcatcccctcgctcaacgtctccgcggggctcctcggcttcttcttcgtccgcctctggaccgccgccatcgagagggtcggcctcctcaggcagcccttcacgcgccaggagaacaccgtcatccagacctgcgtcgtcgcagcctacgacatcgccttcagcggtgggtttggtacatacttgtttggcatgagcgaaaccatcgccaagcaagcaacggaggctgacaatcctcagaatgtcaaaaaccctcacatcggatgggatgatagggtttctcttccttgtcagtttcattgggctatttgcccttgtgcctctgaaggttatgatcgtcgactacaaacttacgtatcaggacggcgactgcttatctcatctcggacaccgcggggttcatatcgatgatgaagaaaaacagcacgcttccggtttcaaacaatggcagccccatcactgaaggtgtttccttcgatgacgaacgccgcagggacctgttcctgaaagaccagatccccagatcagttgcctacggagggtacgtggctgtcgctgccatctcaatcggcacccttcctcaggtcttcccgcagctcaagtggtactacatcctggtggcgtacatcttcgcgcctgtgctggccttctgcaacgcgtacgggactggccttaccgactggtccctcgcgtccacctacgccatcgtgtaccggaacatggccatcctcggcgtggacggcttctcgtcgctccccaagaactgcctcaccctctgctacatcttcttcgcggcggccatcgtcgtcaacctggtcagggacctggtgccgaagaaggtcgccaggttcatcccgctcccgatggccatggcgatcccgttctacctcgggtccttcttcgccatcgacatgttcatcggcaccgcgatcctcttcgcgtgggagacgatcaacaag

SEQ ID NO: 78791 - DNA, 146 bp, Zea mays
  Clone ID: MRT4577_171884C.1
ggaggctatagccacgtatgattctatcaatgttctttcttatttctgggaatgcgcaaacataagccaaaggactcccttatcgaactataactggtaagcactctaaaagaaggcgccgccaatgatgggttgtttttaaaacg

SEQ ID NO: 78792 - DNA, 842 bp, Zea mays
  unsure (1)..(842): unsure at all n locations
  Clone ID: MRT4577_171885C.1
ctctcctgcgcgccgccacagcacctacctaagccctaaacccaacgcgcccaccacctgccccgccgccgccggcgagatggccggcgcgcgctcgcaggtcaacaagccgcacaagacgcgcttcgcctccaaggcctcccgccactcgcacaagatcgacaaggtcaggagcgggaagccggcgggcagccaccgcgccgcagttaagggcgcccgtgcggcgcgcctccagcacagcaaagcgatccgtgatcagaaacgcgctgccttgctaaaggagaagcggtcatctaatggctcctcaagtgcaccccgtgttattgttctttgtggcctttcctcatctgcaaatgttgggccacttgccgaagatcttttgacatttgcagcaggaggagatgagaaactgacttccaacaccgttgcctctcccgcctataaacttcgaaccacggtactgcaagcaccatatggggacctcacctcatgcatggaactggcaaaggttgctgatttgttagcattcgtagtgtcagcaaattcattatacaacagcgattcaggcaatccaattgatgagtttggatcacaatgtctatctgttcttcgagccgtgggcttacctagtacagctgttttcattcgagatcttccatcagataccaaaagtaagcaggaattgaagaaagcagcggtttctttcctttctccagagctngcctgaagattgcaggttctatgcagcagaaactaaggatgatttgcatatgttcatgcggcttttcaggagcaacatctttcatcacacattggagaatcagagaccctatgtaatgtct

SEQ ID NO: 78793 - DNA, 305 bp, Zea mays
  Clone ID: MRT4577_171886C.1
ggccgggaccaatcacacaactcgccgtctgccttctgcgttctccatttcagcctctgtcccttgcaagttcaatctcacctccaaccatgggtaaatagaactcccacatcaacattctcccttattgcctatgtctcctccccccatggggccacgacactccacattctctacacccttctcaacaaacaataactagcccacacccctactccattcaaggattgtgtaaacatgcatctgtggtccaagacaaaacagtccctctcctacctccatgaccacctggccgatactatggc

SEQ ID NO: 78794 - DNA, 412 bp, Zea mays
  Clone ID: MRT4577_171887C.1
agctctattggcagcgaaagcgcccagcgcaaggaaaaggcccaattatgctcaaagcaatggattactgcacaaatatatggcgttggcacttcggaagaaggattgcaacaacccatccacccggttataaatgatgacactgacgtgagcaaccaactgcgtgcacgaatttcatctagctgctgctcttgcatttgaagcatcatgacatttcaagctaatcccttctaagtaggcttgacgattcattgacgctggaccatgctattctcgagaatgcgaaatccatcgtaatgacatccagatcacaacttcatgacttgactcatggtcactattagatgacataagcaatagcacgaaatgccgaatcgtgtttggcagaagatactaatgtgtatgaagcaac

SEQ ID NO: 78795 - DNA, 218 bp, Zea mays
  Clone ID: MRT4577_171888C.1
atatgaccgtgccacaggcacatcaattacatcctcactatagtagacctctctgatgtcagaagcatgtatttttctttgcaccatagacataaacctaacatttggaggcaactgcttgagagctccactggcacggtcatatataagttcacagaaaaatgcatgcttataccatccgggagggctggtactgggaggatgaatatgatgtgcct

SEQ ID NO: 78796 - DNA, 367 bp, Zea mays
  Clone ID: MRT4577_171889C.1
agttatcaaaggtcttgtatgaataccgattcgttttgagccaacaaacccctggttgggctcagatataaccttgggattcaggcgacagaccacattatatttgattcaggcgacactacaaaagcagcgcgcttctcttaagaacaaacacctttacataaagacgggttgaattggcgcgcgagtaaatagccgtaaaagctgggagcacacgcttggcctaacggtccacacgaaacaccaacgaccagctgttccgagctcaacgggagaacgatctggtgatgaagacttgccctatattgttgagccacatgctcggaacgggagaggccaaagggtacaggccccgaccccggggtac

SEQ ID NO: 78797 - DNA, 288 bp, Zea mays
  Clone ID: MRT4577_17188C.1
gtatattgaaatttttttctttaacttttaaaaacactttggaaaaaaagactggatggatatggggccacagaaagaagaccaaataaaagggacacgaatggcaacaaacgacaacaccaaggaagcaacacacgggcaactgccagttcgtcgacccacaaaggaacccacaactggttgcttagccaaacctgaagccaccactaaacttccaaaatacggaccggccggagtgcctcctggaagggcttcacagcattggcatagtccacaaagcccaggaac

SEQ ID NO: 78798 - DNA, 258 bp, Zea mays
  unsure (1)..(258): unsure at all n locations
  Clone ID: MRT4577_171890C.1
ctatgtctggattacaagtttactaatttacaacaaggtaagtacaaatcatctctctgaactcataattcaaatatttatacttgctatttggaacttaacgacataacctttttgaaaggaactatttgaacatcaaattaccttcaataatttattcaacaagatatattactccccaaaagggccaatattgntttntgaaagcacaaggcagcatgcatgcaaaaccgggggcttgaaattttgaaagctagc

SEQ ID NO: 78799 - DNA, 281 bp, Zea mays
  Clone ID: MRT4577_171891C.1
catcttttttcatcgttcacttaaacagagttcttactcgcaggggggattttttagacacaatctgcccaaagcacacagggacagaggagaaatacaaaacatcatcaccaaaagatcggctagaaagatcaccaggatctaactagcaagccacaaaacagatggtgggccgaacgaggtcacacccaaagtatggtctcaaggtccaagtaccaaggtagaagtactgacgcaaaaacacatcatactcgcgggggagagttcaacagcaaggacca

SEQ ID NO: 78800 - DNA, 2308 bp, Zea mays
  Clone ID: MRT4577_171892C.1
tcaatgatgccaattataatcttccctccagtggtttcaattaggcggaaaagggcctgaataagagtagatttaccgcttccagtacgccctacaatcccaatctttttcccgccaggaaacatacaacttacaccatgaagaactaatggtagatcaaagtgttgtggaccttgatatagcgttcagacttggtggatttgcatcaacgacaattcaacaccttggaattgttgctgtcatgagcaaagtcacatggcaagttctgattcttatagtccccatggctgttgcatgcatgtggatgcagaggtattatattgcttcatcaagggaactaactaggattttgagtgttcagaagtctccagtgatccatttgtttagtgaatcaattgctggtgctgctacaataaggggttttggtcaagagaagcggtttatgaaaaggaatctttatcttcttgactgttttgctcgccctttattttccagccttgctgctattgaatggctctgcctgcgaatggaattgctttcgactttcgtctttgctttttgcatggcaatacttgtgagctttcctcctggcacaatcgaaccaagtatggctggcctcgctgtaacatatggacttaatttaaatgctcgcatgtcaagatggatattgagcttctgtaaattagagaacaggataatctctgttgagcgcatttatcaatattgcaggcttcctagtgaagcaccattgattattgagaactgccgtccaccatcatcatggcctcagaatggaaacattgaactgattgatctcaaggtccgctacaaggacgatctaccattagttcttcatggtgtaagttgtatgtttcctggcgggaaaaagattgggattgtagggcgtactggaagcggtaaatctactcttattcaggcccttttccgcctaattgagcccactggagggaagattataattgacaacattgacatctctgcaattggccttcatgatctgcggtcacggttgagcatcattccccaagaccctacattgtttgagggtactatcagaatgaaccttgatcctcttgaggagtgcactgatcaagaaatttgggaggcactagaaaagtgtcagctaggagaggtcattcgttccaaggaagagaaacttgacagtccagtgctagaaaacggggataactggagcgtgggacagcgccaacttattgcactgggtagggcgctgctcaagcaggcaaaaattttggtactcgatgaggcgacagcatctgtcgacacagcaacagacaatcttatccaaaagatcatccgcagtgaattcaaggactgcacagtctgtaccattgctcaccgtattcccaccgttattgacagtgaccttgttctggtccttagtgatggtaaaatcgcagagttcgacacgccccagaggcttttagaggacaagtcatctatgttcatacagctagtatcggaatactccactcggtcgagctgtatatagagaggcttagcttaaaaccccgccccaaacctggcaacagaggctgggaggcaaatagcccgtatctgccagtatacttgcttgcgccatagaggtccctgcgaacaccggagggcggcgtagaagacgaggtgtacatgagtgggaggaacactgggcgttccctgacctgaataccgtggaatcggcgagggagcgcggttggtattggtaggcaccaggggaggagttggtgacactagtacattacccgaagctgatgcttcagtatgtatgtataacaacaatgcatactgcttctccctttgcagagtggagaaccaagggaataactcgtgcgtaataagaggagaaagatttgttttttggcatcagactggtgtgtgtgcgcttttgtttgctgtgtccattagaccattactgtatttctctgccaaattttactgtagccggtgccagtttctgcttcagaaattcagcatctcaaatcgccaggtgaaaaaggttcagcaaccagcagtttgctcgatggccgaggctagtaactcatcctgtgctgaatacagagtatcaccacgtcaggttcactgccctgacctgaaaacaatactccctgtggagatgacggctggattacgcagatactgtagtgtaaaataagagatttacattgtagattatactttttacagattaaagctttaaataggagatgaatagactgtgtagtgtaaaataagatatttacattgtagattatactgtttacagatt

SEQ ID NO: 78801 - DNA, 182 bp, Zea mays
  Clone ID: MRT4577_171893C.1
cctcttttttttcctttctttttgaaacaaaccccatcgatcgatggtttttattattttgtggccaatcagccatcaattgatttttcgaacaaacccttcctgcccaacaagactcgaaaaccaccctacacctaatagtaataagaaaccatgaccagatagagaattactccctacaa

SEQ ID NO: 78802 - DNA, 222 bp, Zea mays
  Clone ID: MRT4577_171894C.1
ctcctttctcatcccatctttgggatgtggaccctgaactgtgattgctccttgggtggatataaaaactagacaaggcaagaatcctgggagaccctgtatgggtgccaggaacgtgttggtagccctggcacccatccactccatggagatgccccccaccccaccccaggcacagctcagtggaggctggatgagggtgtcaggagggacactgggaaa

SEQ ID NO: 78803 - DNA, 408 bp, Zea mays
  Clone ID: MRT4577_171895C.1
cagggctggtgtccctccacaatcaggtctggacctaaaaagtagggacgaagacatcatgtctcaacaaaattgtatctaccatatttcacatattagaaacgaataatagtacaaacctctaatcattccaatgcactgtttctggattgtctaacttgggtaacattacttacttgatggctaaatgcagatggtatgattggcatggctatcatcacaggcgcctttggagttgtgggtcttgttgctggtggtataattgctgctgctgcttcgtcatccaggaagagatggggatatcttctctgttgaagtgaataaaaaaaaggggggcaaaagcttggtggtgggtgacagcgctcatcattttttgctccgggggaaggggtgctcacttgtcttttt

SEQ ID NO: 78804 - DNA, 371 bp, Zea mays
  Clone ID: MRT4577_171896C.1
agaaaaaaatgtggcaagaatttaactacggcgtcaagttgacgccgctggtgtgtttctagaagactgcatatagagaggcaactaatgacgcattagcagttctcgacaaggtgatcaaccaatgcatgtgctttattgagcaagcaacatgtggctgctatggagatcgtacgaataactatttcagacatgctgcagatatgcgtttgccatcatgtatagcgcggagtacacggatatgtgagcgtcccagatccaacacatcgtggtgagatacctccaactgcacttgaccggtaaccactacgtgtacccacgttctttaaccaactacttggacaacgagaggtcatgcctatacatgggac

SEQ ID NO: 78805 - DNA, 228 bp, Zea mays
  unsure (1)..(228): unsure at all n locations
  Clone ID: MRT4577_171897C.1
ggcgccggaagnatcccggnagnatctctttacttcnnctcattaagnaagnngcggtggcngnnattaggnaagcnnnatttggnagnaggnagacaggnaaggngacaaggnactttccaaattaccagnnnnacctttnnccnaattttttttttnnnnncccctttttttntttttttttggggggggntgtgttttttttttttttttttttggggggggggg

SEQ ID NO: 78806 - DNA, 398 bp, Zea mays
  Clone ID: MRT4577_171898C.1
aagggaggaacaaaggtttgttttttgccaacaaattacacacatgattgggattccacaccccaccggtcggtttgaccattattcccctattttttagcccccgcttttttttttttgccctgtttgggggttgggcttacaagcaaccccaatcggtgataccaaaaaaaatttactgggttgcaagaacaagaattggtgggcgcccctttttttcaccccccctcccccaaccctggtcaaaagtttggataaataatggattccctccccccgaagaaaaaaaataaaagcaacgcccccaagaaaaaaaaacccttcacacctttaaaaggggccccaaatttttttttttttgggggggaagaaggggaactttggcttgggggtttttt

SEQ ID NO: 78807 - DNA, 244 bp, Zea mays
  Clone ID: MRT4577_171899C.1
aaaaccaccaaaaaattttcatggggtattataaaaaagagggggtgttttaaaaaaaaaaaaccaatttactacattacaactccaaaaaaatatcaaattttaccactttattcacaacacaaacttttatttcccatccccttttacgattgccaaatcctaacatttattcctttcaattaacctttccaatttttcacactttttctccaaaccataaccagttattaatctctaaaaa

SEQ ID NO: 78808 - DNA, 215 bp, Zea mays
  Clone ID: MRT4577_17189C.1
tttagcactaaaaggtgtgctctgatgctatttgcatcaattaaaccatctttaagaatatgtcattggttacttcatataattttgtcttgtaatttgtttgaacttgtaatgcctggagaagtctgcagtaaaaaattgttaggatgcagtcgtactgccaggttcattaattaggtgaatttttggtatttgtagttttcaaaatgatgaat

SEQ ID NO: 78809 - DNA, 299 bp, Zea mays
  Clone ID: MRT4577_1718C.1
caaagtgatactaatatggtcctcatagaaaagagcaatatacggcgcagcacataagtgtgtaaatgtcaaacatggcggaggtggggcaccaacaggacactaccaaatctattcaaccggtgaacctttgatgatgtgcaggtgaacgacatacttctaaacgactacctagttgtgaacgcgatgaaacacgcgaagcaccttggcgacaccgtgggtcgtatactacaagaaacgattcctcacggcgcatgcgtccgatcgaggagcgcaatacaaactctgttttgatgcac

SEQ ID NO: 78810 - DNA, 786 bp, Zea mays
  Clone ID: MRT4577_171900C.1
atggttctagttattcgtagtgtcaacaaactaaacctagacgtaactcatttcggtccaacacacctcacatgcgacacatgtgaggatcgtcgatggatgtatgaaggttggaagaagagaggtgctctatcaagtgagtgggttgccaagactaacatgtttcttgaccatgcttttgctcggtcagagactggaaccgatgttagctgcccttgtagcaagtgtcagaatatttatttccttgacaggaggactatgtcgatagatctttgtaagaacggttatatgcctggctatgaggtgtgggtgcaccacggtgaggacccacctcctcgtgttgtatcagaagttcagtcacatgaagagggggactatgataggatggaagagatgcttgacgattccaagtttgcattctcaaacaactgctacaaggagcttctaaacatgatcaatgatgtactaccagagaatcacaagataccaaaggacatgtaccagtccaagaagttgctcttgggtctcggtatggactacgaaaaaatcgatgtctgtgataataactctatgcttttctggaaggagaccgcgagtgagaagaagtgtatagtatgtggtgagcgtagattcgtagaggttgaaaacgacgattgtttgaccatgacgatcgaggtagcatgtaagcagcttcgttacatgcctcttatacctcggtttgaaatgtttgtttatctccaagaatatagccagacacatgaggtggcacaaagaaggcgtatgtga

SEQ ID NO: 78811 - DNA, 799 bp, Zea mays
  unsure (1)..(799): unsure at all n locations
  Clone ID: MRT4577_171901C.1
cattgggtacctcgagccggccgggacctggacacctggtgtccttctataccacgccactgctaagctgctccctgttcgccaggtcggcgaccaggcgaaacttgctgctgctgctgctgcaagagaagaataggtacacagacagcatggccggagttcaggcgatgccggcggccgtgggcgtggcggggctgagagggtcagggttagttagcagcagcagcaccagcttgttcaccggcgactgcaagaggaaggctcgccgcccggcgtgctcggcctgggccctcaggcagagccggatcggcagcaggagcaggagcaagaggggcctcggcatcgtctgcaacctcgcgggacagtacgaggattccttcgacgacgtccagcggcaactgatgaactacttcccgtacaaggccgtgaggaccctgctgacccagctctacgagctgaacccgccgagctaccgctggttctacaacttcgtcgctgtcaacaagcctaccgacggcaagcatttcctccgtgctctcggcaaggagaggcaggagctcgcagagcgagtgatggtcaccaggcttcacctgtacgggaaatggataaagaaatgcgaccatgccaagacgtacgagaagatctccgacgagaacctggcgctgatgcgggagcggcttgatggagacggtcatctggccgaccgacgacagcagcacagagaaagatcggctgatgcctgatgcctgcgnagcgccagaanacttttccgggttgctgatcaagcttagctccttct

SEQ ID NO: 78812 - DNA, 819 bp, Zea mays
  Clone ID: MRT4577_171902C.1
cggacgcgtgggcgcgaaagccagccacggggacggagcggctagcgagcaagcgaaacagcactatacaagtcgtcttcttctccgtcccttgggccacctggtgttcttctataccacgcgtccacgccactgctaagctgctccctgttcgccaggtcggcgaccaggcgaaacgtgctgctgcaagaagaagaagaagagtaggtacacagacagcatgtccggagttcaggcgatgccggcggccgtgggcgtggcggggctgagagggtcagggttggttagcagcagcagtaccagcttgttcgccggcgactgcaagaggaaggctcgtcgcccggcgtgctcggcctgggccctcaggcagagccggatcggcagcaggagcaggagcaagaggggcctcggcatcgtctgcaacctcgcgggacagtacgaggattccttcgacgacgtccagcggcaactgatgaactacttcacgtacaaggccgtgaggaccgtgctgacccagctgtacgagctgaacccgccgagctaccgctggttctacaacttcgtcgctgtcaacaagcctaccgacggcaagcatttcctccgtgctctcggcaaggagaggcaggagctcgcagagcgagtgatggtcaccaggcttcacctgtacgggaaatggataaagaaatgcgaccatgccaagacgtacgagaagatctccgacgagaacctggcgctgatgcgggagcggctgatggagacggtcatctggccgaccgacgacagcagcacagagaagatcggctgatgcctgatgcctgc

SEQ ID NO: 78813 - DNA, 254 bp, Zea mays
  Clone ID: MRT4577_171903C.1
gttcaatttctttccacggttcttgtagctttctcttgtgaaacgggtactacggggcctcaccataatcacgaactaccccttgtaccaattaccaaaacactattacccatcctacctgttccttaaactgaagttgatgtgaacaaccattgttcattaaacatatcgcacctctatcttataaaagggaggatggggtcccagggggtaaaccaccaaggaagacttgcggagaacaatatccaccggga

SEQ ID NO: 78814 - DNA, 258 bp, Zea mays
  Clone ID: MRT4577_171904C.1
caggcttgagcctgtcacggtaggatagccgtccgttggtgcctatgctcatggaccggacgtgttgaggcacggaggtctggctgatcccactatggcgaccgtggacgacaggactgcctactactagacggatctggtatatctgtatactaagaaggatgatgagatcgcactggaggctctgacagccatggcacagaacgtcgcgatggggggctcgtgtctgaaaaacggtggaaagaaatgagagtgggc

SEQ ID NO: 78815 - DNA, 553 bp, Zea mays
  Clone ID: MRT4577_171905C.1
atgggactgctactttttttttttttattatttttttttttcctcctataaaagccgcgatctgtaaccctcttcacactcaaccagtcctgaaaaccacaacgtcaacaaatggctttactttggacaggggtggagccacactcacaattaccctaggggcggtcacacgaaattattcctgcaagaaaaactaagaccttacagtaacactcatataacgcgcggtctccactccaagaccttcttctagaggtccgaaaagcccatcttggtaatcattccctacacatgcctgcagacatgaactgatggaaaccagactgcgtgtggacccacacgcacatgcccttacggaccgtgcctttcagcctccttagtattctcccaagaggtgagcttgctttttctggccgaagggggcctcctcggagccttgcgccccttatttttctccacgtgcccaaggaaggttttgtcgacggtacccccagcctgctcagcggatacatactccttgatctcttacctgtgctcaaacgctgtgtccttt

SEQ ID NO: 78816 - DNA, 512 bp, Zea mays
  Clone ID: MRT4577_171906C.1
tttaaggcgggggacggggccacgctcctgtgcgtggccggcgacaacctggggctgggggtcctgacccacgtggactacctggcgcacctcgaggagttgcttgcgggcttcctactcggtttgggatcgctcatgcgcccaaaataggtctggatggagcgctacggactctccggcggggctccctgcaccggcaggaagtacctcgcgtaccagtggagcctcctcggcgtcgtcatcatcatcctcctagtcgggtaagctgtaagcaggattggacatcctgattgatacatttatttatttatttattatatatatgcccttcgtagctggccatttgcttcgcccagcatgtacataacaggagtaacgtgactggattctactcttcctctgtcatggctagccatggtgttgacattgacaaccacgctgtgcacgatactctatgccgttttgtgtgcgctcatatataatgcacaagcctcaacaactcattattcctt

SEQ ID NO: 78817 - DNA, 252 bp, Zea mays
  Clone ID: MRT4577_171907C.1
cccacgcgtccgtctggacatcgagacccttctgcttcaccactgactgcatcctgctgttgaactagctcagtttgagcacaggattacatttcatacactttaccagctcttctaagaagccctcaggataaccgaaatggccaggctgtataaagtgtgcatcctgacatactcgtgaatgtcagatctaagatgtaagatacggtgatttaagaccgacgcattgacagtcgcttataacgtcacgac

SEQ ID NO: 78818 - DNA, 268 bp, Zea mays
  unsure (1)..(268): unsure at all n locations
  Clone ID: MRT4577_171908C.1
attccacctacgcgtacgctcttatcctctcaatttataacccaatcactttaaactcctatcaacatatgctcccctctcctatgtgtcatctccnatcaagggaaaggaatattatctacttcctccagcatccctccgtcaacataccgtcgaatcaaggctaccctcctaaggacagctatcccacaacgttttaccactcatccatctacccctcctctactcatttctaccctcatcatttttacccacaacaggtcttccc

SEQ ID NO: 78819 - DNA, 139 bp, Zea mays
  Clone ID: MRT4577_171909C.1
gattcgttcccacctccgggggtcacgcccgttaccaacacccccacctcgggtcgtccgccagttcctttttgccggggggcaaccatttccatttcccaagattacagggaccacaagaccagggacgcctccacca

SEQ ID NO: 78820 - DNA, 168 bp, Zea mays
  Clone ID: MRT4577_17190C.1
acttggtgggccttccaaacaaacaggttttttgaggagctcaatgcagccggaaagaagctctcgatatggccaccatgcctgattatggcccattgaaccagcttcggacgaacagatacacaagtgccagacaaacaaaggttcaacctaccatcctgccacatg

SEQ ID NO: 78821 - DNA, 264 bp, Zea mays
  Clone ID: MRT4577_171910C.1
ccctcgagttgatctttctttttggtccaataccttgacggggtgctcttccctcgagttgatctttctttttggtccaataccttgacggggtgctcttgtgggtaagcagacacacttccgtagctgagatacgtggaatacatcatgaattgctgacatatgaggtggcaacttcaactggtatgctacaggtccacaagcctctttgatctcataaggcccaatatagcgaggagctaacttgcccttgatcccaaatct

SEQ ID NO: 78822 - DNA, 744 bp, Zea mays
  Clone ID: MRT4577_171911C.1
gccggccggttcggggcgttatctcacatgtgctctgcttctctcctcccctcttaccagtcctcttcgcgatatggttcgtcacggccgtcggcaggggagatggcggcgcttgatgaggagaagcgctgcttggtcttctggattggctggaccgccaagaaccatccactgctgaatgtcttcctgtcctacaaggacatcctccactacaagattatcagcgatcgcaacatcatgagtatctctgacttcacccttcatgaccttctccaccgataagtccgttgctcgacgcatacctatatacgtggacggtcaagagctcgcacggagcgttccatctgcgatgaccgcgtcctaacacgtgatgcaagacatcagacgaattggattaggaaccaatatacgagacaattctcttataattgtggctaaatccaagacaaggggtatggcctttccgacaattattgcgaataacgccacagtagggcatagtgctacgttacaaggatgcactactgaggatgacgcttttgttgtgattgcggctaccctgttagatgctgttgctgttgaaaagaccgaaatgtgagctgctgcagcccttgtacgacagaatactacgatcccttgagcagaggtatggtcaggtaaccctgccagatttcggacgaagctccagatgacgagatcactttcattgcggaatcagttgccaagtattccaatctgtccaag

SEQ ID NO: 78823 - DNA, 277 bp, Zea mays
  Clone ID: MRT4577_171912C.1
cctggtctaattcttctgctctacacatgcagatgctgaaggcgagaagttgaagaacttgtgcaaaatcgcacagctagttagtaataaagcttgaatggaatcctgcttttctgactcccagattaggatttctttgactttacctgccctttggaaaaacgaagcgagtcaggggacgttcctgggcatgtatggtcaaactgccctcgctctgaagattcaatgttttaattggccacgcagagctggatgccacagtgtgtaagcatggaca

SEQ ID NO: 78824 - DNA, 584 bp, Zea mays
  Clone ID: MRT4577_171913C.1
gtcacggtcagctagtctttgctgccgagaagaccactgcagatttattttttttatcttgcccagaagtggtcatcaggtcagacgaacgaaattaatctactggcactggggttgctcaattagctgaccggttctgaatttggaactttctaactgatgaatgattttttacacacgcaagcatgttcgattggctttaatcggtaccgacttcttctacgttatttttgtctgattgcagttgcagtagtctaaacagtcctactttaattcgaagagaacaggctcaggaaaactatctgattagggaaatctggtcctttgctctgccacttcattctgttgctagttgctaaatagtccgagtcagcaagattttagattttcatattttttttggttgaaaatatactaggccgacaaattacaaaacactcgttagttttgagaatcgttcctttgtcttgttgcaaagaaaccagtcgaccgagtttcaaatgcctctaatgcagcatgtggaagttccggtccctttcgccaaaaagaatgagcttctgctgaagctggaggcagcaagcatc

SEQ ID NO: 78825 - DNA, 354 bp, Zea mays
  unsure (1)..(354): unsure at all n locations
  Clone ID: MRT4577_171914C.1
ggggaaaaaagatgcaactttattttccgtagataaatccgaaatactttagctggggggggccccaaacgtaaaaggggggggcaaaaccctgctttgttttgttttgaatatgatntttttgaaggggcggggggggcactggagtttagagcgggacatggtttccagcccacccaattcacaaggggggggggaccacagaccgttttttttgtttgtaataacagcttctcccgtgggtcatatggtcggatgggacagggcccaaccaaggtgacagaacacctcccgttttcaaagaacacgccgggccgggcgtaacaaagggcgcgcgcgcggtgcgactacccc

SEQ ID NO: 78826 - DNA, 484 bp, Zea mays
  unsure (1)..(484): unsure at all n locations
  Clone ID: MRT4577_171915C.1
acaagcagggccagtcagagtgctaagcagtagcagtgaggacgaagatgtatttgtccccctagctgagaggatcacatgtaagcttttgacgagcaagcagctgtgccctgagctctctagctcctcacttaaaacaggtttggatggccaaaataatgccagcgcaccatgtgactggaaaaggcaaccatggccaaagattcccgatgttcccctccacggtgccttagagaagagtgctgcaaatgatgaggactctctcttagacgatcagtgtcgtcagcttccaacctaccaggctacctgcagggagctggcagtctccaaaacaaattccgaccgacctctacccaagaagagaaccaagcatattcagacggtccagagcggaggctctcagggatgctggcgaccgggacagcaagcagaaaggaaacaccccgagcagcatgaaagaaaaagaggcngagatgatcagagc

SEQ ID NO: 78827 - DNA, 296 bp, Zea mays
  Clone ID: MRT4577_171916C.1
gcaagactgctggcaagcccaagccagcagcagttcggtagcccctggtacagagcccaccgcgggctggatctgggcccactgtgcggacaacccccaagctacctgaccggcgagttaccctgctactacagctgggacaccggggggctgtccgctgacccggagactttcggcaagaaccgctagctggaggtgatccactgccgctgggccatgctgggcgcgctcgggtgcgtgttcccggaactggtcgcccgcaacggcggccagttccgcgaagccgtgtggttcaa

SEQ ID NO: 78828 - DNA, 451 bp, Zea mays
  Clone ID: MRT4577_171917C.1
gcgtgcgacgacacgctggcccttgcctgcgggccaccgccgatgatccagttcgctgtctcccccaacttggagaagatgaagtatgacatggccaattctttcttcctgttctaagaccgtagcagcaaattaataatttcatagatatctgtatgtagtgccaccaaaactagccgacttgccagggtaaattttcgtgagatgcatgggaatcatatattggaaggattatagtgaagtcgtgtacacttaacactattgtactctgctatagcctagaatttgagagaagcacatagacaggccattcatgtttttcccctttagaatctggaactttgaaatatgaggagactgtttatactaaaggtcagcatataatcacgttctggatcagtttcattaaaaaaaaaaaaaaaaaaaaaaaaaaaaagaaaaaaaaataaaa

SEQ ID NO: 78829 - DNA, 277 bp, Zea mays
  Clone ID: MRT4577_171918C.1
gcagcattttgaagcacccctggcgtgcactgcacaggaacaccaggtccacattggtgtgctgtgtcctccttaccaaatggctcttggagaaggtgagacagaagtagctgagactccattcctgagatcttcacttaacaactcctgcagcttgtgcagagccttactagaaatactgaaggcagaagtccctggaaaatagggcccataactaattagtaatttgtttttgagtaatttgttaccgttatttgagcacattctgcagtccagg

SEQ ID NO: 78830 - DNA, 186 bp, Zea mays
  Clone ID: MRT4577_171919C.1
aaaaacccatgttagactagtacatatcaaaacccccattatgagacgcaaggtatatatattttttggtaggggatggtatttccctttggtttccctctattctcctttatttcattttcaaatttggttcacaaatttgggtgccataatccaagaatgggatgaatttttccggacgcgggg

SEQ ID NO: 78831 - DNA, 289 bp, Zea mays
  Clone ID: MRT4577_17191C.1
aaggtgaaattgtagctgaaggtagtccttccaaagatcaaacggatgattttggactcaagctgaaagaagaggctatgctgaatagagtactgaaggaggcagtcttgtcaaaagaagttgccattgaacaattgcaatctgatctggcatcttcacttcgcatccaagacgttatgagaaacgagatccagagggttcaggatgagctttcttgcataacccacaaagctaagcagttggagcatcaggtatccaagaaggatgagtcaatcgatgagatccaaca

SEQ ID NO: 78832 - DNA, 153 bp, Zea mays
  Clone ID: MRT4577_171920C.1
tcttcctacaacacttaatactcaccagaattaattttcacaacaaaaaaaaataataacacgtcatgtatatttataacggagctctgctccactcatatacaacacaatcatatatctcttaactacttctatccatatctcaaaataaat

SEQ ID NO: 78833 - DNA, 1143 bp, Zea mays
  Clone ID: MRT4577_171921C.1
attcggctcgagaccggcctggcgatcgccgacctgggctgttcctccggcccaaacacgcttgtgctcgtgtcgacggccgtcgccgccgtccgccgccgctgctcggagctccggcggcagccaccggagctctgcgtgcacctcaacgacctcccaaacaacgacttcaacctggtaaccaagagcctggccacgtacgcgaaagcccaagaaagcttgggccctcctgtcctgaccagcatcgttcccggctcgttccacgcccggctcttcagcaagcgtagccttcacctggtctgctcaaacgcgagcttgcagtggctctcaaaggcacctgaagagctggtgcagaacgggatcccgttctacgacagggacgagtcggcgaggcgtgctcggcgtcctgcagtcatccaggcctatgcccggcagtttcgcagcgacttcacccagatcctgcgcctgcgagctcaggagatggttcccggaggaaagatggtgttctccctccttgggcagcgccccgacgacaaaccggagaacgccctccagcttttcgaatttataaatgccgtcctacacgaaatggcgtccaagggtttgatcgacgaggagagactccactctttctacataccggtgtatgggccatcagagaaagagctgagggagatcgtagaagctgagggctcgttttcgatcgacaagatggcgatccatgaacctcctcctcctcggaatgccaatctcactcccaaggcaagggcgggcgggttgagagctgcaatggaaccgatcatagtgcggcatttcgaagcatctccaccagccatggacgagttcttgaggatcgcggagaagctcatcaaaatgtcacatgtagaggatgagtatccaaacaaacccagggctttcgttgctgcgtccctcaccaggagggcatgaccgcatcacgggaatacatgcatgcatataaactatggtaataccattgccatgttttgccgaataaatcttatatcatgtacagtgatatccactggattatttacacgcactgtgattatttccatattaagagacaatattccatatttccataattccatgttttttaaaaaaaaaaaaaaaaaagcggcc

SEQ ID NO: 78834 - DNA, 1300 bp, Zea mays
  Clone ID: MRT4577_171922C.1
cccacgcgtccgcagcagtgccacggagccatctcccccggcctctatctctatctctctcgtcttgtcttggcctccttgccttctcccccctccgtgccgtggccagtgggtgctgttgcaagttgcaacttgtccctcccaacccaaggcagcaagcaaagcacagcagtgctgttgcttcacgcccggcaggagcagcgacgagccgacgagaacagccaaggagagatctgcagaccggtcggtcgatcgagatgaagagccggaggcagagcagcgggggcagctcgggcgcctgcgccgcgggggagaggaacgcgcacagcagcggcggggggtgcaagctggagaggaaggacgtggagaagaaccggaggctgcacatgaagggcctctgcctcaagctctcctccctcatccctcccgccgccgccgccgccgccacgcacgcctccctcctctccgacgccgcgtcggcggcggtgtcctccaatcccggcaacaagcaggacgcggtgacgcagctggaccagctggacagcgcggcggcgtacatcaagcagctcaaggagcggatcgaggcgctgaagcagcggaaggcgggctgctgcaacggcggcggcgcggccacggaggctgcaacggcggcggccgggtccaccggcggcggcggaggcgtgcgcatgccggtcatcgaggtgcggtgccaggacgggacgctggacgtggtgctcatcagcgaggccgccaggcccttcaagctgcacgaggtcatcaccgtgctggagcaggagggcgccgaggtggtcagcgccagcttctccgtcatcggggacaagatattctacaccgtccactcgcaggcgctcagccccaggatcggcgtcgacgccgccagggtctcccagaggctgcacgcgctgctgcttgctccgacgatcctcgtctgagctgagagagacctccagaccacggcctatgcaaccaccgtgctaatggcgtagtagtactctagtatagtactagtactgtatgagttggtagtcaaagctgcagcctgcagcagagagcggtgcagtagcggggaactataaaccgccggcgcattcttgctggtttctttgcagttgtgcatatttaggagcgagcaaagtaaacacaggctgcctttttgtttttgtttttgtctctcccacctcttcgaaccagtagactactactgctactacttgtgtctatcagtctatgctcggatccagtgttaattgttttaccagaaataactacagttttgctt

SEQ ID NO: 78835 - DNA, 334 bp, Zea mays
  Clone ID: MRT4577_171923C.1
ggtgataccaaccttattcttcgggaattcgggaaaggtggagtaatattgagacatcactctggtccaagagatggaaattggatccacatattgtaccaggtaattatacatttatctactgttgtgcttccgtatttctgttgtactatttactttaattttctctaactatgtttcacaaagtagtcatattagcttaggctgctctgtagctaaccagcgagattagttgccagtgaactgaaacaactacataaactcatttgggctcccccattaggttgagtaaattcttggactggtttaatataaggtcaatttttaggtgcac

SEQ ID NO: 78836 - DNA, 669 bp, Zea mays
  unsure (1)..(669): unsure at all n locations
  Clone ID: MRT4577_171924C.1
accctcagttggtcacccgatcgagtcactgctcactactgcactgcaacttccggcaatattcagcacggcgcttccgtctccgccccggtggcttgctagctcttcgacggtccttgctgcgccatggaggaaaccccactcccacagccactggttcctcgcgtcaggctcggcgcccagggcctggaggtgtctaagctggggttcgggtgcatgggcctgacgggctcctacagcgccccgctcagcgacgacgccggcgcctccgtcgttgcgcacgccttccgccgcggcgtcaccttcttcgacacctccgacttctacggcccccacaccaacgagacgctcctcggcaaggcgttgaagcagctgccgagggagcaggtgcaggtggccaccaagttcgggatccagcagtacgcgtacgacgagggcaggggcgccgtgtgcggccggccggagtacgtgcgcgcctgctgcgaggccagcctgcgccgcctcggcgtcgactacatcgacctctactaccagcaccgggtcgacaccaccacccccatcgaggacacgatcggtgagctcaagaagctggtggagggaggnngaaggtcaggtacattgggctctcggaggcgagccccgacaccatccggcgtgctcacgccgtgc

SEQ ID NO: 78837 - DNA, 177 bp, Zea mays
  Clone ID: MRT4577_171925C.1
cccacacgtgcgcaaggttcgagttcgtcaccgtctagtacgactgtgctatgtacgaagaggcgaggagaagatgcagatcttcgcgaagaccctcacggagaagaccatcaccctcgatgtggacagcagcgacaccgtccacaacgtcaaagacaaaatccaggacaaggaagg

SEQ ID NO: 78838 - DNA, 190 bp, Zea mays
  unsure (1)..(190): unsure at all n locations
  Clone ID: MRT4577_171926C.1
aagctttttttttttttttttttttttttttttttcctttttcttgtttactcgttttgcggcgttgtgtttcggtgtgtctcccttctccttgggtggctgtgtgtgccttgccctgnntgaaccattgnnntggggggggggggggtgtcgggnaaaaggatgtttggaaactcatcttctctgatag

SEQ ID NO: 78839 - DNA, 403 bp, Zea mays
  Clone ID: MRT4577_171927C.1
cagtcaaggggaggggcatgggttgtgaatctgaacactgtattctaatacattgtgttaagggggcctaaataggcatataatgacgcggtgcgcacccgggcagacgaaaacgccttaaccggctgtttgggggccttcatcctggggacgaaaccacaatggccccgagggagagggcagcatgggtgtccgagaggcggacgaacatcgtatggacaacaggcagaagcgcctcatgggccaagaccaatggaggtggggggatcagaaccagaaggccggtgggctgagataattaatctgggatgggatgaaagagaggtctgggaaagggtgcctttctgcatgggggccgcccctcccaaaatgaaaatataagccgggtctccggacgaggggg

SEQ ID NO: 78840 - DNA, 238 bp, Zea mays
  Clone ID: MRT4577_171928C.1
cgagcggtcacctgcaggggcagcaatatggagccggcggtccccgacgttcgtgttcggcggtgccgccggcgagagctccgagcagacgcccgtcgtcgtcaggggtgccgccggcggcccccaccacaggagcaaggtccacggcggcggcgcgccgtccaagaatctcatggccgagaggcggcggcggaacgcctcaacgaccgtctctccatgctccgctctattgttccca

SEQ ID NO: 78841 - DNA, 313 bp, Zea mays
  unsure (1)..(313): unsure at all n locations
  Clone ID: MRT4577_171929C.1
ccggaagagcgggcgccacccacgcgaccgcccacacgaatgtctagtaataggccaacgcgaacaagnnggaacgacacgcaacccaaggggacacagagaggcagacggagacacaccagcagcccgcaccgcacacgaaatgacaaacgccggcgctagctaccgacggcgggaggggcaacaccgtggacctgactgaaagctaccgccgccgaggacgggcaggggcaaaggcgaggtgagccaagacgccgcgccgcaccccctggcgctcgagtgtcgcggccaccttaaactgcggaggaggaag

SEQ ID NO: 78842 - DNA, 408 bp, Zea mays
  Clone ID: MRT4577_17192C.1
cgccttatccgacctcacgcactacaacgctccggacaactacctggagctactgcctgagatgaccattgggggcctgttcagggacggtgctcgtggccagacagcggcaactaggtgcccgcattcgtgtactggcggaagaagggcttccggacgggggggctcacgatggtgacggagcaagtggtgtgagactgcagggccgacgggaacaacggtcgcagcgcatgatccatggacagcgccttctcgttcatggacgccgtcgcggggctgccctacagggacgcctactcgcacctgatggtggaaggggactggtaccactggtccccccactgcgaggcgctcgagactatgtccatgatacgaggacttgccgttgctcgacgagcaggcgatcgt

SEQ ID NO: 78843 - DNA, 309 bp, Zea mays
  Clone ID: MRT4577_171930C.1
gcgacagagacaagagctacaacagcttgtccaagaacagcgctgaggcactgacgcaccggatcaagactaggacgaagaaggccacacgcgagttcctgtgcttgaaccccaggttctcctccaggctcagctggagctccacctggaagaacacaccctgaggccgtgccaagagcaactacttggacaacgtcacacacttcagcttggacaaactgaagctgcagagggtaacgctctagatcataacatacgcgtacctgaccaagtgcacatgcatcttcctgtcaccctccaacgtcacaa

SEQ ID NO: 78844 - DNA, 335 bp, Zea mays
  Clone ID: MRT4577_171931C.1
atcgaccgcgttttttttttttttccttccttttcggaaaccaaaaaaaccaaacttgcaaatctttcccttccaaaaagtgaaaattaaccgcttgatttttcttcccccccccaaaaaaccctaatagtaaaaacaaaaacacttttctttctttggcgccccccccaacggtctaaaataccttgcccaaaccctaaatcggggggcggataaaactaggcccctaatcccacaatttcatttaacccaccccccccaaaccgctattcccctccttggggccctccaccgggggccggggggggtcaaaaaaaaatcccttcaccaagctt

SEQ ID NO: 78845 - DNA, 1352 bp, Zea mays
  Clone ID: MRT4577_171932C.1
cggacgcgtcccacgcgtccgagctaatacagaaagtaaccctgaacttcttccagatgctgttacctacacaacattactcaagggtttaggaaatagccgtgacctttattcagtcgtgaagattgttgtggagatgaaatcttcactaatttcaatcgacaggactgcatacactgctatggtagatgctttgctagcttgtgggtccatcgatggggccctttgcatttttggtgatataataaagcatgctggcaagaacaatgatttgagacctaaacctcatctttatctttcaatcatgagagcttttgctaccagaggtgatgttgatatggtcatgagatttaacaagcgcatgtggctggattcagttggatcaattagccgtgccgccaaagaagagacacatgagctattaatggaagctgccataaataataatcagatagatttggctagagggcttctaagaagaatagtaaatgagaaagaatgtttctcttggacaagtagagtaggcctggtcgcagttaaagttgaaagcttatctggattcaccaactctcttctaaggccccacgtatttccacagattatcttgaatgatccagttgagaagtatatggttccatttcaagaatctcgaccattacccgccgacttaatattgcggaaggttgtgatgcgtttgttgaaagagcgtgcagttcctcttgtggatgattggggaggatgcattggcatagttcaccgcgatgattgtaccaagctggacgcacctcttatttcaatgtctagagggccacctctgtgcgtacctacttcaaccaccgtggagcacgtcattgacctcctcctgagaaacaagtccgagatggtgatcgtggtgaagagtggtaacatgtacgaaggcagctacacatccagctcaagacccttgggcgttttctccctcgccatactatggagcttcaccggcgactactcgtcaggatcagatgatgtccccgacgcaggcatctcccgggcagcaaaacccaaaccagacgccgaggcctgcaaccacagctagtttggtgtttcttttgctcagcttatagcaactccgcgtcgtgttgccgggcaaactagtcatgtaatggtcctccagttggacaaggggtgcatgcgaaaaaaggttttgatcctaaaaaaaaaaaaaaaaatactgcggccaagactattagatgcccaaagcgaaagtgccagtgggctggagatttcctccccaaaaaaaaaaaaaaaaaaaaaaaaaaaaaaaaaaaaaaaaaaaaaaaaaaaaaaaaaaaaaaaaaactcgagggggg

SEQ ID NO: 78846 - DNA, 1688 bp, Zea mays
  unsure (1)..(1688): unsure at all n locations
  Clone ID: MRT4577_171933C.1
ctcaatgacacaaaagaaaagaagaggtctgatgaaccaccaaaatatccaggattcattcttcagacgaaaaggaataaagaatctaaactccgttcaacatccctttcgttggatggcctcctagattatactgccaaggatatagaggagtctgtatttgaggtctgtgttttgtaattactttttgttagtatatatcaaaagggactactacttgtgcacctttatatgttttgctgctacctagttggcaaatttgagcatcccacaccacgtaactgaagtctcttttcatttttttttgtgtttgagagctcatgcggatgtacactgatctggccttctattcctttttcagctctctttgtttgctgagccattcagtgaaatccacgcgtccgcttcaacacagaatgggttgtgttatcctgtcttttcttgagaaactgtacaggcgttatgttgtgaagaggaatcaacgcaaacgccagagagaggaagatctaaagaaagaagagaagaaatcctcagagaagcgatccaagaccatgcatgagactataattgaaagtgttgataacctaggaggcagtgttgaagtgacaaaagaggatgaagaaaagatgagcaaagatcaatcagcaaatgttcatgctgaactgccaaaagagggtcagataaaacttggcacagatcatccaattgttaaccatggcgaaccagcaaaagagggtgatgaaaatatgaacactgatcattcagaagctgttctcgataaacctgcagctgatgcaaatatggcagaggaagatcctgaatacgaggaagatcctgaagaaatagaaatatatgaagatgatgaggacatggatgatgctcatgctggagcacagaatggagaacagaatgagaacacaaatgacagagatgttaagccagaagtagcgacagcagatggtggaaataacagaagttcaacacaacctgaagtaggaaatattactaatatccatgaaagagctgcttcaatggaggacaaactgtctgtggcagagaaaggagattctgtggaaggtggagaaaaggtagttagtaaggaggttaagccagcaaaagatgaggtggtcgacaaggacctgttgcaggcctttaggtactttgacataaatagagcaggatatctcaagatggatgatttaaaatgtattcttcacaacttgggcaagtttttatcaagcagggacgtgaaggacttggttcaagttgctcttgttgagagcaattctgcaagggacactcgcataatctatcctaagcttgtgaagatagttgacctgtaatctggcactgcttggcccatgtgagccccttgaagttaactacgctatcatcgatgagtcagttatgaaaaactattttctttatttataaatggcttcactgtcattttttggttacctgttcgtactattatgttgtacggagccacttttgctttcttgttgaatatttttttattgtaattgtggagtcattaacttggcaaccaatgcttattgtaagcatcaaggattatcacatttcataaatgagggcacttgaaaaaggcgacgaacattgtattaatgcttattggtcttgtcgtttagctaacgaagctgaattaagaaattcgnatattttgt

SEQ ID NO: 78847 - DNA, 785 bp, Zea mays
  unsure (1)..(785): unsure at all n locations
  Clone ID: MRT4577_171934C.1
ggtaccgcgnccttcccgcgagttttttttttttttttttttttttttttttttttttttttttttttttttttttttgggttggggtttttttttttttttttttttttttttttttaaaacccaggggggcccttttttttaaatgggggggaaacccaaagggcctttttttgaaaaaaaaagccccgggggttgccgggccccctccccgaaaaaaaaacccaaccccccgggggggggttacccttccccaggaaaaagggaagggcccccaaaaaaaatggggggtttttcccagggggaaggccttccctttaaaggaaaacaaaaaaaccccaaacaaaaccccccccgtttcccccccccttgacccctaatttgaaagggctttccaaaagcccctaacccccctgggggaaaaaccggggccccttaatcccaaccccggttgggccgaaattttcctcccggaaccggggggcaaaatttccaatcggggcaaaaaaaacccaaggggggggggaaaaaaaaaaaggggttttttgggacccccccccccaaaatttgggggggccccccccccccgggccttttgggtcccccagggttcccaaagtttggccccccaccctccccaaagtttttgggggcctgggaccaaccccaaagcccttgggaaaaccccccccccaatggggggaagggggggttcccctgggcaagggccgggggttttttgagcccaaaaaacaagcggttttgagggcccaaacaggggggcc

SEQ ID NO: 78848 - DNA, 838 bp, Zea mays
  Clone ID: MRT4577_171935C.1
cctcgaggccggccgggccgggggtatttcgccacctcgcgctctcacctcccgccgccgccacacgctccggctcgtgttggtgctcccctcctgcctacggcctaccccatcgagaaaatcccatacaagttggtgctctcacctcggccgtttgtgctacttccgctgctcctggtgctactgtcgctgcttcctggtgccgccgcaggtattgcccaaacttgaattgaactggacacaaaagattctctcatggggcgtcgtccagccttttgccctcccctactatccaatcgatgtgataggacagcggcaccaaactcgtccccaccaattcatggtggcaaaccatgcactacatctgaggttagcctcgtgcacctctctgctgcagcagcacgccgtcgtgaggagttggcgaccgaggtggaggaggaaagcgacacctcatttatctcctagtgataagaaatggttcaacatgtaagattcttcaattacatatatattgatgagaaatggttcaacatcacaaaaaaaactttaaggtactatactgcccctgatgagcagcagccgatacgaacatgtaagaacaaaaactatattccaagaatcatgtttctgactgctcttgctcggccaaggtttgactcaagtggaaattgcacctttgatggcagaattggttgctttccatatgtaacctatgttgccgctaagcgatcaagcaggaaccgccttgcagggacaatcgagatgaacccattctctcgatcgataagagtgtgatgagagatttcatgattggaaaggtctaccggctattcatgcc

SEQ ID NO: 78849 - DNA, 1417 bp, Zea mays
  Clone ID: MRT4577_171936C.1
tgaaacctcgagaccgggcgggagcacatcacccttctctagtctcaatggcgtgctcactcccgctccacgcccccttctcctcgtcgccccgcatcctctcctaccgccccgcgcccagaaccctccctctgttccgccgagggctcagggttccgtaccaccgctccccttccccgcctcgcgcgctcccggacgttgctgcgggggccgtggcgggcatccgggacgcgctcgccgacgccttcttgacgtcgccgccgacgtggcggtccgccgctgccagcaacctcgctgtctttgtctccggatcgccgttgcttctctcgggactgtccgcctccggcttcgccgccgcctatctcttgggcaccctgacgtggcgcgcgttcggagcccagggtttcctcctcgttgtcgcatacttcgttgtgggcacagcggttactaagttgaggataagacagaaggaagctctgggagtagcagaaaaaagaggaggaagaagagggcctggaagtgttattggttctagcgctgccggttgtgtttgtgccctactatcgatatatcatgctggtggtacagcgtcctctgagctctggagactgggttttgttgctagtttctgtactaaactaagtgatacagtttcaagtgaaatagggaaggcttttggaagaacaacgtacctggtgacaacattaaaggttgttcctagaggtacagaaggtgcaatcagtattgagggtactattgctggaattctagcgtctgtgtttcttgcaggtgctggttatcttcttgggcaggtggatgtatcacaagttgtgttatgcgttcttgcttctcagattgcaaattatgttgagagctatattggggccactttacaagacaaggaaggttttgaatggctgaataacgatattgtcaatgtactgaatatctctattggtgccatattggctgttctaacgcagcagctgctcgtcagttggagatcttaatttttccttttgacttaggtctgcatccactattcgaattttattcttgtagtagctgccatattttgcccatctgaaatgtaatcatagattcacatttgggcccatcctaactttctctaggttccggtctttgttatgcctactgtgaaaatgcaaaactgtctttccttcaaaaaaaaaaaaaaaaaaaaaaaaaaaaaaaaaaaaaaaaaaaaaaaaaaaaaaaaaaaaaaaaaaaaaaaaaaaaaaaaaaaaaaaaaaaaaaaaaaaaacaaacgaaaaaaaaaaaaaatcctaaaaaaaaattcctgctacaaaaaaaaaaaggggggcactcccatactttttcaactctcactaatattaattcaatctttaagccccttttataaaaaacccaaaat

SEQ ID NO: 78850 - DNA, 362 bp, Zea mays
  Clone ID: MRT4577_171937C.1
gagcctataaacatagctttcccaagtacttccatgaagaggggaaaaaaaactttttatatcccaaccaacacacggtaaaaaaaaaaaagaatcatgtttccctaaaaaaatgcgctccaagagaaccaacttgttcaatagccagcaaaagaagggggggcagtctagctgtgatcctgggaggaaccacccttgggggggcacagtacaacaggttaaaaactagacgcggccccgaaaaccggctggagccagtggtccacctcgtcctggttaatgagggcctgtggaccttcccacagctcggttcctgctcccccgcccagttgccactttcccggcgacggcgttagtgtttc

SEQ ID NO: 78851 - DNA, 442 bp, Zea mays
  Clone ID: MRT4577_171938C.1
cggctattatcttcctcagaacggttcaattaagctttacaaggaaatcgtatgccctcttgatggttttgagttgcttttgttctcgatggtgggacctgatgcaaaatctttcccactgtgccctttttgctataattgtcctccatttgaaggcatcgacaaactctttggtgctctcaagctcgatgacaccggcaaggttgggaaaggggccggcatgccatgcttcctttgtcctcacccgacatgcaagcaatctatgatcactcagggagtttgtgcttgtcctgagtgtagtggtaccctgattcttgatccagttagtgcacccaaatggcggctttactgcaacatgtgtaattgcattgtattgctcccacatgctggtcacaggatcaccactatcgataatataagtgccctaacgaagctactctca

SEQ ID NO: 78852 - DNA, 863 bp, Zea mays
  Clone ID: MRT4577_171939C.1
aattcggcacgaggaagctccgaactcgatcccagttcttctccacctcgtcctcctcctgctcctgcattctcgcccgtcccccaaattcaccttggccaccctccaccacctcgtcgacgcgggcagcagttcgcctcatcgtcctcccacctgacgacgtcgcggttcgcgctctcgcggcgtgccgcgcacccacgtctcccgcgagttccacgccttctgtgccacgcgccacctggagccactgttcgccgcgccctccgcatctccgacctctacatctccatccgcggaagcagaccacctcgaatccttctctttcacgcagtcattgcttgcctccttagcccaactgttggtaccagaggttcatgtttcatcataaggaatgaacagtagtcgacaaatggaactccactacataaacactggatttccatacacaatcaccgagagcttcatggatttctttgagggtctcacttatgctcatgctgactttgctctcacggatggctttcaggatcagggtaatccatactgggcaatgatgcatacaaactcgtacaaatatggatactctggtcctgggaactattacagttatgctcatgtctatgacatagacgattacatgcgtagagcggatggtgggcgcagaatatgggataacactacacctgtaaacaatgtcgattctgccaatgttgtcctgcgggtggtgaagctccccacacaacgacaaatactattaacaggaatgcatccaccaggtacaccaaagtccaggtagtcctcaggttgtttggcagataacattgagcctgataatatgacaatgaggactgttggattgggtg

SEQ ID NO: 78853 - DNA, 611 bp, Zea mays
  Clone ID: MRT4577_17193C.1
gccagccactcaagcagtcctatgaaggggtccgtgcagtgaggaaatgaggcctctgcaacagctatgcaagtgaattatcttggtaacaggtctttcagcctccgtcaagccttcagatgactgcggcctcaagtgacatcttgactcaccagctaaactgctcccaaattgctggaccacaaaaactaaatcaagcagaagattgagctgctgatgtcagttaactctgagaagtcgtcctcttcagaaaggccggagcctcaacagaaagctcctttagttcctcctcctccaccgccaccaccaccaccaccgccacctttgccagaccccacacccccggagccagaggaggagatcctgggatcagatgatgaggagcaagaggaccctgcggactactgcaaaggtggatatcatccagtgaaaattggagacctcttcaatggccggtatcatgttattagaaagcttggatgggggcacttctctactgtctggctgtgctgggatatgcaggggaaaagatttgttgcaatgaaagttgtaaaaagtgcccagcattatacggagacagccttggatgaaataaaattgctcaaatgtgt

SEQ ID NO: 78854 - DNA, 465 bp, Zea mays
  Clone ID: MRT4577_171940C.1
gcgttcggcaaacccatatgagcgatatagcccggctgctatagaccaccagctcatggcgctgcgtgccctgttcaacatagatacggagcatgtaggtccgccacttgccgacttacctgaagccaggcttgacctgtgacaacgtgcaagaagagcgccagaccacgatccggcttaccgcctacatatcaaaagtacatctacacgagctcgtcggaccctttgtacacgctgtgcatgggacggatgatcttctactacattaatgaatctgtcctggaagcccgcccacctaaaccacctaatggtagatgtgacatgtacgcgccgggcaatcactactatccgatgccccgtacatagctggcagagcattaagacgggtgacttttatggggaccattcatgctgatggctattgtactacttctgtgttcagctactgtagtgatgttactttgg

SEQ ID NO: 78855 - DNA, 961 bp, Zea mays
  unsure (1)..(961): unsure at all n locations
  Clone ID: MRT4577_171941C.1
gcgattgggttcctcgaggccggccgggttctggccgccatgcccactccagcactcctggtatcctatgatatcaacagcatcctctattcggccgggactccctcgtcctcgtgccttctcgcccgcccccccaaaattcacccgtccaccctctaccaccacgtcggcgcgggtagcagttggtctcatcgtcctcgcacctgacgacgtcgcggttcgcgctctcgcctcctgccgcgtgcccattcctcgccctcgtctcctgcgagttcccacgccccccggtgccgccacccggagccagtcctcgccgcattgttcttgttcccctcctcctggtgatcccgcaccgcgctgtgtcctctccatcttcctccgccgccacgctcatcgccggttcatgtttcatcttaaggaatgaccagcagtcgacaaatggaactgcactacataaacactggatttccatacacaatcaccgagagtttcatggatttctttgagggtctcacttatgctcatgctgactttgctctcatggatggctttcaggatcagggtaatccgtactggacaatgatgcatacaaactcatacaagtatggatactctggttctgggaactattacagttatgctcatgcctatgacattgacgattacatgcatagaactgatggtgggcgcagaacatgggataacactacacctgtaaacaatgtggattctgccaatgttgtcctgcagggtggtgaagctccccgcacaactgcaaatactactagtgaggattgcatccaacaggtacaccaaagtccgggtagtcctcaggttgtttggcaagacaacattgaccctgacaatatgacatatgaggaactcttggattttgggtgaggcagttggaacccagagnccgtggtctctcccaagatgcaatttcgttgcttcccatcac

SEQ ID NO: 78856 - DNA, 353 bp, Zea mays
  Clone ID: MRT4577_171942C.1
aacgcttcattcttcctcgtactctgaaattaaacttagccacaaaaatggccgaaactcaagcacttcttcgggcagacaaggccaaagacaaggcgtttgacagaaccctgactcaaaacttgtcgaattctcaagtcgccctccgtaccacgacaaacagagattccgaaagtcaagcactgcttccggccgaccaggtcaaaaacatggcctttgataaaatcctgcacaaaagctcgtcaacttctcaaggcggccttcgtgccatgattaacaaagacaacgaggcccacaaggcagctgttgctgaatactttcagcattgggatgacaagaaagctgaagatgag

SEQ ID NO: 78857 - DNA, 342 bp, Zea mays
  Clone ID: MRT4577_171943C.1
cctcactacacaccagtaggcaacaccagctagcatgtagaaacggccgctcggtcatactgctcccaggcgcagctgtcccacgagctgggcgctcctggcagccgggcagctgctcttgtggtggtggcccgggacgccgtcacgggcggagagctgcggagaggagacgaggtgacctgctccgtgcctccgggactcgaggaccagagcggcagcgccctccccgcctccctggagcgctgcacgctcgtgcaacagcccaacagccgcgccgggggaccggcaggaccacctggaacagtccaacaagctgaacagcccgactggccggctcggagg

SEQ ID NO: 78858 - DNA, 279 bp, Zea mays
  Clone ID: MRT4577_171944C.1
cacagcatgaccacttgacttcatatttcagttgagtttgcacaaacataacagcaggcgatgacataaagggagttggaggagtacaagaagataacagacaagaacaacaaggagatggaggagaccaatgtgctcatctagaagctcttgtccttgcatggtaactcttcttcgacatgagggctgctagtcagagctgctgtttttggcctattctttgacatgagggtacccaaaaactctagttgctcgtggggtggaactttttattatatg

SEQ ID NO: 78859 - DNA, 589 bp, Zea mays
  Clone ID: MRT4577_171945C.1
aaaagggggcctttaatttaaaacccccccgggggcccggtttttttttatgtttttttggcgggaaacaaaaattgggggggcgcccttaatatacggggcacccttcccaaaaaaaaggacccaaaaagcgcggccgggggcctcaatttgggggaccccccccccggggggggatttccgggaggggccttgggccccaaattttgggaacccggtttgttaaaaatgtccggaaccccaaagccctttttgggtttttccggggggcagggaaaaaccctgggccctaaaaggggggcttgtttaagggaacaccctttgttcccgaagtttcaaatggagatggacccctaaatacccccctaaaaattaaacattaaggggggggccgaattttacagaattaaccatggggccaaaagccccggaaacaaatcgtttttgcaaaataccatttttaaaaaaaaggcggccggaaagggaaggcgcacctccccccacccaaatgggggggcccctccgtagtaaatgtaaaccagggggaaaaaccgttaataattcccccattggaagcggggaaaaaggc

SEQ ID NO: 78860 - DNA, 824 bp, Zea mays
  Clone ID: MRT4577_171946C.1
taagataaagaagttggctcaacttttatatataacatctctacagaaaagatggtttacttcattgaactagctgcatactaaaactggtcatgcagtcccaatagcaagcaatagatttttttcaggttcattactcttctaagattaagcgttcatcgaaagactaataactttaggttcttcattacgagacacctagaacaaatataagtatagaagcaatatgataactttttaaatcatttaagcctaatctcacctcatgcaaacaagaatcaatttaagcatgttatgtctgcccacatattcatccaagcacattctatacatgatatcataactccctgtagctaacaaaattttgcaaatataaactccttgaaaagattataacattccatagaacttttattataatgagtgtctcggaattggtttccaaaccgataaaacaatgcaactcttttgtttcaaaacagataagattgaaacaatggacaactaaaattcaaaaacctataactcttgctatactcaacttaaactacaacgaacacgcgttggaaaagttttgaaaattgtccatgacttttgcaataaagttgcacctaaatttatccttatagccctcaactctgcatgacctacagctaaactcagcctgagatactgcacattagagattcgacttatatccgggcaaccacctctccaaatctatttaacagacagttacaagtaattacccattaaaaaggtactgaaaagacctacaagttttgcttaaagagaattcgcaaatttgtgctctgcaacatcaa

SEQ ID NO: 78861 - DNA, 304 bp, Zea mays
  Clone ID: MRT4577_171947C.1
gagtccacacctccgcacacacgtcacccccggttaaagtataccctctgctgctactgcttaagaccatgatgcattctataccaatcactatacactctactatattgattacttacgatcatcagaattagattgaccactaatactcatgctgctccactattaagaacttgattatcatcacttaaaatgtccatcaatatcaaatgctacttttctaaccttacacaattagcattctacacaggaaatgatcctaaacgacctaatcttttatgatggatactacttccaacatact

SEQ ID NO: 78862 - DNA, 463 bp, Zea mays
  Clone ID: MRT4577_171948C.1
tttctcgccgtctgatagtgcagcaggagacaggccgacaaccaccgctgccagaatcactacctagagagagacacgcggggagctgctagtaggcaggaccaactcaagatgccccagacaatgacctgccgcagatggcactctggaaggaggaaccgtcaggacgatgttttttagaggagagggaggaggaagcggagagccagcagatgacccacattgctgtggaccgcaaccgacgcaagcacattaacgagcacctcagcgcgctacgatcactcatgccgtcagaccacacgcatcggggcgatcaggcattcatcgagatgcggctcgatcaactgcggcaaggagctggatcagctgctgcagacgctggaagcccggaggccacacccgcagggcagtgcctacgcacgaaatcccgacgacacggccgccgaagcggactaactcacct

SEQ ID NO: 78863 - DNA, 723 bp, Zea mays
  Clone ID: MRT4577_171949C.1
gcccttcctcgagtttttttttttttttttttttttttttttttttttttttttttttttttttttttttttttttttgggatatcccataccctatttattcccaatcaaaaaaaaaacggtttcccgaaaaaatcccgtttccgaccgttttcttccttagggccccctaacaaaaaaggcaaaaaaaaatttttttttacaaaggaaggggccaaaggggccttaggggacacagcatttaatttagttttattttaaaaaacaggggggggggggcatcacaaactcaaacaagtcaattttgggaagcccgttgctcaacagggaaaaactaaaacctaaaggcccttgctgatttaaaggggcccaccaaaacataattttcgactatgcccttacacaaaattttttttggggttttttgccaggccgttacaagggatgattttcaaccatttcctggaaaaaaaacccccgaaattgcaaatttgggcccaaaaggaaacttgggggtggggctacttaccattccccccagaaggggggaaaacttgtttatttccacaatttttccttaaattttgggggggggaccccactgaccctcagaaaggatttccacgaggtatccttgttcataccgggataagtttaaaaaaccacttcaaccctagggttgggctttaacttttcgggaaggcccccttgattaactccttt

SEQ ID NO: 78864 - DNA, 823 bp, Zea mays
  unsure (1)..(823): unsure at all n locations
  Clone ID: MRT4577_17194C.1
cctgcaggttccggtccggaattcccgggtcgacccacgcgtccgccatggcggctgggaccctgtacacataccctgaaaattggagggccttcaaggccctcatcgctgctcagtacagcggggctcaggtccgcgtgctctccgcaccaccccacttccactttggccaaaccaaccgcacccctgaatttctccgaaaatttcctgccggcaaggttccagcatttgagggtgatgatggattctgtgtgtttgagagcaatgccattgcctattatgtaagcaatgaggagctgcgaggaagtacgccagaggcggcagctcaggtggtgcagtgggtcagctttgctgacagtgacatcgttcctccagctagtacctgggtgttccccaccttgggcattatgcaccacaacaaacaggccactgaaaatgcgaaagaggaggtgaagcgaatcctggggctgctggacactcacttgaagactcgaacttttctagtgggcgagcgagtgacactggctgatattacagttgtctgtaccctgttgtggctctataaacaggtcttagagccttcttttcgccaggccttccccaataccanaccggtggttccttacctgcattaaccagccccagttcagggctatcttggggggaggtggaagctgtgtgagaagatgggctcagtttgatgctaagaagtttgcagagagccagcctaaaaaagaaccccaagaaagaaaaggttcacgagaggagaacagaaaccccagctgagcgggaggagaaaaaaagcagctgccccagctctgag

SEQ ID NO: 78865 - DNA, 2598 bp, Zea mays
  unsure (1)..(2598): unsure at all n locations
  Clone ID: MRT4577_171950C.1
gccggccgggtcggggagcctgcgacctgaccaacagacgaccccgttgaacccgccgccgccccgcccgcttgtttccccattcccttcctccttccgcagcaagctccagcctcccaaagcccccactcccccaatagaccatgccggccgctgcgctctagccgaccgccgccccttccttccccctcctcgccgccatgtccatcgccgccgtgtccgcggatgggctcctcgcgttggccgacgaggctgagcgccggtatgacttttccgccgcggccgcttgcctcgagtccgcgctgcgtccgccctacgccgcagctctcctcccactcaccgaagcccgcgcgcggctccgcctcgcttcgctcctcctcgcgccccgcgggtcctcccgcgtcccgcgcgccggcgctcccgccgccgccaagacgcacctcgagcgcgcgctgctcatcctctcccctctcccctccgcgccaccgcggctcaagctgttggcccactcccacctcgcgggcgcctatgctgtcctgngggcgatcgcgtcgcgaaaaaacgtgctccaccgcggcctcggcctcctggattcggcttccgcctcggggctcctccagcgcgagccagcgcttctatggacttgcaacttccaggcgcagctcgggtccgttttcaccaatgacggggacgccgcgtcagcgctgtccgcactgtccgtgggagcatccgccgccgccgagctcgggagcccccagctcgagctcttcttcgccgcctccgagctccacgtccacctcctctgctgggaggacagcgctgccgttgagaacgctgtcactcgtgcctcgctgctctgggacgcactcacagccgagcagatggagcactgggttggactcttcttctacacgcagctgctgcagactttctacctgctcaggatctgcgactacaaggctgcctcacagcacgtagagaggttggatacagctgtgaagagtgagatgcagagaggacgccaaattacggcgcttgctaatgatctcagcacactggagaggacactagggcagtctgggctgaaggagcgggagatgctggcattatcgcacaagcaaaggcagctcaagggtcagctgcgagcattgtgtggctatgactcattgaatgatgtgttggattatggggataagctgcttttggcaccaccgctgatgcatggggagtggctcccacggacggcggtgtttgtgctcgtagatctcatggttgttatggtaggtcgcccgaaagggatatttaaggagtgcgggaagagaataaattcaggactccggctcatccatgatgaacttgtgaagcttggcattgtggatggtgtgatggaggcagatttggaacactcaacaatatggacagcagggctgtacttgatccttttacttcagtttctggaaaacaaagttgctgtggaacttacaaggtcagaatttgttgaagcccaagaggctttagctcagatgaaaaactggtttactcgcttccccacaattcttcaaggttgcgaaagtatcattgaaaatttaaggggacaatatgcacattctgttggctgcttcgatgaagcagctttccactttcttgaagcaaaaaagctgacagagagtaaatcaatgcaatcgatgtgtgaaacctatgcagctgtgtcatatatttgtaagggtgatgcagagtcgtcttcacaggcactagaactggttggtcctgcctatagaacaatggactcatttgttggtgtgcgagagaaaacctgtatcatttttgtttatggactattacttatgagacagcataatccgcaggaagcacggaaccgccttgcaagtggtttgaaaatagcgcaccaacagttgggtaacatccagttagtttctcagtatttgacaatactgggcacattggcgcttcagctacatgacgcagcacaggctaaagagatcctgaagtcttcgttgaccttagctaagacgctatttgatattccaacccaaatctggatcttgtcagtatttacagagttatatcgtgaactggaagagaaggaaaatgaaatggagaactctgagtacgaaggaaagaaggaagacgatctgcagagaagactttctgaagcttattctcattcttttcaccatgagctggtggaaaaatcaagaatccagccgctgcacatgtcaagtaagcagccagagatggctgttccatcagctaatggtgatcttgacatcccagaatcagtggggctttccgctccccagccattcctcaaaagacttgttgaggccgagccgatgaggcgcagtaccaggaggcggcggtagtaatgaaactagtactgtaattaatagcgtagtgaatttgttggttaagtgttgttatgacttgtaacttttagcagtttaggtttttattttcttttgtttgttgtgttgattatgtgtatcttggtttagaatttatagatttggagaactgttggattgacaacattctgagtggtaaaataccaattattccacgccgaaaagaggcatc

SEQ ID NO: 78866 - DNA, 182 bp, Zea mays
  Clone ID: MRT4577_171951C.1
tcggatcatgtgatttaacatgaccacttgtcatatttggtccctgtatgagatgtgtaatgtgtggggatattttctctctttaatacaaagaagggcagctaatcttgtgtttttgaaaaaaaaaacaaaaattgagaaataaaaataagtatacaaaatctaaataaaaataaatatta

SEQ ID NO: 78867 - DNA, 620 bp, Zea mays
  Clone ID: MRT4577_171952C.1
ctgtgcgatgatgtgatccagcaggaagttaaggaggttatcatttcttactacattttgatggagcaaggaaaggccactgtacaggatcttgattcacgttgcgaacagctcatcaaggaagagtttggtatggagtgcaattttgatgttgtagatgctgtaaagaagctagagaaacttggcattgtttctcgggactcgattgggaggatcctatgcgttccattgaagcgcgcaaatgagatcataggaacaactactgaagaaatggtgatgcgagcccaacaagcttcgggataattacatcattaagtcaaagcttatgcgatgcaaaggcctgccatgctgatgcattcttttgagcagtttgctggtgtagaggaaatgttgttattctttcatctgttcatccttctctctttttagtgtacggacagtggaacaagtggactgtagagcacatgatttacatgtacagaccattgcttcctgattgctttcgcgtagattagttacttcctgattactttcgctgcttcacaccagcctgcttatgatatacatacagtatcatgtattggaacatttaatgaaacagaaggcagcttgcttttgat

SEQ ID NO: 78868 - DNA, 519 bp, Zea mays
  Clone ID: MRT4577_171953C.1
ggcaagccgttcgagaccaacagkkccacgaacattcatgtagccaactaaatcaacggagcaagcatgaggwtcaggwgctgaaggagctcacctgggcctcggcatagctgccctgcgcgctgacggcgccgwcgygcgcgatgacgagcgacggaaacggcttcccggggtgcctaccctcgcgcgccgcgawtggccgtgcgcgcccgcttctgcatgccgacaagcacattatgccacgtgctggcccgcgaccaggccgccgttgtccccgccccgagcggcgcaggtcgggatcggcggggtcgacggcgagagacgtcctcaggtttggccccgtccagcgcggcgacgaggcaggcgcagtacccacgcgagatgtcagagtcggagtccgccgagaaccacatccgccagcccgttgacgcgttgcagcgagcgacgagccacacccgcgcgacgcagcccatgacgcggttgccctgggcgcggtcgggctccgggagccgcggcasc

SEQ ID NO: 78869 - DNA, 246 bp, Zea mays
  Clone ID: MRT4577_171954C.1
gacccactcgtccgccgacccatcgttgctacatcacatgagttcacttcttttccacactggcatacagccagggcatttgtgacattttcttccagatgtgaccttcttgatcagcttattatccgacacatgtatacatatttgacacatactcaccgactcaaatgccttgacacatctcatgattactattcacatctctataacactacaggatcataagataatccctttttcattttt

SEQ ID NO: 78870 - DNA, 256 bp, Zea mays
  Clone ID: MRT4577_171955C.1
cagcataacaaaatggtaggaactgcctacttcttaaaaatctgtcattaatgttttggtaaatttgtaaaatctgaggcaaggtagtgcatgggttaagatggaactagtgcttctattgagatgtcggtgttgtatgtaaatggaaaacaataattttaatttaaatgaaattgtgttttagttatcatgtaatctaactattaaaggatctgcggatatagaaacccaaaaacttatgcacttttgtagtgta

SEQ ID NO: 78871 - DNA, 640 bp, Zea mays
  Clone ID: MRT4577_171956C.1
attgggtacctcgaggccggccgggctcgagtcctcctaattcctaaagtcctaaccctagccgccgcccgccaggctccagcagatcccggtccggcactccgccgcccctcatctccgacctgatcacctgagcgcgccgccccgcctctccctcgggcactgacgcgctgtccgcgcctccacgatccgccggtccgcccagggcacaggcagttgctgcctgcctgccttgctgtcgtctgcccgtccggcgtccgccaggccgcccacactacttctacggccagccacccagccacactagttgatcattgcatcaataacaaacttccttaacgtttcaactgatccggcaacttttgttcagggagcacttccccatattcttgagaacacaaaggaagattttttcaggaggatcattggtctactagcagaaacctcagagatatgttacagagaaataaaggacatcaagtgcatcacctgccctcacaagccagaaggttccatgtttgtcatggtgaaattaaatttgtatcttttggaggggattcatgacgatattgatttttgctgcaagctagcaaaagaagagtctgtgattttgtgtccagggtattctcgacaagaaagc

SEQ ID NO: 78872 - DNA, 576 bp, Zea mays
  Clone ID: MRT4577_171957C.1
accaggcagtgcaggtgcagatggagccccggggatagatggtcccaggggtcctaccggtcccatcggcccccctggcccagccggtcagcccggagataagggtgaaggtggtgcccccggcctcccgggcatagctggtcctcgcggtggccccgtaagtgagaacgaggccttgggttactcttgcgcccaccaggcccgagcacttcctcagcaatcccgccccaggacctgagtctcagccatgggagaccgtttccttaggccaaagttcttagatctaaaattcacgagagagagttttaagtcacaccttctctcctgaataattctggaaaagaaataaaaaatggcacgaataatgctcatttgtaagtatttgttaaacctgcaggatctttgcctgaggcaccttctagatctaaaatcctctgccttcagggtctgcaactcaggacagatacggagtaaatggctttaattaattagttgactgatttcccaattaacccttttactatacttttaaattctcacatgtttagaattacagattgcatgtgtcaaacactt

SEQ ID NO: 78873 - DNA, 828 bp, Zea mays
  Clone ID: MRT4577_171958C.1
cttcttggtagctgagatgctccttctgtccgtcaatgcattgcattgcatggctagaagcgttatatctaggaggcaaaagcaggaggagactggtgggaggggagtagaccgcgtgggattcgattctcactacttgtccatgctgcttaaaagaatccctctggtcctgattaattagaagctgtagttgtccttgacttgcaaccatgtatccacagatggtatatcatgcagatgttcgggcgagggagaaggagttggcggcggcggagacggagacggagaccatgggctgctgctcctgcgctcccttgggcaggatgatatccagatgtatcatcaaacgcaacgtaggaagagaacggcgcatgaggtacgacgagaggacgggaatggactatgccatggcgtacgctcccccgcagacatgctacgtgcgcccaacagacgcgcgcaccgtcaccttggccaccaccaacgcccacgccgaccatccggatccacacccacagcgagcgcacgcagcgacgaccatgccgcttgaaccggcgggcggcgcccctgcccaacgcgtgctcacttgtcacatcatcatcatcatcatcgaccagaataaaaatgcatggtcttctttttttttcttactaatgtaaaattgtagttaattatgtcaaggaatatggttcttgcaggcctgcgtaagtatggattagttcgaatctctggtatgcttaggctttaattttataggagaatatcatcttaatttgactcgtgcgcgttgcctttccgtgagagtaagttggtgcgggaatggagatttac

SEQ ID NO: 78874 - DNA, 418 bp, Zea mays
  unsure (1)..(418): unsure at all n locations
  Clone ID: MRT4577_171959C.1
cccacgcgtccgggacgcgggtggtggggtggccgccggtgaggtcntaccggaagaacgcgctctccgactccggcgagggcaaccggtcatccagtttcgtgaaggtggccgtcgacggcgcggcctacctgcggaaggtggacctccaggcgtacggcggctacgaccagctcctccgcgcgctccaggacaagttcttctcccacttcaccatcagtcagtgcttcgtgcaccgtcctgccctgggtttagttttccgcagcgccttgctctgtttgatcgagcggcgccttcgcctgatgaaaggttcagaggccgttaacttgggtacgtacgtgttctcctctaaggccttgcctagcttcatgtgctacaaaatccgtagcgattgcaaaccatctggctcatttttttt

SEQ ID NO: 78875 - DNA, 242 bp, Zea mays
  Clone ID: MRT4577_17195C.1
attacggatcactatgatcctaacagtgcaacccacgataggagcaaggatggtcttgagcttggcaatgtcctgccagatattagaagcactcggcaatgtctccaggcagtataagacgccgggtatgaggttgtttgggatcaggatcttgctgtagaatctcccttgccttggtacttgcccatggatccaagccgattctccctgagtagcttccgtctgacttctgtgggacgcat

SEQ ID NO: 78876 - DNA, 367 bp, Zea mays
  Clone ID: MRT4577_171960C.1
gcaaaacaagagtagaacagcgtaaacatctggatcctccgaaagctgagacacagctgtttttttcttttcttttcttttcggatagtatgctctctgctgttagttgccccctgttgaatagagaaagaaaaagaggacgccggttcttttctgtatacacgaaaagctgttcaagtatagtggcctgtatgtttttggtcttctggatgattacacattgctttggtcaccatttcatttgatggaaagaaagaaagaaagaaagaaaaaaaaaaaaaaaaaaaaataaaaaaaattataaaaaataaaaaataaaataatttatttatatataatatttaatatatttttatttattttataa

SEQ ID NO: 78877 - DNA, 723 bp, Zea mays
  unsure (1)..(723): unsure at all n locations
  Clone ID: MRT4577_171961C.1
cctcgaggccnggccttcaatacaagattgtttacaaaaaaaggtgtgacaacgctgccgcagacgcactgtccaggtactcacatcagccggaccaattgctgcatatttctcactgtacgccaacttgggttcaggaaatcgtggagggttatcaacatgaccagcaggcacaaagtttgttatcgcagttggcccttgatccgtcggcactagctgcaacatacactcttaaagatggcttgattcgacataagggacgtctatggttaggcaagaatgaggtgttacaacaaaaggtcatcgccgccttccacgactcagctttggggggtcactcgggtgtgcctgtcacttatcgacgagtgaagcaattattttcatggaagggcatgaagaagacagttcaccagtttgtgcagtcatgtcccatatgccagcaagcgaagccggatcgtgctaaatacccaggtctgcttgctcctctacccattccaccgcacgcctggcattcaatttctatggatttcatagaaggcctaccgaaatcgggatcctggaactgcatactagtggtggtcgaccgtttctcaaaatatagtcattttctggcccttgctcatccattcacagccacggnggtggccaaagttttcttggacaatatttataagcttcacggtatgccagcaagtattgtgtccggatcgagatccaatcttc

SEQ ID NO: 78878 - DNA, 289 bp, Zea mays
  unsure (1)..(289): unsure at all n locations
  Clone ID: MRT4577_171962C.1
cccacgcgtacgcggnagcgtgggctggagcgtgggcagattcaacattttgtagttggaattgtttaaatatgttatcttgatattagattcagtattataaaagttgttattattacttattataaaaaaattttgtggggggggggggtgggtanttnatatctanattattataatagtgtatgcttggttttaaatgtaaactgtagagctattctaatgtttaaatttggaaagtatggtacagtaattattttaattggtgtttttgttgttatttggagtg

SEQ ID NO: 78879 - DNA, 315 bp, Zea mays
  Clone ID: MRT4577_171963C.1
agatagtgataatttaatatatataccacacgtactatctgtacactgtacatgacatggctgttacaagttacaacgaagccttcgaaaaggctataaaaacaaatcgcatgcgggcagggcgccagggaacacttgtacaagaaatttcacacctacaaatgtcacgctgcaaaatgaggcctctacactaactcaaaagaactgcctatactgtaccgactgcccggatatggaacggggatccgcgacatagtataggttcatctggtgactctgcctttgcgcgagcacgaaaaacgtctgtgggatcga

SEQ ID NO: 78880 - DNA, 672 bp, Zea mays
  unsure (1)..(672): unsure at all n locations
  Clone ID: MRT4577_171964C.1
gggccgtgttttttttttttttttccggggnttttttttttttttttttttttttttttttttttttttttttttttttttttttttttttttttttgggacaggttaaccctaaggggcattgtaagacctaaagggggtttgggggggcagcaaaataaactgacatgaagttttgagttgcccgggcaacaagaatataatttaatttgggaataaacaccttatttcctagaaaattatactaaggggggtaatttttacattacatttggcaaaaagggcaaggccatgggggattttataacccaggggagggggaatcaccctttaaaaaaaaactgtccggggtttggcacccatttttttccacgaaaaattgggcatgatttgggccgggtcaacccgatccttgttttggggggcaaaattgaaaagcgggtcgagcagggagtcccagagcagggggggcaccaggccgggctaaaaaagcttcgggggcttggggttgaaaaagggctcctaaacctcgactcggggggggggtatggatttggtctccatttttagcccaagttttgtttctgccggagtcaccagtttggctagctaattgacaaaaaactgctcggggaactggttgaagactctgaactccccaggttggggtgg

SEQ ID NO: 78881 - DNA, 345 bp, Zea mays
  Clone ID: MRT4577_171965C.1
ggccaaatattaaaaggacaattaaaaaacagggtaacttacaggggcccaaaaaaaaaaaaggctaatgggggccctttacttaaaaaacacacaagcttgattaaaaacactgggaaaaaaacaccaagtaaattctgggacacacgggaggggacattgaataaaaccaatccagctacacacaaatagattattggttttgggccatgaacaaattgaacaaaacagggctccctccaactaggaattaaaacgcattatatttttaaaaaaaccgcagaacactggaagggcaccatttttttgacacaacgggcagggtttttaacgctgtatcttttt

SEQ ID NO: 78882 - DNA, 356 bp, Zea mays
  Clone ID: MRT4577_171966C.1
gaggaggagacccaccgttggctcgcccgcgtgcggattcccacgtgcacgacatcaatctgtacgtaatcatacagcccgcaacgagggatggacatttgcttcagcctttgaggcaggtggcattcacgacgcatgtgatgatgcatgcaggatttgccttgaggctttctgtgagagtgacctcaccctcgccagcgccggggcccgctcccgcgcgctccgtgctggccacaccgacgatatgctgaactcaaaggagcttgtccaatgggagaatggcttgtcattcaatgacatagcggctaggcaggggattcgcattcgcagacactgcccccccactggctacttga

SEQ ID NO: 78883 - DNA, 592 bp, Zea mays
  Clone ID: MRT4577_171967C.1
cccagcgtgcgaccgaaaccccctcacgcaccctaaacgcacactagcgccccaacaatggcagccattttatcgagcctatcttagctgcctatggacgacaggagtactggtacaagctaccatgtatcccgcaagcgcacaagctactataggtatcccttgttccaacgggacctctaacgaacaggggcttcagcatgctgaaaacccaacgcttccaccctacaggatccaacaggaaagcacaggtggcttcttacctttatcacccttgtgcctccaacattgatcagacctatgacatcagttacatctggtgcatgtattggctcaaaacatcaaggcacaacaactacaacaacttgtgctaccaaaccttgctgcctactctcagcagcagcaatttcttccattcaaccaactaactgcattgaactctgctgcttatttgcaacaacaacaactaccattcaaccagctacctgctgcctacccccagcaatctcttacattcgaccaactagcagaattgaactctgctgcttatgtacagcagcaacaactactaccattcagccagctagctggt

SEQ ID NO: 78884 - DNA, 556 bp, Zea mays
  unsure (1)..(556): unsure at all n locations
  Clone ID: MRT4577_171968C.1
ggttccctcgccactatngctgctaatagctgtagctgtccgtgtgtngcccggagactccatgtgttctcttgctcgtctctccttctgacgtcacacagtccaacacagatggccgccgccaccgccctggtgagcagcagcagcctccgcgccccggcggccttctccgtcgtcgtccgcgcggcctcccggccggcgcctgtcggggcggttgtgacgccgctgcccgcggccaaggcagctgccgcccgcggcgcctggctgcgcgcgcnggccacccncatcgtcttgctcatctcgccggccggggaggtgcgggtcatgatgcccggcgacgtctacatcctggactttgccgtggtacaagggttggacctgccctactcctgccgcgccggcgcctgctcctcctgcgtcggctnggtcggttccggctccgttttcctgttcgtccagagcttcctcgtcgtcgacccggtcgtcgtgggctttgagctgccctgtgtcggctgccccacctggggcctgggggtgccgtcgcgcaaggtggatg

SEQ ID NO: 78885 - DNA, 602 bp, Zea mays
  Clone ID: MRT4577_171969C.1
acatcttcactaacatatcgacgtggaggctcgcgcaccaaagacctaattgccgtcgctcgcgccgacaactgccgcgtcctcccagacaagatagggaaacatgcaccgaaagcagagagcggagaagcatagggaggcaggcacccatgacggaatacgagatccgaattaccacacgggggaggctgcgcacctacatcacctacgccaccgccttgcttcgtgacgacaggtctagatgaggatgtattcatcgggcatgtgcgaggactgtcaataagactgtcgtcggtggcgcacatatcgctctggacgctgatagtggggctcctgcgaaataccaccatctcggatccatcgtcgatattactagcatgcgtgattcgcttgcaggaaggactacttccgctggatacttcgaagacactgtctctatgatcgctatatctcgtccttataaggagctgaacacatcatgtatctcttatcgatctgccctgtctgctgtacgtaggtgaggcctgtggaatatgtaggaatgcgctgtgcatggccactcccctggtggacgaggaaggagtcatggccgctcgaggccg

SEQ ID NO: 78886 - DNA, 252 bp, Zea mays
  Clone ID: MRT4577_17196C.1
gggataatacaggagtattatatagacacaggtgaaccaaacagtttctttgttccctgtctccctcggggggatggcctacttctgattaataaaaaaccaaccagggaaccccgagggggtctcgtataattggctgagttatccaagttcttttaagtcaggaaccatcccggttaaaagtgaagtcccaaagttgcaaacttgcaaccctttaatgcctttggtgggggtttttcaaaaaaagttttt

SEQ ID NO: 78887 - DNA, 254 bp, Zea mays
  Clone ID: MRT4577_171970C.1
tttaagcttaaagggcggcggcggcgctcgaggccaggcaaagatccaacctccggacgcgcgatggggcggcggaacctcaacgacgcccctgcgcacgaaggtcaacgcagaccggcgggggaacgcgccggcgcttctccgacccatctacggcgacaaggtctccctcctcaacatcatgaagtaccgagggtatatcaaaaacttagaggccatcgatgagaatagaggcgggaaaactagagcggagc

SEQ ID NO: 78888 - DNA, 750 bp, Zea mays
  Clone ID: MRT4577_171971C.1
ccagcagcgagcggccaaagtcagggcaggttcgtcgcaggcagcagcctgatagtcgagatacagagaaccgcatttactctgcatcccaagggcagtcttcacgctgctcgcaccgagcacaacccgcacggcggcctggcgacgctggcggctatctgctgacgcgaggggagacgacgagacccaaccgcgcgttcaatgcgacgaggtggacgacgtatcgcgccgctggcccgccgtcgcgaaatggtcctccagccagagctaggcacgaattattgggggtgcggaggaaatgcggcgacgacgacggccggctactccaagccgcggcgacgtcttctccggcttctcgccaaagtatcttttggtttccactcaagatcttcttcttcttcttcttcttcttttttttttgcggagacaatgagaaatctcctagactgagacgctgccagtcatcatgtcgcgttagcaaaggtctgtgagataaatgtggccgagtcaggattcaggaaaagcgtcatcattcatccagggtttggcgtggctgcatctgcatcattagtactagtacgtactactgtactgctttgggtttagcacgtgtgagccgtgccatgcagtctcggtacacgcatgcatcattgcgccgtagtgctttgttttgtcgcaaattactggttccattcaaaccatatatatatagtacgtccggaggaaaaaaaaaaaaaaaaaaggccctag

SEQ ID NO: 78889 - DNA, 631 bp, Zea mays
  unsure (1)..(631): unsure at all n locations
  Clone ID: MRT4577_171972C.1
cctcgaggccggccggggaaccagcaccgaaatgacgtgatccccattccattcaccctcgtcgttcgtcactgcacctgccggctgtgccgcccttgaaaaatcccaccaccttcctcgccctccaggcctccactcattcctgcccccgacactcccactgccaccagtcctctcaccgccaggcgcggcacaatgcagccgcctacccttctcccgcggggctgctggcgctgggcggcgggccgctctccttcccgtcccagatctccgcgtccaccttctcctactgcctcgtggaccgcgactccccggccgcgtccacgctccagttcggcgacggcgccgccgaggcgggcaccgtgacggcgcctctcgtgcgcagcccgcgcacgagcaccttctactacgtggcgctgtcgggcatctcggtgggcgggcagccgctgtccatcccggcctccgccttcgccatggacgccacgtcgggctcgggcggcgtcatcgtggactccggcaccgccgtgacgcggctccagtccgccgcctacgcggcgctccgcgacgccttcgtccagggcgcgccgtcgctgccccggacctccggggtgtcgntggtcgaaacgtgcta

SEQ ID NO: 78890 - DNA, 209 bp, Zea mays
  Clone ID: MRT4577_171973C.1
acagtcatcaactaacgaacgaactcttgctcgatcacgagctagctgaggtcgcgatgcggtggctgaacagcagaagacgccgagcggggtggcggctggtggcggggcgctgctggcttgccgttcggcggatcacctgcgcaggtggggtcgcgctggcgccggctcctgacgcgacggaggggcgagcgctccctgtcgagctg

SEQ ID NO: 78891 - DNA, 522 bp, Zea mays
  unsure (1)..(522): unsure at all n locations
  Clone ID: MRT4577_171974C.1
cacctattcctgccccccgacactcccactgccaccagtcctctcaccgccaggcgccagccacagcggcacaatgcagccgcctactacccttctcccgctaggcgccgtcgtggtcgccatcctcctgctcgccaccgccccgagccccgccgtctcccgccaccgccactcgtccgccgcggacacggagacgctcgatgtagccgcctcgctctcccgcgcccgcgccgcgctctccaccgacgccgtctcgctgcgcctgcctctacgaggttgcctacggcgacggctcctacaccgtgggcgacttcgccaccgagacgctcacgctgggggactccaccccggtcggcaacgtcgccatcgggtgcggccacgacaacgagggcctcttcgtcggcgccgcggggctgctggcgctgggcggcgggccgctctccttcccgtcccagatctccgcgtncaccttctcctactgcctcgtggaccgngactccccggncgngtncacgctccagt

SEQ ID NO: 78892 - DNA, 925 bp, Zea mays
  unsure (1)..(925): unsure at all n locations
  Clone ID: MRT4577_171975C.1
gccgggnaaaaaaaaaaaaaaaaaagaagcggattaatccagcaccgaaatgacgtgatccccattccattcaccctcgtcgttcgtcactgcacctgccggctgtgccgcccttgaaaaatcccaccatcgtcctcgccctccaggcctccactcattcctgcccccgacactcccactgccaccagtcctctcaccgccaggcgcggcacaatgcagccgcctacccttctcccgctaggcgccgtcgtggtcgccatcctcctgctcgccaccgccccgagccccgccgtctcccgccaccgccactcgtccgccgcggacacggagacgctcgatgtagccgcctcgctctcccgcgcccgcgccgcgctctccaccgacgccgtctcgctgcaccagtccgcggcggcgatccagggtcccgtggtgtccggcgtcgggcagggcagcggcgagtacttctcccgcgtgggcatcggcagccccgcgcggcagctgtacatggtgctggacaccggcagcgacgtcacctgggtgcagtgccagccctgcgccgactgctaccagcagtccgacccgatgttcgacccgtccctctccgcctcctacgccgccgtctcctgcgactcccagcgctgccgggacctggacaccgcggcgtgccgcaacgccacgggcgcctgcctctacgaggtggcctacggcgacggctcctacaccgtgggcgacttcgccaccgagacgctcacgctgggggactccaccccggtcggcaacgtcgccatcgggtgcggccacgacaacgagggcctcttcgtcggcgccgcgnngctgctggcgctgggcggcgggccgctctccttcccgntccagatctccgcgtccaccttctcctactgcctcgtggaccgcgactccccgg

SEQ ID NO: 78893 - DNA, 2127 bp, Zea mays
  Clone ID: MRT4577_171976C.1
ctacgcgtacctcgagggccggggggagccggccgcgtgactcattcctgcccccgacactcccactgccaccagtcctctcaccgccaggcgccagccacagcggcacaatgcagccgcctactacccttctcccgctaggcgccgtcgtcgtcgccatcctcctgctcgccaccgccccgagccccgccgtctcccgccaccgccactcgtccgccgcggacacggagacgctcgatgtagccgcctcgctctcccgcgcccgcgccgcgctctccaccgacgccgtctcgctgcaccagtccgcggcagccgccgccggggcgaagcgctccccgcgagcgcgggagggcggcctcacgctgcggctccactcccgggacttcctgcccgaggagcaggggcggcacgagacgtaccgctcgctcgtgctctcccgcctccgccgcgactcggcgcgcgccgcggcggtgtcggcccgcgcgacgctggcggcggacggcgtgacccggctggacctgcgccccgcgaacgggtcggcggtgttcgcggcgtccgcggcgatccagggccccgtggtgtccggcgtcgggcagggcagcggcgagtacttctcccgcgtgggcatcggcagccccgcgcggcagctgtacatggtgctggacaccggcagcgacgtcacctgggtgcagtgccagccctgcgccgactgctaccagcagtccgacccggtgttcgacccgtccctctccgcctcctacgccgccgtctcctgcgactcccagcgctgccgggacctggacaccgcggcgtgccgcaacgccacgggcgcctgcctctacgaggtggcctacggcgacggctcctacaccgtgggcgacttcgccaccgagacgctcacgctgggggactccaccccggtcggcaacgtcgccatcgggtgcggccacgacaacgagggcctcttcgtcggcgccgcggggctgctggcgctgggcggcgggccgctctccttcccgtcccagatctccgcgtccaccttctcctactgcctcgtggaccgcgactccccggccgcgtccacgctccagttcggcgacggcgccgccgaggcgggcaccgtgacggcgcctctcgtgcgcagcccgcgcacgagcaccttctactacgtggcgctgtcgggcatctcggtgggcgggcagccgctgtccatcccggcctccgccttcgccatggacgccacgtcgggctcgggcggcgtcatcgtggactccggcaccgccgtgacgcggctccagtccgccgcctacgcggcgctccgcgacgccttcgtccagggcgcgccgtcgctgccccggacctccggggtgtcgctgttcgacacgtgctacgacctgtcggaccggacgagcgtggaggtgcccgcggtgtcgctgcggttcgagggcggcggcgcgctgcggctgccggcgaagaactacctgatccccgtggacggagccggcacctactgcctggcgttcgcgccgacgaacgcggccgtgtccatcatcgggaacgtgcagcagcagggcacccgcgtcagcttcgacaccgccaggggcgccgtcggcttcacccccaacaagtgctagcctagcctagcctaagcctgccttctggctaaccgtgccctgttagccacggttgtcagtagtaatgacaagccggtgtttaattagcgggagaatgattagatggggggtaattaagcggtgggccctgccgggtctggggaggagcgaaaggcaaaggcgaggacagatgatgccattgccatgccagcctgtgtccggcgcgatgggtccagctccagcagtgtttctctctttctctcgagtatgcgtgcgtggagccttgtcatgacgaattagatcgtgggggctcccaagttaagagtatttatttttattttatttgctatgtcaagaaaatggaagtttccatccagccgtgtcatgacgaattagatcgtgggggctcccaagttaagagtatttatttttattttatttgctatgtcaagaaaatggaagtttccatccaaaaaaaaaaaaaaagggcggctgctcgcgatctagaactagt

SEQ ID NO: 78894 - DNA, 491 bp, Zea mays
  Clone ID: MRT4577_171977C.1
tcccccttaagaaatgctgccaagcacaagaaagaccgtgcaaaagtcaactgggccaatcggtgtgccccgtcatcaacttgccccacggcatgaagatagcagcagtgggagcaacgatccgattggagatttggaagcccaagtggatcagcttcgaatagaacttcgatgcaggaacaatctatgggttgcagatggcgaaagggtaaatgaattaaggacagaaattcgccaccggcaagactagctagcggatcgggatctagcactcgactgggctgtgaactctcgttcacttgcttgggcaaaagaagctagagctcgagcccgagtggaagagcttagctcaaccgtggatagcttgcaggtttattgtaataccttacatgaagaagttcacgtattggattctcaactgcatcccaatgtacctgtgaatcctgtcgggacagaagctggaccttctgggatagcgggagaagccttcg

SEQ ID NO: 78895 - DNA, 381 bp, Zea mays
  Clone ID: MRT4577_171978C.1
tggcttctcctccccctccggttcgggttcgggttcgtgaggttctccggggttcgggttcgtgggtgagtggatcgagatggcggcgtcggatgttgaccaccgctggttcaacctgggaggctacagaatatcatgacaaaactctttacactagatgtatcagaagttacccatgtcgcgttcatcatccatggtagtcattgctctttagtgccatgacatttgggtgctaagtcatctacatcttcatgtaccgaattgaggtctggaacagcgacaccctgccaatatacaagactggttctgatgatgcagttttttttttttttgggcgacctccacatataataataatgttgttgagaagcacattcgctg

SEQ ID NO: 78896 - DNA, 505 bp, Zea mays
  Clone ID: MRT4577_171979C.1
caacggggggggggggaaaaccggggaaaatttacactgtttttggcccaaaaataaaatttcccccccccttcccccaaaaaaacgggggggacttgcatttactggacatggggggcggggggggcaacccccagggggatcaaccaaaatggttttggggaaggaaaaagttcccggaaaatttccccctaccattttttaaaatttaaggaaccccggaaacgtggggggtaaacaaaaaagggggcccacagggcccggggttaggaaaataaaacaggccggattggacccataaaaggggtttttaagccccaaaaggatttgggggcccgttttttttttttgggggaccaaaaattctttttgggcaaactgaaatcatgggtgccaaaatgttttttgttggggtgggactgagccttcttaggtttttttggaggaaaaaaaaaggccgggggttttccacttgaccaaggtttttcctcccccgggggggggg

SEQ ID NO: 78897 - DNA, 346 bp, Zea mays
  Clone ID: MRT4577_171980C.1
cttcactagttgagtgtttgataaacgagctatcctcatggaagctggggagttggaacgcctcacaggccagagccgtgtccgaccctgatcttctgtaacgggttcgagtttgagaacctctttggctacccgaaagatggaaaactttacctgagcgtgtcgaaatcagattaaactgtggtggaggttttaagcgatacttacttgcaaattgtttgactgacttgggtttaggggcaaatgactaatttaactatttattaactggttcctttggaggtttacctaaagatagctgaaactcacacgatttttatcgcttaaaagcaatgattagaggcat

SEQ ID NO: 78898 - DNA, 219 bp, Zea mays
  Clone ID: MRT4577_171981C.1
agcacacgcgtccgcacacgcgtccgcggataggtgggatcgacccacgcgtcgcacacgcgtccggttctggagggggattttgaaagtggagaatatgatgacaggacaattcaagagtttaacaataacattgttaaagaaagagaaggcaaaagacccttgatttctggggatgcattcattgccctcgtcgatggcattggaacagtaggggaa

SEQ ID NO: 78899 - DNA, 1474 bp, Zea mays
  unsure (1)..(1474): unsure at all n locations
  Clone ID: MRT4577_171982C.1
cgcccctataaactngatgatctgctgatgagacatcccaggccggccgggactcgcctgccgtccttgaagagcgagcagcaatggcgcaggagatcgagcacacccacctccccatccgcggcctcaacctccacgtcgcacaagtaggcacaggtgagtcctcatcgttgctttgagccgatggatcccagcggagcaggcagagtatcgatcattcatgggctacggcctgcgggccgcacggctggccggctggtgccgttggttcgtgtgccgcaggtgaactgggcacggtggtgttcctgcacggcttcccggagatatggtactcgtggcgccaccagatgcgggccgtggccgcggcggggtaccgcgccatcgcgccggactgccgcgggtacggcctgtcggagcagccgccggagcacgaggaggtctctcctgacgacctcatcgccgacgtgctgggcatcctcgacgccctcagcgtcccgaaggtaaagcagcggctgcggcggcagcccaccgaacggacgaaaaggaggagcgtccaatccatgtctccaagatctgagctgttgttgccgcgcgcgtgcaggcgttcttggtgggcaaggacttcggcgccatgccggcgtacgagttcgcgctgcagcacccgggccgccccgtcggcgtggtgtgcctgggcatccccttcaacccggcccccatgtccttcgacgccatcatgcccgaaggattctacatcctgcgctggcgcgcttcttcttcttctggtgttctccttttgcttctcttgttcaggagccgggcagggcggaggccgacttcggccggttcgacgtgaggcgcgtggtgcgcaccatctacgtgctcttcgccggcgccgagatcccgattgccaaggaagggcaggagatcatggacctggccgacctgtccacgcccctcccggagtggttcaccgaggaggacctggacgcctacgccaagctctacgagaagtccggcttcgggtacccgctcaagatgccgtacagatctatgcacaagctcccgaaccggctggacgccaagttccaggtgccggtgttcatggtgatgggggagaaggactacgcgttcaagttcccggggttcgagaccgccatgcgcggcggggtcatggacaacttcatgccggacctcaagatcacctacatccctgaggggagccacttcgtgcaggagcagctcccagagcaggtcaacgacctgctcctcggcttcctcagggaccatccctccgccgcataagcagtgggtgagaccgtcagaataatggaatgcttcctgagcaacggtttctctactctattgccgttgcctggatccatgaccgtgttaattaattaattagtgcatatacttcctactcaaatcagatgtacgttttttttatctgcaataaaaatcatcgtcgctgcat

SEQ ID NO: 78900 - DNA, 446 bp, Zea mays
  Clone ID: MRT4577_171983C.1
cgaactatggagcgtgccccaggcgtgggcggagctggataagtcgacgcgggcagccaagaacctatgaagggtcgcggatcaggcattctccgccgcgccgagccggactggaccacaggcgccgttgcctgattttgcgcaccctgacgccgctgacgctggcgtcgtgcgcccgctccatgggacgccgggcgtaccacgcgggcccgcacgagagccaaggtccgggcgaagatcctggtaggggcggaggcatgggagccctggcctgccttcctggggctgcttccgaccgacgacataacaagggctgacgccaccaccaacgaggggctgaacggcgtggatcctgacattgagaggggccacctccgttctctcccctagggggagctataaggtggccgacaccccggtcctgcacatggaggggggagaaaaca

SEQ ID NO: 78901 - DNA, 704 bp, Zea mays
  unsure (1)..(704): unsure at all n locations
  Clone ID: MRT4577_171984C.1
caggccggccgggccgggatcaactccgaacgaangcaccaccgaccggagtctacaatcgatagcaagctcaatgtcctctatctatgtctgaaccacgcctacggacgataacaacgcctggtgcagcgatggcctcctccgacctgctcttcaggcagaggaagctcttgtagcggtctttctactcaaagaggcactcccaactgaaacagctcgggaactccaattggaacccgccgctgagggagatgactgcgattgcctttctgacatatgcctcgactcttaccagctggtgaacacctgaagagattcatatggcggtacctcactggatggagtgaatgttttctcagagcacatgactggagactaggaacgcgttatatccagactgaggaatgtctgagtgatctccgacctgcgaacaattatgctctagggaaagagtgctgtaattgtatttagtgatgatctaggatctcactgtgacgttgctgagggaaatcactatgcatgatctatggatatggatggattgtatgtccagatcttcatcaagatgcataggtcccaatatgctgagaagccctgaatatgatgcatataattgatgaagaccgtacacttgcactaattgtggacgtatgtgtgggcagtgctgatggtgactctaagatccgtgcagattatctcatatt

SEQ ID NO: 78902 - DNA, 806 bp, Zea mays
  Clone ID: MRT4577_171985C.1
ccggccgggaccgagggaaagttcaagtgttcaaccttgaatggccatggccttcttttcgttttcgttttttttttgaagaacagacagacttgaaagttgagatatctcactaatccccaaaatgtccctataaaactgatgatctgctgatgagacatcccactcgccggccgtccttgaagagcgagcagcaatggcgcaggagatcgagcacacccacctccccatccgcggcctcaacctccacgtcgcacaagtaggcacaggtgaactgggcacggtggtgttcctgcacggcttcccggagatatggtactcgtggcgccaccagatgcgggccgtggccgcggcggggtaccgcgccatcgcgccggactgccgcgggtacggcctgtcggagcagccgccggagcacgaggaggtgtcccttgacgacctcatcgccgacgtgctcggcatcctcgacgccctcagcgtcccgaaggcgttcttggtgggcaaggacttcggcgccatgccggcgtacgagttcgcgctgcagcaccccatgtccttcgacgccatcatgcccgaaggattctacatcctgcgctggcgcgagccgggcagggcggaggccgacttcggccggttcgacgtgaggcgcgtggtgcgcaccatctacgtgctcttcgccggcgccgagatcccgattgccaaggaagggcaggagatcatggacctggccgacctgtccacgcccctcccggagtggttcaccgaggaggaactggacgcctacgccaagctctacgagaagtccg

SEQ ID NO: 78903 - DNA, 595 bp, Zea mays
  Clone ID: MRT4577_171986C.1
ggtaccctcgggtcctgccgggctgagctgctgttgccgcgcgcgtgcaggcgttcttggtgggcaaggacttcggcgccatgccggcgtacgagttcgcgctgcagcacccgggccgcaccctcggcgtggtgtgcctgggcatccccttcaacccggctcccatgtccttcgacgccatcatgcccgaaggattctacatcctgcgctggcgcgagccgggcagggcggaggccgacttcggccggttcgacgtgaggcgcgtggtgcgcaccatctacgtgctcttcgccggcgccgagatcccgattgccaaggaagggcaggagatcatggacctggtcgacctgtccacgcccctcccggagtggttcaccgaggaggacctggacgcctacgccaagctctacgagaaagccggcttcgggtacccgctcaagatgccgtacagatctatgcacaagctcccgaaccggctggacgccaagttccaggtgccggtgttcatggtgatgtgggagaaagactacacgttcaagttcccggggttcgagacccgcatgcgcgggggcgtcatggacaacttcatgccgga

SEQ ID NO: 78904 - DNA, 418 bp, Zea mays
  Clone ID: MRT4577_171987C.1
ttcttcttttttttttttttttgaaacgaaaatggtggcgacttttggaacaggccacattagttcagtttgcagaggggcacaaacaaaaaacggagtaggactggaaaaaaacaaggccaatttcaaaggactaagcgctgcagggcctcaactacaatgcataacttacagccgattaccctgggaaaggccatacacaagccaacctgctgacattgtacagcacaagaacacgggaagaaaaatcggaaacacttgaatgggactcaccccaaagagtttaaaagactgggacacacacgaactgaggcaaaaaaaaaccgactaatgaaagcacgggactcaaggcaactctggaaacacatggcagaagcacgaagggttcaatagacacaaactactcaaactgagacat

SEQ ID NO: 78905 - DNA, 827 bp, Zea mays
  unsure (1)..(827): unsure at all n locations
  Clone ID: MRT4577_171988C.1
gggcacgactctcggcaacggatatctcggctctcgcatcgatgaagaacgtagcaaaatgcgatacctggtgtgaattgcagaatcccgcgaaccatcgagtttttgaacgcaagttgcgcccgaagccttctggcggagggcacgtctgcctgggcgtcacgactcgccggccgtccttgaagagcgagcagcaatggcgcaggagatcgagcacacccacctccccatccgcggcctcaacctccacgtcgcacaagtaggcacaggtgaactgggcacggtggtgttcctgcacggcttcccggagatatggtactcgtggcgccaccagatgcgggccgtggccgcggcggggtaccgcgccatcgcgccggactgccgcgggtacggcctgtcggagcagccgccggagcacgaggaggtctctcctgacgacctcatcgccgacgtgctgggcatcctcgacgccctcagcgtcccgaaggcgttcttggtgggcaaggacttcggcgccatgccggcgtacgagttcgcgctgcagcacccgggccgcaccctcggcgtggtgtgcctgggcatccccttcaacccggctcccatgtccttcgacgccatcatgcccgaaggattctacatcctgcgctggcgcgtgcgtagccgcccgccactgactgcatacatacagctcttgctattctagtattcttcttcttcttgagctggtgttctccttttgctttctcttcttgttcangagccgggcagggcggaggccgacttcggccggttcgacgtgaggcgcgtggtgcgcaccatctacgtgc

SEQ ID NO: 78906 - DNA, 1031 bp, Zea mays
  unsure (1)..(1031): unsure at all n locations
  Clone ID: MRT4577_171989C.1
cattgggtacctcgaggccggccggggaaaaagagagatggaccctccaactcactctctcccctcctcacccccgttcctccggcgggccgccgccgcctccaccaggggcgccagagacctccataaagtctccccccaacccccccactacgcctgtccgcccgccagtctccaggggatccgcctgcctcctccgcgcgagatcagtcgcacgctgtcccggatccgccattcccggtcccgcgccgggtttcctgctccggctgcgttgttcctggctgtcccgtccccgctcttggcccgggttctcctggcctgccgttcgcagatctcgagccagatccttccccgcatggggtgtcgtcggttcccagcctagcggtgccgcgccattgccacaccattttggagcaattgcttgcccggttcctctggttgtctgagctgcgagaaatctccctattgttcaaatcgaaagatccagttcaccgggcctttcgcgtgtgccgaatttgaggcagattgtccccatcaatcaatcgtctgaatctcctgctttctgcttcggaggaaaaaaaatctgatccctgctccaaccaccactaccaaaccacgcacccaagatcctccgctgcattggccgcggcctgcgcgtattctgcgaatcctgatccaagagcccgcaggcgcggcagcagccgctggccggagatgacgtcgccgtacgcctcgccgttcctgctctccctgctgctgctcatctccatcccggtcgtcttcctcctcgcgccgcgcctgctcccgcccaagacgctcccggccatcccggacgccgacgagtccgacgaccttgccctcttccgccgagccatcctctcctcctcgtcagccactcccacgcccacctccgcgggctcctactttttctggcgccgcccggcgcccaagatcgccttcctcttcctcaccaactcgnacctcgtcttctccccgctctgggagaagttcttccgcgggcacacccacct

SEQ ID NO: 78907 - DNA, 666 bp, Zea mays
  Clone ID: MRT4577_17198C.1
ccggccgggctccccacgcaagcccggccctcagcggcgctcgtcgagccgccacggccagctgtgatccctccctggccgtgcgctggctccggcgagcagcagccctgccgtgctgcctcctcggctctctctctctgctcggaaccggcctgttgtttccaggatgaagaagtcgtgcgtgggccacctgcatgctgcatgctgcatgccgattcctatactatgcgtttgacaaaaaccaccagggcccaccttgcatgcaaatgctaaagtgctatacgtgagtcacgcatgtaaaccatcttctccaccatgcacaaatctcgtgacccacaatttggatcccatgattttctatgactgcgattccatagccctccgtgtggtcgtgctccaaccaataaaaatgtgccacttcttttaaattcgcggtttactaattgcacattagcttttgcgttagactctgatttattcagttttaatcgcgttagcctcgtaataatgttgagcacacgttaaaaaaaatattatcttgtcatgatgtatgttttatttatttacttaatcattgtttggtcgcgacacatgtttatttaattaatgaattaattatttacctgttagttatcaaaatcaaaaaaaaaaaaaaaaaaagcggcc

SEQ ID NO: 78908 - DNA, 548 bp, Zea mays
  unsure (1)..(548): unsure at all n locations
  Clone ID: MRT4577_171990C.1
gnaaggattgaattatccaacgatttggccttaaatatgagtgcatggnaaaatagctatccaagtgcctaaactttatccgtggtttctgctgggtttcagctcaagcctacctaacttgcttgggactaaaatgtctgtttgttgttgatataaaactggcagtagaccttcggttatatgtgtatcatatcaactaacttgaatcttctactttgacatgacttcttttttctccttgtctacttcagaggcttcaattgctactggggttatgtttgataatgatagggaacatgctcaaatcatggcaaggttagttgaactcgaaagggaagaaaaggaagctggaaatacttgtgaagatgatgatgatgatggcgacgatgatggagatgctggtacaagtgaggatggtgaggaaaataaggaacccggaaatgctttaagtgatggcaatgaggaccacagttctggttctggtgctttattttttggaaatggtggcaatgataggagtaatgggaatatcaagctgaagagtgcac

SEQ ID NO: 78909 - DNA, 1616 bp, Zea mays
  unsure (1)..(1616): unsure at all n locations
  Clone ID: MRT4577_171991C.1
ggagcaagcaagtcgaagcatcaaatggcgcatcaggagatcgagcacacccacctccccgtccgcggcgggaacctccaacttgaaagttgaggcaagtcgaagcatcaaatggtgcgtctggagaacgggtaccccctcgaggccggccgggactcgccggccgtccttgaagagcgagcagcaatggcgcaggagatcgagcacacccacctccccatccgcggcctcaacctccacgtcgcacaagtaggcacaggtgaactgggcacggtggtgttcctgcacggcttcccggagatatggtactcgtggcgccaccagatgcgggccgtggccgcggcggggtaccgcgccatcgcgccggactgccgcgggtacggcctgtcggagcagccgccggagcacgaggaggtctctcctgacgacctcatcgccgacgtgctgggcatcctcgacgccctcagcgtcccgaaggcgttcttggtgggcaaggacttcggcgccatgccggcgtacgagttcgcgctgcagcacccgggccgcaccctcggcgtggtgtgcctgggcatccccttcaacccggctcccatgtccttcgacgccatcatgcccgaaggattctacatcctgcgctggcgcgagccgggcagggcggaggccgacttcggccggttcgacgtgaggcgcgtggtgcgcaccatctacgtgctcttcgccggcgccgagatcccgattgccaaggaagggcaggagatcatggacctggccgacctgtccacgcccctcccggagtggttcaccgaggaggacctggacgcctacgccaagctctacgagaagtccggcttcgggtacccgctcaagatgccgtacagatctatgcacaagctcccgaaccggctggacgccaagttccaggtgccggtgttcatggtgatgggggagaaggactacgcgttcaagttcccggggttcgagaccgccatgcgcggcggcgtcatggacaacttcatgccggacctcaagatcacctacatccctgaggggagccacttcgtgcaggagcagctcccagagcaggtcaacgacctgctactcggcttcctcagggaccatccctccgccgcataagcagcgggtgagaccgtcagaataatggaatgcttcctgagcaacggtttctctactctattgccgttgcctggatccatgaccgtgttaattaattaattagtacatatacctcctactcaaatcagatgtacggtttttttaatctgcaataaaaatcatcgttgctgcattaaaaaaaaaaaaaaagcggccgcggccttcgccgaganccgcatgcccaccaggagccgtctgcacacgagctcggnggcgacngtctaggcacggtgtacagacgctggactcccgagacttnttcgggctcaggccacggtggtgctatctgagcgatgncgngcggcaggcgtncttntcccacgtccttggtgcgcagtttgtttttaagggcaccggtcagaacgccgtgagggtgcttgtataggcnaaacagaaggtggtgattatcggtttttgttagattggttggaactttcttcggg

SEQ ID NO: 78910 - DNA, 1613 bp, Zea mays
  Clone ID: MRT4577_171992C.1
gttcacatagatatgaaatttgttaattttgtagtctcagtttaaagttggagcttcttttttaaacaaaaaatcttctgaatgcttgacggcatatgccattttgtatgctggttatcccatttatgtagggttgctggatctgtttagttctttctcacgggtgggtggctgcttcaattgtcagaaaaagggtcataaagaacatgaggcgcagcattgcagatggaaatagttttgcatttctttgtgacaacatagatgagcttgagcactccgtccaatagaatttacctagagtctgtaattatgcctttgaagggctttggagaacataatttgcaaaattggcgaactcagattacatcaccttatgggggaccactggaattcctgtttgtcgtagagagcgaagacgatccggcttatcatgctgtttcccgtttgatcgcagagtacaaggacaatctggaggcgaaggtggttgtggcagggctgtcaacaacctgtagctaggaaattcacaatcaattgatcggcgttgaaaagacgcacagggatacaaagtatgtcttgtttcttgacgatgatgtgaggctgcatcctgggactattggagctgtcacaaaagaaatggagaagaatcctgagatatttatacaaactggatatccccttgacttaccttctggcagtttgggcagctattgcatatatgaataccacatgccttgctcgatgggatttgcaactggtgggaagactttcttcttgtggggggctgtatgatggcaagaccgatatggtgttgtcagtggattaagagatggttgttactcagatgatatgacactcgctgcaatagcagtgtagtggcgagaactgtctcacttgagtcaccaagtcatgggtttcaagctgcctctccgtatttgcggtgggaggacttacctcagtttatcccttccccaaaccctactcataggggtcttcggcactgggacagcacaagatgctcatatcttcacctcctgtctctgtgtttccacaccctcttgccagtgatcttagcttctcgaggtacagcgaatttgcattggaaagctacgcagcttatttgcgggcagtaaaagaaagagtaaatcacataagtccaattcattgtgtcacaacgacaaagtttctgtttgtgaagcattccgatcacatttctcccaatcaatcaattggtctggtatctgatactacttgagagatgggaaaatatgcaagatcgaaagagagaacagttcaaagtacagagaacagttcaaagtacactgatcttggagggaagcgtctatatggcaagagaacatacccttccaataaatcattgctcggttacctgtcaagaactctagtgcaatggcaccaaccaaagaaatacgacgtataggaagctgaaccccctcgatttggcggggcttcttgttgtacaaccctcttttgttttcgtttattggttattaggttcattcatattaaattttgtttgcacctcagctcttgtaacactatagatatgtaatgtaacgacctgtctgaagaagtgaaaatgttccatattgctg

SEQ ID NO: 78911 - DNA, 2253 bp, Zea mays
  Clone ID: MRT4577_171993C.1
gccggccgggtcgggaaaaaaaaattcggctcgagaaatcaacccgttcgttcctcccttctcccccctctccccacatcgggcagcctcccccctctctctcaccgctcaggtcaggccaggcccggcgggagagagatccggcgagagacgcggcctcttgctcccctcaacccccttaaagaagcgcatagaagcttcggaaggtgcccctccgcggctcgaaggaggggaggggacgccgcggacaatgacggcgatggaagccgccgtcgacgctatgctcgccgccgcgagccgtgccttcacgagcacctttgccatcgccatccagatccaggggtgcatgatctgtttagtccttgctctcgggtgggcggctgcttcaattgtcagaaaaggggttataaagaacatgaggcgcaacattgtagatggaaatagttttgcatttctttgtgacaacatagatgagcttgagcactctgttcaggagaatttacctagagtctctgtagtcatgcctttgaagggctttggcgaacataatttgcaaaattggcgaactcagattacatcactttatggtgggccactggaattcttgtttatcgtcgagagcaaagatgatcctgcttatcatgctgtttcccgtttgatcacagagtacaaggacaatctggaggcaaaggtggtcgttgctgggttgtcaacaacctgtagccagaaaattcacaatcaattgatcggtgttgaaaagatgcacaaggataccaagtatgtattgtttcttgatgatgatgtgaggctgcatcctgggactatcggagctctcacaaaagaaatggagaagaatcctgagatatttatacaaactggatatccccttgacttaccttctggcagtttgggcagctattgcatatatgaataccacatgccttgttcgatgggatttgcaactggtgggaagactttcttcttgtggggtggctgtatgatgatgcatgctgatgattttaggcaagaccggtacggcattgtcagtggattaagagatggcggttactcagatgatatgacactcgctgcaatagcaggacagcacaaaaggctcatattttcaccacctgttgctgtgtttccacacccccttgccagtgatcttagcttctccagatactggaattacctcaggaaacaaacttttgttctcgagtcatatgtatcgaatgtaaactggatgatgaaccgtgcattatttacaagccattgctatctgtcatgggggtttgtctggccatacattatggctttggtccatgttttagctgctcttcgggcaccgtacagcaaagttgtaaaggaagcatccgattcatcttggggtttgttcctggtgggcctcttgttcacatgcactctgatcgagctcgtttcaatgtggaatttgactaaggtggaaattcaactgtgcaatatgctgtctcctgaaggaccgaaagtatctcttgattcatacaactgggggctcgtgttcatcgctgtgttggtagacaacttcctctatccagtatccgcaatccggtcgcatttctcccaatcaatcaactggtctggcatccggtactacttgagggacgggaaaataagcaagatcgagagagagaacagttcgaagtacactgatcttggagggaagcatctatacggcaagaggacataccctcctaacaaatcgttgctcggttacctgtcaagaactctagtgcaatggcatcagccaaagaaatatgacgtataggaaggtcgaccgggggagattcagccctcgattgtgtggggggcttcttgttgtacacctcttttggtttcaactttctttcatgcctctctctctctctctctcctctctgattgtttagtggttattaggttcattcatattaaattttgtggtgttcaatcggcgccaccactttgaaagggttgcattgcacctcatagttctttgtaacactagagatatgtaacgatttggctgaagaagtgaaatgttccatgttggtgagaaaaaaaaaatgaatccccccgatttggcggggcttcttgttgtacaacccccttttgttttcgtttattggttattaggttcattcatattaaattttgtttgcccctcagctcttgtaaccctatagatatgtaatgtaacgacctgtctgaaaaagtgaaaatgttccatattgctgg

SEQ ID NO: 78912 - DNA, 1423 bp, Zea mays
  Clone ID: MRT4577_171994C.1
ggacaatctggaggcgaaggtggttgtggcagggctgtcaacaacctgtagctaggaaattcacaatcaattggtacacaagtggcattgttctcatcctcattgtatctttcatgatcggcgttgaaaagacgcacagggatacaaagtatgtcttgtttcttgacgatgatgtgaggctgcatcctgggactattggagctgtcacaaaagaaatggagaagaatcctgagatatttatacaaactggatatccccttgacttaccttctggcagtttgggcagctattgcatatatgaataccacatgccttgctcgatgggatttgcaactggtgggaagactttcttcttgtggggggctgtatgatgatgcatgctgatgattttaggcaagaccgatatggtgttgtcagtggattaagagatggttgttactcagatgatatgacactcgctgcaatagcagtggcgagaactgtctcacttgagtcaccaagtcatgggtttcaagctgcctctccgtatttgcggtgggaggacttacctcagtttatcccttccccaaaccctactcataggggtcttcggcactgggacagcacaagatgctcatatcttcacctcctgtcgctgtgtttccacaccctcttgccagtgatcttagcttctcgaggtacagcgaatttgcattggaaagctacgcagcttatttgcgggcagtaaaagaaagagtaaatcacataagtccaattcattgtgtcacaacgacaaagtttctgtttgtgaagcattccgatcacatttctcccaatcaatcaattggtctggtatctgatactacttgagagatgggaaaatatgcaagatcgaaagagagaacagttcaaagtacagagaacagttcaaagtacactgatcttggagggaagcgtctatatggcaagagaacatacccttccaataaatcattgctcggttacctgtcaagaactctagtgcaatggcaccaaccaaagaaatacgacgtataggaagctgaaccccctcgatttggcggggcttcttgttgtacaaccctcttttgttttcgtgtttcccagctccctccgcgtccccccgtctctgatcgtttattggttattcggttcattcatattaaattttgtggtgtccaactggcactacttcagggcttattcggttattttcaatccatatggattggaggggattgatacagattgaaataaattttgacttactagggattgaaactccctcaatttctctcaatctatatggattggggtagaaccgaacaaatcctttgagggtttgcacctcatagctcttgtaacactatagatatgtaatgtaatgacctggctgaagaagtgaaatgttccatatttgcttgtt

SEQ ID NO: 78913 - DNA, 809 bp, Zea mays
  unsure (1)..(809): unsure at all n locations
  Clone ID: MRT4577_171995C.1
ccggccgggatactctttcaactcaaaaaaacactcactcactcacacttacacacacataacaaatacccaaccaacatatactcaaaatggctcccaaggttctcgtcgttcttaccagccagtccaagatgaacaatggcaaccccaccggctggtatttgcctgagctcgctcacccctactatgacctcgtcaacgccggcgttgagatcaccgttgcttctcccgctggcggtgaagctcctctcgaccagggctccgttcagatgttcaaggaggatgaggagtcagtaaagttcctcaacgagaagaagcaggtctgggagcagacaacccctctcaaggagttcctcggcaagtcttccgagtttgacgccatcttctaccctggtggccacggccctatgttcgaccttgtcaacgacgagacctctattaagcttattgaggagttttacaaggctggcaagcccgtcgcttccgtctgccacggccctatcgtcttcacccaggtcaagattgacggaaagcctctgctcgagggccgagaagctactggcttcagcagctccgaggaggacgctgttggcctgaccagcgccatgcctgttctcctcgaggatgagatcaagcgtgttggtggaaagtacgtcaaggctgatgactgggccgagaaagtggctgtcgatggacaaatcatcactggccagaaccctgcttctgcacacgctgtcggcaagggcattctcaagnacatcggcgcttaaataatgaaatagtatgaataataataataatctgccatc

SEQ ID NO: 78914 - DNA, 355 bp, Zea mays
  Clone ID: MRT4577_171996C.1
aaccaaagggggggacccataccatacccatactgtcatgcatgataagagaaaaaaagaaagcacacgatccatcttaacacatgacacatcaagctgtaccaactgacaacatggggcaaagagcaactgacacctggcccgaccaacattacaacccgacgcacactttatttagcccacgtcactctcaacccaaaccggacacgtccacacgacagtcactgttagctacttaccgggctacgtacgagacacacacacacacagagagagactctagtaataaccgtagggtactagaacagcaaaatcccgtgttatactgccatgtacgcgcgcaagcgaatacccc

SEQ ID NO: 78915 - DNA, 293 bp, Zea mays
  Clone ID: MRT4577_171997C.1
ctcaagcatacccgccttaagctcttcaaggatttcttcctccaagagaggaaggagctggggagcacctaggccacacacagcatcgggctctagcgccccattgatcacatactggagggacttcaatcgggtgagatcaactaggacaacctgctctttatcgtcgagaacattaacgttgcagctttcgagaccaccctgtaggtaatcgagcgggcggtagatgatcttttgaacctaacggaaatccagcttatatctgtcgctagatctagacacggtgctagggg

SEQ ID NO: 78916 - DNA, 468 bp, Zea mays
  unsure (1)..(468): unsure at all n locations
  Clone ID: MRT4577_171998C.1
gtagtggaaatcttattaccaaattttacaggttacaaaaattttacattattttatcggagtgattacaaaagtataagtttgaaatatatgctagctcaagtgaccatcctcaataagaagtatagaagaagtacttagacttataagaaggccgagcccaccggcacttaacaccatcatcagcagcacaaaactataacctgaaataacactaggttagtgttgttagacgtcatccacttggcgatcatcttttgttctgaacttgttccgattatccatcttcagttccgttcatcagcaccatcttgtggtcgactcagttctggttttccgcatcacgtggttaattcacgtaccagcatcaaacgtgactcactactcgtgagaatgctgatacatcctggctcgagcttgtcgttgaacacctaacagtatggtngtggcttcactttcttctccata

SEQ ID NO: 78917 - DNA, 750 bp, Zea mays
  unsure (1)..(750): unsure at all n locations
  Clone ID: MRT4577_171999C.1
ccggggagttttattacaataatattgttatatatgcttgattgaggatgtttctaagaggagcgtgaattgcgtgttttgggttacaaggtaaccatcaatttgaatttaagtagttgagtggttggtggatagctccaactatctttgaaaagaatgattgtttatgtcgagaaaccagttatgaaagaaatgaatattggtacttttatatggattttgggggaagtctttacatagccagaatgacttatatgtctctcttctatcgtgcgttttagtagccacaaagcctagatgtggtttaaagtggttgcatgttagtcatgttaattgtagaataaatctttgattttcttgatccattgattatgtattaatacattgaggatctgatggttctcttcccgatgcatgcttgtggagcctttgttggaccacttatctattggtttgaatgaagtcattgcctagcctagagttggttgtgtgtggttagtcacctatttctaaatgatgtggtttttacatcagcttgagatgtttgtcaaatgtgtgaagggttacagggttattattgaccctgtatgtctggtactttgagtgcatcgtatgatagaatgaaatgtgagtttctgaactacaatagatgaagacttatattatgtgtaggttaaccttactagtttggatatttttcttagntgagttgttggatgaagtacagtgacattggttaagcaagtattg

SEQ ID NO: 78918 - DNA, 230 bp, Zea mays
  Clone ID: MRT4577_17199C.1
gaaccattagctatactatagcgcaaaaaccgagcacctgggggttgtcgtgctgctttgcttgtgagcgccactcacatcacggggtgggtgcccacgcgctcattaccgcgcgacattgcacctcggtacctgcactcggcattccacgcgtcactccgcgcggtcactgcacgcggccaggcccccggtattgcgcgcacagcgatcaacctgccactgcagaacct

SEQ ID NO: 78919 - DNA, 251 bp, Zea mays
  Clone ID: MRT4577_1719C.1
cttcactgcaaagaacttctgaagccttcaggtcccaaggtttggataaacgtgatgaaaatcttgtaactgcagaagatgcatcggcaccacattttgaagagaaaactgacgtcgatgtagatgtggaagttgctaagggtgagagctcaagcgatacggttcctggtggctctgagaatcctcctttacctgacgagtacgttgatcacaaaattgaagaagacacatgcactgctccttcaccttca

SEQ ID NO: 78920 - DNA, 515 bp, Zea mays
  Clone ID: MRT4577_171C.1
gtttatacgtgtagaggacattgaagagacaatccggctgattcctaacaaggttgacgatctgaatcttaaacctcctcacttgtctatacaaccttacacttgctccaagagttcctcatcaaattgggagcaaacatcacctagtgctctgcattcaacatctttaggaggcacttctgcctttggccaatggcagaggccttcaccgctcgcaacacaaagttttgatttgagcaattacaagctacttatggaacacctgtttaaggttgttgggaggcaggaggaagcattgagtgctatttgtgcatccattgtgcggtgcaggtcgatggagaggcgtcttggtgcaaacaaaaagaacgacatatggtttagtttttatggccctgacagcattgccaagcggagagttggtgtggcacttgctgagctaatgcatggtagcttcaaggaacttgatatttctggacttaagccctaatgattgcggtaaccctagttttagagga

SEQ ID NO: 78921 - DNA, 556 bp, Zea mays
  Clone ID: MRT4577_172000C.1
cctcgaggcctggccggtaactcaattgcaaaccatccacctgtctgactgtacaaactgttcagttctaccagcacttggagtacttcccctactcaagtttttagatttcgggggtttccatgccattgttcacatcaaccaagagttttcaggaaccagtgaggtcaagaggtttccatcactgaaggaactggtatttgaagacatgtctaacctaaaaggttggacttctgtacaagatggtcagttgcttccattgctcacagagcttgcagtgattgactgcccactactagaagaatttccatctttcccatcatcagtagtgaagctcaaaatttctgaaacagggttcgctattcttccagaaatatatactccaagttctcaagtttcatcatcattggtatgcctagaaattcaccagtgcccaaatcttacatcattagagcgaggactgctttgccagaaattatcaatgctccagcaattaaccatcaccgggtgcccagaattaacttcatctgccagctgaaagatcagaagccctgac

SEQ ID NO: 78922 - DNA, 554 bp, Zea mays
  unsure (1)..(554): unsure at all n locations
  Clone ID: MRT4577_172001C.1
ctccatccttgcggtttgccgcgccaccccgcccccgcaggccgcagccgcttttttattataaaccgcctgcgctgcgccccctcctcgcgtgctcgatctttcccccctgcgctgcgcacaccaccaccagacgccccgccgccgccgccccccgtcgccccggctcccgcgcgcatcagtccggccctccccgtctcgtctcccccgctccgctgccgcaggtctattgtcccttccggaaactgaagctcagccccccaaaacctcaccgtcctcctgtggttcttgaaagtggcgagagatggatcgtgacgatgtggctggctttgtcagcggaggttgcaaacatttcttgcgggagacttctaatctaatataacccagcagcacagcacagtagatgacagtagcagtagtagggtttttggttcttttcgtttcgtctctggacatgtttcttgactggaatggacagggcctnctnctcccctagccttggatctggtggtaacgttgactcctcgaacgatccctgtcaccgcaggcagttc

SEQ ID NO: 78923 - DNA, 811 bp, Zea mays
  Clone ID: MRT4577_172002C.1
gggtacctcgaagccggccgggactagatctctctcacatgcatatgcatgaattagctttcctccacacgaatgaactataatgagtacgatgtgtgtagtcggtgaacgatcatgacttattagctccccgcttccacggcagttaatgctacttcggtgagcgctagaacccccatgtgctcgaccaagcattcaaatcgggcatacatcaatgtggtgttgatgaagcatttgctgccaatggatctgccgagggcgatgatgaatacaggggtgaggtccctggtgtgaacgcgggagatatctgtgcaccttttcactgtacagaagccacctcctttgcacaagagatcattaatgtcttacatcacaaaaatacgtgaacaatctgattgatgcgatgaaccaaacagaaagcggatgagttactgaagcatgtgctgggggtaaccaactatctccttaacacagtgaaggacaaccaaaattataatgagaagaacatgcaggatgaggcggcggtggtattcacctattacagggatggtgccactaatgcgacatacctctatttctctcatggtcttaaggagatcaagtgctaggcccgccgcgaaattacttacccatgttgggtactatctatgcaccattattatatcccaaactatagttgtcctggctgaattgaactcaaaccgccttgtttgagaaaaaattggcccatgatcggatcgcttgctaaagctcaatattgttatcgaaacgcacttgcttacatgcaaaaaaaaaaaaaaaaaacgggccc

SEQ ID NO: 78924 - DNA, 188 bp, Zea mays
  unsure (1)..(188): unsure at all n locations
  Clone ID: MRT4577_172003C.1
aggcataaatcagcnagtgtacatctatatataccatcaagagtacagcgctaagaggacattgtcttacgccaatctgacaagtactcgttctaaaatactatatgaacaataaactgtacagatttttgtggtaaacggtgtcatgaatatcagggtaacacggcattatcatatgtacgttttct

SEQ ID NO: 78925 - DNA, 352 bp, Zea mays
  Clone ID: MRT4577_172004C.1
tatcttttaatggtatagatccaattattcctttttgtaacacgtctttgagcgaatcctaagtttcataatggcagaaatccaattttcttttgtaaaggtgaaggatgaagtggtgagcaaaaatgaagaggatgatgtggggcctggatcaatttgcatattactaacgatcaggtgtattgtgagacggagaaggtgaaagaaggaggagggaatacgttgaatgatctagccaggagaacaacagatttggatcctttggacaagaaagaagcaagctcaagcaagggacatctggccatgcctctcaatccttcggaattacaaggcgttatatggcccccacata

SEQ ID NO: 78926 - DNA, 1174 bp, Zea mays
  unsure (1)..(1174): unsure at all n locations
  Clone ID: MRT4577_172005C.1
gccacccctcctcttccttgtgatctccgaatacccactcagatccagggccgcgccgtgtaatccccggctctccccacccaccatacaattggccatgttgctgctacagtgagcatgtctaaggtggcagtgtcattcacacacataattaaaagcgcagaacctgcattcagtgttttggtgtcaaggttcttccttggggagacgtttccaattccagtatatctttctcttcttccaatcattggtggttgtgctctagctgctgtcacagagctgaactttaatatggttggatttatgggtgccatgatatccaaccttgcatttgttttccgcaacatcttctcgaagaggggcatgaaggggaagtccgtcagtggcatgaattactacgcttgcctgtcaattatgtccctggtcatactgactccatttgctatagctatggaaggccctcaaatgtgggctgctggttggcaaaaggctcttgcagaagttggacccaatgttgtctggtggattgctgcacagagcgtgttctaccacttatataaccaggtgtcctacatgtctctcgatcagatttctccattgacattcagcattggcaatacaatgaagcgtatatcagtgattgtttcatcaatcattatcttccacactcctgtccgcgctgtcaatgcactgggagctgccattgccatccttggcacattcctgtactctcaggcaaaggcgtgaggcgggccatgatgacgaacgtctgcagaatcagtagcaagcactaaatccaattttgcttgttccagtggcatgtagatatcgggttagttttccgtatgagagtttgtaataatggatgaatggctctgctgtttcgttcttgtttgttggccagactcaaatccataggccatgaactgcggtcgagtgtacctgaataatactgtaacggagaattcgccgaaaaaaaaaaaaaaaaaaaaaaaaaaaaaaaatgccgcccgctggtacgagaccgtctctgcggctgtagcctcaagattccctggtaaggctgtttggtgtaaatctgccttgcgggatcagctcctgcggcagctgctcctgcngatgaggctgaggacgatgatgaccttgatcttttttggtgatgaaactgaggagg

SEQ ID NO: 78927 - DNA, 611 bp, Zea mays
  Clone ID: MRT4577_172006C.1
ccgagaacaaaggtagtattattttacgtcccagctatctttttagttgttacatgtaaactggcaaagcaatcacaatgcagctaaacataacatcacattctactttgttgtactagccctgcaatatatttgtacactgatgcagagaacattcttcaagccttcgaaatcttcactcttgcttgttcaagctaacttctgatgatgctcaaacgccagaaaggtagggaggttcaagcgctcatggtcatggtcatggctcgcagcttagctctgctaaaataccataaagaaacagcatcggtgaatttcgttacggtgttattcaggtacacttgacgacggttcatgtcacggcctgtgcatttcaatctggtcaacaaacaagaacggaacagcagagccactgatccattattaccctctctctcacgaaaaccgaaccttatatctacatgccactccaacaagcaaaactggatccagtgcctgctactggctccgatcctttggccaaagctttagcctcacgcctttgcctgagagacaggaatgtgccaaggatggcaatggcagctcccagtgcattgacagggcggacaggcgtg

SEQ ID NO: 78928 - DNA, 656 bp, Zea mays
  unsure (1)..(656): unsure at all n locations
  Clone ID: MRT4577_172007C.1
attccattggnacccgcacgtttctttaccctaaccttttcactgctccagcgaaggcacacacccgccgccgtttcttcatctcccatctacatcttcctcgcagcgccggcgcggcggcgctccatcttccgctccctcctttacttgcgcttggcactcaggcgacggcggcggcgcccagtctcgtactctcagcggcttcccctcccgcctctcgccagtcgcctcgcgccctcgcctccggtcctgcgcacgccggcctgttaccctgcgtgcgtgcctctctctctcctcccgcctccggtggatcgtcaacggcgcccggcctgagggcgggaaccagcagccgctgccccaccaaggcggtcgcgccgatttgggagcgtttatgccccaaagcgaagcgttacccgtactcctaacgattcagcgcgcggaagcgtgcgcttagtgccgctttctggaaccctgttcatcgtaataataattgaaattaagttgccactgtaatgatactctttgtacaagtaagagtactccattgtaatgatacacgcctttgagttgcatccttttttttttctgtctgctgagcatgactctggagttaaatgactgatatccttgttgggatttgctgcatgaagaattat

SEQ ID NO: 78929 - DNA, 2156 bp, Zea mays
  Clone ID: MRT4577_172008C.1
gagcttgatttcgatgcacgcgtagcgtagctcggaagtcgggggcccgggcccagcttttggaaaaattgggtacctcgaggccggccgggcaccttcccggctcctttactcgccggaggcgaaccagaactcgtgccacctcctcctgttccttgccatctccgaattcccatctgaaattccaagggccgcgccgtgcaatcgaggctctccccgctcaccatatatcggaggctccgcccccgcgcctcgaatccttcgccggagaggtgctgttgtttgccgtgatttgagccgggtggaggtgtctcgcttcttgatcttgagaggtgttcctggttgattgttgggagcgaagaaggcatgataccttctgtgaggatctctcctggctatgcagccttctctggctccagcctacgcttaaaattacattcaattccatccatctctagtctcaaaccctccaaatatgtggtctcctcgctgaaaccactctacctagcaccgccagatggtccacacacttctgagcttaagtcttggagacaaccacttgagttccgttgtgctgcttctgctgccgatgacaaggagtcaaagactcaggtggtgccagttcagttggaaggcgcacagaggttaaagatctccatctatttcgcgacctggtgggcgcttaatgtgatatttaacatttacaacaagaaggttctcaatgctttcccttacccctggctcacctccacactctcccttgcctgcggctctgcgatgatgcttttctcgtgggccactcgtcttgttgaggcccccaagaccgacctagacttctggaaagttcttttcccggttgctgtggcacatacaattggccatgttgctgcgacagtgagcatgtctaaggtggcagtgtcattcacacacataattaaaagcgcagaacctgcattcactgttttggtgtcaaggttcttccttggggagacgtttccaattccagtatatctttctcttcttccaatcattggtggttgtgctctagctgctgtcacagagctgaactttaatatggttggatttatgggtgccatgatatccaaccttgcatttgttttccgcaacatcttctcgaagaggggcatgaaggggaagtccgtcagtggcatgaattactatgcttgcctgtcaataatgtcgctggtcatactgactccatttgctatagctatggaaggtcctcagatgtgggctgctggttggcaaaaggctgttgcagaagttggacccaatgttgtctggtggatcgctgcacagagcgtgttctatcacttatataaccaggtgtcctacatgtctctcgatcagatctctccattgacgtttagcattggcaatacaatgaaacgtatatcagtgattgtttcatctataattatcttccacacgcctgtccgccctgtcaatgcactgggagctgccattgccatccttggcacattcctgtactctcaggcaaaggcgtgaggctaaagctttggccaaaggatcggagccagtagcaggcactggatccagttttgcttgttggagtggcatgtagatataaggttcggttttcgtgagagagagggtaataatggatcagtggctctgctgttccgttcttgtttgttgaccagattgaaatgcacaggccgtgacatgaaccgtcgtcaagtgtacctgaataacaccgtaacgaaattcaccgatgctgtttctttatgggtatgtaatccaaaccggaatcctggtttcaatagaaatagtttctgctatcagaagttattaaaaatagtgcattccagtattttagcagagctaagctgcgagccatgaccatgaccatgagcgcttgaacctccctacctttctggcgtttgagcatcatcagaagttagcttgaacaagcaagagtgaagatttcgaaggcttgaagaatgttctctgcatcagtgtacaaatatattgcagggctagtacaacaaagtagaatgtgatgttatgtttagctgcattgtgattgctttgccagtttacatgtaacaaaaagatagctgggacgtaaaatagaacggagggagtagatgcgtggaaggtttgcagccgct

SEQ ID NO: 78930 - DNA, 2342 bp, Zea mays
  Clone ID: MRT4577_172009C.1
gaacgaggacgaacgtatggggaacctcgagcccgcgcgggaccagcatctataacagccgccaccttcccccttatactcgccggaggccaaccagtactcgtgccacgactgccacccctcctcttccttgtgatctccgaatacccatctcagattccaagggccgcgccgtgtaatccccggctctccccacccaccatatatctagtatccgcgcctcaaatccctcgcgaaacgccccgccgtaagcagttgttgtctgccgtgatttgagccgggcggacggattgatcccgggacgaggtgtctcagctcttgatcttgatcctgatcctgggaggcgttcctggtttattggtgggagcgaagaagccatgataccttccgtgaggctctctcctggtcctgcagccttctcaggctccagcctacgctcaaaattaccgtcaattccatccatctccagtctcaaaccctccaaatatgtggtctcctcgctgaaaccactctacctagcaccgctagatggtccgcgcactgccgagcttaagtctcggagacagccacttgagttccgttgttctgcttctgctgctgatgacaaggagtcaaagactcaggtggtgccagttcagtcggaaggcgcacagaggttgaagatctccatctatttcgccacctggtgggcgcttaatgtgatatttaacatttacaacaagaaggttctcaatgcattcccttacccctggctcacctccacactctccctcgcctgtggctctgctatgatgcttttctcgtgggccacccgtcttgttgaggcccctaagaccgacctggacttctggaaagttcttttcccggttgctgtggcgcatacaattggccatgttgctgctacagtgagcatgtctaaggtggcagtgtcattcacacacataattaaaagcgcagaacctgcattcagtgttttggtgtcaaggttcttccttgggggagacgtttccaattccagtatatctttctcttcttccaatcattggtggttgtgctctagctgctgtcacagagctgaactttaatatggttggatttatgggtgccatgatatccaaccttgcatttgttttccgcaacatcttctcgaagaggggcatgaaggggaagtccgtcagtggcatgaattactacgcttgcctgtcaattatgtccctggtcatactgactccatttgctatagctatggaaggccctcaaatgtgggctgctggttggcaaaaggctcttgcagaagttggacccaatgttgtctggtggattgctgcacagagcgtgttctaccacttatataaccaggtgtcctacatgtctctcgatcagatttctccattgacattcagcattggcaatacaatgaagcgtatatcagtgattgtttcatcaatcattatcttccacactcctgtccgcgctgtcaatgcactgggagctgccattgccatccttggcacattcctgtactctcaggcaaaggcgtgaggcgggccatgatgacgaacgtctgcagaatcagtagcaagcactaaatccaattttgcttgttccagtggcatgtagatatcgggttagttttccgtatgagagtttgtaataatggatgaatggctctgctgtttcgttcttgtttgttggccagactcaaatccataggccatgaactgcggtcgagtgtacctgaataatactgtaacggagaattcgccgatgctgtttctttatgggtatatatatagtccaagccggaatcccgttttcaaaaaaaaaaaaaaaaaaaaaaaaaaaaaaaaaaaaaaaaaaaacatgaactgcggtcgagtgtacctgaataatactgtaacggagaattcgccgatgctgtttctttatgggtatataaatagtccaagccggaatcccgtttttaatagaatattgttctatcgtttgtgcattccagcattttagcagagaatgagttaggaccattagcgcttgaacctccctacctttttggcatttgagcatcatcagaagttagcttgaacaagcaagagtgaagatttcgaaggcttgaagaatgttctctgcatcagtgtacaaatatattgcagggctagtacaacaaagtagaatgtgatgttatgtttagctgcattgtgattgttttgccagtttacatgtaacaactaaaaagatagctagaacataaaatagtactacatcttttctcaaatatttgtcacccgttagtttatttttatttttcacaaaaaaaaaaaaaaaaaaaaaaaaaaaataat

SEQ ID NO: 78931 - DNA, 203 bp, Zea mays
  Clone ID: MRT4577_17200C.1
gatggagagggcactcaagaagcaggctgagcataatgggacagttcgaggctgaagacaatgctcagagggagtgggagagagaattcaggctgagccgttattcacatatggtacacactttccttttgcatatgtgaaacattatacttaataccaagttcctttcattcgactgtctaaaaaaggacctgagctaatat

SEQ ID NO: 78932 - DNA, 779 bp, Zea mays
  Clone ID: MRT4577_172010C.1
agcgacaaataaaaagaaacggagcgaggccgccagcgggaccctcgctcccgacgaccgactgctggagccaactcaagcagccgatccgcaagtggcgcgcgactatggaggcaaccgcgacggtgcagaggctggccgacctagaggtgcagcggcgccgtatcgccgaggtgcgcgccacggatctgcacgaatccaacctcgtctgctcggagcagctcgtcgtcgacactgcggcgttcgcgtgcacaacaaacgacgctgttcagatcaccgacatctccctcgagctcgccgtaccgcttcacctcaccaaggagctcgtccagcgtggccccgcctcggtcacggctgcgcccacatcttcctccgtttccgtttgtgagatggaccgcttccgcctggacaccaacggcacaaagctgctgcaacgtgcaatactatgcggagcccatcttctccaagatcgactcggatggagaggcgcgcgtacaggaccaagtcatgcacgacaccaggggcaacccatgggagttctgccacatctaccgcgtccagcacgaccaacacaaactcctccccatcgggtggagcaggaactacatggcaggagctctggatgagcagatcgacgcgtcggtgaggcagcactacctgtggaacctgcaagccagctggagtttattgctattataacactcgttttagtaggcttatttattatgatattctcaattctatcttgtccataatagtatttaaaaagtgtttctagc

SEQ ID NO: 78933 - DNA, 172 bp, Zea mays
  Clone ID: MRT4577_172011C.1
acgcgttcgtttaatttgataatctctagtcgcctccgtcgaagcggtcttccaagagggcaaaatactgcagtaaggacaccgacttgcatcgcagtaacggtgggaagagtttccgaccgaagaaaggaaaggcgcgctgtagaagaacccaactggcgccagtaggggg

SEQ ID NO: 78934 - DNA, 302 bp, Zea mays
  Clone ID: MRT4577_172012C.1
ggcagcaacaacagggacaatttggcattcaaaaccattccaggggggcacaacataaataaataagctaaaagggggggcacgggtcagggtagggaacctgaaacctctactaaacgggttgggggaaattacccggaaaatttatctcttaactgaagtacaacaggttctccaacaaagggggccagaggggaaaagctaaccccaaggggttaaacatgcatcactattttagagctctaccatgaggggagagggccccaactggtgctgggtgcgccgggtgatctttacatccg

SEQ ID NO: 78935 - DNA, 512 bp, Zea mays
  Clone ID: MRT4577_172013C.1
gggggtcgcctcctatagggggattgtatctctcgagggcggccggggattaccgatgtaatggctcgaccatccctgcagattaccgccatggctcccaagatcctatacatccttgtgatcctcggacgtggcctcaccggcgggtctgggcgccttccatgtgatagagatggtatgcgacaagcccacgtactccaccttcctgaagatcctgcaggacaccaagggcgcgggcgaggcgaatcagctccggtcggcgacgcctactggtcggccccgacaaacttgccaagcctctggagtctctgcccgccgataaggtgcagccggcggaggagaaccacgtccttctcagttacttcgaccccatcatgctggacgagatgaagacactcaccgccatcctctccacgctgctctccgttaccgacaagaaactcggcggctctcaatgtaccccagggccgacgacgcgcaaatgtacttcccgggctcccggcgccccctgc

SEQ ID NO: 78936 - DNA, 1370 bp, Zea mays
  Clone ID: MRT4577_172014C.1
gaaaaagtccagaattaacataacaataatacagtgttagaatcatagcatgctatgatctcaatggcattggaaagcatggcgcctaaacttgtgacataatcttgctaaacttgtctcacagcttcagtggaactaaaagatcctgttccctgaagccatcaaatgtgatcttaccctcatatgccttaacaacatctggcaactcattggcatacctcaatacataccttgtggagaacatgttggcactaccaagcaatgccgaaatcaacttgacgttgggcccaatctttccctccctcatcaacaagcttagcacggcacaccttggtatgatgttcctctccaagctataccctataatcgcaggttgctccattacttcgcttagttcaaccttcagcacatccaggaagaaccggatcttcttctttatgatctcatcagagaagttaactatattcggctgtttcttgaacgctctctgcagctcaccctcggacaccccgaagctccggtaaagggccaccctatgcagccacttctccctactaatgcagcacaaggcgcggatgccgtaaggaaagcgcttctccgttacgcccaagccgagctccttgagggcctcgaagatctggcatatgcggtcgggcgacatcatgagcacgcccatctcgatgactactaacttcgagatagactcgtcggggagcccaagacggcggagggtgtccaaggcgggccgcatgatcttctccaggccagccgagagggcgcgcggggtgcgcgagatggcgaggcagacgtcctcatcggtgctgagaatgttgcggaggaactggatgcaggggacgaggtgcttgtcgaggctgcgcgtgaggagggcaggatatctggcgagccgccgcggcttgacgccgagggaggcgaagaggtcaagcttggggcggatccggtcggggtcgacgctgaggatctgcgataatcggcggactaggtcggcgacctccgcgtcggtgaagccgtagctgcggaggagcgcgcggacggcgtcggccttggcggtggagcggattgggagcctgtgggcgaccgcggcggcgggggagagcccgcaagagacaagggcagcacagggctcggagacgggagcgtccgcgatggttgctaaggagtggcagtgggggagggcgtcgctagggattgcgccggtgccgaaggggatttggcagaggcggaggagccgccgccggcagatggaagcgaacatgccggtggcctggcccctgggattgtagtacttaagtgcggcggggattccgggccggccggcccatctccaataccatatgctaatatgctatccc

SEQ ID NO: 78937 - DNA, 599 bp, Zea mays
  Clone ID: MRT4577_172015C.1
cgctccccccactcccactcgcctgaaaccctagcaaggagctcccggcggatggacgagggaggcggcgctggtgctgcggctgccgccgccgggaacgcggcgggggcggcggtgcaccacaacgcgcggtccgcggaggacgtcttccgcgacttccgcgcgcgccgcgcgggcatcgtcaaggcgctcaccaccgatgtggagaagttctaccggcagtgcgaccccgagaaagagaacctgtgcctttatggattgcccaatgagacctgggacgtgacccttccagctgaggaagtacctcctgaacttccagaaccagcactgggcataaactttgctcgtgatggaatgatcgaaaaagattggttgtcgctggttgcagttcatagcgatgcatggctactgtctgtagcattttactttggggctcgctttggatttgataaggaagccaggagacggctcttcaccatgattaatggtcttcccactgtatatgaaagtgggacggggattgccaagaggcaaaaaaaagtctccaacggcagcagcaaaagcaacaagtcccaccctaaaccatcgaagcaatccaa

SEQ ID NO: 78938 - DNA, 343 bp, Zea mays
  Clone ID: MRT4577_172016C.1
attcggctcgagggtcgcgctgctggaacgtgtatatgccctggctttccacactgggaccgggcagctgtacaccatcgtgcatgaacagcgcgaggatgccgtgaaccaagccattagagaccaaacaagcgtgggacaactgtcgcttggctgggatcacgtaggagaccaatgggacaacggctggagacatcgagttgaccaggtgcatcaccagataggtcaacaggcacaccagccgcgcggtctggttggcttatcagggtagggatacgcacatccctgactctgttgctgtacgagagtacatgtacacactctatgatgagagcatgggagg

SEQ ID NO: 78939 - DNA, 325 bp, Zea mays
  Clone ID: MRT4577_172017C.1
ggcccccaaaaacaatggccaaaggggacttaaaaattttggggggcccaaccaaccccaagcccctggtggggggtccaaactggcccggctccaggttttgactgaaaaccaagcccccttgtccctcccaaaaaagaacctgccctaaaaaaatggggggggccccataacccccaattttttaatttaaaggggaaaatttaccctgggggggaccctccccccttttccaagtatacttttgggggggggggcttattgcccattaaaaatttttttttaccagaaataaattgggcgcctcttcccaccggggccaagc

SEQ ID NO: 78940 - DNA, 420 bp, Zea mays
  Clone ID: MRT4577_172018C.1
ggggggggggccaagaaaattttgccaaaaaaaaacttttacatggggaacaccgccctaatttatggaacaacatgggaaggggaatcacttacaaaattccgggggggggtcggacaagggtacagctaaaaaagaaaaatctcgggatttctttttttggagccaagggttcaggaaccgcaatgaaaaatatttacaggggcactcgggcatggaaattttttttttttttcccgaattctcgaatagggctcgatctcatgattcaccgaacaaagggggggcatcccaccagtttgttttaaaaaacccgggttggcttaacaagaaaggggggggggttataaaacccaccacacatgggcccagggtttttcccaaaatatgaagggttccattggaaaccctggggcccaa

SEQ ID NO: 78941 - DNA, 377 bp, Zea mays
  Clone ID: MRT4577_172019C.1
gctcgttggactaggttctgcccgttgctgctcgatcctggtctgcgtgggctgcgtccggactcgcccctgcttctggggcgaagagattttaagagcgccgagtagtttactgcgtccaaagaagggcctacgactaagagggtttaaggatggaagtgtcccgggacgaagaaccccaagaagagacggccctgtccgattaattacgaacccattcattataaaagtaaaggggattagttctcccatagtacctttactgagaatacttcggtagcggaaaactcggaggaggagctccctaaaacgaacaatacgccttaggctacctagttagagtgcgtgtcgcatacctaggttaatattcgtgcgga

SEQ ID NO: 78942 - DNA, 661 bp, Zea mays
  Clone ID: MRT4577_17201C.1
tttttttttttttttttttttttttttttttttttttttttttttttttttttttttttttttttttttttttttttttttttttttttttttttttttttcccccggaaagggggaaccttttttttccatttaattaagggggggcccaaaaggcaaaaattttgcaaatgccccaaaaaaaaaaaatttttgggccgttgggcctttggaagagtgtcccaaaacccaaaaaaaaaaaaaaatggggggccccccaactaaaataaaaatgaaccccgttaaactttccttgaaaaaaaatacttaacggggggaacgccaaaaaaaaaacccgggaggagtcccacggggttttgggggccccccccctaaaagggttttttaaaccccaaaaaaagacccaaaggggaaacttttgtttaaaaagtggccccttttgatcccatttttgcaaccccttggaaagtggggaaacgtttaaacctgggtttttgatttgaaaaaaacccaagggcccaaaaccccccttatttaggcctaaaagggaactggtttccccccacaaagggttggtgcttggtggcccaacaacaagggttggccaaacctccttgtatttataaaaaaaatggacatggaaggggcccccgcccttttc

SEQ ID NO: 78943 - DNA, 294 bp, Zea mays
  unsure (1)..(294): unsure at all n locations
  Clone ID: MRT4577_172020C.1
acccgtgaatggcaaccgaaggcagccaccngcagaacaggcataatgaccgnggcgaacggaaaaaacccccacaacaaagggncggccgaccggacccagcgccgccaacacacccaacagccggagggacgccggggccgccacgccacggaccaacgcgagggcagacaccacgcctccagcgccaagggacacaacccccgccgacggcgctggcgcaaccgccgcaaccgccgcgccaggcacaacaagagcgagcgggcccacgggcaaacctgcaacgcatgaaca

SEQ ID NO: 78944 - DNA, 310 bp, Zea mays
  Clone ID: MRT4577_172021C.1
gagaaaagggttagatcccgattctctcataggaaacttttatttatttcgccttcgttggatgatatacaacggttggtggagcatttgcttatactggccaaagactcaggtttaccatcaaagtatatcgccgattataactcaagacttactgtatcctttctacgacctgactgttatggtgcatatctcatcttatttgagtacttagctattaatggcatataatcttgttaaatgaaacaaaatgtttgctttctgaaactaaaacatggtactctaacttgcttaaactcaatcctttaaa

SEQ ID NO: 78945 - DNA, 1693 bp, Zea mays
  Clone ID: MRT4577_172022C.1
gcgtgcacggtaagctcggaattcggctggaagctcagctgattgagcagtccaagaaccaaaggataaggtgggtgggcgcctgggcggggaccgccggagcccggagggaggagaagcgagcgaggtgccgtcgtcagctagcactagcagccatggaaggcggcgcgcacgagttcgacggctccaccttcaaggagtgcttctccctctcgtggaggaacccctacgtcctccgcctcgccttctccgccggcatcggcggcctgctcttcggctacgacaccggtgcgttgcgactgcgtgcgcgtccttcttcctgcctgtgctgtgtgtcactgtagtgtagttccatttcttcacccgccatatccagctcaaagaaagatgggccctataggagttcggatgatgatcgtgtccagctagatgatatggctagctagctattggtgaccgaactgtgtttaatttcctgttagcgtctgctagctggaaaagtgttcgacgatatcgtacgtgttattagtgagcaagtgaccagtgacgtgagctccgcttccgtgtctgtgcgtgcgtgtgatgagtgctgcaggtgtcatttcgggagctctgctctacatccgcgacgacttcgtttcagtggacaggaacacatggcttcaggaaatgatcgtgagcatggcggtggccggcgcgatcatcggcgcggccatcggcgggtggaccacggaccggttcgggcggcgggcgtcgatcctggtggccgactccctcttcttcgcgggcgcggcggtgatggcgtcggccacgcgccccgcgcagctcgtggtgggccgcgtcttcgtcggcctcggcgtcggcatggcctccatgacctccccgctctacatctccgaggcgtcgcccgccaggatccgcggcgcgctcgtcagcaccaacggcttcctcatcaccggcggccagttcctggcctacctcatcaacctcgccttcaccaaggcgccggggacgtggaggtggatgctcggcgtcgccgcgctccccgccgtcgtccagttcggcctcatgctcgcactgcctgaatccccgcgctggctctacagacaggggagggcggaagaagcagaggcgatcctgcggcggatctactcggcggaggaggtggagcgggagatcgaggagctgaaggagtcggtggcggcggagcgtgggtcgtcggagaagctgagcctggtggcgctggtgcggacggcgacggtgcgccgggggctggtggccggcgtggggctgcaggtgttccagcagctggtgggcatcaacacggtgatgtactacagcccgacgatcgtgcagctggctgggttcgcgtccaaccagacggcgctggcgctgtcgctcgtcacctcgggcctcaacgcgctcggctccgtcgtcagcatctacttcatcgaccgcacggggcggaggaagctgctggtcatcagcctcgtgggcgtcatcctctcgctcggcgtgctcacggccgtgttccacgagaccgcgtcccactccccggccgtgagcgccaccgagaccgctcgcttcgacgcctcgctgacgtgtccgtcctaccgcccgtcgtcgccggccagcggcggggcgtcctgggactgcacccggtgcctcaaggcggccgccgacaaatgagctc

SEQ ID NO: 78946 - DNA, 984 bp, Zea mays
  unsure (1)..(984): unsure at all n locations
  Clone ID: MRT4577_172023C.1
ttgggtccctcgaggccggccgggaaacagtttgacgatgctccacgtagtatacacaacacgcgcataccagtctaaactcgaagccctgattgggagctcagctgattgagcagtccaagaaccaaaggataaggtgggtggggggaccgccggagccgggaggccgggaggagaagcgagcgaggtgccgtcgtcagctagcactagcagccatggaaggcggcgcgcacgagttcgacggctccaccttcaaggagtgcttctccctctcgtggaggaacccctacgtcctccgcctcgccttctccgccggcatcggcggcctgctcttcggctacgacaccggtgtcatttcgggagctctgctctacatccgcgacgacttcgtttcagtggacaggaacacatggcttcaggaaatgatcgtgagcatggcggtggccggcgcgatcatcggcgcggccatcggcgggtggaccacggaccggttcgggcggcgggcgtcgatcctggtggccgactccctcttcttcgcgggcgcggcggtgatggcgtcggccacgcgccccgcgcagctcgtggtgggccgcgtcttcgtcggcctcggcgtcggcatggcctccatgacctccccgctctacatctccgaggcgtcgcccgccaggatccgcggcgcgctcgtcagcaccaacggcttcctcatcaccggcggccagttcctggcctacctcatcaacctcgccttcaccaaggcgccggggacgtggaggtggatgctcggcgtcgccgcgctccccgccgtcgtccagttcggcctcatgctcgcactgcctgaatccccgcgctggctctacagacaggtatccatccatccaattcgcctactcttcttttcttctggccattntttttttggttggctacgagcctacgacgaactggaatgaaacaggggagggcggaagaaacagaggcgatcct

SEQ ID NO: 78947 - DNA, 407 bp, Zea mays
  Clone ID: MRT4577_172024C.1
aattcttattcttaccctttaaaatttttttttacatattcttaattttttaaccaaacactagcccacaactccggagctataatacaaggacgaggctcccaggtggggctcatccattggccggtgctgagggccccaaaagggttaacagctgcgccctaagcatggtagctgcaggtcacactattaagttggacggaatggccatcgtactggcaagcggccaccaggaatttatatgcattaggggatagaccagagatgaccgcatggacagagacgaaaaggggaacgtggccatcgagatacaggttccgccttcccagccgaaggcagctgcggttgttggctggaacgaccaccagggattcgatttttcgaaacccccaaatgggaccttggca

SEQ ID NO: 78948 - DNA, 2848 bp, Zea mays
  Clone ID: MRT4577_172025C.1
cctcggcgccggccgggccgggcaattactccagaagtccaaatccctctctcctccctcccagcaccagccctggctgctccaccgagctcccatccatggctcctgtcttcttccttctacctctcctactcggccagatccttctctgcgcagccggcgacaccatcaactcgtccacacccttgtccggcgcgcagaagattgtgtccaagggcaacaagttcaccttgggcttctacaccccaccccaaggtaccaacacctcctccaaccagggtaactactacatcgccatatggtacagcaacataccactgcagacgacggtgtggatggccaaccccgatctgccggtggctgacccgaccaccgccgccttgaccatcggcagtgacggcaacctcgtcctccttgatcagtccaagaatcggcaggtgctgtggtcgacgaacataagtactagctccaattccaccatcgctgtcctccaggacggcggtagcctcgacctcagagatgccaccaattcatccatggtttattggcgaagcatcgatcatcccaccaatacctggcttcctgggggcaagcttgggctgaacaagaccactggtgtgagccagcggcttgttccatggactaacaccgccaacccctctcctgggctgttctcactggagttggatccaagaggcacgacgcaatacttaattcagtggaatgattccataacatactggagcagtggtccttggaataataacatctttagccttgtgccagagatgacctctggttacaactatgacttccagttcatcaacaatgccaccgagagctacttcatctactcaatgaaggacaacagcatcatctcgaggttcatcatcgatgtggatgggcagatcaagcagctgacatgggtgcctgcctcccagtcatggatcttgttctggtcccagccaaggacacagtgtgaggtgtacgcactgtgtggggcctatggtagctgcaacctcaatgcactgccattctgcaactgcatcagggggttcagccagaaggttcagagtgattgggacctccaggattacagtagcgggtgcaaaaggagagtaccattgcagtgccagaccaattcgagctcttcacaggctcagcctgataagttctataccatggcaaatgtgaggctacctgataatgctcagactgctgtggctgcgagctctcaagactgtcaagtggcttgtctgaacaattgctcctgtaatgcatatacttataatagtagtggctgctttgcttggcatggggatctgattaaccttcaggatcaatacagcgggaatggaggaggcacactcttcctcaggcttgcggcttctgaactgccaggctccaaaaggagcaaggcagtgatcattggtgcagttgttggcggagttgctgcagttttaattgtcctttctattgtggcatacttcctatttcagaaataccgccgagagaggactctcaggatacccaagactgctgggggcacactgatcgcctttagatacagtgatctgcagcatgtcactaataacttctcggagaggctgggtggaggtgcctttggctcggtgttcaaagggaagctcccagattcaacagccattgctgtgaagaggctcgatggagttcaccaaggggagaagcaatttcgtgctgaggtgagcaccattggcaccgtacagcatgttaatttggtccgcctccttggattttgctcagaaggatcacggaggctgcttgtgtatgagttcatgccaaagggctccctggacctgcagctattccttggtgagacaacagcactcagctgggctaccaggtaccaaatagcacttggaacagcaaggggcttaaattacctgcatgaaaaatgtagggattgcattatacactgtgatgtcaagccagaaaacatactcttggatgagtcatttgtgcctaaggtggctgattttggtctagcaaagctcttaggcagagacttcagccgtgtattgacaacaatgagaggaacaaggggttaccttgcgcctgaatggatcagtggtgtggcaattacagcaaaggcagatgtctttagctatggcatgatgctcttcgaactcatatcaggcaggagaaattctgaccacggagaacagcatggatccacctttttcccaacctttgctgccagcaagcttcatgaaggagatgtgcggaccttgttggaccccaagctgaatggagatgcaaatgctgacgaactcacaagagcttgtaaggttgcctgttggtgcatccaagatgacgaaagtgctagacctacaactggtcagattgttcaaatcctcgagggattccttgacgttaacatgcctcctgttccaaggtcattgagagttcttggtgaaagccctgatgttataaacttcttttcagatatatcttcaaaccagacttcccagacacagaacagcacaacttcccagacacgcagtactacttcaggcagttcacatctccaaagtccatagatcagataacctgcaatttattagggcgaatacttgaagagcatgagtaaatctgtacatgattagaacctaatatactcagtttttgtatcactatgcttcagtactgtaaatttagtgcagaatgtcataaccaaaacaaggaaggtactagtgttgcatttacattacacatgcaagattccccattttctcttactaaatgtaaaaaatcaagatgatctcatcgaagttgattgattgaaaaaaaaaaaaaaaaaaggccccta

SEQ ID NO: 78949 - DNA, 408 bp, Zea mays
  Clone ID: MRT4577_172026C.1
cggctcgagcggctcgagcacacactcttgctaccagtccatccatctaataattgccaatctttctgcatatatatacacacatctatatatctctcgtttaaagacaccatgttcgaaaacggtttcttcggtctcttcagatcctcccagcaagaggaagaacctcgtacccagcagcctacttggaacgctaccacgatggccatggagcagcccgccaattatgccggcaaccaacaggccgcagctccctctcaagaagagcaacaagtgaaactccgcggtggagccggctgctgtgatgtgtgctgcggatgtttcgccggtctctgtgctttcgagtgcctcgaagactgctgttaaagatgttcagtcttcaacgacaatcacaactagatgttttta

SEQ ID NO: 78950 - DNA, 1139 bp, Zea mays
  Clone ID: MRT4577_172027C.1
ggtcgaccaagcgtccgcaattctaaccctaaccttctccaactcccatcctccatagccatccgccccccgatcccgaaatgccccccgccggcagccgccccgcccccgcgtctgctgaatgctgctcctgctcgggcgctcggctgctcctcacgtcacggctccggcagagcccgtacactcccccggccagcattctccctcgttcctcagatcctcacagtcgccgccaacggccagcacccgcccggccgccccatagtgcgtctgctcctgcacggacgtcgcccgcgctcggctgctccggccttcagcacggctgccggcactcagaagtcagaactcactcacaatcaggacacgtcaaaaccccactaacatgtctccatccgacgacggcgaggaaaccctcgccgcactcatagaactgtccagaacgccggagggccggaagggtctcaccgacgtgctcatcgacaccctcttcctcctcccggcctccccgccgcgcctcttgctcctccgcctacgcctcctccgcaacctcctcgccggcgatgagctcaaccactacgccttcatcgagcactccggccccgccgccgtcgccgcctccgtgctctccttcccctcgctcgcccccgacgtggcgcgcgccgcgctccaggcgctcgggaacgccgcgctcgccggggagctccaccgcgacgccgtctggcaggcgctcttccctgaggcgctgcgggtgttcgcggggctcagggaccagggagtcctggatcccctgtgcatggttctcgacacgtgctgcggcggggaaggcggtcgcgggaggctccaggagctgtgtcacgaggagctgggcctgccaatcctcgtccaagctgtcactacggcgtcacaagtggagcacaaggaagagtggttagagtggcttctgttcaaagtctgtgctgaggagcagaagtttgagagcttgttctatgccttatgctctgctaatgatgtgggcgagtataatgctaagcatatttttcttctggatacgttgtcaaggtgttttgatagccatcccgaagaaagtaccgtctcagacaagtttgcacatgatgtttttaatctacacaagcatgctg

SEQ ID NO: 78951 - DNA, 410 bp, Zea mays
  Clone ID: MRT4577_172028C.1
gcggaggagacggcctgctgcatgccgagagagcattcaggatcgcacagctggagctagcattcctcaacgactacttctacacaagataccccatcctgttctggcgtggcttcccgctcctctgtgcttggcaccccctgctcaccatcgctctcatcgcgtggcttgcaagggacatccacaagctctacgaacccagggaaggagagactgcccacgtcattaagggtgtcaatgttgacatcaccatcacatggatattcatgggcattatcgttctgaaggagctgtggaagatggtcacctacatcttgtcggactggaccaaggtgatgctgctgtgcgagtacacttcgcggaggagcatcggcccgtggtgtatgtggatcccattccacaacgtatgt

SEQ ID NO: 78952 - DNA, 216 bp, Zea mays
  Clone ID: MRT4577_172029C.1
gcaccgactactgctagatcggatcacgctgccgtgctctctgatgcgcccgctgagagtacatggtcacctggctgccagagatggcgaagcacatgcagtaacactggtatctttcagcccatggataaccacaggtgctgctgtagttgttgagtgcacataccatgctcattttgccctcggcatcgggggccttactactggacctggcgt

SEQ ID NO: 78953 - DNA, 425 bp, Zea mays
  Clone ID: MRT4577_17202C.1
tttttttttttttttttttttttttttttttaagggttatttgttaattgtggtttatttttgttctttttcatatttcttgtgtaaaaaaaaccaccccttgcaaatttcttgatgagggctttaatgaagggaaaaccccgcgcttttaaaggtagaccgggggattatttgcttccccaggtgcaaaagcaaatggccctaattttccccaaagaccagggcccccgggtgggatttcgccggttttgaaaggatgaccctttgggcgggatcggtttcggccaaaaactggggggccgcccggggggcccattgtggcagggtcagggggggcccttgaaacattatgggatttgggcacccaaagggcctgggggggaacacaggccagggccattgggtgaccatggggggggccccgc

SEQ ID NO: 78954 - DNA, 1081 bp, Zea mays
  Clone ID: MRT4577_172030C.1
cattgggtacctcgaggccggccgggattgcccatggaccagctgcctcgcccggtcatcttccacgacggccgcctggtgcgccggccgacgccgctggcggcgctgctggtcgtgctgtggttccccgtgggcttcgcgctcgcctgcctgcgcatcgcggcgggggcgctgctgcccatgccgctggtgtactacgccttctgggcgctgggcgtgcgcgtgcacgtccggggcgccccgccgccgccgcgcgccgagcgcgccacgggccggaggggcgtcctcttcgcctgctcgcaccggacgctgctggaccccatcttcctgtccaccgcgctggggcgccccgtggcggcggtcacctactcgctctcgcgcctctccgagttcctctcgcccatccggacggtgcgcctcacgcgggaccgcgcctccgacgccgccatgatccgggacctgctggcggagggcgacctcgtcatctgccccgaggggaccacgtggccgggagcccttcctgctgcgcttctcggcgctcttcgcggagctcacccacgaggtggtgcccgtggccatggagaaccggatgagcatgttccacggcacaacggccaggggggtggaaggggatggacccattctacttcttcatgaaccccagcccggcatacgtcgtcaccttcctcaacaagctcccgcccgagctcacctgcgccggcggcaggacaagccacgaggtggccaactacatccagaggctaatcgccgccacgctctcctacgagtgcacaagcctcaccaggaaggacaagtacctgtcgctcgcaggcaacgacggggtggtggccacccccaagccgccggcgccggccaagaaacccaatggctgctaatataacagggtcgatgatcgaaaaaaaggaaaagaaaattgggttattgtgatgtgtctttgctgcagaattaatactactagtagtatattcattgtgatgatgcttggcaatgggctgtaatttttctcccttgtattggtcacatctactatatattatagcaatggctttattttaccacc

SEQ ID NO: 78955 - DNA, 272 bp, Zea mays
  Clone ID: MRT4577_172031C.1
ccccgggtaaaaaatttctgaaattttcaccctcccacgaaaaaagggcaaaaaaatgccccggggacaaaacaaacggcacccccaggggcaacccaccccttttggcttttggggcccaaaatttaccacccgattgacaaaacttaccaagcggagtcaatcccccaagttggggggtcccccaaaaaaacgaccatggcccttaactcccgaaaggcctttttttcccccccgggccttttgaaccggggaaaaaaaaacccaaaggg

SEQ ID NO: 78956 - DNA, 513 bp, Zea mays
  Clone ID: MRT4577_172032C.1
cattgggtacctcgaggccggccggggagaacggctcacccttgctgccgtctgcttccacgcggccacaccaaccatacacctcttacttcgtccggtctcagcttacaccaacatccgctacgtaagcgactccttgctcgtaggtaccgcgatccggaccggatcgaatctcctttgaacggcactgtccacgtgcattgtcgaccgaaaagcacgtcctctgcgtgcgcttgatggatctactcgctagcttgacgatttactcaccgctatgacatcttgtacagccccgtatcacatgatacgctaatcttccgagtgcgcgatcgatccgctctccatacattgtgaatgcttgccgcatcccggttgctgcacactgataggggaggcacactgctgacatctggttcatcgacaaaattccccacagagcattagagtgattatcttgagagcagcagatctgcacctgaagattcatattgaaagatggaagattctgctgat

SEQ ID NO: 78957 - DNA, 204 bp, Zea mays
  Clone ID: MRT4577_172033C.1
atcaggacacacatatgaactttcattttggagtggaaacccctctagaaataagtgtctcaggtttttacagcgtcgagagggaaaaaacacacatgctactttttagaaaggggggaaacctctacatgataatcgggagactattaactctaccgaaaacatttgtcattagagaaaaaattacaggtgattgatgtttaa

SEQ ID NO: 78958 - DNA, 512 bp, Zea mays
  Clone ID: MRT4577_172034C.1
ggcgattgggttcctcgaggccggccgggctcgctcggtcgtgctcggccttaaatccccgtgaatgtcgtcggccttccatcagttctcgaggacggattcccagggcgcggccggaggcggacgtcggcgggttggcctttccaatcgagatcagtgaggtacaaaatggatgaggactgcgctgacgatgatgacgacatggccacatcgtcttgaggtagcagtcagctacatcgtcttcctcaaagccttatattctcctcataagagtgctcttcatttgagttggttcagtcaagaattttttgtgccatcaaagaagtagctcatcatggcttgcatcagggaacctgcttccattttgctttttttatgaaggatttgagaattgcgcaacaacagttttagggaagccatttgtgtcatcatgtaaacatgaaagctcagataaatgagaaatgcacgctgttatattttcttggaaaaaaaaaaaaaaaaaaggggcggcc

SEQ ID NO: 78959 - DNA, 795 bp, Zea mays
  Clone ID: MRT4577_172035C.1
gcgccatccgccgtgaaagttgcccctcatccgtcttccatcctctcccccacgtcgcgcccccttccatcctcgctcggccgtgctcggccttaaatccccgtgaatgtcgtcgaccttccatcagttctcgaggacggattcccagggcgaggccggaggcggacgtcggcaggttggcctttccatgaggtacaaaatggatgagggctgcgctgacgatgatgacgacatggccaccatcgtcgccctcaggatttacctgaagggagttatggatcggatggaacaggtggttgtggaatttcttgaggtagcagtcagctacatcgtcttcctcaaagccttatattctcctcataatagtgctctctcattcgagttggttcagtcaagaattttttgtgccatcaaagaagtagctcatcatggcttgcatcggggaacctgcttccattttgcttttttatgaaggatttgagaattgcgcaacaacagtttcagggaagccatttgtgtcatcatgtaaacatgaaagctcagataaatgagaaatgcacgctgttatattttcttggttcatattttctggaacagcataatgatcaggctcgaacataattctagcctcatgattaaatatgaaagaagggatcctgtgagagaacttgataaggtttttgcctgtgtatgtgtaacaagttctctgttccactcttaactttgcaaatttgcttcggaaataaaaattgtgttcttgctcttccataaaaaaaaaaaaaaaaaaggccccta

SEQ ID NO: 78960 - DNA, 629 bp, Zea mays
  Clone ID: MRT4577_172036C.1
gcccccctcatcctttttccatcctctccccccgtcgcgcggggtgtggctgctggctcggccgtgctcggccttaaatccccgtgaatgtcgtcggccttccatcagttctcgaggacggattcccagggcgcggccggaggcagacgtcggcgggttggcctttccagactggaccggatcagatctaattctttctttcctcccggagcgagattagtgaggtacaaaatggatgaggaccgcgctgacgatgatgacgacatggccaccatcgccgccctcagattgaaagatttacctgaagggagttatggatcggatggaacaggtggttgtggaatttcttgaggtagcagtcagctacatcatattcctcaaaagccttatattctcctcataagagtgctcttcatttgagttggttcagtcacgatttttttgtgccatcaaaggagtagctcatcatggcttgcatcggggaacctgcttccattttgttttttatgaaggatttgagaattgcgcaacaacagtttcagggaagccatttgtgtcatcatgtaaacatgaaagcttagataaatgagaaatgcacgctgttatattttttaaaaaacacccccccc

SEQ ID NO: 78961 - DNA, 446 bp, Zea mays
  Clone ID: MRT4577_172037C.1
ttagctcaagaaggtgaagaagagcaatggcgcagatgcttgccatcaacgaggtataccgatcctttctcctctttctatggtatatgaataggtgtggatcgatagataattctcgcttgagttgccattgctgattacatgctgtcaaggttatgctctctttggccgtatcagcgatatattgtttttattacatgctttgttttgctattatttgaatagttttatttttattttcatttagttctatttttctttattagttattgatttttttatgttttttgatagattccttttttattatcgttattttattttatatttttttttttatattgtttattatctctatttattctatattaatttggtatatattatatttattttatatttttttctctatttatttaactattttttattttttttcatatatt

SEQ ID NO: 78962 - DNA, 355 bp, Zea mays
  unsure (1)..(355): unsure at all n locations
  Clone ID: MRT4577_172038C.1
cccacacttncantgtctcgtgggtggatttggagggcatcgatctctggagcagaaaaacaaatctttcaacattagaggaagcatctaccgctcctggaccaccaactacgagacccccgtctggaacaacaacggagtcctaaccgagggacagcaaggtccaatcctccttgaggattatcatctaaccgaaaagcttgctcagctcgacagataacgtatccctgaacgtgttgtgcatgcacggggagcctgagagcagattcctttgaggtcactcatgatgacaatcaccctacatgtgctgattatctccgtgctcctggggtccacacacctgttattgtccgtt

SEQ ID NO: 78963 - DNA, 405 bp, Zea mays
  Clone ID: MRT4577_172039C.1
gttcgtcggtgcttaccagcagtagtgtagctgctcctgttttgatcggccgccatgatgtaaatgatcatcacccaactggaacccctgttatctcgttacatgcttaggcctctgatacgtctcgttcaaaaaaaaaaaaagacatagagaaagatctaaacaagaaatattaaaagacaaggctacgcatgataaaggtgcgccttctatattgtgctggactacgtgggcctggctttagaggttccaactcttataggctgaggtccataccggtaactttgttttacggctacctaatttcattaacgtgcgcgttattcacactcactggcttgaagaaaagcattatatcgcgattgtatctaagcagagagatatccttatttatacgtttgttta

SEQ ID NO: 78964 - DNA, 116 bp, Zea mays
  Clone ID: MRT4577_17203C.1
tcgcgctcgaggagccactaaagctactgccatctgctatgatagcacaaacgtatgctgatcatgtcacgcatactataagtgcacatactatcgctacagagtttactagcagt

SEQ ID NO: 78965 - DNA, 607 bp, Zea mays
  unsure (1)..(607): unsure at all n locations
  Clone ID: MRT4577_172040C.1
gtcaccgaagagcaagcagacgagattcagagtgctggagaggccgctcagaaagagtttgcacaaaacgtcgttggtgtagggaaaggtgatgccgagactcaagcagcttggcaagaagcgcaagacgacgtcgatgaacaagtcgatgctgaaaagacttctgaagaggttgaagcgcaagaagacgagcattcaactacagtcgaagacgttgaacaagacattgttgaagagactgctgaagctgctgaagaagctactgaagactcagatgatgtcgccgaagatatgttggagaacccagcagcctctcaaggccccttgatgggttggacattgactgcccgcagtctggtcaatggaggctatgtcgaccgaccagagcaaataactgaattcgatgactggaagatagaatatcatgtcaaagagatacctgaagagaaacgatggaagctgtacaagtcgctccaagcgcgaaggcattcactcattggacaagacgaagaggccgttgacaggggccttaagcatttaccgcgattaatacagcgctacagcaaaccgcgacgcccgtggagggaggagcangacaggatcaacg

SEQ ID NO: 78966 - DNA, 503 bp, Zea mays
  Clone ID: MRT4577_172041C.1
tcggtaaaagttaagtgctccgaattgcgtgcagaggacaaaaaagagttgaccaaacaactcgatgaactcaaaactgagctccttggcttgcgtgttgccaaagtaaccggcggtgctgcatccaaattgtccaaaatccgtgtcgtacggaaagctattgctcgtgttaacattgtagtgcgcgcagagaccaaggaaaatttgcgcaaattctacagaaacaagaaattcaagcctttggacttgcgaccaaagaagactcgtgctatccgcaaagctttgtccccacgcgatgccaaccgcaaaactgctaaagagttgagaaaacgttcagtatatccacaacggaaatacgctctcaaggcttaatttggaatcttatttgatattcaattattggagcactgaaaaagtttatttttttttggataaaaaacagcaaccaacatttgtttcggcatagcaaacaaattgaaatgaataataagatttaatcagtc

SEQ ID NO: 78967 - DNA, 634 bp, Zea mays
  unsure (1)..(634): unsure at all n locations
  Clone ID: MRT4577_172042C.1
ggngnacttgggcaaagggaacccatannacagnatctcctcaagnatggnaaacccccaattaggatttctatactaagtggntaccatgaaagaaattgaatctatgtgcaataatagattgattaatgagagacacagacgttacaatatataggggtgaggagatcttgggcaaaaggaaacacatagacaagatctcctcaaagatggaaacacccagtcaggatttctcaggatttctatactaaggaaactccaaatcaggatcatatacaaagcaagccctcaatcaggatcatatacaaagcaagccctcaatcaggatctcactaaccataatactctacactgcctactaggccggctggctatagagccacgcgcaggtcctgtatatggtagggaatcagctgtctaacatataggctattgatttctgttccatccatcttgttcaatattttccaggatcaactggctgctcagatgcccagttctcagtgcagcacttattccgtaagttgggaaatgatgaattcattggtcagcgggtaatccttgtagtttctcaaaagaatccaacgtatctgaaagatgttcttggctgatccgtttgctgatgctttccctg

SEQ ID NO: 78968 - DNA, 740 bp, Zea mays
  unsure (1)..(740): unsure at all n locations
  Clone ID: MRT4577_172043C.1
ngatacctcccccgactcctaaaaccttaaaccctagctccggccactcccccatggcggccgtccgggtcatcctccctcatccccacctccccatcccctcgtggagaccccagctcaagccctcctcatcctatccccgccgcgcggtcgccgccccagcttcgctgtctccgtcgcccctcacggcttccctgcaactcggagatgtgatcgaggcgcagcagttcgatcggcagatccttaatgagatctttgaggtggcgcgggagatggaggccgtggagtgcggctcccacgggttccgaagccgcgtccttgaggggtacctcatggccacgctcttctacgagccctccacccgcacgcgcctctccttcgaggccgccatgcgccgtcttggcggtgaggtgctcaccaccgagaacgctcgcgagttctcgtccgctgccaagggcgagaccctagaagataccataagaactgttgaaggttattctgatattatcgttctgagacattttgaaagtggagctgccagaagagcagcggctactgcagaaattccggttattaatgcaggtgatgggccagggcaacatcctactcaggctctgttggatgtatatacaataaagagagaaattggtaggctagatggaatcaaacttggtttggttggagaccttgccaatgggagaactgttcgttctctggcctatttgatcgctaagtaccag

SEQ ID NO: 78969 - DNA, 695 bp, Zea mays
  Clone ID: MRT4577_172044C.1
ccgggatttctcctcccactcctaaccaaaccgtcgctaactatcactagtcgccgtgtggtggtcgtcgtcatatccctcgcctctgcctcgaccgcccgatcgcccatagcctgctggcctgctctgctagccatggaccggtccaagtcgtacgcgggcgggcgcatgcagatcgagccgtactacggcggcggcggcggcggaggaggaggcgcgcgggcggacttccggtcctactcctacagcgccggcgggacggggccgtcgtcctactcgtacaaccagtacgagtacggaggcccgggggcgggtgaggaggaggtgaagcggagcaagtcgaagcggcggtggctggcggacccggacatggaccgcaagcgccgcgtggcggcgtacaaggcgtacggcgtggagggcagggtgaagggctccctccgcaagagcttcaggtgggtcaaggaccgctacctcgacctcgtctacggttggtcctgatcctcagagcacgcacaccaccgctctccatggttgttgtttggctctcgtagatgttgttcatccttcctggtgatgtgaaaccaaccagtacagtgtatgtattcatgagatgtgtgactcaagaggttgtttcagaccaaattggtacagataaattcatcgttcaggtgatccgaaaaaaaaaaaaaaaaaag

SEQ ID NO: 78970 - DNA, 438 bp, Zea mays
  Clone ID: MRT4577_172045C.1
tttttttttttttttttttcgaggagattttttttcatatttggcatcaccttcgtcgagtttcaattgccatattggcattacaatcacacacggtttgaagatttgacatcactttttctaatcgtcgtttgtggatgtgttcttcctatcgtgcccctgtctcctttcttctccacacatctccgtcatgcaagcttatttcaccaaacatggccatcatcgtcggtgtgatcgcctacggctgccagcagctgggtcgaatatgtcgtcggcttctcgctgtccatgctcaccaactccctggtggtcggtgtgcccatggctacgacgagtgggcgcaacagctctccatcttccaggccatcgtcttgctggtcgatgggtttccgtcccactcgacgatgggtagcacggggaggtcattcatcctcgtgc

SEQ ID NO: 78971 - DNA, 310 bp, Zea mays
  unsure (1)..(310): unsure at all n locations
  Clone ID: MRT4577_172046C.1
tttcctcctaagccaagttctgcatnatacgcaagggtttttttttcaaatatgttgccctcatacaccgccccagcgcccaccaactggtagactagaattagatgatggctgggcacacaaactagaccgcgcctagcctccaaaacaattttcaatacacagctgcatggcttagctcttccctgcgccaagggtgggccagtcacgacacaagatcaccaactctcagagggcggcccttttatttgcaccccttgccgtcggggcgaccaaatatcacattccggatcgcttgtcaaacgctgga

SEQ ID NO: 78972 - DNA, 391 bp, Zea mays
  Clone ID: MRT4577_172047C.1
ctaacatctatgtttctgtaatcgactaacagctctttagcatttaaatatatgtatagcttgctaaagcatttacacatcagtaatcaactctaacatctctgtttctgtataccaaagaacaattcaacatctctgtttgctcatatagttgttcttgactacttcatctactattttatttaaatgctttagcattgttcatatctaaaattaattttaaattgtttttttgaaatcctacttgtaccttatttcaagacctccattctgactggactcattttatatcattttagaagaaagaaaaatataaggatgctgaacctagtgcaatagatcttttcaagtagatgcattgcaacaagaagggaggttttagtgaaaatgt

SEQ ID NO: 78973 - DNA, 724 bp, Zea mays
  unsure (1)..(724): unsure at all n locations
  Clone ID: MRT4577_172048C.1
atctcacaacacctgttcccatcaggaacagagaggaaacagagcccccaacccaccccacccttacccagaaaagaacaaacatacaagagaggaggagcaccagggagccatggcgccgtcctacgacaagaccatcgccacggcagcctccctcgcggcatccctgatgctcgtccgcagcctcgcgaacgagctgctgccgtccgaggtgcgcgacgcgctgtcctcggccctcgccagcctccgctcgcgcatgacgtggcggcacaccatcgtcatcaaggagatcgagggctggtgcagaaactgtgtctacgatgccgtcgaggcctaccttgccacgcgcatcaacgccaacctcaacatggagcgactgcgcgtcagcagcgccggcgcatctgagaagatggtcgtcggcatggaggcaggcgaggagatgccagatgtgtatcaaggagcggagttcaagtggtgcctggtcactcgcgaggtcagggccgacacggacagcgttggcgacggggcccacgaggtcaggtcctatgaggtgagcttccacaagaggcacaaggagaaggccctcaaggagtacctgcccttcatcgtcgccgccgncaaggccatcaacgaccaggagcggagcctcgacatctacatgaacgagcacggcaacgagtggccctccatcgtccctcaaccacccctcaccttcgaaacgctc

SEQ ID NO: 78974 - DNA, 185 bp, Zea mays
  Clone ID: MRT4577_172049C.1
cgggcacgcctgcgggtgccgggccggaattaattgccgggtcttcgagctcattttttggcggccgccctcaactcttctttctgtgggtcaccctttggaacacctacaggtttaacaaccaacgaacggaccatcgcaaaagtcattctaatcaccatctaagatactatataaaggtcttt

SEQ ID NO: 78975 - DNA, 463 bp, Zea mays
  Clone ID: MRT4577_17204C.1
cccacgcgtgcgcacttgaaatcgctttttttctggtgacgcgagacacgcaagcacgatggcatatgagaaatcgttatcgcagctatttcattgacgctcgtaattcctactaacacaacacaaccgaatacaataccagacacgtatgtactgcgccctgccgatctacctacccacctaaaccgcagggctgtaacgccgccacactgatcgcgtgcaagaacaacgacgccaagaaggacgcaccggacagctagtcgctatccagtgacggtttccacaccatcaaccgtttcacgtgcgccgcccagaacagctgccccgcagtggtgtcctgcgccgacatcatggcgctcgccgccagagacgtcatatacctggtaaccgccgtcaccactcccttgatgtctcgagccagacagacagtcccagcatcgtccctataccagctggtgacgta

SEQ ID NO: 78976 - DNA, 199 bp, Zea mays
  Clone ID: MRT4577_172050C.1
tccacgcgtccgtccacgcgtccgcacacgctttcgtgactatggttatccaacaagagttcggctatatttatggaagagctcatttcccgtttcatggacgagtaacagctgtcatggagacaggtacaagttcctatttatacatatttccaatttgggctgtcatgatacactactaccaactattcaattggac

SEQ ID NO: 78977 - DNA, 354 bp, Zea mays
  Clone ID: MRT4577_172051C.1
agtatatatatatagtatcaaaacatatcattgcggaccaacgaatatatggaaacaggagacgcggtcggatcacaccaacatgcgtgtatacacacgttcatgaacacaaagactgacgccaaacatgcaacgagagatagcaaaccgaagaactctgggtgtatctgtctcacacacacaccacacaatacctatgtatggcggtcagttgggcctatgctcattatagttaaaccaccaccacaagctagatcgataataatcatatccatggacgtggatcgacgtgatcagcagttgcaggggttgcacttgcagtcactaccaaagatgcagtcgtggactgacttt

SEQ ID NO: 78978 - DNA, 342 bp, Zea mays
  Clone ID: MRT4577_172052C.1
tgaataataagggggaacaagctgtgctcttgttattttctttctgtgaaaacccagttcttaaaccccacatgatccaacagggccaccgcagctggcatcttacctttaccccccttgttcctccaacactcatcagccgggggggggggggggccttgtggtgcattctttgccgccccacatcccccgcagcttctagcgcagcttgtgctagcacaccttcctgcctactctcggcgccctccctttcttccattcaaccatcaagctgcgtggcactcggctccttattggcccatcaacaactaccgttgaaccaggtggctgctctctaccccc

SEQ ID NO: 78979 - DNA, 187 bp, Zea mays
  Clone ID: MRT4577_172053C.1
acggacgctcaagactgggaccttcaaagagcaattggactgatggacgttggatacacaggaggggagtttgcatcagcggcactgaccaagggaggtgcggattatgccacacgcaaaccgcttgattgttgcttcgtaaaggccaaggagcgggtgcttgaaaccgacggcaactgtcatgata

SEQ ID NO: 78980 - DNA, 1356 bp, Zea mays
  Clone ID: MRT4577_172054C.1
ggtcgtgcagctcctcacgccggcgcgggccggagcgcgccggctccgcgcccctcgccaagttgccggactcgccgcccgcgccggagctcgccaacccgccgctgccgcatcaccgtccctccaagtcctacgccgcgccaccgccaccgcccacgctggagcccgaggcgccgcggggcgaggctctccaagctcgagtcctccgattcattctctgcccccttgcacaaggtagagggacgtgccatccattatcacatagcagatgatctgggcaatgtgcaagatggcacagtgggacactcctttacattcaatggcagcaacttggaggagcttgcccacaagttgcaggaagagactggcctggataatatcatcatatgcacacgcagccctatcaacgggaagctcactcctctccgtctgcaactgccaccaaacaatgcagcgatgcatattgtgctcgtccaggagtcctcaaaggtggctagatcatttgcacggccgtacggttcataaatcacaaacctttggcgaagacacggggggccttgagttctggtggagtgtgcttgtgcgtgtcgctcgaagcccgtacatcattggatcaggtcatgccggttgtgcggtcacgctgggtgtcagaagcaacctatcttaaacctcattcgtgtacatgtaaaaggatcccccctacagtatagttaaaaccagcggagattcatcgcgtgataagtggagagagtcagcatcagcgagccggatggttcttcccccagatgggtttctggcaggatggacaggaacgtcctctttcgttccttcaattttgaaatatgtcgtattgcgctggatgatgcagaggtgtgttcaattttgcccatggctgcgctggatgatgccgtattgcgctgcccactacggcgatggatgccgcctgcgtcgccgagttggagccgaagagttgacctaaccggctgccttttctgttaactgtccgcatcagtgacctctctcgcccaatcatccacgaagactcgaagagggggtgtatttcttgtcggcagtgaaaaaaaaaatctgtggcaggattaattcacgcaggataccaattaatctgctaatttggtgaagttgtgaacttgtgatcacactctttgaaaaaaaagcaactaatctgctaatttagtgccgtctgccgtgggagggattttcagcattccaaacaaggatagcctgaactgacgaaagcggagggatccgtcgcctggccctggcccgccggccatgtgatgatgtgaaagcgagaggtgtcgcacacgctccgtagtggagtggtggtagccttgc

SEQ ID NO: 78981 - DNA, 389 bp, Zea mays
  unsure (1)..(389): unsure at all n locations
  Clone ID: MRT4577_172055C.1
cctcgaggccggccgggcgctnctccgaccacgcgttcatttgcttcggttctctcagataagctagcgcacctgacacccaccacctccctcccagatccacttccccagccatggccaccggctttgactccccgacctcctcccccgccgccgcgcccttccgagacgacccttgtcctcgatggctggggatcggcccgagccgccgcagaggggtgtccatgtctcctcggatgcctaagcgccacctggcatagcaatggcccacagggaggggaaggtgtgcacctggacatcccgagccaggggtaggtgcgcggcgggaggagtgccgccggcaagtatttgtgtttctcgctcccccccctcttcgacgctctgcgggc

SEQ ID NO: 78982 - DNA, 350 bp, Zea mays
  Clone ID: MRT4577_172056C.1
atgtagctcactttcacacacgaagcagtggacgtgcatgttcctgaaacgggcggcattgcccatcatcaccagctggaggggcattgccagttccatagagcggtcgaagagctcctctatgaccacactctaggcttgtaacgcgagatgactgatacagtattgcaacatccatctcacacagttgcacgacacggctcgccctgatcacatcagcttttgaccagcttgtggagactgacccatataagcagctaagcagtcacgggggacgtatcaatcgggtgccacacatggcagggacgatggccataagtggggaatgagaggctcaagccagactaatg

SEQ ID NO: 78983 - DNA, 232 bp, Zea mays
  Clone ID: MRT4577_172057C.1
agagagggttttatatcggcacagggtataggcaccaaccttaaaacttattagagataactgtgaacccaggcttgggcaaattttattataggggttcttttttattgcaatttatgtgattaacgcctttacattggtcggggatgtgaccaggaaatgaatttacggggttcttgggcacaaggcgatacttgcagtgtttacaaccacgctggggtttttgtttggg

SEQ ID NO: 78984 - DNA, 431 bp, Zea mays
  unsure (1)..(431): unsure at all n locations
  Clone ID: MRT4577_172058C.1
gttctttttcgttgatgcactggattaaaacaagtgcgcttgtcggccagtgccgtgtaaatttctgagagttggtcttgtgttattaccaggttttgttcgtttcttttgttttggagagagtggtgctaccagcattactacactagactactctgtgtgaacggaatactactgtactttgtctctaaaaaaaaaaaaaaaaaaaaaaaaaaaaaaaaaaaaaaaaaaaaaaaaaaaaaaaaaaaaaaaaaaaaaaaaaaaaaaaaaaaaaaaaaagggaggnngggggggggggttcaagatgacccacgcttacgtgccccggcatgcaacttaataagtgttacctagggtcaactaaatgcacttccctggccaacgttttaaaacgggaaagccgggaaaaaccctgacttaacccaatttaa

SEQ ID NO: 78985 - DNA, 630 bp, Zea mays
  Clone ID: MRT4577_172059C.1
ctcgaagccggccgggctccttcttttccaaggtgggacaagcaccacgacttccaactctacttgagcaacccatctggcaactacggtggagggaaggttgtcgttgttggggccaacagccagtgtgcacaaggggtaacgaagtcgtgtagcttctggtgcccgtagaggaaaggtgaggcgaggtgctcgccatgcgcctcaaggtgggcgacctcacgtggccatatacgccaattcagagaacgaatgaggtcgcgaagaaatggttcaataaccagaccaaggtctctctgagccgtcctcaatgcgctacgcagtcacggaatcaacctccacatcaatgatgatggcgaccataggccacacgtctgaaacaaccatcagttcacgagattgtttctctataaaacaaaagtactgtatgaaatttgagcacgttgattgttgcgtgctgttttatggcctcaccctttaattgaacacaagtagtgtctgacttttatttgcttcactgtaatatataacatatatttgtctgtaaaaagtctggattctcgatgatttttagtgaattcaaaagagaattccatagtttcctccaaaaaaaaaaaaaaaaaagcggcc

SEQ ID NO: 78986 - DNA, 724 bp, Zea mays
  unsure (1)..(724): unsure at all n locations
  Clone ID: MRT4577_17205C.1
attgggtacctcgaggccggccggngactattgtctcagtaatgggactcgtcattcatatcgcagttttccggctccatcactcccaggggcgtcctctagctaatgtggtctctcggtgccctctcctcatcgccgtcttcgcaacaccggggtagctgctgccgtcttcttggacggcgccgtttccatctctcggcacctcgctccacatcccacacccagtaccagcttcactctaccacacactgcgaaccacacgtctccacgggctgaccgcggatatctcgaaggatatgcctatatctaccatgggcgtgtcactgctagtgacaaacgagaagatgcacgtaactagggaaagggttttctgggacgaccacgtggtacaaggagacaagtactatgaccctgacatccagataatctgtgatgattgcaacatcttcatgaggaatgctcctatcgacggtgacttatgatgcaccttatgacggtggcgcgcaccaacttgactgcaacattcccgagcacgatgctctactgcctcatcatgtgctgttcgtaacccatattctccacccaactgtgcatctccagacacgtgaactctgtcttgatatattgaagaatgcatgaagtcctgcatggaccttacaatctgactgtatagccagaactgctatgatgggccatcctgaggcacacactccacttaactggg

SEQ ID NO: 78987 - DNA, 415 bp, Zea mays
  Clone ID: MRT4577_172060C.1
caaaaaacaagaaaccatttccttaacagggccggggcccaacttaacagtttacaggcgggccaggccaaacaaaaaacggggggggccttgtccccacccccattaacccaggttttaccctttcccctaaaaaaaaaaaaaaactccggcccaacaaacccaggaactttccagggttggggggcaaaactctgcttggggcataatggggggccaccccagcggcaacgggaaaaaaaaccgccttttaaagcttttggttgttgctgggaaggaccccaataggaccccaacccctttgcctacaccaacaaaaactcccaggccgatgcctaccccaactttgaccccagggttaaaccatgaaagctgcccgtcgtaatcgtaagagacccaaccttcagggttttgc

SEQ ID NO: 78988 - DNA, 139 bp, Zea mays
  Clone ID: MRT4577_172061C.1
gggcggcgggcgactattaagcagggcgccccgcaaaaaaacaccggaccgcgaccagaaggtgaaccacgctgccagagagggaggacggaaacagccaggcgaaaccaaggcagagacagcccctgggggaaaagga

SEQ ID NO: 78989 - DNA, 848 bp, Zea mays
  unsure (1)..(848): unsure at all n locations
  Clone ID: MRT4577_172062C.1
gggaccctcgaggccggccgggaaatcgtcgctatccttcttcccctgatatttttctacggcgccggccctgggctcttcaaaaatgcagccgacgctcatcttctggccgagtgcccatctccctccgccgtgccctgggtagcgtgctccaccgcaccggtcgctgctttccccaacctccacggcgctcccttcctgcctcagctcggaccgcgcctagccgagcggctcctcccacatgcgctcctctgtctcccatggcgcacgcgtgccccctggtcggctgctgctccctgcgctcgccgtggctccctgctgtagctcgcccccagctcgccgcacggctcccatggcgtgctcctctctgccaagccgtcgaatcccgtcttcctctgctcgcgcgggccgcgcccctgcttcccctccctagctgagctcgccggttccctttccccaagctccacggctggccgtgcccagcgtcctcctctcagctccccacgcgcaccggcttgctccctgctcggttccgtgaccgcaccgtgtgcccatctcctgtgcgcgcgtgctccctccctgttcctccaaaccagttgagctcctccccatggccgtactgagctccttccctacgccagttggatctctctggtgctcgcccagtctggcgcggcaaacggggaaagaaacagccgagttcctctgcgcgcagccacgtcttctcgctcggnctgctccggatccgaagctggtcaccctgtgtgctcggctttgccttgtcgcaaaacccgacgncgtcgagcctcgctgcccatcgcgaagttccctgctgtcagcctccgcac

SEQ ID NO: 78990 - DNA, 1180 bp, Zea mays
  Clone ID: MRT4577_172063C.1
agattttactcgtgatggttgatagcttagctaaattaagtatggatgttggggataaggatctggtgtacagtttgttacttgtcttctctggaatgttgatggatgaaaaaggcaaagagtgcattttggacaacatccaaatcacaatcagcgttcttactgaacttgtttcctatcctcacatgatggttgtgcgggagacagcattacaatgtttagtagccttttcgacgtttcctcactcgaagatttatcctgtgcggcgtaaggttgtgcaggcagcagtcagggctctcgacgataagaaacgggctgttcgtcgagtggctgtccgatgccggcacacatggcagtccttcgcttaaggggagtctctttcggtggtgtcaggtagtcgggggaggcaagcacaaaaaactgctcttactgggcgatcctgttgggagtcgatgagtgtacatggatctagagctgtcattgtaaggtgagatactgggagcggggtctgctgactagtttttatgtccgagacctggtctttggatcagctgctgccaagttccagatgttcgaagttctccgaagagccatggggccatggggaggaatgtccctggaaattggccctcagtctgggttgccagctcttgtgcccttttcttttccttgatcctggacattgccttgtgtgtctgacacaagatcagaaaactgatgcaggatcgcttgggagttgggaatgtaacctaaagtctccccagtattcttggcctcccgatgttggagaattcaagcatgccacatgctagcatgcgtgcgtttgtgccaacagtttttagtttgctttcatgtttcaaccaggctctgccgctcagaacgtgtcgagtatactttccagttggctagatcgtgtcaggttgtgcagtacgtagaaatttgtcatcccatacagatttgtggccttcctggactgcgcagtactgctacgctggaaaacgctgcgatagccgtgccccgcggaatccacatctctcggtcgattgtgtaatgcgaagcatgcaacagagttaggcggcatttcttttcttcatgacaattattctcgcctcttgtgtcgaaaagtgggagtttgcaaaagaaggggatatagagatgaaccatgtgtttggttgtctgt

SEQ ID NO: 78991 - DNA, 616 bp, Zea mays
  unsure (1)..(616): unsure at all n locations
  Clone ID: MRT4577_172064C.1
cggcccctcccggggctaattagggggcttttcagccaacacctnaacagggnaagggaggcggtggtagacatgggaaggggaaataggctattctaacacgcgccccgcagtcgaaacgtgcgatgggcggcatatgtgtaagaccgggagcgagatcttccgaggaagaccagaagtnngggcagcccnncttggtgagagatgttgtcgcaaactggataccatcgtctgggacatgagagaacagcgaacatctaccaatgagcaacggcgctcacggacgagaggtggagagtcaatctcgatatgcgttcgtgccgctgatgcgtgaatcgggttagntggacaagtgtacaccactgacattgtcacaataaactaaggagctcttggttaagggactgtgaagctcctgtggtngttgacgcagtcaggaagcttcgacgacaccgttagcaactggcctatattcggtctctgccctggagcgaggcaccgtgngttgccgcttggaggactgggagacgaggttctctccnnggaaaacancgtgccgctggagtagggctacgagtgtccgggcgtctggcccaatcaacatctgtgtggacga

SEQ ID NO: 78992 - DNA, 359 bp, Zea mays
  Clone ID: MRT4577_172065C.1
cccacgcgtccgcccactcgtccgcccactcgttcgcggacgcgtgggtaaatgtgtctctgaggcctgtacagggagcattctcaaatatctgtaccttcaatggctactgttttaaggttagcatgtttggatgcgcttgggtgcactgcaggtgtcctacgactaatctctactggcggtgagcattatgatcctggaatgataatagtcttcgccccaagggcacctgtaccctcacgtgtgatcgtgggaattaggctctgatggatgcaatgttggaacgtgtactaacacacatagtgcgtttcagaactcgatttaaatgttagcctcagatgctaatgataacataaagt

SEQ ID NO: 78993 - DNA, 433 bp, Zea mays
  Clone ID: MRT4577_172066C.1
gccgggccggtccatctacctgtaaacatggatcgcggtgaatgccagcgacgccttccccggcgcggcggcctccccgcccgcacagccactggccgtgacggagcggcccctccagttcctcatggattcgcgcgcgttcctggctgggcgagggcgaccaccggaaggcagcaaccggcaaccgcgactgtcatttgatacccgcgactgtcgtttgatacccctgacatttgcgttagaggttggtgctgtgctttttcttttttgctagggcttgctggtgttaggcgttgtgcattgtgaaaattgtcgggctgttaggatcttgtaatctggggaagtgtgcattgcttatggtcttgcttccaccattgtgctgctgtgtggttgctctaggactgttggaaaccatgtaggcttgcacatcata

SEQ ID NO: 78994 - DNA, 101 bp, Zea mays
  Clone ID: MRT4577_172067C.1
agcacgtaatccgccttcgagcgtcacccgcccgcagtccgtgtggcctgggcgagccctttcgtgcccattggtctaaaatttaacaattaacctttaat

SEQ ID NO: 78995 - DNA, 890 bp, Zea mays
  Clone ID: MRT4577_172068C.1
gtgtgttgcactaactattcttaattgtcaggtcctgttggtgaggacatgttccattggcgggcgaccatcatggggccttcggacagcccatttgcaggtggggtattcttggtgaacattcacttcccaccggattaccctttcaagccaccaaaggtattttctctaatttttgatttctaattcggcacgaggtgcaggtggggtattcttggtgaacattcacttcccaccggattaccctttcaagccaccaaaggtgtctttccgcaccaaggttttccacccgaacatcaacagcaacggcagcatttgccttgacattcttaaggaacagtggagtcctgctttaactatctcaaaggttctcctgtcaatctgctcactgctcacggacccaaaccctgatgatcctcttgtccctgagattgctcacatgtacaagaccgacagggccaagtatgagtccaccgcacgctcctggacacagaagtatgccatgggctagaagcaaggctaaaagctggccaaactggtgaatgtgccggaccccaaatcgttatcacctaaataaccagtcaagtcgcaagtatgaatggacttttgaggaccattgtgccctgttgaactcatgtattaccttgtgaagtccgttgtgtctggtttctacctgaccgtttcgttatctgatgctgtttctttaaaaaaaaaaaaaaaaaaaaaaaaaaaaaaaaaaaaaaaaaaaaaaaaaaaaaaaaaaaaaaaaaaaaaaaaaaaaaaaaaaaaaaaaaaaaaaaaaaaaaaaaaaaaaaaaaaaaagggggggccgttcttaaaggaccaaagtttacttccccgtgcttgcaaggtaatagtttttttttggg

SEQ ID NO: 78996 - DNA, 489 bp, Zea mays
  Clone ID: MRT4577_172069C.1
aaaaaaggggatttgaattaaacaggaaaaattacagggccccccaattgaaaaaaaatggaaaaatcaaattagaggcaaccctccgttggaaaaaagtttaaaatgccaacatttctatttaaccggcaaaacaaaacccataaaaccaggggttttaaaagacccaaaaaagcacgactacaggacgaaaaaaaaaccagttaccaaaattactacaatacaaacacaggaggggggccaaactagtcccacaaatccgaaacacctggacagggaattacccaaacctaacctagccgccaaaaccataaaaagggcggccctggggtttgagggcgtacacaacgtccataggggggacggttttgcaaagggcgtgctccgggtaggtaaaaacgtcggggataacattttcaaaaaaaattttgagcaccccgggggtttcctcgaaaataaccccggaaatgggtttaaagccaccccttt

SEQ ID NO: 78997 - DNA, 237 bp, Zea mays
  Clone ID: MRT4577_17206C.1
catcaaaaacactttattattgaactatagcttataagctatctaaaagagggcaccaccaatgatgggttgttggtagaaccgctagctgggtttcgcaaagcaaggtggttgaatggcaacaatcgttgcttttttttaagggtggcgacgttaggccgcacgtgcctgtaaaacgacaaccattgttgcttgggcaagaagggatgggggctcacagccactagctggctgaat

SEQ ID NO: 78998 - DNA, 247 bp, Zea mays
  Clone ID: MRT4577_172070C.1
ctttacatgtggtggtctttatggagcagaaaccagagaacttacaacacacttatttatgtcccttgattgtaccgcgcccattagatgttttccgacggatgcctctaccctgggtacaaaaaaacgtggctggtgtcattacatagcggctcatcacccattaaattctgttaaattgtcaacgcggccccatctttttttttttgcatctaactaaggggcccgatgggggatctacaggata

SEQ ID NO: 78999 - DNA, 1062 bp, Zea mays
  Clone ID: MRT4577_172071C.1
gaagaagagcgcgagaaacggagccccaagaggtggcaagcgtaggaagcagcaggcgttagccgacgcggcgacgccatcgaagaagaggaagaagggcggcgaaggcccggaacccaaggaagccacgcccgcgaagaagcacaagccagccgggacgcccccgaagaagcagaaggcgtccagcaaacccgcgacgcctgctaagaagcagcagtcacccggcaaagcggagaagctcacaccgaagaagaagcagcagtcacccggcaaagcggagaagcccacgccgaagaagaagcagcagtcacccggcaaagcggagaagcccacgccgaagaagaagcagcagtcacccggcaaagcggagaaagccgcgccgaagaagcagcagcagcagccagccggcaaagcgcggaagcccgcggtggcggcgacctcgcccacgaagaagaagcaagccaagcgcgagaagcccactcccaccaagaggaagcgcggcgacgacgagcaagcaaaggaggccaagagccccaagagagcgcccgcggatggggcggcgcgcgcatctacgcccgtgaagaagaagctgaaggaccagaaggcggctgcggcaaacatgggtgtgtgcagcttctccatggcgcgggtgcggcagctgatgcgggccgaggaccccaccatccgcccttccagtgaggctgtcttcctcatcaataaggcttcagagttcttcttggggaagtttgcagaggatgcttatcacaatgccgcgaaggatcgtaagaaatccattatttacgataatctttcaacagctgtttccagccagaagactttaaagttcctttcagattttgtaccgcagagagttgcagccgaagatgctttgaagacaatgacgagcaacaactcgtaaccgattatgctagactagattgcaagtcatctactcctctataccctgtcgtttctgtcttttctatgatttattaccccgagacctgtattagtccatagataagagtggattcaaatgtttcgtgaaaggatttatttaga

SEQ ID NO: 79000 - DNA, 231 bp, Zea mays
  Clone ID: MRT4577_172072C.1
atcatggccgctgacaccctatatgaggatgctactaaagcatagtgccttcggcaaactagctaacagccgtcatgatagacttactttgaaatgggcatcgcatgtatatcccgaggacgtgacgcatgtctatccttatccagctggtgaagatcccaatggctatgagcttgcaagcgaacgatggacaccactgcacacgagcgaaagtatagctctgagcatcat

SEQ ID NO: 79001 - DNA, 499 bp, Zea mays
  Clone ID: MRT4577_172073C.1
gccgcccgggcaggtaccaagcctttttttttttctttttttttttatttttttttttcttttttttttttttttttttttttttttaaattccaaaatcttaaaacgggcaccccaaactcggggcacccacaaaccattattcacaaaaaaggactacaaaacaaaaacgaaggggcaacccccaaagggggcccccccaaagaacggggggggggagaacacagcaaggggggaaaaaggaagggggcggaaggggggaaagggggcccccggaaaaagcgccccgggcgggggccccggaaaccagtggaacggcaacaacaggggtggaggacacacaccaacaagggccacaccagaaaaccgggggaaaggctgcaaatcacccggagaaaaaaaagcaacaaagggcaaaacggacaaaaagtcgaagggaaaaaaaccggggggggggcaaaagggaaccggctgtatggcaaataatgagcagacaaaa

SEQ ID NO: 79002 - DNA, 404 bp, Zea mays
  Clone ID: MRT4577_172074C.1
cccacgcgtccggtccatggcaatggcattgaggagggcagcaggaaggatttgaggagcagggggctgtgcctggtgccagtgtcgtgcacgtcgcacctcgccgacgacaacggcccctccgacttctgggcggtgtccgcggcgccgtccccgcctcctccgcctccgccattcgccggcatcatctggcgatagagtcgtccagaccggcgtcgatccacccataagtcgcatgcattattcatgcatgcatgacgtaaatatatacatatatatagtttcatgcatcactataccattggtttttttttaaaaaaaaatgtttggttgcttgccagggttgctagcttgctataagctttgtttaaccgatgagctgaagtatccatcgagcatggagc

SEQ ID NO: 79003 - DNA, 276 bp, Zea mays
  Clone ID: MRT4577_172075C.1
cggcaatcaatgtgttagctccttcagcttggacactgtcgcgagtacatggtacaacccaggccatcttccctcagggtttcctgggacagcgccactttcagacacgactgctggtggcagtctcacaagtgctccggcgccttacacgtattcagtcttcccaagttatatatccgtcattacaccggcaccgtataatgcaagaaatgcggctgggacgggaactgctgtcgaaacttcttcccctacgggcgcctctgctactgggtccct

SEQ ID NO: 79004 - DNA, 368 bp, Zea mays
  Clone ID: MRT4577_172076C.1
atctaccagcaatattggtttgcttcggtatgtgaatcctactcatgagttgtacataagtgggcttgataacacaatatctgcagaagaggttgacagtataaacctaagccaaaaacaggggatccagtcgttgagtctttcatggactagagatgctcagagatctgtggaggacatggaagtcctgggaaagctagtgccacctgatactttaaaatgctttgagctaagaggttatgatagtatgagctttccaacatgggttatgggcatcacgctctatcttcctcgccttaccaaggttgtattgtgggagctgcgtaaatgcaatagtctaccaccactgggccagttaccaacactac

SEQ ID NO: 79005 - DNA, 845 bp, Zea mays
  unsure (1)..(845): unsure at all n locations
  Clone ID: MRT4577_172077C.1
cattgggtacctcgnagccggccgggccgggaaaaacacccaacacgtatatcctggagtagacagtaacagtacgacgatcctgagctgagatggccgtcgcgatctccaccaagctggccgcgctcgctgcgctcgtcgtctccgtgttcgccacgcatggcgctcgcgcgcagccgagctacaatgcctctgccgctcgaagagaactgtactactccagcaccaccggcggcagctggctccccgccagggccacctggtacggccggcccaacggcgccggccccgacaacaacggtggcgggtgtgggtacagcggcaccaacacgtaccctttcaactccatgacatcctgtggcaaccagcccttgttcagggacggcaaaggctgcggcgcgtgctaccagataaaatgcgtgagcaagaacaaccctacctgctccggcgagcccaagacggtcatcatcaccgacgtgaactacgacaccaaggtcgccccctaccacttcgacctcagcggcacggcgttcggcgccatggctaagccggggctcaacggcaagctccgcgacgccggcatcctcgacatccagttcaggagggtgccctgcgactacaaggggctcaacgtgaagttccacgtgatgggaggctgcaatccgttctacttcgcggtgatcgtgtactacgccggcagcgatggcgcccgtcgtgcaggtggacctcaaggaggccaactcgccggcatggatgccgctctacgagtcgtggggcgcccgtctggaagatcgaccccggccacccgctcaaggggcccctctcgctgcgcgtccgcagcgact

SEQ ID NO: 79006 - DNA, 368 bp, Zea mays
  Clone ID: MRT4577_172078C.1
gcgggcacacgacttggaagaagactttgaatactaccaaaataactaacacttgggaggactcattaatgtaatggagagtgttattgaaattgaacttgcacacatacgcatacacacagacatgggaacacaatatgctagattctattctaaaaaccttattgaacacattaaactacacatcacacgtttcaacatacctaagattattcctactcttaatcaacctcatcactaacaagaactctcctaactactcatacaccttgacatacatgacaatgcatccgacaatattatcaaccatattataaatgcatctgaacatacacaggatcatgatcagtgcaatgaagtttccaatg

SEQ ID NO: 79007 - DNA, 204 bp, Zea mays
  Clone ID: MRT4577_172079C.1
atctgttcatatctagtataactcgagttgcgcctcgataaaagctgacaccattgttatcgtcttcgaagaatattaagcgagcctatatgccaaagagctaccgattcgatggcctagagatacctttttttttgacaagagagaggagaacgggaacgagaggaccgatattattgcttgcctcagtgagaggctagagca

SEQ ID NO: 79008 - DNA, 569 bp, Zea mays
  Clone ID: MRT4577_17207C.1
ccggccgggatagaagcaccctgccggctcaccgcctctctctctgagaccgcatatccgttgtccggcgagtggaagccgcacgaacccatggcctccggcgagcttgcctgcacctacgccgctctcatcctcatcgacgatggtatcgacatcgccgccgacaagatcgccacgatcgggaaggcgtgcaacatcaaggtcgagtcctactggtcggcgatcttcggcaagctcctggagaagctcaacctcgaggacctcatcctctccgctggatctgtgggcggacctgctccagctgctgctgcggcacctgctggtggagcatgctgctcgcactgccccggctgtccacgagaacaaggaacaggcaaaggacgagactgatgacgacatgcgcttcacgctgttcgactgacgatagctcctcatccagccattaccaagattcacttgtgctgacatagactatcatggcttatgtaatgtctctacgcatgtgatactactacccgagctccgagatcttgagatgagaatatggtgtgaactcagaccatcttatg

SEQ ID NO: 79009 - DNA, 373 bp, Zea mays
  Clone ID: MRT4577_172080C.1
aaaaaaaaacaattttgggccccaataccgggcataaaaaatttttatttcagggggtcctgccgggtttccccaaaaccctggaaggaacttgggctacaaggacccccaagtaaccccaatttttttaaaaaaaagaaactttccataaagagggggtttatttgtccccttggaagaacatggcccctttttgaaaaaccccaagggttaaggggggccccaaaaaaaaaaggggaacccccccaaaggaaaaaacccccttttttcctttttcaaaaaaagggtgattcccccccaaaaaacccgttaagggtttcccaaaaaaaacaatggggggggcaaggggggcatttttccaaaaaccaagggg

SEQ ID NO: 79010 - DNA, 794 bp, Zea mays
  unsure (1)..(794): unsure at all n locations
  Clone ID: MRT4577_172081C.1
caaaaactgccacaggtttacacagcccaacaagtcgtggcccattggcgtgagacacactacgcagaacttcgccgccgtcgcctttctcagtttctcctgggagcgaggctgtgtcgaacatggcggtggctgcgacgacggtgctggacatcgcggagctctccttctccgacttagtcgccctcctatctcccgagactcttgctgacgacggccgctgccgacgtgttgtggacaccgtcgcaaccgagctcggccgaggtgggtccgggttgctggctatcgacggagtgccgcgcgtgggcgccctccggcgacgactcctccccttggcccgacgcgtcgccctcatggatcacctgacccgctcccaactcctcaagaagcaccttttgggcagcgacgttcctttgaagaagctcgatcggtccgtatcctcgttcgcgcagcttcataagcacagagcacgactcgtcttgctcgagtcggtgaagaacaatgggttcaattcttctgatagggtacaggattgtaaccaatccgaggatgttaatgatgatgatgatgctgatgatatggataatctgggtgacctcattaaggagcttggtttgnacatgatggagcttggaatcttgattgcacgagcttgcgatattgncatcggtagaggtcagctagagcagagcatcactgactttgggacagcaaaggctaggctcattcactaccactctgagctggtaacattgtgatcagggataacaatgcaaagaggaaaggttcggcaa

SEQ ID NO: 79011 - DNA, 272 bp, Zea mays
  Clone ID: MRT4577_172082C.1
gggagctttactgcctctagcatggcattcaagctgatggtcatatacccggtcacaacactattgggggtggtgatgatgctttcaacacgttcttcaggggagactggtgctgggaagcacgtccctcatgcggtttttgttgaccttgagccaactgtcatccatgatgttcggactggtacctaacgtcatctcttccaccctgtacatcttatcaatggcaaggacgatgcagccaacaacctctcccgttggcactacaccattgg

SEQ ID NO: 79012 - DNA, 478 bp, Zea mays
  Clone ID: MRT4577_172083C.1
tttcttttttttttttttttttttttctatttttttttttttttgtttttttttttttatttttttctcttattttttttttttcttttttttttttggggggcaaagggcccacaactcatcctcccccgggaaaaatcccgggcccaaaaaccatttgcagaaaaaacacccacgcggagccaaacaaatgggcggggatttttgcctccccccccccccgcattaaagtttgacccccccccacctccccaggctggggggcccctgccaaaaaaccccataaagccggggcccccaaaaaaaaaccccccccattaaggggccacgcctccctttcttaaaccgggggggcccccaccagctggcccccccttgggccaggggggttccccccaaaaccgtcttaggcacaaacacaaatcttttctactccttggggccccggcctcattttccccctacccccatcccgggg

SEQ ID NO: 79013 - DNA, 329 bp, Zea mays
  Clone ID: MRT4577_172084C.1
tccaagcgtgtctcctatatatcgcccgccctttttttttatttttatcatacattaaagggagggttatataaaattttttattttttttactattttattttttttgtcttgttttacaaaaaaaaaccgagtaattaaacgcccagtacacagccaaagggggggggaagtattttaatctccacctcccctggataatcccaaaaaaacaaaccgttataaaatttgacagtgctcctttaagaccaactgggggagcataaaaaaacccggcgggggcagtgaaaaaaaataaccagcctgggggccgttccaaaaacggttga

SEQ ID NO: 79014 - DNA, 165 bp, Zea mays
  Clone ID: MRT4577_172085C.1
cataccactcatcaatgatatcttcagcatgataaaacccaactctccaacccggtgggctgcaacattcttttttttcactcaacataccaacatcacccttgccacctcaacaataagcatccctatctctgtcacacacatcgttacaaaccacctattcac

SEQ ID NO: 79015 - DNA, 281 bp, Zea mays
  Clone ID: MRT4577_172086C.1
cccacacttatgtgtgtcatgatggatggctccatggaggtgggtcaggtctacagcgagagagggagtaatactaatatacaatgcaccgatctcactcgtggcacaatggatgacaatcaatgctcagattctgagtgagcgaagaggagacctccaggcgcgttgcgactactcaacactactctccgacatgatacattgtggactactagaaggaatcttcaatcgacactgataggctcgacgcactgctgggtgtcttctactagacaaacttg

SEQ ID NO: 79016 - DNA, 595 bp, Zea mays
  unsure (1)..(595): unsure at all n locations
  Clone ID: MRT4577_172087C.1
aagtgacgtgtgctctttactctcagcagcagtcctactgcatgaccctgaggatgaacatcgactgcaacgggtgctaccagaggatcaggagggcgctcctccagatgcgaggtaaacactctagccgcccatctgcggtgatgcctgaaaggctgaaacctcggtttgtgaagcttctctgaactgaacctttttggtttttttgcagagctggagaaacacctgatcgacaagaagcacggccgggtcgtagtgtggggcgccttcagcccgcaggacgtggccatcaagatcaggaagcggaccaaccgccgcgtcgagatcctcgacctcagcgaggcctcgccggcagccccagaaggcggccccgacggccacatgtcctgaaggaaccacgtcaccaatacgtactctggagaactgcttgctattctcttcactcttcaccaaggcaggcccgcctcagaggacgtaaccatatgcctgcctggcatcttttaccttcttgtaatttaggaatcaatgtgaggcattcaggatcctcaacaatctttgcaaatgtttgcaggaatgctgccaanatcagcaccat

SEQ ID NO: 79017 - DNA, 2792 bp, Zea mays
  unsure (1)..(2792): unsure at all n locations
  Clone ID: MRT4577_172088C.1
cagcagnacagtcgtagnaaaagggtgtgtgngnaagcggaagggcactgcatggnaagccagcctgcgctgcttgtgccccggaatctgattcccaaaagcacatagatcgagccctacacgggaatgaatcacttgagtgaatcgtccataaaccgggaggctcacaagttacaagtagtcaagtacggctgcaagcaaagcgaagcacaccaaagcgagcatcaagcagcgcctcgcacgctaatcccttcctttcctctgctggccgcccttaacagcactcggtcctcgctctccctgcggcggcctttttcacactctgcacctcctcccctccggccagtcgaaaccgtcgccgccgccgccgggaggagaagagctccatggactacaggcagtcctactgcatgaccctgaggatgaacatcgactgcaacgggtgctaccagaggatcaggagggcgctcctccagatgcgagagctggagaaacacctgatcgacaagaagcacggccgggtcgtagtgtggggcgccttcagcccgcaggacgtggccatcaagatcaggaagcggaccaaccgccgcgtcgagatcctcgacctcagcgaggcctcgccggcagccccagaaggcggccccgacggccacatgtcctgaaggaaccacgtcaccaatacgtactctggagaactgcttgctattctcttcactcttcaccaaggcaggcccgcctcagaggacgtaaccatatgcctgcctggcatcttttaccttcttgtaatttaggaatcctgcatcattttgttctgtaactgtgaaggcttgttgaagtaaccagaaaaaaaatctaggtaccgttctgaaaaaaaaaaaaaaaaaacaagcgaggccatgctcgtttgctttaactttactcaaaacaggaaaaaatgatctgttgaatttcctgtcaattagtattgtccagttaagacataaacaagatctatataggaaccaggaagcagcctctatcattattaatgccccaaagtgtttacacaattcatggtttcttgaatcagggtctccctccaagaatagataaacacacggagcgaaaacgatcagtgtataaactgtacacaaaaatctgtatgtggagatataacattgaaaagtgtctttttattatctatattggcattgtcttccaattgtgaataaaaaaaaattgagaacttgtatgaagcttcccttacaatgtgaggcattcaggatcctcaacaatctttgcaaatgtttgcaggaatgctgccaaatcagcaccatagataatcctgtgatcagcagtaacattcaccagcatttcactcttgatactaaagaaaccatccttatcagccactacagtaggtcttgacgctccaacagccatgatagccccctgaccagcaggaaggattgcgtcgaatttatccaccccaaacatacccaaattggatagtgtaaacgtcccagagttgtattcatttggttgcagctgcttcatgcgtgccttcttgagcagcactctccactttcgtgcaagcagatatatatccatcttatcagcatcctctaatactggagtaagaaggccaccctcgagtgcaacagccactccaatgttgacatcattgttgtaggagaagctctttccatctctgcagctagcatttactacagggtgttgggtgagcgccacagctgccgccttcaccagcagcactgtctttgtaaccccctttgacttaaccttctcatagagtgcgtcaagcttgtcagtgatcatggagtagctaacccggaatgtcggtaccctcaagctctccaccatgttcttgctcaccgccgcctgcattgtcgtgaacggcaccaccgtgccaccgggtactggtggcagcaccgcacttgcgggcactagtggcgcagcgtcaacagaagcagggggtggaggtggagggggtcgcttgtgcttgatgccagcagctgcctcgacgtcagccgccgtgacgcggccgtgtggcccggtgccgacaaccccggcgatgtccaccctgtgctgcttcgcgagtttcttggcgtaaggtgtcgcgatgccctttgtcgctggaggcgccacaggcgctggaggaggtggccccagggcggcggcggcatggggagggggaggagagggtgcctggctttgtccctgcgagagggcctgagcgcgcgcccgcgccagcgcgacctcctcctctgattcagcgaggagggcgataggggcgcctacgggggcggtcccaccggccgggacgaggacgaccgcgactatgccatcctggaacgtctccacgtccatatcggccttgtcggactccacgaccaccactgggtcgcccttggccacgcggtccccctcggcggccgtccaggagacgatcttgccctccatcatcgttgagctcagcgccggcatgaatatctcccgaatcttcgccctcaccaccgccatcctcctccgccgcggcgtccccggagcagcaaggcgcgcgggccccggggcggtgggaacggagaggcagggagaaatcagagacgccatggcgcactggttgatgatcactgaacaaatgacccccctctcaggactcggttgggtctaggagaacgcgggcagggcggcggaatccggcgagcggcgcgaggtgggagacgaaccagatcgttaggtgaagccgtgaaggcggccagccactcccggccggccgggaggtacccaat

SEQ ID NO: 79018 - DNA, 366 bp, Zea mays
  Clone ID: MRT4577_172089C.1
gtccacaaaacgagtgcatggggacaatgagtccatttttgggcttggtttacaagatataacaacgcagggcaatgctgcacttgcactcgctggcgcaaatatcaccaaggtatatgaccctgtgagagacttcaaggaccctcactggatgatggaccaggagatcaccttgaccatggcggctaccatgactatagggaggcaggcgtagatggtgaaggatacgtgctagcacctcaagtccatggacaccagacgcacgtcgaagacctcaaggatgccctgcagctcgttggccgcggaatcgcggaacgcctggatcacctcctaggagagcgtcttcctagagacctgcacaaccag

SEQ ID NO: 79019 - DNA, 803 bp, Zea mays
  Clone ID: MRT4577_17208C.1
aaatcatttttgctcaaaatccaacttggccaatcattagtaggtccagttatattcatgaaaccttttgtttgttgtttctttgcctaaaaacatgctttcattggttagttcattatcctagagttgcagagggactttatgtagcatgatccatgctcaggtattgcaattttggcaatttctgtaatgtaacatggaattggtgaaggtccttggtcgagtaatcacaatactattgatattattcatattgattaaatttttatcattggttctctttgtttgttatattatcttgtgtcatcgattaacaactctttcaccggacgtcttgaggtgactttagtttcttatcttttatatgtatcctgacataaaaccagtgcttattttctattcgtgcatgtgcaggtgttgtactgtttcttagaattatccagcaacttcgatgggaggaattttgtttgagcttgtgggcccaatttgagaagttttacatatagagtaaaaaaaggtcctgctctcgtgttttcgtgtaaaactggattttgttcagttcttactgtggagctatgcttcctagataaaacttctcgatttgtataacttctcgatttgtataaaaacttctccatttacatatagagtaaaaaaaggtcctgctctcgtgttttcgtgtaaaactggattttgttcagttcttactgtggagctatgcttcctagataaaacttctcgatttgtataacttctcgatttatatatcaactatgcttcctgtggagcaaggaagcgaacgc

SEQ ID NO: 79020 - DNA, 375 bp, Zea mays
  Clone ID: MRT4577_172090C.1
ggacagatgacaaaagtaaagcagtcattattgcaaaccctcgcacttctgaattcgagatttttgaagttggtgatgttgtgatgctggactcgtcacgtgatgttggtgcctctaataatcgcaggcttgcagctttgtactgcaatagggtttctggatttgaggaaattatgggattggtggatagtattgtcaaagttgtcagagctccacatgttaactttggcgagaattactatgtacctacagatgaacctgagttcttcccgaaaagacaatgtaaaattgtgacaagtgatggcaagcaagttggctacttaggaattgtccatgctgaagtcctaaggaaatttgggattccggatccctgca

SEQ ID NO: 79021 - DNA, 520 bp, Zea mays
  Clone ID: MRT4577_172091C.1
aaaaggggaactaaatgcaataacaggatccaaattaaaacacaacgaattagggtttatgggccaacaaaggcaccaaactatttaaatttttgagaatggcagcagcattttttttttccccagattattgttgaataaagtttttttggcgaagtttttaaagccatagaagggataaacaagggcctttttttaaagggggttgacttttttttttggggggggtttaaaaaacccccaaatttttgctcaataaaggggaaagggggttttttttggactctttcccccctttttttgggggcgcaaaaaaaaaaaaccttgtggtgggggaaaaatttttgcccccaaaatatacccccccccctctttttttttttttataaggggtggtttccttaaaaattttttttggggaaagaaaggtcttttttccaaaaaaaaaaggcccccccggggggggagaccccttttttcacacaattttttttttttaaaacacacatatttttttttt

SEQ ID NO: 79022 - DNA, 2381 bp, Zea mays
  Clone ID: MRT4577_172092C.1
tgggaccctcgaggccggccgggccgggactcaccgctaggtttttcctcctgccgccgcctcccagaccgtctcctccgccccagccgggatgccgacggtgagcgtcggccgggatcgtctcttggctgccattggtcgaacctacacacaggaggagttcgaggcgctctgcttcgagttcggcatcgagctggacgatgtgacgacggagaaggctattatcaggaaggagaagcacctcgaggacgacagtgaggtggacgaagatgacgaggtcatctacaagatagaggttgccgccaacagatatgatttgctatgttttgaaggactagcaagagctcttcgtgttttcactgggactgaagcaagccctgtattccaagtttcatcaatccctcggggttcaatgcttcagatgcatgttaaaccagagacttcaaaaattagaccgtacatagtttgtgctgtcctaagaggggtaacttttgatgaagcaagatacaacagcttcattgatcttcaagacaaactccaccaaaatatctgccggaagaggacactcgttgctattggcacccatgatctggacactctgcaaggacccttctcatatgaggctctaccaccgaatgaaatcaattttgtcccattaaagcaggagaaaagcttcagagccgataaactgatggaattctataaatcagacatgaaactgaagaaattcttgcatataattgagaattctccagtgtacccagttatctatgatagcaacaggactgtattatcattacctcctatcattaatggcgcacattcagctatcacccttgcaacaaggaatgtctttattgaatgtacagctactgaccttaccaaagcaaatatagttctgaatacaatggttaccatgttctctgaatattgtgagactaaatttgaagtggaacctgttgaagtgatacatcatgatggaaggaaaacagtttaccctgatctttcatgttacaaaatggatgttttgttatctgacattcttgggcctattggcatctcccaggacgagaaacaggttgtctgtcttttgaataaaatgcaactgcaagctgaaagtcactccttgaaaggggaggctcgcatttcagtgtctgttcctccaacaagaagtgatattctgcatgcccgtgatttgtcagaggacgttgctattgcttatggattcaacaatgtgccaaaatcaaagccgaagtgtatgacaataggaggaaggcaaccattaaacagattctcagataaaattcgtgctgaggttgcaagagctggttatatggaggtgctcacatttatcttgtcttcacacgaagagaactttgacatgttaaacaggacagatgacaaaagtaaagcagtcattattgcaaaccctcgcacttctgaattcgaggttgttagaactagcctgatgtcgtgtttattaaaaacactgaaacataatatagaccatccaagacctataaagatttttgaagttggtgatgttgtgatgctggactcgtcacgtgatgttggtgcctctaataatcgcaggcttgcagctttgtactgcaatagggtttctggatttgaggaaattatgggattggtggatagtattgtcaaagttgtcagagctccacatgttaactttggcgagaattactatgtacctacagatgaacctgagttcttcccgaaaagacaatgtaaaattgtgacaagtgatggcaagcaagttggctacttaggaattgtccatgctgaggtcctaaggaaatttggcattccggatccctgcactttcgttgagatggacctcgaagcactgttgtaatgcagtcaacctgaaacaaaggaatgcttgaagctgatacctcatacctgccacatattggttttgttcgtaagcatggtggggtaccagcaagaagtgcatattacccaagctgcagtatctcgatgtacttctcaattgcattggattttgctgtgggaaaaaagggtacaacgatacagcaaatacccagcctaatttttgtgttagggattatgtttgcattgtaagggcttattcctatccaactttctatgaaaagtgtaccgtacatccttttgtaaaccatcgcgcgtccaaaagttatttctcaactcttgtcacctccacatgaggtcaccatgatgtaaagcaggttcagaatattagacctctaatatctccttgtgtttgtgaatggcattaaaatttgacattaaggattgtttggtttataaagactaattttagtcctttaatttaaaaaaaaaaaaaaaaaaaaaaaaaaaaaaaaaaaaaaaaaaaa

SEQ ID NO: 79023 - DNA, 536 bp, Zea mays
  Clone ID: MRT4577_172093C.1
ccggccgggccgcttctgtcctctcttctgccctctactgtggttctgctcggcggcccaaaatcatctcatccaccgagcgcccttccacgttcccgactccaagggactcctctgccacaggagtggaaaggagaatctcaacgcgggggatcttatatactcctgaagggcagggggaagatgcgctgatcacggaatatatgagggtgatgatcatgagatacgtttcacgagacgacgacgacatgacgcttgatcaggaactgtccgagatattattctatgtgagctccaccccgcaacgaagaaacacatcttgcccggggcgcacccaccaaaccagagacagcatcacacagacgaacggcgcggtatcctcctggctcagctgcttcctaggtggaggtgctctctaccgatgcgagtacgcagtcagcccagcgctcttcctcttcaaagctcgacgagggacgtgcacattcgctccttctgactctgatcacactgaggttcgacactgctgatacctggtg

SEQ ID NO: 79024 - DNA, 949 bp, Zea mays
  Clone ID: MRT4577_172094C.1
gtgatgactgcttgagtcttcaacattgttctgtatggatgattctacagaaggttcagaagtgaagtctggtcctttgttttctcctatctcttcaatttctctaggatttatacttgtattgtcatggattatttcttcgcatagagatgttgtatcatcaattttagcatccacattgtatggttcattggaatgcggttgaggtgactcttccttttcagaatttgtctgtaatttatcatgacaaatagcattgtcttcatgtatttctttactttcttctatttcatctgcgatctctttctctgatgcttgaatgatgtgaacaggatcctcttcttttctaatttcatcagttgtttggccttgttcattagtagaagtttttgatactatatcaacattttctgcattctcctgttcatctttgttatcatttttggcagcatcatcttcttcagttccttcacttgtttccttaatgttttcaaccttcatagccataatgcttggggtggattccttggatatatgtagggctttattcttgagaatctcactattggctgcctctgtttgttcaaccttgaatgcatcattgtcttttgtgttgtttgaagctctgttttcgaaattctggtactccactagtggttctttggctaaatcatccctcttgtcttcatgtttctgttcatctacctgaagttcatcattctgactttcaatctcctcaacttctttctgcttttgatctgagtcaatcttttgcagagcctcatcttgttccaaaatggataaggcctctgtctcaggacgcggttgttgaattgcttctacatcacaatgttgcctgctatcgtgatcactgattggctcactactttcgttgtatcatcctttctatagttcttgtgctgcctgaggatcttttccaaaaagccgt

SEQ ID NO: 79025 - DNA, 640 bp, Zea mays
  unsure (1)..(640): unsure at all n locations
  Clone ID: MRT4577_172095C.1
tcgggctcgcctgcttgcgcgcctctagtgcagcagcgggggcaggggccaggctcgcctgcctacggcccacgtccgccctccagcgccgctgcgctcagccgcggaggcaggccgaactcttccccgccatggtcgtggatctggccgctgattccctctctcgctcccctctgccagtcgtcgtcacgcgcacaggcgcccgcccagccgtcggactcctccctctggccgtcgcggctgacccctgtcctgctcggcgctggcacgctttcccggctacagcgtgacagccctccccgccggcctccccgctccctctccttctactccagcgctatgcagtccccgtcgtcgcgctgtctaccttgtccctgattgcgtcgacgcccagcagcgcctcttatcttcaagcttctctcgctgccggcgtcaaactcccctaccaggtccgccgcaggcccctgtccggctggccctgccctgccgcgcgcctccctcttcgtcggttccgtcgctgccgcggccttccccgccagatccacgttgntgcggncttctcggctcgatcccgtcgtcttttgacctgatcgcgtcttcccgaccggattcgtcactggctttgccattccgaccggat

SEQ ID NO: 79026 - DNA, 345 bp, Zea mays
  unsure (1)..(345): unsure at all n locations
  Clone ID: MRT4577_172096C.1
ggggggggtggttttttttaatatatttttgcggcctgttcaacatacatttttaacattattaggcacccgcacacatgattacaatcactagcataaacagaacccaaacacaaaatcatcaactttacaccaacactcggggcagaggggggattttttttttttnaacttcactaaaatcaaggcccccaaacacacgcattcccacacaagcaacaatacacaaacgactaataagagtaactctggtgaccgaaactttaccggagggtacgaaaaaaaagccacccctttataaaaacatatgccacctcccacaaagaggtcaaaggaaaaaccaca

SEQ ID NO: 79027 - DNA, 342 bp, Zea mays
  Clone ID: MRT4577_172097C.1
cagctactccttactcatcttgatgttcgacaactactcatcaaatctgacccatcttacgctttgcggcgcgtttaacacatgaaccaccaaccataaaaccaatgccacaccatcacacgtgctgttcgtctaggttaaacatgaccacaagcaaattctgatgaacaagaccaattttttacatatggataagattttacacatatccatacccgaaactacccttttctgcatgacattcaaagatctgtgccaatactgcatcacgcttaacatcaactttatcatcatcaacccatactactaccttctattcatcttcgatgctacctacactct

SEQ ID NO: 79028 - DNA, 178 bp, Zea mays
  unsure (1)..(178): unsure at all n locations
  Clone ID: MRT4577_172098C.1
ctaccgaagcccttgtacacatcgccgccgctgctgctagggaacttccatccgcgcgcacctacaacgatagctagcagcagtagcggccgntatcttgtcgcaccggatccgttcgtgtacacaagtaccagcctagatgccgcagatggaggggtccactgatcagatcaccgcc

SEQ ID NO: 79029 - DNA, 294 bp, Zea mays
  Clone ID: MRT4577_172099C.1
acaagcttctgatcggggctcgccgcgcttcacggcgcattgtttcttcccttgaccccaaggcgcagtcccgcaacaccgccgagccctgcgacccttctcccgcaatctcccgcccccctcccccctgcgctcacccccacccgcgacgccctcccccccccccttgactcccccctaccccctcctccccctgccgccccccccccccgccctccccctccaccacgccccccgcccccccccccccccctcgccccccacccccacctccgccctgccgcccaccccccc

SEQ ID NO: 79030 - DNA, 731 bp, Zea mays
  unsure (1)..(731): unsure at all n locations
  Clone ID: MRT4577_17209C.1
aaatacacaaaatccaccactctccactcggtcttcccctcgctaccactccgcctgctgccgcgccatggcgctccacgccgtctcccctgcggcggcggcctccccaccctgcgccctctcctctgaccgactgccccagcgnccagnntgtgnntgaatctcaaaacgntcatccctgataaaancaaccaaaaaattcatgaaacaacacaaatgaaaaatgaanaacaatgatgtgcaattgaatctaaaaaaatcgaanaaaaaaaaaanantcaaaacatgacaataatgaaaaaacacanaaacaaaaaaacacacnccaacaacaacctaaagaccccatgcacaaccccccacaaccccccccnccaacaccaaaccaaaaaaaaaaaaaaaaaaaaaaanaataaaatcaacaacaaaaaaaaaaaaaaaaaaaaaaacaacaaaaaaaaaaaactaaaacaaaaaaaaaaaaaaaaaaaaaacaaaaaaaacataaaaaaaaaaaaaaaaaaaaaaaaaaaaaaaaaaaaaacaacaaaaaaaaaaaaaaancaaaaaaaaaaaaaaaaaaaaaaaaaaaaaaaaaaacaaaaaaaacaacnnnccaaacaaaaaaaaaaaaaaaaaaccaaaaaaaacaaaaaaaaaaacaaaaaaaaaataccataaaaaaaaaaaaaaaacaaaaaaaaaaacntatacacaaacaaacaacacat

SEQ ID NO: 79031 - DNA, 373 bp, Zea mays
  Clone ID: MRT4577_1720C.1
cgcgccgctcacggccctgccggcgtcggtgcgggagtccgggtgccgcgtcgtctacctgtgccgagaccccaaggacgctttcgtctcgctccgccactacctcgacgagatcaagcctaagggtgctgccatgacgccgttcgccgaggcgttcgacctgttctgcgacggcgtgtcaccgttcggaccggtgtgggacaacatggccgagtactggaacgagagcgtggcgcggccggaggaggtgatgttcctccggtacgaggacctgaaggaggacactgtggggagcgtgaggcgcctggctgcgttcctcggctgcccgttcaccgacgaggaggcagagagaggcgtccctgtggccattgtg

SEQ ID NO: 79032 - DNA, 598 bp, Zea mays
  Clone ID: MRT4577_172101C.1
aataataatataatttaatataatatagtatgagtaccaattcaatatttttatacattaagtgttactctataatctcaaaccataaacacttgagtataattcttgttaatttagctcaatacatatcttgtgctaagttgctggaatacaagtgtactagacagatatggattttgcatctatggtcaaaaaccaggactgtaccatggggaatactatacggtgtggccgcgtgtccgtgaactctctccttgtccgatggttaccatagaactgtcatgtcttagcgtggcgcagtgttgttcccaaagcattttcacctaaacagattaggacctgcgtttagtgaagctatggtaaacagctgcaccctcaagtcagcacacccacaaggttgtgggcaattagcggtgaaaacattatagtaaaagcgtgagggccaaacacatcacagggaacttccatgaatgtttcagcaaagaccacactctagactctgccaagacaaccacaaaagaatgagctctcctccaggaataacattggaatcgatatttgatccttcaaacctgacaatcttcatccaaggggggca

SEQ ID NO: 79033 - DNA, 1121 bp, Zea mays
  Clone ID: MRT4577_172102C.1
cattgggtacctcgaggccggccgggccccccgataccccgctccgcgcccctccctgagctctgtcgtgtcatccctgccctgtccccttcctccctcgccgacgcacacgaggaagctgttaaccagcgccgccacttccacctcagagtccctcgtggcgcttgaggcccgctgtcccttccccccccgctgccgaggctcgcgccggctagaggtccacgctcccccccagagattgctccctccccgaggagctgaaggcagcggcgtcgcgggggctgcggtaggagctcgacaccgagcgggggtccacggagacggcagccagatccggctcgaccctcttcgccttattcgagctcctggggctcgcagataaaggggccgactaggtcgcttgagccctcctacgacgaggccctgcagcccgatgaggaggccggcgtaggcgcgacggaggccgcgccggcggaagcggacgatggcatcgaggtctgctgcttcgacaaccgcggtgtcggccacagctccgtgctccccaacaaatcctactactcgacgacaatcatggcgacggatgccttggccttgatggatcatttggggtggaagaaggctcacgtcttcggccactccatgggtgccatgattgcttgcaagctagatgtgatggcacctcacaggctatgttcgctggcattgcttaatgtcaccagaggtggctttcagtgcttcccaaaggtagacgcgcagatgctatctcttgcattccgtttcttaagggcaaaaactccagaggaaagagcccttgtggacctggaaacacattatacaaaggttgtccacactgtactcagtgctcaggaggagatgttggcaacatggaggacttcgaggagtttcaggactacgatgagttctagtttatcttagtggcaaacccccggtcagctgcctgtgtaggcttatcctctacgtttcgtatttccgcactttgatattaatgttgaagactatggctatgtattagactttgtggatgtcttggacatcttgatgtaattaaagtacatttccgctatttactttgagcattgtgtgatgatgtccaattatgt

SEQ ID NO: 79034 - DNA, 442 bp, Zea mays
  Clone ID: MRT4577_172103C.1
tgagataaagacatgcggaagcagttacataaacttacatttatttcaaaagcaagcttgagttaatttattacagaccagaactaaaagtgagtgcagagtagtattattatacaaaccaggggaggcacaaacttcttaataaacaaaagatcctaagtggaggaccgagtcctcccgcacttcagtcttgtttttcctcgtttggtaccaccttggagcaaaagcaacaaaagtttgtcgcttcctcacctgggtaacactaggttagtgttgttaggtgacgtccatttgacgatcatccttgtcctagcacttgatcaggcaggttcgttcatcagcatctccatgcgaagtagcccgcgcttggggtcgacttggttcgtcttccgcatcacgtgattaattaacgtaccgtttcaacagctgacacgaatccgcg

SEQ ID NO: 79035 - DNA, 761 bp, Zea mays
  Clone ID: MRT4577_172104C.1
gtagcggaaatcttattaccaaattttacaagttacaaaaattttatattattttatcggagtgattacaaaagtataagtttgaaatatatgctagctcaaatgaccatcctcagtaagaagataaagacgggttatactatataagaaggccgagcccacccgactaaagaaaagactctcaagggtatgctggatttgggaatcaaggagaggctttagcaagaatcaacttagatacttttgcagaaatagcttactaaagtgagtccttactttcaatattttaacgccagattaaatattaatagactctatttgcatctggtctaatttcaccatctcatcaatacaacatcatttttattcatgaggttcacatcctgacttaggttgcaggtcagtgatcaagtctccactctccggggatataacggcgatccgaatcgatttactcagctgaggatctctaaccacacgacatatgtagcacttaacccttgcatatgtcaaccgttcccacagatcctccacaacgtgaaccggtccgcgctacccgggagcacagtactcctccatccagcctctagccaggagggcacacgctactcccaccatctcccacgcccagtgcgcgggttgtcttttcacgtatggaatagcccgggttcaagcttaccctgtcccatttccagggcatgtggccagttaaggtagtccttgatctatcaggcctacatacgcatccaatcctttattga

SEQ ID NO: 79036 - DNA, 722 bp, Zea mays
  Clone ID: MRT4577_172105C.1
gtagcggaaatcttgttaccaaattttacaagttacaaaaattttacattattttatcggagtgattgcaaaagtataagtttgaaatatatgctagctcaagggaccatcctcattaagaagtatagaagggttacttaaacttataagaaggccgagcccaccggcacttaacaccaccatcagtagcacaaaactatgacctgaaaaacaacagggaataaaaccctgagtatggaattactcagcaagacttacccgactaaagaaaagactctcaagggtatgctggctagagggattcaaggtatggcttatcaagaatcaaagactctgttttgcagaagagcttactagtagtaaatccttatgccaaaattttacttcacaagtttagtacttttcctgaatctagatttgcctaatctagagcattcacttgtccttatctagctttcttttaaccaactacaatcatgtttcacttgtcaactacgatgagtggtcagtgagtcgagtctccataaccgaggagcaacgacgattcgaaccgattatacccagctggggatccctaaccacacgacatatgtagcacttaacccttgcatatgtcaaccgttcccatagatcctccataacgtgaaccggtccgcgctacccgggagcacaggactcctgcatccagcctctagccaggaaggtacacgctactcccacca

SEQ ID NO: 79037 - DNA, 558 bp, Zea mays
  Clone ID: MRT4577_172106C.1
gcagcgaaaacttattaccaaattttacaagttacaaaaattatacattattttatcagagtgattgcaaaagtataagtttgaaatatatgctagctcaagtgaccatcctcaataagaagtatagaagaagtacttagacttataagaaggacgagcccaacgtcacttaacaccatcatcagcagcacaaaactataacctgaaaaacaacagggaataaaaccctgagtatggaattactcaacaagacttacccgactaaagaaaagactctcaagggtatgctggctagagggattcaaggtatggcttatcaataatcaaagactcggttttgcagaaatgcttactaaaagtggatccttaaaaatccatttttacttgtcaggttaagtaaaattacctgcaactaaagttctttctaccctagttcaatcacttgacctatactagccaatttcttaacaacccttcagctttactggagttctacgtatagggcagtgaccaagtcttcatacccgcgaaggtacgggtgatctgaatcgattatac

SEQ ID NO: 79038 - DNA, 354 bp, Zea mays
  Clone ID: MRT4577_172107C.1
gcggcggcggaggatgatcaagaacagggagtccgccgcgaggtcccgagcgcgcaaacaggcttattcaatggaatttgaagcccaagttcaaaaacttaaaaaggcaaattaagaacctgagaaggaaccagccaaaattattggaattgcaaacaaccaaggtttaaaaattgtggaaggatcaattcgaccgaagaaaccggtgtgctctcgaagaacatttaccggcccctgtggacaaatgcctataacacaacataagtttcactttctacatacctgtaggggcgcttgggatctgtagataaattctctcctatagtgtggcgctgaactcatcatgtacatgta

SEQ ID NO: 79039 - DNA, 1365 bp, Zea mays
  unsure (1)..(1365): unsure at all n locations
  Clone ID: MRT4577_172108C.1
gcagcggaaatcttgttaccaaattttacaagttacaaaaattttacattattttatcggagtgattacaaaagtatatgtttgaaatatatgctagctcaaacgaccatcctcaataagaagtatagaagggttacttagacttataagaaggccgagcccaccggcacttaacaccattacagcagcacaaggttagaacctgaaaaacaacagggaataaaaccctgagtatggaattactcagcaagtcttacccgactaaggaaaagactctcaagggtatgctggataaataggaatcaagaagaggctttagcaaaaatcaacttagatacttctgcagaaatagcttactaaagtgagtccttactttcaacattttaacgccgaattaagtattaatagactctgtttgcatctgatctaatttcaccatctcatcaatacaacatcatttttattcatgaggttcatatcctgacttaggttgcaggtcagtgatcaagtctccactctccggggatataacggcgatccgaatcgatttactcagctgaggatctctaaccacacgacatatgtagcacttaacccttgcatatgtcaaccgttcccacagatcctccacaacgtgaactggtccgcgctacccgggagcacagtagtcctccatccagcctctagccaggagggcacacgctactcccaccatctcccacgcccagtgcgcggttgtcctttcacgtatggaatagccgggttcaggcttacccatgacgaggtatgtggccagctanaaagtcctagatcaacatgcctacaatcggtacagtccttaatcgatacagacggagacactacaaccagactccgttctggtgcaagtcaaccccccagcctcaagtttacttctgctatttctcaaaacatttgacacctgacagaggggccatgcctggataatgaatttctcactgcagatgatgtcttcattatcccaagccgattttcttttgtaaattatgagtcatagatcaaaaacatttttttaatctattcgcatgattaagcatctctagcttttataaaacaggtgacaaggtatggtactcaattctttcaaggaatggtaatgcatcaagtgtttaatcaatcaactgctatcatctaatgcatcatataagtgataaaattttataaatacaaggaatgtggcaaatgcaccggggcttgcctttgttgcagagaagatccaaaaaatccttctaccagataaccagttagatagaaccccaccaatgggtattcaggtaccggagcatacttctcttcgatgtccacttcttccggacgcgtgggcga

SEQ ID NO: 79040 - DNA, 148 bp, Zea mays
  Clone ID: MRT4577_172109C.1
aagttcctttacacagtctcgaagaccctggaggaggtcacaactttttattgctgcgagaatcgcgacaagatctacactgtcaaccgtcacggccttgtccatgtttagataagcttaaaactgaaactgttttgcggatttcaac

SEQ ID NO: 79041 - DNA, 118 bp, Zea mays
  Clone ID: MRT4577_17210C.1
ggtgcctgtttgatgcaggtggatactttttggtcaagggaatggagaaggtataactctgtgttctctgttgttaatgtattagtatgtaggaactttcaagtgtccttttgttgcc

SEQ ID NO: 79042 - DNA, 434 bp, Zea mays
  Clone ID: MRT4577_172110C.1
gggatacaaccaaaatgctttttaacacaccttctttagcccaaaaactggccccaaaaattgggggggggggattgcaaactgaaaaactttgttttttttttttttttaaacaccaaaaaatacctttttttgggagccagcttggcctttttttttttttttcaaccccccccccaagcttgatagataataattatttccatgggcgccgatcgatgtgaacaaaaattggaggggttgcattttgaatttttacccaaaccccaggggtgggggggctttccggaattccccgggggcttaaaaaaattgggggcgggcttttttttcggggccacccccaggaacaagggggccttcgcgggggggctttttttcttcagggaagggttctttttgccccactttcaatttgggcccgaaccccaatt

SEQ ID NO: 79043 - DNA, 1966 bp, Zea mays
  unsure (1)..(1966): unsure at all n locations
  Clone ID: MRT4577_172111C.1
acagaccataacaaaagtgagtgcagagtagtaatattatacaaaccaaggaaggcacaaacacctcccgataagtttaataagcaaaagatcctaagtggaggagggagtcctcccgcacttcaatcttgtttttcctcgtttggtaccaccttggagcaaaagcgacaaaagtttgccgcttcctcaccttcgttcacaggtgaatcaggctcagatccacagatatcaaagtagaaatgattcccggcctgagactccgaaggtggtggtggtatctcctcttcagttacttctatctcttcttctcgttttagacttataagaaggccgagcccaccggcacttatcaccatcaacagcagcacaaaattaaaacctgaaaaacaacagggaataaaaccctgagtatggaattactcagcaagtcttacccgactaaggaaaagactctcaagggtatgctggataaataggaatcaaggagaggctttatcaagaatcaacttagatacttttgcagaaatagcttactaaagtgagtccttacttttaatattttaacgccagattgaatattaatagacactgtttgcatctagtctaatttcatcatctcatcaatacaacatcctttttattcataatgttcacatcctgacttaggttgcagggcagtgaccaagtcttcataaccgcgaaggtacggcgatccgaatcgattatactcagctgaggatctccaatcacacgacatatgtagcacttaacccttgcatatgtcaacccgccaccggggttcttaagaccagatcaggttcacgcaaaccgagagcacagatacaccaccgtccagcctcttgccacggagggtacacgctactctcaccaccgctccacgcccatttcgtgttatcttattctggccttagtctgcccgaggcaaggcttacccatgacgaggcatgtgaccagttaaagggtcctcgatcagcacgcctacatacgcattcaatccttaatcaacctaggtagaacatcacctgttcctagcccgagtcccgatttaagtacttccaatccttaggattgtttgtgttccttagaatgaaaagagcatcaaagggaactttgcagtaagatcacaccancactctcaatgaaagtattcttgcaggtagaagtcatctttcctcgggataacccctgagctaggccttaatgcaaaagacaaccttctatcacaagatctgagcagggctaagcatttttgtaaatcataattttgatacttcaccangaagtatctataaaggtatggatttcaaggaaggcaatgcatccaagggtttccaagcaactcctataaacctaatgcacattcactagacttaagtgtgtaaaaataatttaaaaacacaaggaaggggttgcatgcaccggggcttgcctgggtaacactatgttagtgtttgttagacgacttccacttgacgatcatccttgtcctaacacttgatcaggcaggttcgttcatcagcatctccatacggagtagcccgcgcttggggtcgacttgagtcatcttccgcatcacgtgattaattatcgcaccgtttccacagctgacacgaatccacgagatcggtagcgattttccgatccaagcaatttgtcgaacgcttggggaatatcgtgctactagcttcgtcttcacccgattcttgggatttcttaatacacacggatcgacgacgaccaggagggtgacttatatagagttgtactcgcgacgcgacgacgttaaccggcggaatcgacgacgcgattgggaattaaaacgacgcgattgggaattaaagctgagcgagccgagagggcgcaccggcgagaaggaaaccacgcgagtataagatatggaaaatgacaggctcgacacacgcgaagcgatgacagtcgaatcggc

SEQ ID NO: 79044 - DNA, 2054 bp, Zea mays
  Clone ID: MRT4577_172112C.1
ggccgcttttttttttttttttttcttttttttttttttttttttttttttaagcattgaagtccaagatcacagagttgacccactgataataaattgaagctcaaaggtgcaaccaagagaacatttgaaattgataaatcattcgaaattgccaccttgccaagtcctcgcactttccctttgaattgtctccaaatgtgattttgtcttgtccatcaacattctcatcaagtgaggtgaacatctgtgggttacctgtcatatgttgagtgcatccactgtcaataacccaatggctcccaccagtcttgtagttcacttatataagaaggccgagcccaccggcacttaacaccatcaacagcagcacaaagttaaaacctgaaaaacaacagggaataaaaccctgagtatggaattactcagcaagacttacccgactaaagaaaagactctcaagggtatgctggatttgggaatcaaggagaggctttagcaagaatcaacttagatacttttgcagaaatagcttactaaagtgagtccttactttcaatattttaacgccagattaaatattaatagactctgtttgcatctggtctaatttcaccatctcatcaatacaacatcatttttattcatgaggtttacatcctgacttaggttgcaggtcagtgatcaagtctccactctccggggatataacgggcgatccgaatcgatttactcagctgaggatctctaaccacacgacatatgtagcacttaacccttgcatatgtcaaccgttcccacagatcctccacaacgtgaaccggtccgcgctacccgggagcacagtactcctccatccagcctctagccaggagggcacacgctactcccaccatctcccacgcccagtgcgcgggttgtcttttcacgtatggaatagtcgggttcaagcttaccctgtcccatttccagggcatgtggctagttaagatagtccttgatctatcaggcctacatacgcatccaatccttaattgacccgggcggagcatcacctgttcctagcccaagtcccgatttaattacttccacccttaggattgtttgtattccttaggatgaaaagagcatcaaagggaactttgcagtaagatcccaccacgctctcaatgaaaatattcttgcaggtagaagccatctttcctcaagataacccctgagctaggccttaatgcaaaagacaacctctatccacaagatctgagcagggctaagcatttttgtaaatcatattttgatacttcaccagaagtatctataaaggtatggatatcaaggaaggcaatgcatcaaagggtttcaagcaactcctatatacctaatgcacgtttcactagacttaaagtgtgcgaaaattatttaaaaacacaaggaaggggttgcatgcaccggggcttgcctaggtaacactaggttagtgtttgttagacgatgtccacttgacgatcatccttgtcctagcacttgatcagtccggttcgttcatcagcatcaccatgcggagtagcccgcgcttggggtcgacttgagtcatcttccgcatcacgtgattaattatcgcaccgcttcagcagctgacacgaatccgcgagatcggtagcgattttccgatccaggcaatttgtcgagcgcttggggaatatcgcgctgctagcttcgtcttcacccgattcttgggatttcttgctgacgcacggattgacgacgagatggagacttgcggggtcgagtacgacgaggagttccgagggtcgacataagcagcacgaaattggaaatcaaatcatcaaagtcgacgagcacgtcgtgggcacaacgtgggtcgacgacgagatcgtgtttggagcgagctggtgaggtgggagtcgagcaggggataacgtgtttgacgactcgacggcaaacgacgcgacgacgagcagcggagagaagcaggcggccgagctaggagggaggctgcgcgcgaagggaaacggcaagcgctcgagccgaat

SEQ ID NO: 79045 - DNA, 360 bp, Zea mays
  Clone ID: MRT4577_172113C.1
tgggctgatttatgtgcttgtttatgtgcttggtagtggaggtggttggtaagttcgagcggggttatggcgggttgattgatgtcggtggtcataataatcggttcgagtatattgctcctccctgtggtgataatggcgggcggagtattgagcatggtgatcctccttcgctgcggcatctgtagacgtcgtcggagtatggtgattgtacttcgctgggtgttatgcttgcgcctggtgtggtgtttgcggaggctcttgcgaaggcggttggtacttatcggtatcatggtagttggctttatgtttttgagtctattgtgggtcatcataatatgtggtgttatgatgggcatt

SEQ ID NO: 79046 - DNA, 593 bp, Zea mays
  Clone ID: MRT4577_172114C.1
ttaaaaaaaaaaaaaaaaaaaaaaaaaaaaaaaaaaaaaaaaaaaaaaaaaaaaaaaaaaaaaaaaaaaaaaaaaaaaaaaaaaaaaaaaaaattataaaatttaaaaaataaaattttaaaatttatatttacctttggtccccaatttccctttgggtttttttttttccattttcttcttttttgggggcgttttttttttatttttaaggggctaaattccctttttttggggaatttttacatttttcggccttttatttttttacctttttggtgggataacccttggtgtccccatttttatattttccaaaaccattcccttttttataggttttgaaaataaaattaaagacgggactcattttttttttgaaaaaatttgtcccgccttgttttgatatttaccctcccctggccccgtaaatttaaccgttgggtttttgcggttcctttcgttttaaactttacttttttccccccccaagccgcgtttttttggttatttttactttttgtttttccctctgggggcgctttttcccgtttaaaattttatttggggccttttttttttggtttgggttt

SEQ ID NO: 79047 - DNA, 582 bp, Zea mays
  Clone ID: MRT4577_172116C.1
aaaaaaaaaaaaaaaaaaaaaaaaaaaaaaaaaaaaaaaaaaaaaaaaaaaaaaaaaaaaaaaaaaaaaaaaaaaaaaaaaaaaaaaaaaaaagaaaaaaaaaaaaaaaaaaaaaaaaaaaaagcttccttcccgggggggcccgtttaaaaggggcgaaattccagcccctgggcgggcggttattaggggacccgacctgggccccaagttgggggaaataagggcaaaagttgttccctggggaaaattgtttcccgttcaaatttccccaaaaaatacaaccgggaaccataaagggaaaacccgggggggcctaagggggggcctacctcaatttaatggggtgggcctaacggccctttttcaagggggaaaacctgtggggccagttgttttaataaatggcccaacccccgggaagggggggttggggtttggggcgcttttccgtttcctggttaattgactcgttggcctggggggttcggttgggggaaggggtttaagttacctaaaggggggaaatacggttttccacaaaatcgggggataccccggaaaaaaccttgggaccaaagg

SEQ ID NO: 79048 - DNA, 380 bp, Zea mays
  Clone ID: MRT4577_172117C.1
atcccttgaacatgaagcatatcggtaacttagtcctgtataggttttcagcgtaacatgatcaaggtaccatcacacacagggaacttatttttacttatgaagtctctaaattcataaaataaattcataaattggtggaatgttatgtgtctattgacgatgggtttacaaatatcctcgaaagatactggaaaataaatagaaatgtgatgtgctctctgaattcccttggcacatccaagttattatgcttatacaaatagcaactcttcagacttcttgttgtcaccaggtattcaagtagttcttttgttggcagtgtcagtttcctgtacgcatttttcagattaaaaacctgtatggtcactatcaactct

SEQ ID NO: 79049 - DNA, 696 bp, Zea mays
  Clone ID: MRT4577_172118C.1
gtccccacacttctcagttctcagtatgccccggccccgtcactagaagtcaacggccgttcagttccttccccgctccgtccttcggcatgcttctactcagcccctcgccgcccttctactcagcccctcgccgccgtctaccgccgcagcggtaacggtcccccgccgtgtcctccttactccctacaaccgcctcaaggctacgcccaccccaccgcgcctcgcctgcctccgccttcggcccgccaccccgctccgcggcatttcgtcgaggaccgcgtgccgcgcggccgctgccgatgccgatgccgatgcagtgccctcccaagctcctggaggcgatggtggcgtgcgtggcgcaatggtgcgcattggggaggctctatcgcttgggttcccggtgtgggtggcgtcagcctgcgccctcgcgctgtggcggccgccggccttcctctgggtcgggcccaccgcgcagatgcttggcctctccttcacaatgcttggtcggggccttcctttccttagttccgttccccccgctagtacttgtttctacccatcttagtgctgtctcagtgtctcgtgccacttcttccaagttgactcaaactctacttcccctgtgggcttattagctctgttgatgtcctctacatgatattaaaacagctgctggcaatgagatcactgagt

SEQ ID NO: 79050 - DNA, 621 bp, Zea mays
  unsure (1)..(621): unsure at all n locations
  Clone ID: MRT4577_172119C.1
aagcaacagttcgaaattcccaagtanntgttcttagtattaatacctttcccagtggtataagttttgttttgagttttgagaaaggttgtgacagagaatgtagctactacaaagcattgaaggataattgattttggacacattgacaagttttccgtgcacgagctgataattttggatgagaagaatgatgaagtgcgcaagatttctagcagagtaaatgatcttgatctgcaactaatgaagaattgaaaagcttgcctacactgaggagtacattgatgggcaattctctggaaaccttggagagatcctgatcagaaccaaattgaattttacaaggtggaatatcgattgggtaaaggtgggatgctgactgggaaagcgctactcccttgtatgaattgcactactcccttgtatgaactagctggtcgatgattttgttttcatccttttggttttcttgacatcggtttgttcattggagagcacataggtggaatgatgcttaatgtttctgcatattaatgtattttattataacatgtcgccgtaacaacgtacgggcatacagctagtacattgactatatgatcaatatgagttagatgtcgg

SEQ ID NO: 79051 - DNA, 229 bp, Zea mays
  Clone ID: MRT4577_17211C.1
ggaaaagaaacaaatcaatccatgtgggcaatcaaatgttttattttccccaaaaacatccatttgtcattacaacaaattcttacccttccagctggggccccaggccccatggttttaaaacaaaaaatgggcttccttgaacaaccctggggcgcggaggtgtcaaaatttccaacatttttcaggggggggggctggttttatttttttaacataaactaagggg

SEQ ID NO: 79052 - DNA, 669 bp, Zea mays
  Clone ID: MRT4577_172120C.1
aaaaaaaaaaaaaaaaaaaaaaaaatagtcgtcctcttcactattccaatccagacgtggcccaaggctgaagcaagagcgtgactgtgctgtgggaagtttgccggagcagtgcaggccaagtcaccatcgtgcgcaggctaagcaccaaccgccaccttcaaagcgcccggctttagccgaccacgaacggaagcttggtgatcaaggcgagccaccgcgcgcgttgccgacgggacggttgacgtctccactcgccacccacactacagcatgcatacacatacagcagctgttgcgcgtgcgcttttcacctctaaatctaatcagtcacaaaccaatgtggatttagaggtgcttatctctcgtgcgcgaatgatgaagggacacggacgacacaatttggaaggagacccgtcgtggtggcatatcttccggctctggctgcatgtccgcgcgcgatatcgcagcgcctacggcgtacgagacgcagcgaggccttccttccaggccgtcagctactgctacagtgctacaatacgtggactaagaacaacggtatactctctccgtgtcctattatttgtcatttagcatagcgacatggtctataaaatataactttgaccaatgtatttattaaaataaataaactcttagtatatttac

SEQ ID NO: 79053 - DNA, 589 bp, Zea mays
  Clone ID: MRT4577_172121C.1
ggattgaacattccaagtatcattgctgaattcacgcatatagttgctcttcaaatagatcaagtacaatttcgtcctacagcgttgctgctgtggctatataatgaccttccaaaatcaagaagaatctaatcaccagctcgaggttgatgcgaagctacaaaagcatcattatcaagtgagcaggagctttcggccaattcagttacactagcccgtagggcatcccttttcttttcacaatgttaagtaggataccgttactagtgctctcaggctgcagcaaatccccttcgcaaacagccatgctcgtgggagtagaagcctgactggctctggtgttggcagtgttgcatgcctcagtctcagaattttctgtgcatctacctggcatagtaacacttgagctattgttcggcggtggatcgcttgggaaggtaggctctgaccaaatacctgcagcattaccctccacagtgcatgccctagttaattccgtgtcgatctcaaggttatgaatgaaactgatgaacttgtcagcagtatgatgtcctcattagaggcccaccactcctggtccaggaattaa

SEQ ID NO: 79054 - DNA, 155 bp, Zea mays
  Clone ID: MRT4577_172122C.1
ggatatctgtgagttcctgaaccatgtggaggacgggctgaaggaccactacgacatccggatgctgaccttcatcatggttgcccggctggccaccctgtgtcctgcacctgtcctgcagagggtggaccgactcattgagccactaagggcca

SEQ ID NO: 79055 - DNA, 702 bp, Zea mays
  Clone ID: MRT4577_172123C.1
cggcattcccggggcgccatgcctttcgcctccgccgtcagcaccgccgattggatccttccctcccgtgcatccctcgctcgtctcgccacacaaatcaccacctccttctctgcgtcgccccaatcgccgaggaaggacgggggcttcttgacgcaggaccagcccagtgctcgtccacggcggcccgtgacaccacctccgtcgctgccaggaaggagaacaccgcgcccaagcagcaccacctccaccgtcgctgggaaggagaacactgcgtccaagcccacctccgccgtgcggtggtccacgtcgtcgctcccgcaggccagtaagatccaaagctcggtggactcctccaaggtcgtctccaccttcagggctcccgtgctgctggggagtgctgctccacgacctcgctgacagggtcagggacgatgaccagaccgctgcaatcgacatctagctggcggctgcatttgatttgggaaggaagcgtgagttttgtggactgtggtgggggacaagcagggagatttgcactgaaatacgaggtgctttgagagcccagtagtttattccattttacatcttattggtatatatacgtgtgtttctacggagattcacgcttatcaggagatttgatttaacaattgatacacgcttgctctcctcttaataaaaaaagaacttatgggttac

SEQ ID NO: 79056 - DNA, 280 bp, Zea mays
  Clone ID: MRT4577_172124C.1
ccttctccccccaagtgattgcagcaccccccccccaaccctagccgccccccctgctctccatggtgcatcctccccgcttggtaccccgtcgtgtgggtgcgagtcttccattggagtttggagggaggaagaaggaagaatggaaggaggaaaggaggaacccaaggtggtggacttccggatcgtacttagggatttgcccgaacttccggtaaaggtacttgatacatgttgggaatgaggggagtagcagcacgtccacttacactttcacaat

SEQ ID NO: 79057 - DNA, 299 bp, Zea mays
  Clone ID: MRT4577_172125C.1
caaaaaaaggggggttttttttaaatttaacagtcctaaatccagggggtttttattcaattcaattccaacaggttttttttaaaacagttaataaacaagctggttgatgggattattcccacatttttgctgaaatattttatggaaaccccccccgttgagaataataaaacggcccgcagtttcaaaaccacatgcttttgtaaaaaaaaattaattcttttaggttaaaaaaattggccaggtccccgagaattaaatttttttttttaaaagaaaataacttttttaaccgt

SEQ ID NO: 79058 - DNA, 2804 bp, Zea mays
  Clone ID: MRT4577_172126C.1
cagcgagcgaggactggggcggaagagagagagaagacgtctctctcctctcggcgtccccgttccccaacctctcgtcgtttcgtctcctggtgaacatctcacacttcattatcaggttaggcaccttgatacttttgtgactcaaatcatgcctgagctacaacaacaatatagtgtgcatccagaattctcaaagtgtcatccaactgcttttatgaaactaaagcgtgaatctgaaagagagatactgcagagtgccgatgtcaattgattttccttggtctattccaaatcgcccaatgttctaaaatgtgcaggtagcttatttgacaactatggaaatattgatgtgtttcatacacaaactcttatctggacgtgatgcatatccatactaatatctgcagatgggacaagaagaaatcagtgctagtgggacatcgtatctcaatagaactgaagctgcaaatgttgaaaaaattgtaacaacttttttaagaagtggtgttgtaccaagccagatcggagttatcacaccttatgaagggcaaagggcttacatcgtaaattacatggcaaggaatggctctcttcgccaacaactttacaaagaaatcgaggttgctagtgtagactcatttcagggtagagagaaagactacattattctatcttgtgttagaagcaatgagcaccagggaatcgggtttctcaatgatccgcgcaggttaaatgttgcgctaactcgtgcacgttatggcatagttattcttggtaatccaaaagtactaagcaagcagccactttggaatagcttgttgacacattacaaggagcatgagtgcttggtagaaggacctctgaacaacttaaagcagagtatggtgcaatttcagaagccaaaaaagatatataatgaccggagattgttcctgggcggtggtcaaggtgttatgcatggaactaactttggggctggggcctcaagccaagcagcagataagagaagtggcagagggaaagaaggacaatcgtttgctccttatggccctccaaatggggtgcataagcctggtgtgcacccggttggctatgctgtaccacgtatgccttttcctccatttcctggggctccacattctcaaccatacgcaattccaacccggggtttgcatgggccccttggagctgttccaccggtgcatcaacctggaagtagaaactttggggcagctcgttcaaatactggtgggcctattggtggccaccttgctcatcaacagaactcccagcaagctatggggagcattgggtcaaattttaactacactggaatggagaatccaagtagtcagccttctggtggagcacaaatgtcccaaactggattaatgacccaggtgcctgtccaaggactaagtcaaacattccgtgatggtttttctattggtgggatgtcacaggacttctttgtagacgattttaagagccaagggtcacatgtgccatacaatattgctgaattttctacccaggcttctcaaggtggttatggtgttgagtttactcaagcgccccaatctggatactctgggaattatatgaaccaaaattcacatcctggatactcccatattggtacaacaaatgacattgtatctcaggatcacatggcccatggatctcatgggatgtttacacaagcgggatataatgatccctcacaagatgagtcgtctcagattcattatggaatggctgccgctggccctctacagtcgcagggcatgatgaaccccttgtactctcaatcctatgctcactacaacacccaaccacagtctcttcaacctccgccccagtgataatgaaagcttgtgataggatgaagccaaattttggaagtttggtgggttgcatcttttggcccacatgttgtgcccttctctgctatttcagaatcgatggtgcatagacatcagatgcaagcaatgaaggcacactatgtattggctatttatcggggcaggcttgactgaggggcacaaggattgcaacgtatcattgatcgttgtagttcactgcccactttggccacaggagaggtcatatcatcgagaggttgacggcactaccctcatccctcacctgtatagaaaggcaatcggggccaatagtggtacgatgtgaatattccaggatttgctgccattcagaaagtcaagttgcagcaactgcatgcctccatggtaccatgaagacacgcccgtagagtggctttgtatagaggtgctataggcgaggtggacaaccctttcggatatcgcacatggcaagatatttacattgacattttgtatgcacccgatatggttttgatatttatgccacaaatcatttaggtggtgatgcaagtagtttgttgtgattggaaaaaaaaaaaaaaaaaccaaaacaagtttataacggcaatctgggcctataatggttcaatgtgagcttttttgaggatttgcaggcactcaagtcaagttgcagcaattgcaggcctccatggtgtagagtggctttgtataaaggtgctataggttgggtggccacaacccttttggatatcacacatgacaagatatttacctttacattttgtatgcatctgatatggttttgatatttatgccagagatgatttaggtgatggtaaaattagttagtgacgactggaaatttgggagtgttctgtgaaagtaaatttgaccctgaatcctgcgaggaatggctgatcatgaagtttattgtat

SEQ ID NO: 79059 - DNA, 266 bp, Zea mays
  Clone ID: MRT4577_172127C.1
ataaataaaagcgcgcttgtatttattggtatcgactggcccaggtcctgtaaccacgcggcatgactgatcagggaggccacacccatcaaagtaaggcggctccgttctatgatcatccaccacagctgacccgtccatcctacctttgtcgagtctatagtatgcccaatttgcattctcttgcctgcactttctcaatgcagtgactgggaaactgctggcgtcaccctacgtaatgatcttgatatacataccgtttttac

SEQ ID NO: 79060 - DNA, 292 bp, Zea mays
  unsure (1)..(292): unsure at all n locations
  Clone ID: MRT4577_172128C.1
accaccacaataacaactaatatcatcccttctaccaataccattactcctacacctatttcctcacctacaccttcaattactattaccataagtacaataatcatcataatgatcacaatcacaaacaacacctcttccaagccatcaccatctcctccagctccttctcactctacnagaagcactaagcgaataaagacccctagcacactcacaagcacaagatcactgaagatgtctctgccacggcggccgtcgactcctactgctacgtattccactagcacca

SEQ ID NO: 79061 - DNA, 497 bp, Zea mays
  Clone ID: MRT4577_172129C.1
atagaaccaattctcatttcaacccttctaatttaaatatattcccaggagcatctagacgtgtcattacaaagagtcctcttctcattcatatggctaacctgacgctcaatctatctctagatcgaacggctattctacactttatatgaaacaaattgactattatacacattgcaggtgcctccaattggattgcctatagccatcgctagcagttctgtcaaaaggcaccacaattatctgtctaaacatagaagctcggctccccttcctgacctaggtgatgatattctcaccaacacatggaagctacttctaccgtcttaactattatgacggactccagcattttttactagccctggactgaatgaagcctgagactacttgtgaactaccacgatctccttactctccattgacctaccctgatgctacagccagaaagctcctgggagataatcttctgaatagagaccatccttaacatctgg

SEQ ID NO: 79062 - DNA, 460 bp, Zea mays
  Clone ID: MRT4577_17212C.1
atatgattcgaaaacagggacatccgccatgtgttttctgatcgggcggcagggcagtgcagaccccgatgcggaagctgcctccgctgtcgccgatctgaaggatcgtcgacccagtgctgcagcacaccagtgttcagatcagtcaccgggctgcaggtcgactgcggcgacggccagcttatcaaccacagcctcagcgaggctctcctacggacccgcttcaacaccggcgaggaggcgaaccttgctgttgagaagagttcgacgagacgagcgctgaagagaacgaatacgcaaccaataccgcaactcaagaggcggtgacgctgagccctgtgaggacggacggttgatgctaaaacgccagagaagcatgctcgacgggcttctccgagtggtggaatatcatcgacaccaccagtgagcgcataatgttcaagctacaggatctgatact

SEQ ID NO: 79063 - DNA, 179 bp, Zea mays
  Clone ID: MRT4577_172130C.1
cagccgacgaagggtacccggccttcgtgctcgtcaacagggtcagcggcgacgccatcaagcactcccagggcgagggccaccccgtcaagctcgtgccctactaccccggctaccatgacgagtcggtgctatggacggagagacgcgacgtcggccatggcttccgctcaggccgc

SEQ ID NO: 79064 - DNA, 872 bp, Zea mays
  Clone ID: MRT4577_172131C.1
gaaaaagaggagcaccactcgtggggtggtaattcggcacgaggcaaacttgggaatagcagcggccggccggaagcgagcggagaccgaggggagggggtgaagaagcaacgagacgcagcgagcaagcgaaagcataccagagcaccaagcatagggacgcgcgcgcttctccagttctccctccctgccctgcaaggcggctgcaactgttccagctagcccctctcccagcctctgggtcgtagacgtagtagtagcagccgcagcagcagaagcggcggcgagcatgctcttggcacccctccccggcgccgggcggatctgccggagggcggcggccggggcgcttggagcgcggcgctaaccgcgttcgacggacctcgggatctgacgccgggcctcccctaatcggtcgactccatcggtggcggcggcggccgaggcgccagcagccgggtctctcggctccgggacaagggaaagattgcgcttgcgcttgcttgggcgccggccgcgccggtggcggttaatcttcgagagccgcggtcgcggcgcgcggtgaagagaaaaaaaaggtgtgtgtgtgtgtgaaaaaaaggaggctccctgccctctcgcggtgacttggcgaggagggggagggactgggaaagcgaatggttttcgggaaggcgctgtgatttggcctggaaaggaggaacctttccttcctcttcccgtcctttgccggctcttgtaccgccctcagatcggcgacccggttgtttcttcggcaacgggcggaaatgaggctctcgtcgtcgtccggcagcgtcctaccggctcagccgggctctccggaagctgtggaggagcacaagtgcctgaac

SEQ ID NO: 79065 - DNA, 437 bp, Zea mays
  Clone ID: MRT4577_172132C.1
ccggccgggccctgggctgaccctgccggccattgagctggcgtcatccgcagtgagaccttcccggtggagaccagcaccttggtgcagagcgagaccgactgcgtcaacctgctcttcatcttcgagatcatgcaggcgctttctgtacatgcgtctgcctacctcaaggaccccatatcttgtgatcttgtacagcgtgggtccgttgaaatagtcacttcttcgatctcttcttcctgccgtagaccaagagcctgcccatctacgagatgactgacagtgtggggaaccagcactgggtgtgcaagagctacatggccgacgaccaccaccacattggcgacggtaagctcaccggctgcctacgccgaactacatccgtgtgctactgttcatgcatcagacgtcacttgatgagactacaggactactac

SEQ ID NO: 79066 - DNA, 444 bp, Zea mays
  Clone ID: MRT4577_172133C.1
gtcctttttttttttttttttttttttttttttttttttttggtttttttttttttttttggcggccttcctttattttttttttttttttttttgaaaaaaaaaaaaaaggcccggctaaaaaaataaagcagttgtacaaaaaatgcaccaaacccgggggggcaaaaaaggaaaaaaggggggccttcatcccccccccaaaaggggtgaataaaaaactttgaaccacaaatgggggggcccaaaaacaatttttgaaaaaagctgcaaacttgatttttaggcccggccagttcaaaaaaaccccccaaattggggtaatggtccttgaaaggaaaagggtgccattgccccttttcttggggccagaacccccaagggcttttctaaattccttttgggaggaaaaaatagtttaatttaccccccccgacccctggg

SEQ ID NO: 79067 - DNA, 397 bp, Zea mays
  Clone ID: MRT4577_172134C.1
gggggggccgccggcccgccccggggctaaaaaaaaaccaaaggcccccttggttgccaaaattagccaaaaaattcagttaaccagtaaaccaggggggtttgggcccttggcaaaagttttgaaaaaccccccgaacacatccaacgccaaaaaaaggccttaaaaaatgggccccgcccccccccaaaacgggaaattggggcccccaaaggccgggggaccaaaatcttcaccgggcaaagtcaccgcccgcaaaaaagcccgtgttttaaatcaaccccccttcacccccagggggggtttcgctaaaaaaaaaagggttttggggggccctggctggcctttaagggggggcccccccaactggtttttgaaagctcccaaagggggggaa

SEQ ID NO: 79068 - DNA, 584 bp, Zea mays
  Clone ID: MRT4577_172135C.1
cccactcgtccgcccacgcgtccgcggacgcgtgggcggacgcgtgggggaggtgattgtccatggagaatcaatgcaaggctacaaaatgcctcgtctcccatagtcgtgtgctctagattgttacagttattgtggatcagcacacatgcacttctagtggtcgtcgaaagacaacaacacccaccagctcatgggttgcatccctagcactgccaatcctaacgaagaaaccacatatgggagcaaaaggcttatgcacgaaggattgaaagtgtgggcaacaagtcattctggccaaaagtgtccatagccgaggaagtgaatgcacctattggtaagaggagtgttggtcggcaaaggaaaaatcgggtgaaaagttccctagaaggtggtgctgcaaagaagaaaaagtccgtacctgaagaggaaaaggagaagaagctactcagaggaaaaattaaatgcccgaactgtggccaacttggtcataggaaggccagcccaaaatgccctcttaatgggtcaaaaaagaggaaaaggaaatctcgggaaaaattgcacaaaacaatggttttccaaaa

SEQ ID NO: 79069 - DNA, 633 bp, Zea mays
  Clone ID: MRT4577_172136C.1
aaaaaaaaaaaaaaaaaaaaaaaaaaaaaaaaaaaaaaaaaaaaaaaaaaaaaaaaaaaaaaaaaaaaaaaaaaaaaaaaaaaaaggaaaaaaaaaaataaaaaaaaaaaaaattgaggggggcgtgcattgaagaatccaagtttcttagatgggggcttcctgaagtaaaaatgtttgttttgggggtcgcgggagtttcattgttggggcccgccgttgctcccccgctggtgctgggggattgccttttctttccccccttcttcttgccgttggacgcgcgtgctcctttcccccctggggcttgtgttcccatttggggccccctgcctgtttgcctttttgggcccttgtgccccccctgtttggttgaggggggccgggccgtggggggggcccccttcaccccccccggtttctcgttgcctcctccctgggggccggtgcgttttcttccttccttttctcccggtttttggggttgggttctttctttcccccccaagttggcgggtctttcgcggggccttttggggggggggggtcccttttcgggtccccttttacctggttagcgggggttggccccccgaatctttgttttgggggacggtttttgtttggggcttt

SEQ ID NO: 79070 - DNA, 473 bp, Zea mays
  Clone ID: MRT4577_172137C.1
aaaacatgatttttaacccaggagcgaagtggaacatgaaccgggcgggggaaaaaaagggagtggggaaagagggggcagggggacgggggcggggaaagcccaaaggccagggaacagaaaaaaggatgacgaaaaaaaaaaccagcagaaaaccgcaacccccaagacaaggcagacgcagccaaaaacaagaaccagacctagacaaacaccagcaaccccaaccccgaaaggggaacaagaaacgaagcccacccaaggcaacaaaaaaaacgccccaaacgaaggcccgccacaagagagaaacacaaaaccccaacttaaagaaaggcccaacttcgcggcccgtctatggaggaaactccacgaggacgcccactccaccaaggaccacaaactcgacagggtcagggagggggaggccctgagcagagacaaccggaaagaacccaccaacaaaatccacgcca

SEQ ID NO: 79071 - DNA, 176 bp, Zea mays
  Clone ID: MRT4577_172138C.1
ggcaagagagacacggggagttatacacagggggggaagccgctttccccttgagagggaccacccgggatatgaagaacccccctttccacccgttaaaaaataacaccagccccaaaggcaaacgtgttaaaacaaaaaaagaaaaaaaccgcaaacgtttaaaatccaggggg

SEQ ID NO: 79072 - DNA, 320 bp, Zea mays
  Clone ID: MRT4577_172139C.1
attcggggttaagggaggttaggtagctgttggaacaggaacaggccgaaaccccagaaacagggggaacacaaaacaaaaaaaaaaaaaaacaaaaaacaaaaaaaagaaaaaaaaaaggaaccccccccaggcgcccctaagaaaaaagggcccccagggaaaaaacggaggagggcaaagaaaaaacgggggggaacacaacctgcccccaggaacccaacaagaacgagagcaacccaaaggacacaaggaaaaacaaaggaaaagaggggaaaaggaggactgaaacgcaggggaaacgggaccccccggccaag

SEQ ID NO: 79073 - DNA, 514 bp, Zea mays
  Clone ID: MRT4577_17213C.1
gggtacctcgaggccggccggggacgcagactcaggcgcaggcgcagctcgccgcagccgtggtgggacctccggggacgacgatgactgcctcgtgggctacggtggggtccgcgccggcggagtactggccgggagggacgaccagcgacatggcttgtggccctgctggcacggccagcttcccgtcgtctcctagcagcctcggattcatgaccggctcgccgtttggaaacgccggcgatgacgacctgtttctgtttggcttcgatccctgacaaaggcttgctgatgcatgcatatccagccaatgccacgtttgcagtttgcatgcatgcactaccatgcaagtagtactagtagtagccacgtatgactatagtttgatgatcaagtgtccgcatggatggtatataatggttaatacaataaggcaaaagctctgcagttcatctgaacagggctttgcatatgcatatttgcagcccacaaaaaaaaaaaaaaaaaagcggcc

SEQ ID NO: 79074 - DNA, 371 bp, Zea mays
  Clone ID: MRT4577_172140C.1
ttttttttttttttttttttttttttttttttttttttttattgatttttgtattttcttggttaaggggtgggggcttccaacaacaatttttgccagcgtgaacaacaccaaaaccgcgaaattgctgtacatcctaccggggggggggcccacaaacaaaaacgtttttacaggcacttgaacacgcgcgcatgtttttgggggcccttgccccggggcgcagcccttgtgagatacacactctggggggacgcccgcacaaactaatggctggcggggacacggagaaatttggggccaaaaacatcaagggggtttaacctttagatccggaaccagggctaccaccacaacggggggtttgtgtt

SEQ ID NO: 79075 - DNA, 814 bp, Zea mays
  Clone ID: MRT4577_172141C.1
agagcgtctctgtctgtgtgaagtgtgattgtctggcctcgtcgtcctctggacgacttttcccccgtcttccacaaccccgagtccccaacccaccacggcgttgcggaatccacctgcaactgcaagcccacgaaatcgagccgagccccgacgccaccaaatcgtgtggcctcggagatcgagcagggtctggaagaaccaggggagagaccgtcagaagaggaggaccagcagcaggcaggcggtggtggcgaagtcgtcggcgtcggcggccggggtatctacgatgataacccggtcgaagctggtggagcaactgcgcgactaccagatccgatcccagcacaagcgtgacgttatcggagctatatcatggggcttgttgtgttgttttctgataatatcatcgtacatgacgctatacttcaggcacttttggcttagtgccattattatctcactcggtattcttcttcctgctggcctgtatattttgaggcaaagaaagctggctaagaaacgagagagaagactgttgttgcctctctctgtgtaaggttgttgtgttttcctaagtgctacaggagaaatgatagttttgcgagtagataccagttgtgttgtcagctacaaaactcatttttgtaaatttgtttggtcgatgacttcagcccaagggaacaactcaacatgtcataatacattgggcgtcgccatacacgtgtatgcagatactagctcgtacttctgatggattttgttactgcattccatcctagctcatttgctaagtgagtttttggttaaatga

SEQ ID NO: 79076 - DNA, 1095 bp, Zea mays
  Clone ID: MRT4577_172142C.1
ctgggtacctcgaggcgggccgggagtgattgtctggcctcgtcgtcctctggacgacttttctcccgtcttccacaaccccgagtccccaacccaccacggcgttgcggaatccacctgcaactgcaagcccacgaaatcgagccgagccccgacgccaccaaatcgtgtggcctcggagatcgagcagggtctggaagaaccaggggagagaccgtcagaagaggaggaccagcagcaggcaggcggtggtggcgaagtcgtcggcgtcggcggccggggtatctacgatgataacccggtcgaagctggtggagcaactgcgcgactaccagatccgatcccagcacaagcgtgacgttatcggagctatatcatggggcttgttgtgttgttttctgataatatcatcgtacatgacgctatacttcaggcacttttggcttagtgccattattatctcactcggtattcttcttcctgctggcctgtatattttgaggcaaagaaagctggctaagaaacgagagagaagactgttgttgcctctctctgtgtaaggttgttggtaggttccttgtttttgcgcctattcctgtcttgatagaatctgcattcttaacttgctgcttgtctggcgcacatccaacattttatacatctctggaccctaatacatattcttattcttcagtgttttcctaagtgctacaggagaaatgatagttttgcgagtagataccagttgtgttgtcagctacaaaactcatttttgtaaatttgtttggtcgatgacttcagcccaaggaaacaactcaacatgtcataatacattgggcgtcgccatacacgtgtatgcagatactagttcgtacttctgatggattttgttagctgcattccatcctagctcatttgctaagtgagtttttggttaaaatgaggacactggatggttttctgtttcttgtgcccagttgatgtttgtttctgacaaggttgtatatttgatggtttgtattgtgttacggaaaaaatgtatattattggctgaatccagcttggtactgaatgaatttacgttattgccgcgcg

SEQ ID NO: 79077 - DNA, 198 bp, Zea mays
  Clone ID: MRT4577_172143C.1
aaaagaaaagggcttcatttacaaaacatgaagtgaacaataggcatcaactgctttgaaaaaaaaacaagcacccattacgtcttaatcatcatgtaacaaaaagtgacacacttgctgcttgcttaatttagggggcaagagcaatctaagaacctgggctgctttttctttctacttgaaaaggggccatttttt

SEQ ID NO: 79078 - DNA, 429 bp, Zea mays
  unsure (1)..(429): unsure at all n locations
  Clone ID: MRT4577_172144C.1
agggtggngngccggtgggagacggntgggtgngacgccgnctggccggaggncgttcctgttctcgncgaagggtgtttcggactcgnggagttcgcannngtggcttgatccggacgccagnacgagtgttcttgggatttttcttggagggggtgctgggacntggttgttttttttgactaanaaaagggngaaaancngnantggcgttgggngncnctaaaggtttatatatatccctgtcaccaactggttcaactgcaaacgtctcctaagaatatatgtgctaaaccatagtatcaaactctgcttcgctcaaccccgccacctctccgaggctctatggaacaaaaccttgcccggtaacaaataacgaagggcatttttgagatccctgcaacccaaaacaaaatcanaaaaatccca

SEQ ID NO: 79079 - DNA, 118 bp, Zea mays
  unsure (1)..(118): unsure at all n locations
  Clone ID: MRT4577_172145C.1
atcnatgagcatattagctatcancctgcnaaacacacaagcnttgcnncagtgccnggnntgtggganagaacgtgaactgtgantggattctctaaggcnntngctatgactggtt

SEQ ID NO: 79080 - DNA, 310 bp, Zea mays
  unsure (1)..(310): unsure at all n locations
  Clone ID: MRT4577_172146C.1
attanttttttttttttttttttttttttttttttttttttttttttttttttttttttttttttctttttttttttttttttttgggggggggatggggaattttaccccggtcggaacaacgtttggacaacacgttttgggcggagctaaaggtgccctgaaaacccaagggggtgattgtaaaaaacccccaacatgcagattaaactggttttgggctttgacaaaaccttaggggatttcaggaaattctgaacgggggaacaaaaaaaggaccgtttgggggccggccttcaaaaatcccaaa

SEQ ID NO: 79081 - DNA, 270 bp, Zea mays
  unsure (1)..(270): unsure at all n locations
  Clone ID: MRT4577_172147C.1
gcgtttttcctctatagcgtttcgcttttgaactacaaccagtgaacccccagagcagggggagggcgaagaggcccctttttagacgancggtcaggaaaatttccagcttaccaacaacagcagcagcaagcccacccctttgacgacatggcccgccttggtgccggcgccgtgttggcgctcctagtggcggtcgcggcggtggccgttttcctcgcggtgccggcctcggcgaagttcggggagctgagcgcgatggggttgctg

SEQ ID NO: 79082 - DNA, 599 bp, Zea mays
  unsure (1)..(599): unsure at all n locations
  Clone ID: MRT4577_172148C.1
cgggccntngcgggggcntttgtcgtgggcgcccaggtggnagnggcgatgactngggcaggttcacnnctcggccgtnncgtcggcgagggggcgggttnncagcaccgtgtacctttcgcgcgcctctttccggcggcgcgctttggccnngccgtcaagggtccaaccgcnnagcagcgagccgcctttccaccgcnngtgttccgccaggaagctttcgacgcgctttccgacgcgtnnccgccacccgcacaatcgtccgccttcctttgccttnnctgcgaccagcaagaaaggaaggcgtgcttggtgcttggagnnttcgcggcgaaacgggaacccctgcacgagcggcttccacgnngcgggggcaagggcttgcgggcatcgatttgccgtgggcgcccggcgggtgttcgnngcggcgctttgcaggtgnngcgcgggcgcctcnngagtacctttgcacgacctgtctgcgaagccgnncaggtggtgcacgnngcgaacgtttgaaggccttccaaacgtgctttcctggnnacgcgggccattgtttccgccaagcttttgtgcgactttcgggnnntcggcgc

SEQ ID NO: 79083 - DNA, 257 bp, Zea mays
  Clone ID: MRT4577_172149C.1
gctgggttttgaacagaagagtcccgagctcccattggacaaggcacactcgcgtattcaccaaatgacaccaacgccccgagcccaagcataaaaaagtgttctgaaagaagcatcaggacaggccacgcacccaccacgacagggaaaagaatggcactagggaaaaaagggcacccctttggcttcccaaagtcatatttggtgatctcgactgaacgcatgttcaaaaaactagacagcatagaaaagattaa

SEQ ID NO: 79084 - DNA, 230 bp, Zea mays
  Clone ID: MRT4577_17214C.1
aaggtgccattccctttctgagatgataatacacatgttttgcctaatcggggttactgtaaatcgacttcttctaaagagcaaaggctggactctggagactgaagggatttaacattagtcaaaccaacacatcatgatgggaacaatgcaggatccacaaagtctttcatgcatgatctttcaatgtctccaaaaaagcacactcatctaatcacgcattaatctca

SEQ ID NO: 79085 - DNA, 423 bp, Zea mays
  unsure (1)..(423): unsure at all n locations
  Clone ID: MRT4577_172150C.1
ccaacccttccgttacacaattcaagctaatcccaccaccaatttctcctcaaaggataccataccataccaagaagccttttctaacattctacagaaacccttaacctccnntccctttatctcccctcctttctttttcactttataatttcattattcattattttattaatcatttaattcttatttttttaatattaaattattaatataatttttttttaattatttaattaataatatatttaaatactttattaatttattttataatatatttatttactatttttttaattaattcatttattattccttaaattttttaattcttctatttataatataataaattatatttatttatttatttttcttataataaaattatattaatttattattattattatatttata

SEQ ID NO: 79086 - DNA, 647 bp, Zea mays
  unsure (1)..(647): unsure at all n locations
  Clone ID: MRT4577_172151C.1
aattcggcacgaggcgaaggaccgccgccgccccttcacggaacccgcggccgactccccctccgccttccccgctcgtccgcttctccgccgtccgctcctccactgcatggcctccacccctccgaccctgcacctcggctcctccacccttcggccccacgcctcggctgctccgctcgtccagccttcggccccacgcgcaccgcggccgccgtatctcccgtcatctgatcacccacaacggtgatgtggacgacgtggtgcgtcttggaggcagttccatttctggcgttacggtgagggaatgccacaacgtgngtggacgccactgccgtggcgctcccgttgcaggccggagtctggacgcctaagcttcttgttttgctgggtttggtgcaagtggcccatatgttgcgcagaggagcactggtgaagcctaagaaccctttatgtcgatggngggcggtctcagggnaaggtgtcgtcagcatgtgagaggctctgcttcatttgcccatcactgcggacgaggtcccgccatccagtcaagcgctacaagaagttgcttgcagaaatcttccctcggacacaggatgaaggaccaaatgatcgcaaatagggaaactgtgcgaatatatttcaag

SEQ ID NO: 79087 - DNA, 248 bp, Zea mays
  Clone ID: MRT4577_172152C.1
ctctagcccaattcatctcgagctcactcaaagagatgtgtagaccatcgtagagaggggcggactcgcacgatgtcgcaagagtctcctgtacacttcactcggcttggccacgtgcttatcctaccgctagctctccttctcctactggacgctgcgcattaaatgtcacccagacaagtgcgccacctcaatgtgctcctgcggttgctctgatgtcggcaacgccagatggcataccatccaac

SEQ ID NO: 79088 - DNA, 1063 bp, Zea mays
  unsure (1)..(1063): unsure at all n locations
  Clone ID: MRT4577_172153C.1
cggncgcgtgggcggccgcgtgggcggacgcgtgggtctagatcgcgagctagaactacggacgcgtgggcggacgcgtgggcggacgcgtgggtgggatcatctcgaaaaccatctcaaagaagggatgcttgaagtgtacaactctttgagcgaggaaggcaaaaaggagttcaacaaggcttatagcgcatcgttttacccgtgcatggatatactctacgaatgctatgaagatgtggcctctggaagtgaaatccggagcgtggtgttggctgggcggaggttttatgagaaagagggcctcccagcttttccgatgggcaacatcgaccaaactcgcatgtggaaggttggtgaaaaggtgcgctcaacccgtccggaaggtgatcttggcccgctccatgccttcactgctggagtgtacattgccctgatgatggctcagattgaggatcaagaggaaggcactcctactctgagatcatcaacgagaggtggagtcggtactcgctggtgattgagtcgcccgttggggaacccgttcatgcgagccctggggtcgccttcatggtggacaactgctccacaacggctcccctaggatccaggaagtgggcgcctcgctttgattacatcctgacgcagcaggccttcgtggcggtggacaaggacgccccaatcaatttggacctcatcagcaactttttgtcggacccagtccccggtgccatcgaggtttgcgctgagctgaggccccccgttgatatttttgtgcctgccaaccccgactttgtgcgcccgaaaaaaaaacagttttcttagattgaggcagtgagcggagagggagagagaaagagaggatttcgtgtcccgagttagaacagagtgctgtatgttttgtgcgactgtttgtaagtcaagtttgaactgtgaacctatgtgagcttttatcagaggacccggagaaaacctgggcatctgtttccggaataaaaaaaaaaaaaaaaaaaaaaaaaaaaaaaaaaaaaaaaaaaaaaaaaataaaaaaaaaaaaaaaaaa

SEQ ID NO: 79089 - DNA, 525 bp, Zea mays
  Clone ID: MRT4577_172154C.1
ctttcaagtttgtggatccgtttctttcttcctcatgcaattcgagaagctacatgcatggtgattcttctgacccagataaaagatctagaggatggggttctatggtgaaaaatatgaatggagaggtattggtggctggggctggggacacaactcgacatgcttcatcggccctacatgcatggcgatgtgccattgtggcctacaagagcattcattcttcatgcaattcagttaggtttatcgcaaatcatattagaaaaaaaaatggatgccatggtgtttcatattcgagacatgatgcaatcagagttttctttttttaatgcctcgttatgtaatagagactgtaataaggtatctgattaattgtttagctatccatggagcttatatttttttttaaaaaaaagattctgaaaaatgtaaactggctaacacgctatggctgaagcgcatgtgtggttttaaattgttcgccgtacgtgctccatttcacttctcaacagtactcttctctta

SEQ ID NO: 79090 - DNA, 2569 bp, Zea mays
  Clone ID: MRT4577_172155C.1
gtgcggcggccgaggccggcgtatatccgaaaggattagccctgacacgacacggccgcgctcaccagtcacacacgacacgacacgcgacagtccccaccccaccaaccgcctctcgccgtcctcgctcgcgcagctgtcctgcaccagcactgcacccggctacatggcggccgcctccaccctcgcgttcgggcacccaaaaaccctagccgccgccggcgccaagcccctgcccgccgccacctccacgtccgtctccttcccggccacccaccagcccgcgtgcctgctctcctcgcccgcgcccgggtctctgcgccgccgggacgtcgccgccatggtctccgcgccgccggccgtcggcaccgccatgccgtcgctcgacttcgacacctccgtcttcaacaaggagaaggtctccctcgccggccacgacgagtacatcgtgcgcggcgggaggaacctgttcccgctgcttccggaggcgttcaagggggtcaagcagatcggagtcattggatggggctcgcagggtcctgcccaagcccagaacctgagagattcactggctgaagccaagtcagatattgttgtgaagattggtctccggaaaggatccaaatcttttgaggaagcacgtgccgctggattcaccgaagagagcggaaccttgggcgatatttgggaaaccgtctccggcagcgatcttgtgttgctgctgatatccgatgctgcacaggctgacaactatgagaagatcttctctcacatgaaaccaaacagtatccttggtttatctcatggatttcttctgggacatttgcaatcactcggactcgatttcccaaagaacatcagtgtgattgctgtatgccccaagggaatgggtccatccgtccgcaggctttatgttcagggcaaggaagtcaatggcgctggcatcaactctagctttgctgtgcaccaggatgttgatggaagggcaactgatgttgctttagcatggtcagttgcacttggttcccccttcacgtttgctactactttggaacaggagtacaagagtgatatctttggagagcgaggcatcttgctgggtgctgtccatggtatcgtggaggctctgtttaggaggtacacagaacaaggaatggatgaagagtcggcctacaaaaacactgtcgagggcataactgggatcatctcgaaaaccatctcaaagaaagggatgcttgaagtgtacaactctttgagcgaggaaggcaaaaaggagttcaacaaggcttatagcgcatcgttttacccgtgcatggatatactctacgaatgctatgaagatgtggcctctggaagtgaaatccggagcgtggtgttggctgggcggaggttttatgagaaagagggcctcccagcttttccgatgggcaacatcgaccaaactcgcatgtggaaggttggtgaaaaggtgcgctcaacccgtccggaaggtgatcttggcccgctccatgccttcactgctggagtgtacattgccctgatgatggctcagattgagatcctgaggaagaaggggcactcctactctgagatcatcaacgagagcgtgattgagtcggtggactcgctgaacccgttcatgcacgcccgtggggtcgccttcatggtggacaactgctccacaacggctcgcctgggatccaggaagtgggcgcctcgcttcgactacatcctgacgcagcaggccttcgtggcggtggacaaggacgccccgatcaaccaggacctcatcagcaacttcttgtcggaccctgtccatggtgccattgaggtctgcgccgagctgaggcccaccgtcgacatctctgtgcctgccaacgccgactttgtgcgcccggagctccggcagtcttcctagattgaggcagtgagcggagagggagagggagagagaaagagaggatttcgtgtcccgagttagaacagagtgctgtatgttttgtgcgactgtttgtaagtcaagtctgaactgtgaacctatgtgagcttctatcagaggacccggagaaagcctgggcatctgtttccggaataaaatgggtccttcggaataaaaaaaaaaaaaaaaaaaaagaaaaaaaaaaaaaaaaatccttcggaataaaaaaaaaaaaaaagaacaaaagaacaatgaacagctgatctctcctcgcgtcagtgtttttttttgtttcggtgacaatggccaggcatttgcactgctataccttagattactcgaaatgttgtctaggaatagactgggttgttttgttccactggctaaagtgtagttcgtgttatgggttatattgaatgtttgcatgtcaattaatatattaaaaatagtctaattataaaattaattccaaaacggacgcgtgggtcgacccgggaattccggaccgatttttatatggtatggtcgtgttgttttcattctatttttttctcatatatcctttctcttttttattgttggtggggggtgcttcttttaattttctctcttttttttcccttgggtttt

SEQ ID NO: 79091 - DNA, 694 bp, Zea mays
  unsure (1)..(694): unsure at all n locations
  Clone ID: MRT4577_172156C.1
accacacaccatcagccacaaatcaatataggccgtactcatcagcttgcgcgctccagttttcggatcagctacataccataagttgtgaagtttcaaggccacacggccatagatatggctccaactcaagttgttgcaatggtgctgctggcggtgggcagtgcactgctgtctgcggctgcggacaccgcagctgcgccatccccgcaacccttcgtctggcagaaggcgcatgcgacattctatggtggcgctgatgcctccgacacaatgggtggcgcatgcggttacggcaatctcttctctgaagggtacgggacacgaacagccgctctgagcgccgtgttgtttaatgatggcgccgcgtgcgggcagtgttacaagattgcatgcgaccgcaagcgtgcggacccgttgttttgcaagcccggtgttacggtcaccgtcactgccacaaacttctgtccgcccaacgacgccctccccaatgacaatggcggatggtgcaacacgccaaggccgcactttgacatggcccaaccagcctgggagaaagatcggtgtttataaaggtggcatcatccccgtcatgtaccaaagagttccgtgcgtgaagcgnnngtggtgtgaggntcaaaatcaatggtcacgattacttcaatcttgtgctggtgagcaatgttgctgcggc

SEQ ID NO: 79092 - DNA, 578 bp, Zea mays
  Clone ID: MRT4577_172157C.1
ttgctacttccgctgtacctactgctacatttccgttcgctgctgcaggtctggatctctactgcaacaatgtgatggacacgatgactgacgagtgcggccagtgctacaacctctcctacctcacataacgatcccgcatggcgcagacgctcatctcgactgatcacccgttattgccataccagaggctaggaccctgcaacgactgccggaggaatcaacctctgccgttgtgttcacacatgtcatctgatctaactcggagaatggcctttcgatgccatccacaacacaaaagacatcgtcttccatctggtcataatctatgcatgacggactatattcaacgtatctcagctgactggccacatatccctcactgggaggccttcaccatggatgttcacaattgagctaaatatgaccttcactgatccacgactgcttctacttactgttctaacgactgtcctgctgacactaaaggagtgtgctctccccaacttcctgacccatgctttgatctgacactagactctcccatgcgcaactcattagtatagcttatcacatct

SEQ ID NO: 79093 - DNA, 216 bp, Zea mays
  unsure (1)..(216): unsure at all n locations
  Clone ID: MRT4577_172158C.1
cggatttaggttcaggcaccacacccaccacgcgggagcgacaatatactaaatatccgcaatncacaacacgaaccatcaaacacatcaaccacaatcataaaccaccaagaccatcaagatcatcactatagccactataactagccacattcaaaacacacaaacaacaatcacaattatcgctaccaactgtaaacatcgcaacaagctcag

SEQ ID NO: 79094 - DNA, 377 bp, Zea mays
  Clone ID: MRT4577_172159C.1
cccacgcgtccgcggacgcgtgggtttacacgacctgtaatattttgcgagatggaccttagccatctcgcttcgcttacaggattagtctcacagatcatcactatccaaacagaactgagagcgattagcatttagtcaaactgtacaaatggtttcagagataccctgtttgggatagaagactctgatgtattgcaaacgatcttgaacgatcgatataatgggctctaatatgtcatatgtgacagaatcatgggccttcatagatgtgaaacgcccattcaatggaactgtttctatcagaggcagaattattgctgggacatgccacaatgctaagatgaacagaactatcattcgtcgcaggagctacc

SEQ ID NO: 79095 - DNA, 645 bp, Zea mays
  Clone ID: MRT4577_17215C.1
gccggccggtctctcggacgcctcacctccgatcgggaacgtcgactaaccccacagcgagaccctctgtccaaatggctcccaccaccaagtccgccggcaagaagtctgccggaaagaccggccgcagtgcgatcgctgacgtcgtcgcccgcgaatacacgatccacctccacaagcgcgtccatggcgtaagcttcaagaagagggcccccagggctgtcaaggagatccgtgcttttgctaagcaggctatgggcaccaacgatgtccgccttgaccctcagctcaacaagaaggtctgggagtctggtatcaagggcgtcccattccgcctccgtgtccgcatctcgcgtaagcgtaacgacgaggagggtgccaaggagaagctctactcctacgtccaggccgtcaacgtcaaggaccccaagggtctgcacacccagatcgtcgaggatgcttagatgggattgctaagggagggaatgtaagatgtgcatatcaaaagcatggcgttccggcgggatatgctgagtagctactatggatatgtagagcgaaaagctggtgaaatgatacctcaatgacagatcatgccccgccaaaaaaaaaaaaaaaaaaaaaaaaaaaaaaaaaaaagcggcc

SEQ ID NO: 79096 - DNA, 355 bp, Zea mays
  Clone ID: MRT4577_172160C.1
cgccactcattccaagaggcaggcccgctctcccttggacccctgccatgggacgcggggacagtaccgaacaccgaccagccatgcgcatcttcgagctgaccgtgcagagtaacaaggccggccgaaggtcatacacacataagcactaggacggcgtagtgcccacagaacagcgccccggatccgtccatcctgcccctttactcggaccagcaaaaggaggaagaccttgaggcgctgcacgccgacatagacacaaccaagacctttgggaccgggcccggcactgccttagcccacgctgtgctctcgggcctccaggacgacacccctggcgcgggggtccagatcg

SEQ ID NO: 79097 - DNA, 577 bp, Zea mays
  Clone ID: MRT4577_172161C.1
ccgtttcaaccaactcttcgtcaccactaacctcgacgagcacacgcacgcaccccgtctctctcgcttcttcctcccccgccccggtcgcggtctcgcacgcctcatcgccgcaagcaaaggccaaggtggcaggagctcctcgcggctctctcggagcggcggcgccggcgcgaggggagcgggatccggatcccgcgcggcggagcgatccccggccgcctcgccggatcgccggagacagtttgctggtctccatatagttggggatttttcggagtctgaggcgggattcagagatggaggagctgctgggcacggagatcgggaagcacgactacgactggcttcttactcccccgggaacaccccgtgctcctgcactggaggttgctgagaaagccccaccatcaaatgtgcctaaacggaccgtcactagatcttcctcaaccaccagagcatcaaggctttctggtgatgaaacagagaatgggcattcagcagctcccaatagaccaatgcgaagcatgtcccgcactttcaacaggtcctcagtgctcacttccagcatttcttc

SEQ ID NO: 79098 - DNA, 347 bp, Zea mays
  Clone ID: MRT4577_172162C.1
aaaaaaaacccccttttccggggtaaaaaattttttttaaaaaacattcctaatttataaggcggggttaaccttccttaatttttaataaaaggggttttggggtggttaaataagggagggaaatgccccaccggtttaccccacacttcctttcccctattgcttaaaaaagggggataaaaatttttaaaaccccggggggggggaaaatcccccggggtttgcctaaaaaaaactgggttaggggggtaaaggggcaaccccttgggaatctttttaaagtgggccccccccttttttcctggggattacctcccccttgggggcaatttggtttgttttcc

SEQ ID NO: 79099 - DNA, 319 bp, Zea mays
  Clone ID: MRT4577_172163C.1
aattatggggagggcaggagatcaaaaaggggaggggtgggtgctttacatgcactcgtaaatggagtagggggggaattatgtttgcattggagggaaacctatcggattggtcataataatattcttccagggatactggacaggtaaccttaggtgtagagggataacagaattggggtccatgatccatgggggatacttctgagtgctggttgggggagggcgcaaaaaccttattagatgggcaagatgacccagtatgggtattcttagtttctggagggtgccctagggtctggacatgggttggggcttt

SEQ ID NO: 79100 - DNA, 351 bp, Zea mays
  Clone ID: MRT4577_172164C.1
agtggacaacccagtttgttctagcaaaagcatatacaggaagggatgtgtctagcagaaaaatgaaattttccgccttttggagaaatacaaaaatgtaaacattctttctgctccacataaaatgacagcttattacattttgaacctacctacttaattgacaaaaaaatatcacaactttcataccaggactctggtactaacagttcattgatccccaaaagaatgttatatatagcatctgtctaaaggtgtgattcatcttctgcaaagaacttgtgcacacatccgtccactttaatgaaagagcatccagggtgcttactcattctactactgtccatagat

SEQ ID NO: 79101 - DNA, 344 bp, Zea mays
  Clone ID: MRT4577_172165C.1
ttccacgcgtacgtccacgcatacgctcacgcattctatcacgcatccgcgcaagtttgcgcctaaaccctaactcgattcccaatggtgccgaagaagcgcaaggacgatcccgacaagtgaccacgactctagggatgcagacgccagcaaccaccgacaggagccagcgccctaagagcccaagccgaggtgccaccatgtacttccccatcaccgacaacccgacttagcccgtctccgaggaggaccaggaggatggcactagcaaagacaaagactaggtgtaggacatttgcaagctgcatcagccactgtcgggagagcatctcgatgggctgctc

SEQ ID NO: 79102 - DNA, 1277 bp, Zea mays
  Clone ID: MRT4577_172166C.1
tttcggaattttagctggccatggttgccttcactatagtttcacttcacttcagccggatcgacctgcgccgtctgacctcggcgcctatttaaacgcctgcgcttccactcgtcagtcctcacccatccacatcttctccttcctcaacaacaactccaatccgaacaagtggtagagatggagatcgaagcacgacagctactgctggctgtttttggcattgtaatagcgataggtttcgccaatgccgtgcaaggggagacagcgccgccggttgttgtcggcttggccaagtgctccgactgcgccaggaggaacatggacgccgaggcagctttcaaaggtcttcaggtggccgtcaagtgtaagaacagcaagggcgagtacgagagcacggccgtgggacaggtggacaggtccggcgccttccgcgtcccgctggcggccgccgacgtcgttggcgaggacggggagctcaagtcggaatgcttcgcgcagctccacagcgcgtcgagcgcgccgtgccccgggcaggagccctccaagatcgtcgcggcgccacccggccacgacgccaacggggagaagacgtacgtcgcgctcggcggcaaggtctaccgctcgtcgcccgagtgcgcttcggctttcctttgccaccctttcttccacagcattatgcaccaccaccacgtagggacccacaagcatgtggttattcctcacctgcctgtgcctgatcacggtcacggccattctggcgtgccagtgccagtgccacctgtcaccaagccgccggtagacgtccctgagcacaaaccggcgccggtgcccgtgccagagcacaagcctccgtcgtcgacgccggtggacactcctccgtcgacgccggtgggcactccaccatcgacgccggtggacccggcgccgtcaacgccggtgtattcgccgccgaagccaacccccagctactaccacccgtagctcttcaagaagctgctcccgtgcttcaagaagttgcctttctttcctcctgctgcgatggagactcggcactagaatgtttggtcagtgtttttttggctcttgcaggttatgcagtttcctcagaataaggctgtgactttgattagtacacatgaagattggatcagttttaagagtgtgcgttctatctattggagatagtttgaaccttatgcaatttcctgtgagctgtttttattcagtataactctgtcaagaagttgggaatattaaattatgattgccatccc

SEQ ID NO: 79103 - DNA, 623 bp, Zea mays
  Clone ID: MRT4577_172167C.1
aaagaccaaaacgtttcccgaaaaccaaaaccaacttggggggccaaaaacagcttttcggaaacctcgggccggaataaaagccctatcaggacatacatctaaaaacaggctaaaagggcaaaggggcgccaaaggccttcgggggccccaaccatatcaggggcaaaacccggccacattatggccagcccccatacgggggggggggggggaacccacccccttgaaaggagttgggcccccggccgggcccggcccccccattgggccccccctgggggaagttgggccctccccccccatacccacggcccccgttgccccggggcccacctgttccagggaaaggaggccctcccccttgggggggaaaaggcccacggccaaagccccccccctgccctccacggttcggattgaacccccccccttgatccccccccggaggaacccggttaggccccccgggccctcggggttttgaaaaaaaaggccctggcccggttgccacaggaggcacattgggcaaccccgggccagccctaattggaggatggccttgcccagcctgcgggaggggaggcaaacaaaaaggggggggaggaggggaaaaatttttg

SEQ ID NO: 79104 - DNA, 599 bp, Zea mays
  Clone ID: MRT4577_172168C.1
gtgcggcgctcgaggcggccgtttcaaatgtcccaagccgccggtagattccctgagccaaaccggcgccggtgcccgtgccagagcacaagcctccatcgtcgacgccggtggacactcctccgtcgacgccggtgggcactccaccatcgacgccggtggacccggcgccgtcaacgccggtgtattcgcccccgaagccaacccccagctactaccacccgccggcgcagcgcgacgctaccactggcccgtagctcttcaagaagctgctcccgtgcttcaagaagtcgcctttctttcctcctgctgcgatggagactcggcagtcggcactagagtgtttggtcagtgttttttttggggggcttttgcaggttatgccgtttcctcagaataaggctgtgactttgattagtacacatgaaggttggatcagttttaagagtgtgcgttctatctattggagatagtttgaaccttatgcaatttcctgtgctgtttttattcagtataactctgtgcaagaagttgggaatattaaattatgattgccatcaacatggtcgttacaaaaaaaaaaaaaaaaaaggccccta

SEQ ID NO: 79105 - DNA, 261 bp, Zea mays
  Clone ID: MRT4577_172169C.1
aggcaacgcatcggtctcgtctccaccatgttcacgtcgggtctggtgggcgaccagttccagctcctgtacatgcagcacgaacacggcggcaggccgggcatcctcggcgacgtcttgatgttcgtcggcgtgcacctggagatgatcatcaccgtcctcgtcactatgcttgtgcagcccatcgtggtctatgatgtcgtcgacgcctagctccatcagatcaagtggagcagctcgattatgtgggcgcagatcgtc

SEQ ID NO: 79106 - DNA, 242 bp, Zea mays
  Clone ID: MRT4577_17216C.1
tcataattaccttctaactaacaatcctaatattcgctttacgccttcgtcaatcatcaacccaggtgcgtaaaaatttaacagtaaggttgctaaataacaatccaactaccatcctaacagctattaaaactctctcacatccctatcaaatacatacaggataaacatcctatatctccttccacatatttctcttatcaaacattcatcactacttcaaatacatccttataaatcaa

SEQ ID NO: 79107 - DNA, 291 bp, Zea mays
  Clone ID: MRT4577_172170C.1
tttttatcataatcactcatgtgcttggttttcttgaggcaaactagagggtcgtgtattacaccgtcttctgttttaccctccatttcagtggatatactacccattttattgagaccatattccttacatgcccgaatacatgtgttgatgacacttcttgtgcatggtgcaaagcccccttcttatagctgatacccatgtcactgatactctgttgcgcaaggctccaattggacttaatcttcgccatcaatgggatatctcttgtggtaagcttgcacaaagcac

SEQ ID NO: 79108 - DNA, 802 bp, Zea mays
  unsure (1)..(802): unsure at all n locations
  Clone ID: MRT4577_172171C.1
cccttttcttcccagccgcgccgctccactccactccagtcgccggcggccggcgtcgcagcccgccgctgcctgccagacggcggatccattaactggtagcgagaatccgctcctttcctgctggattcccccccgtttggccgcgcacaatctcgatctcgaaccctacctagctacgcaggcagcaatgcgctccaatcccgccacgcctgcgaatcccagcgggagcagaaagcgtgggcattacaattccgccaacaagtcccgccggaagggagacacggcgtacaggtgctcgcctcacctcatcccaccgatgatgaagcttctcagcgacgagcagagaggctttgtgagaaagattgggtttgggagcctgctgtccatggcagacttcgagatggacagggccctcaccctgtggctgatcgacaggttcagctgcgacaccgaggcgctcgagttcgaaggcgacgtgtcggttccggtaaggccgctcgtggcgtccgtcctcgggatcccttcgggccccatcncaggtcgtggcgggcctccacgtcggcgacgctctccgcactcggcaccgctgtcttanagggaagaacgccgagaaactggccgaagaaatgcgcggcatgacccgagaggaacccttctgtatggccttcatgatggtgatacttgcgatctatctcgcgccgaacacgaccaagcttgtcaaccggtacttgtttggagccgctcaacaggtcggcagcctcaagcagatggactggtgcggcttcgttgctgactatct

SEQ ID NO: 79109 - DNA, 424 bp, Zea mays
  Clone ID: MRT4577_172172C.1
aaacacaagcaagggactttttccttacggggcacaaactattaacggaccacatcgggttggggttttatagaaggacactctcccatttttttgggccccccccacggttaaaaaaggaaccgacccactgcactgggacgtttcgcctaacagctccccgggcaaaaaaagagaggcaaaaacaatggaccccgggcaaaaattacaagggcaggccatgaacccggagtctcaaaacctcaacttaaggcatccggggccaggtgttttttttgtttgaacaccaaaacctgaagtttggggagctgggccctcatgccccggggctgctcacggacggacccctccggggcgctgcacatttgggaccctcccttcaggcccagtcgccggggcacgacgcgggagggccacccccccc

SEQ ID NO: 79110 - DNA, 492 bp, Zea mays
  Clone ID: MRT4577_172173C.1
gggaaccaaacacttaaaaatttaaaccaaaaaagggaagttaaaaaattaaccgccaaagaggcaaccaaagattaaaaaaaagtttagcatagggggaaaacaactacaaataggagggggaaaaaaagggaaccaccgggaagtttaaacgggggcacgggggggaccacccaactgggggcggccgaaggggggggcgttggaaacctaaacctggggctaaaacccgggaaggggggccatgccgagggcaaggagcatttccaggggctccttggggacggggatttttttaacctcgaggggggacttttccggaaaaaaatccaaggggggctcgggctcctccttctgaaatttgagcaaaatacccgggactgggcccccctggatgcggggcataaggggggtactgaaaccaaccaccttgttggggaggggctttgaggggaaaaaaaaaaccccctcgagcacctttttggtgggggg

SEQ ID NO: 79111 - DNA, 285 bp, Zea mays
  Clone ID: MRT4577_172174C.1
aattcggcacgagggggctacctagtagctgctctctcaccccgcgaggtgtgtaggagagcgcgactgccgtcctatcctcagccataagctatagctctgcaggggcaggccacttaataggttgctcagatagatcgctctcgacagacaggcgacggatgagtgatctgcctcaggatgcgggatataccggaccgctgtgcggcttcatgctgccggccctcgccactcgccagatatccctcccctccggacctgcgcataccgtgcgctgatcctgcc

SEQ ID NO: 79112 - DNA, 347 bp, Zea mays
  Clone ID: MRT4577_172175C.1
ggacacccacgactttcgtactgcctgcttatgccttcgacccgggcttcatgaccacaacccagatctgctcctccatacctcctctcgggcttcactgcatgagactgccgtccaggggtgtctctggtggataacaggacgcatgtgatcccacacccgagaaaggctgaccgtgggagagaagatgctgtgtatacgccaatgacgacgctgacggcatattggcggtatggagataaggcattgggatcagcctaagggaagatgcatcgagctgtattctttatcaatcttatgagaaaacaggcagtgattgcactcaatagtcaggctgacagccatga

SEQ ID NO: 79113 - DNA, 348 bp, Zea mays
  Clone ID: MRT4577_172176C.1
aggtattaaacttacaaaaaacttttattcttgggacgagcttagggttcacatatgtacaggatctgagtgcgtcacttgcgatagccacgtacgatgaccttgagcagccagctaacttctgacatacgtaacgcactcaggcaacctcgaacgggcgtgggtgccagacgacgggacggttcaaatagtcctggggaggagagttgttatgcgatagcggacctgccccgagcaagtgttgatgtatctattagaccctggtttcgagcaccaccaaccccggggcgccgttgtagaccataggggctgtggtgttttgctccagggcatgcgatcgcttctacc

SEQ ID NO: 79114 - DNA, 235 bp, Zea mays
  Clone ID: MRT4577_172177C.1
tcatccacgtacactttggcgaccacttcatcaattctagccacttcaccaacaacatgtcgcgacgacactcttatttatttctacctttacacacttcacctcaccattatatactacgctaacaaatcttaaattacctcccatactcttaactaaaaccataatatattaaaaattcccattttaaattataatctttaccaaacctttaaccctacctttgttcccatca

SEQ ID NO: 79115 - DNA, 359 bp, Zea mays
  Clone ID: MRT4577_172178C.1
tgttattttcttggaccgctagaacacttgacgtgtgggtttaaagaaataagcctgcacaattacagggcacacggatacccacaagccgtgcaatgtacaggacaccagcaccacaaatggtaaccacttaacaggatttggaaaccaaaaaaaccgcctaaattcaccaagtactcctggaggccgggccacggaacatgccacccacactaccattttgcgctccacgcacagggggaagatgtgctcaccatcctctcaagcggaatttgcttgacaaccagcttggcttgtgggcaaaaaacctgatgcacttgaagcagcccctgggcaattttatagaacacgccctggca

SEQ ID NO: 79116 - DNA, 1665 bp, Zea mays
  Clone ID: MRT4577_17217C.1
actatgacttttagaattagtataactaatgagtaatagtacaatatacttaaacaaccatagagggagccaagccccttccattatcagcatgctgcatgcctcgtggttcatagattgctcttcaaagtgcaggccaacattcacaaagagaaaataaacataaaaaacaaatgacaattccacgatgcaaactgaagaagcgcaaaataatgttttcctcattatatatggagattaaatctatatcctgcatctaaactttctgagctttattggaggccctgtcacgggagtcgaagtggcgaccccgcttcccaccgccaaactgctttccgcctcggttgttcttccagtcccgtcctctgttgtttcggctatctttatatttctcctgaacgccccgaattgcactccaataatccttttcagcttgaccagacacaggttccaaaatgactatgtggcctttcatagtcaaaccaccttcatctgcaatggctgcaaatgcacgggccttgtcagctgctgcaggatcctcaaaccgaatgaatccagaatcttccccaatgctgaagtccacataccgcactgtgccaaatttagtgaattcttcttttaaatcctccctcgagattatatcttgatctttatttgaagggcttttatcaaccttgggaacagattgtaaagtttccccagcagacagccctttcaattcctcaacggcatcggcctgctcctcactcacattgcctttattctcagtgatcttctcatcattctctacactggatttctctgtagcatcggaagctccattattcttagtaaggtcagtgtcatctactttgcccccaccactttttcctgtctcaccatcatctgcagttttcttcagcttgaaggccagaatcagaccttttggatagccttcaccatgactgctcttattaggatgtgacttctcatatgcttctttctttgcctctctttcagtatcaaattctttctttggtcttatttccaggtctgccccagcaaaaatgagatttttctcaaaaacgccttttgcctcatcttcttctgaaaattcaactaaagcagtgccacagaaatgccttttgtcagaaacatgtcgaggtagcctcacactatttaccttgccacactgagcaaaaaaagattcgacttcctccagttttacattgtaaggaagcggtgatgcagcaactgtcctggagtccacttgctctataacctcatctggcttcgacaactccttagacctaccaactttcttcccatcctctgatacgcggagcgctgtggaacggcgcaagatgtcggcaactgcaagcacggtctcctctggcactgtttctggtttcgcatccccttcgagacctaggtgtgacctcatccgcgagaaggaacagatgagagccaagctcaccaatccatcctcgctttcctcgacagtcctgcgtaggaacccatcgcgggggaggttgctgtcactaaaatagaactccacctggcgtataacattcttggccttggcgtcgtcaagcggggcggcggcggcggcggcggttgccatggttagattttttagaacgaaggcgttagcctgctagcccggccggcctcgaggtacccaat

SEQ ID NO: 79117 - DNA, 660 bp, Zea mays
  Clone ID: MRT4577_172180C.1
cattgggtacctcgaagccggccgggccgggtgtctcggtggctattgaggtctgtttcactattggttatcctgctgaccccgaggcagccgactgcgtaagggatctacaacatggtcgacgacgtgcgcgatatgcctcggcgcagctctcgaacgcagaccccactccagatactccgtgatgctacaacgaggaacccgctacagacaaaacaacacgctcctcctccaacttatgatcgagatgatgctatgtccatgattgcaagaattgcggcgaccattgctcaaggtatggcgtctaccacgccgagcgccatggcacacaggtgtggtaatgctgtattaccgcccaggaacatgcacaatgagactgtggcctcaaaacttgttgatggtgcgcctgccccttcagcgatcaatgatgactgttgctacatccattataacgctatccaacaccgtcacatcaactatggaaggatagatcagcgagtagccacattgctacctaggacatgttggaactatctgacgacgcaggcgtggtgctatgactaagtatgcctcatggtagatatacactgtgattttcgttgtcagtgatgctatctgcattagatagagagtaccgcgaaacttattgtctccacatgc

SEQ ID NO: 79118 - DNA, 272 bp, Zea mays
  Clone ID: MRT4577_172181C.1
acgcgctagtaccatgccggagctcgcatctcgccgtgggccgcgtcacagtgctcctcctgctctgccatgaatgccatcactgacggcgtgtgcaggtcgggtacacatatatgctcagaatgccagctggcttgaggcgtggactacgagagtagcttcgcccagtgcctggcatctagcagctgaaggtgcaagctcgaactctgcgaactgtgatgtgggataatgctaacaagatgaatagatgatcgtagggctgtctccaacaa

SEQ ID NO: 79119 - DNA, 463 bp, Zea mays
  Clone ID: MRT4577_172182C.1
cggaattcccgggtcgaccctcgcgtccggcgtcatctgcctcgtgcactccgagccctgcggcttcctgctccgccgttcggtcgccttgtcgtctgcggggtcgccgtcgccctgccggccgctgcttgggcccgcggtccgccgagcggcggatgcgtccggtccggtcggcgcggcctgcctcgacgtgccgctgccgctgccgctgcgcctgcgctcgctgcggtcgctgtcgttgcggtcggcgtgcacgggcgtcctccggtgcgccatggcggaggtcatgcccatggagtcgtactatgcggatggccccggcgggcgcatgtcggacgggttcctgtactagtacaggaagggggtggatgtgcggttcgtgagcgtctgccacggcagcttcctcacgccggccgagttcgaggagctcgccggcggcagcgtggtccccaacccgctgcgc

SEQ ID NO: 79120 - DNA, 353 bp, Zea mays
  Clone ID: MRT4577_172183C.1
aagcaacataaaacggggcctacacgtgcagcaattgagcaacaatggcggccaagatatgacccatctcttatgctccttgctctctctgcatgcgtggctaacgcgaccattttttctcactactcacaggctactatagctgccattctatcttcatcccttccatcaatgaccgcttgagtatgcgaaaacccagccctcaaaccctacaggctccaacaggccatagcaacaagcaactgacctttatcacccgtgtgctttcaacaattgccagccctatctctggtgcaggcattggtacaaactatcaaggcacaacagctgcagctactcgtgctaccagtgat

SEQ ID NO: 79121 - DNA, 563 bp, Zea mays
  Clone ID: MRT4577_172184C.1
cctcgaggccggccgggctcccgttcagccggcgacaactctctctaccgaccgatacccacaaaaaccaagggacgacaccgtgagagcatgcgctgtacggaaagaacaagaggatctccgagggaaaagaagggcgcgcaagaaaaataccgcccgaccctttctctagagaaggattgtcatgacatcaaggcaccggccgtgtgcacggtgcgctacatcaggaagactctcgcatccaggacgcagggcaccaagattgcttctgaggcactgaagtacagagcctttgaggcttgcctacttgatcttcaaggagacgaggatcaagattacaagaaaatcaggctccgtgcatgaacatgtgcaagtgaggaatgtgctcacaaacttgtgagtgtatgaattgtaccactggtatactgagatccctagcgaagaagcgccagacatcagtctaagcccatgttgatgacaagacagccgacaaatacatgttgtctttcgttctgcatcagcatgccaaggaggcgcccataccaggtctagagaacctgcta

SEQ ID NO: 79122 - DNA, 667 bp, Zea mays
  Clone ID: MRT4577_172185C.1
cgggtagccgtcgaccacccaagcacaggtcgtcggccaccggcttccgcggcgccgtccccgggaggctcctccatcactcccgggggcagcccccatcccacacgccaccagccatctccttccccttccctggttcaacaagtgcagaggatacctccccacagaccccttcaccaccagcaacagggcgtccctgctcccttgagctcgcgcagcgggctctcatggtgtcttcctccccctgctagagcccctcaccgggatgcatggtcgccggccaccatggacgcgccctccctcaactccgactccccctgctttctcaagtccgagctccccctcgcgacagcgccgttcccccaggccgtcgcgcctaccaccagcggcggcgtggcccttctcccattcgccgacgtggccgtgtcgctcccctccggccagactgcgccaccgccccctggccgcgcttcctgttgctggcgtccggatccgcgctgccaatgtcgtctgacctcggatctacgccgccggaccgcgccgcgcccgcaccgcccaactccggcgagtagcggtccctgccagcgtgccccctggccggcaagcgcccataacgggcgcgttgccggcgtgctctcccacatcaccagcctcctcacctacgaca

SEQ ID NO: 79123 - DNA, 656 bp, Zea mays
  Clone ID: MRT4577_172186C.1
ggagcggacgcctcacctcaaagagtgatgtttatagttttggagttgttctcttggaactgattacaagaagaaaggctgtcgatggtggtcaaattagccttactgaaaacttcactcaagctctagcgaaacggaataagatacgggaattttatgatgtaaaagttgcagatgagaacagtttgaggattcttgatggaattgggaaactagcagcaaaatgcttagcaatggaaatagagaaacgtccagaaatgaaagatgttgcagaacagcttcggatgtttagaaaaactcaatatcagtcacaagaaaaaatatttttctttggctgggtacggagaagcaaacagccaccccaaaatatggtccagattcacaaaaatcgtggaaatcaagttctagtacacatgacacatattgtatattgagggtgctattttgttgcaattatgtcagggacgtgacaaaccgacttagttctatggaagcgggaagatgtgattcatttgtaatccatttgtgtgtttggaccctatgatggtcgtattagtagtgggccgtattggcctagtgttgtaatacaaatactggacaagtagtgaagaaagacagaaaaaatagatatcgaaaatacacatacctgttttctc

SEQ ID NO: 79124 - DNA, 3006 bp, Zea mays
  Clone ID: MRT4577_172187C.1
gtaagctcggaattcggctcgagtttttttttttttttttttttttttttttttttttttttggaaaaagagctctataggtcattttttttttttttttttttgcgaaattttcgatattctatttttctgtctttcttcactacttgtccagtatttgtattacaacactaggccaatacggcccactactaatacgaccatcatagggtccaaacacacaaatggattacaaatgaatcacatcttcccgcttccatagaactaagtcggtttgtcacgtccctgacataattgcaacaaaatagcaccctcaatatacaatatgtgtcatgtgtactagaacaaaatgttggtgaaaaagggctctatatttcaaacggaaacggtatcgcaaacaaccaagtgatggaacgtgagtgtctttttcagacaacaagaaatgcttgtaacagtagtgtatgctcacagtaaaatttgtatcctcgtgttccttggctcaaagtttgttcctctcaacctgcactgctgttccacataaggtgcctattcccagctgtagaaacgtcgtatcccctcaatccgttgaacaacttctgccattgctggtctcattgtggggttcttgtcacagcaatgaattgcaagtttgagaaactgaaccagctcctctaccacagttttgtttgtaaggagcttcttatcgaatgcttgtgttgcccagtgctcatggggtattgataaaacccaatcgaccaaatctggctcgtctgtgacgattggtgacttgcttgtgagcatctcaagcagtatgacgccaaaactgtacacatcatccttttgtgcaatgttgttgtcagcaagtaacgttgggatactgacaagagttttgaggccgtgttctgagacaagtccctcgtagttactggtgagaagaacgttggaggagctgatgttgccatgggaagctgcagcattggttgagtggatgaaggcaacagcacgagctacagagagtgcaatggcagaccgagtctcccagcctactggcttcacatcttttccatgaagattggaagctaggctaccattgggaaaataatcatacaccagtagcttctcatccttgctgtagtagtactgacgtagtgggactacaagctcatgctcaattgttcctattgctactattcgtttcttgaacactgcctctggcacgtctagagtcttcagtctctttataattaacgtggaaccatcatgcagtgtagtcttgtatgttgttccatacttgcctttcccaagaacctcggcagatgcttccaacagcttttctaattctatcccctgcgatgaaccaaagctgtaaagttttgaactcctatctctcactactgtgacattatgaacatctttatctactttactgacttcctgtgtttgtacctccgctttaagaacttgatttccacgatttttgtgaatctggaccatattttggggtggctgtttgcttctccgtacccagccaaagaaaaatattttttcttgtgactgatattgagtttttctaaacatccgaagctgttctgcaacatctttcatttctggacgtttctctatttccattgctaaacattttgctgctagtttcccaattccatcaagaatcctcaaactgttctcatctgcaacttttacatcataaaattcccgtatcttattccgtttcgctagagcttgagtgaagttttcagtaaggctaatttaaccaccatcgacagcctttcttcttgtaatcagttccaagagaacaactccaaaactataaacatcactctttgaggtgaggcgtccgctccgtgcaaacaaaggatccatataccctatgctccccagtacatgtgtggtgtataaggtattatccgttgaaagtaactttgatatcccaaagtctgatatttttgcagtgaggttgtcatcgagaagtatgttggcaggcttaatgtctccatggatgactttcccatacatttgcgaatgcatatagcttaatgcttctgcacaccctatagcaatactcaatcgtgtttccaaagatatagaaatttcactggagtgaagaatatcactgaggtttcctctagagatatattcagtcaccatcattagtgcattttcacctatacaataaccaatgagtctaactacattccggtgattgatttggcaatggacaatcacttctttggcaaagtcctcctttacattatggatgtacttctttacagcaactaaactgttatcatcaagaacccctttataaacttctccaaatgcccctttcccaaggaaagtgttatagttgttagtgattattcttatatcttcttctttgaaataccttatgttgtgattgttatgtgctgtccacattggtttgccattgtcctttatgtatctttgtagctcattttctggcagatccatgttatgccagtagtaaaaattccgacaatagaaatcttgataacatctgatacagaagagatgttgataactctcaccaaagcctctgaaagagaagaataaagaaaaagaagctatgccgttttgtactggtcatgcgttcagcggtccagccttcagaagtcccacttagaagttagaagaggcagaaaaatatgatgtgcagacttttgggctcctgaagcgcttctttgcgagaaaacctctctgttcttgtttcaaaggctgaaggataaaaatatatgtttctttactgattggatcttcagtatgccatatagtcctcctcggaacctcatcaacagctgtccaccctgcaatctccaggcatcttctcaatggaaaactgagcttgcggggttttggctgaagagaccttttaggcacaacttagttgctaggcttcaggtctgcagtgaccttctttgattttggctcgagccgaattccgcccggccggcctcgagggtcccaatg

SEQ ID NO: 79125 - DNA, 375 bp, Zea mays
  Clone ID: MRT4577_172188C.1
ggcggtcaatccccacaggccacaatggcgtcgctgcggggcctcccctcgctgctttccccgtccaagcccctgctccggcgccggttccctgatccgaggttcgcgttttacttctgatgcagtgtaaactgttctggccttataagatttgctcctttacatactgttgttttttctagcttgtttctcttgtatgtttagtattctctctgttgttctttgtccttttaactctatatttccgcttctatcttttttttctgagtgttcttttctttttacttttttttatttttttttttttatccttttataatactttttccatagtttcttatgtttatttttttttttattaatgttctttctttt

SEQ ID NO: 79126 - DNA, 297 bp, Zea mays
  Clone ID: MRT4577_172189C.1
gtctttatcctttccgcgtccgacgagtgcgcggcggccggtgatgactggtcgcgacaggtgtgccgcgggccccgcggtgccgtgccgtgtggatcagtcccgatccttctcccgccttcggccttccccgcgcgcgcgcgcacgcaccagcaccaccgcgatataaagcccggggggggggcgctcgtggtcgtcgtcatcatcccaattcccgacacgcttgggttgtcgagattggcaagctcggcggctcgtggcagcgggaacttacgaggcgaaagagagcgagggcga

SEQ ID NO: 79127 - DNA, 510 bp, Zea mays
  Clone ID: MRT4577_17218C.1
ttttttttttttttttttttttttaacactattgtttatcgttcacgttatgaatatgtgaatcacagcaccctaattccaaaaacgcacacgacggaatacagtgtccaaatcactatccagtattcaacactagtcactagtacctacaactgcacggaacaggttttgcgtcttttatttattcgactgaacgtctgaatgactgaacctacgacagaaatgtggaccggagctgcatgcgctgtgagcaggaggcgagtggatgctcgtgcccggaacgaagagagggtctggtctaggcgtctagcaggtgggcacgcacttcctgcacttgacgacgcaccagacttgccctccaatggatcctcgttaagggatttagattgtactcattccaattaccagacactaacgcgcccggtattgttatttattgtcactacctccccgtgtcaggattgggtaatttgcgcgcctgctgccttccttggatgtggtagccgtttc

SEQ ID NO: 79128 - DNA, 263 bp, Zea mays
  Clone ID: MRT4577_172190C.1
caattactgcgctattgagaaagatttatggggttctggaactgtgaatgacgagtatctggaagccttaaattctgtatttaccaacttcccaagacttagagcaactgaaccagcaacccttagcatatcccatctggttacagccttaaagacaggttcagaggcttgtcaggaagctgcattggatgcacttttcctgctcagacaagcttggtcagcatgcccagctgaagtttctagagctcagtaattgcagctgc

SEQ ID NO: 79129 - DNA, 597 bp, Zea mays
  unsure (1)..(597): unsure at all n locations
  Clone ID: MRT4577_172191C.1
cgttcgatggcaacctgcagagattctggggatgtcgcccgacgcccccgaggcggagatcttcaaggagtacgccaagaagcacgagggccagaacggcaccaccatacctgcagctgcaaccggtgccgcggcgaccgggaagagcacgagcgcggcgccgacggcggacggcgccgggaggcagccttgcgcggtcttcttctacctcgtgtcggcgctgttcgcctccgttgcggtcctgctgggctgacagccgcggcaacgcagcgcgtgcattcatggcggcaggggatggaggtactcctgcacggactagaaggaagaagcccggagacataactgaagaaaagcgatgagcaaattaaaggacacgagtgttcttattttttttcttctgcttgtagtttttttaaaaaattttgtggggattgtgagacgtcctcggcttgtgctgacggagcactagcgacgcagctgttgggctgcggccttccagcctgnggatttttaatgtggtggccagagactgtgtctagctgtctgtctgaatttgatgaatctgatccattggcgcactgtatgcttggtttcttt

SEQ ID NO: 79130 - DNA, 393 bp, Zea mays
  Clone ID: MRT4577_172192C.1
cgggggtttttttttttttttttttttttttttgttttttttttttttttttttttttttttttttttttttttttttttttttgggttttttttttttttttttttttttggccgccaatgatcaaccagaggggtaccattttaaaccaaaggggggggggaattagtctatccaaaaagaaacaagctaataaaaatttaaacaccttggccattggggggggttgggcttaaaagcaggctttttggccaaaaattgggggggccggggggaacccggggaagggagaatttcaatcagggtgctcccgagaagggaggggggggggaaaaaaatttctcgaggggaaaccatgggggccagggggggtccctgtgccaagcccaaggg

SEQ ID NO: 79131 - DNA, 522 bp, Zea mays
  Clone ID: MRT4577_172193C.1
ggccgcttttttttttttttttttcagattcattttcagtttcaacacaggttcaatagcagcaaaacagcaagcttacttgcaatattagcagcatatgcacctgaacacaggttcagtttcagcagtgaaagcaacagcaaaacagtaagcagaacagcaagcttacatcgtcacacgttcaacaggttcaatctcagtttcagtaggcacaacagaaagtttcagcagcacgtgttcaacagccccaacgacggcgggtggtcggggccgagctgtgcccgtctgcccgacggtcggtgttcgagggcgggtgtcattgctgctcggggaataaggcctacagacgtcagtgcacggcagctccaggccgtcgcatggtgggggtggaggcgacccttcacatgcctgaatgccggagatctgcccattcgcgccagcgtcggagacagtccgtcgcgtgctccgagggatgattcagcaagtcgcgcgcctttcggaggggccttcggccggcgttgc

SEQ ID NO: 79132 - DNA, 355 bp, Zea mays
  Clone ID: MRT4577_172194C.1
gctcattcccgttttttttgttggacacccttgccaagatcgatcctaggggagagggccgccaggtggaccacacggatggcttaattagcatgacccttgtcacgccttctgctgccgaatgcggttcacggagagcaacaggcggtgtagccgaccattgcacggcgcggacaggggaaaggcgcggctgcggttcgatggaaggcagaacacgcgcaggagaagaaggcttgcgtacgcccgaccggcaccattgaataacactggctgtctgttggtactcttctagctcggcgacccaagagctgatcgcgagggacgaaagacgatgtctcaccatggttcccagcta

SEQ ID NO: 79133 - DNA, 488 bp, Zea mays
  Clone ID: MRT4577_172195C.1
gggcggggcaagttgggaaagcatctccaatagatcctaataataccaattccaatccttaatttaaaaaaaaaatgggaaaactctcatccaacggatccctatcagctttttgtatccttccgcatgggcaggtcggcgaggagcaggtagcgcgcaggcaggcgcatttttagctcctgctcgcgacgcgggggagtcgagggaaaagcgcaacaacattttgggggcgtggaacaatggggcagcggcgcaaaacaggtcggcgtcggcgaggagtaggtagcacccgggcgtggggcatttgcagctcctgctcgcgatgcgggaaagttgacggaaaaccgtgcgacccgggggcatgtttagctcaccctgcagggagcgggggcccatcttggccagcttttcattgacgacggggccagctaaaaccttctccacgatggagggtgcgccccatgccgaccacgggtggctccttgggg

SEQ ID NO: 79134 - DNA, 374 bp, Zea mays
  unsure (1)..(374): unsure at all n locations
  Clone ID: MRT4577_172196C.1
aaaaaaaaaaaaaaaaaaaaaatnnnnaaatagcaaaataaaaaaaaaaaaaaaaaaaaatacgaagggataaaataaacctaanggccgtcccttttaaanaatccaaccttacttccccttccatccaacatcatatcttttttttagtcccacctaaattaaattcactgcccttcattttacaacttcctacctggaaaaaccctgactttccccaacttaattccctttcaaaacatccccctttctccaattgtcataataccaaaaaacccctcaccaatcttcccttcccaacaatttctcaccctaaattcctaattgaaccccccctttattttcccattaaacccccccgatgtttttgtttt

SEQ ID NO: 79135 - DNA, 267 bp, Zea mays
  Clone ID: MRT4577_172197C.1
tcaggaacttatgatatgggacaccaggtccaaattcatctccaagccgagtcacttggtggatgcgcacactgccgaagtcaactgcctctcattcaatccctacagcgaatttattctagccaccggctctgtggataagaccgtagctttatcgatctgcggtaatttaaaattaatactccataccttcgaatctcataaagatgaaattttccaggtccactggtctccacataatgttactattctggcttcagtggtact

SEQ ID NO: 79136 - DNA, 265 bp, Zea mays
  unsure (1)..(265): unsure at all n locations
  Clone ID: MRT4577_172198C.1
gagctcctgcagagatctggggggggggggggggggtttcaccacaaggtatcaggtatctacacgtccgacagtgcgctcccagcgggcacctactgcacctttcacgaacgtcagttcaccgtctatgatcggagaccgggggagacagtagcccaacgatncgttggcaatctaactattatctttggggtggggctctgggcttagtnagtccaaaggtcaccggacgtccgcccctaaaacgcttctgcgcttcacgcaa

SEQ ID NO: 79137 - DNA, 262 bp, Zea mays
  Clone ID: MRT4577_172199C.1
cttgcccggtcccgcgtgcacttgttctgccgacggggcaatcccagcttgtggcgtgagctcgccctacgaaatggccacctgtccttgcgatttaagtatgccaaggacacaccaggacgtacgggccgacatcagcaacgtcgctgccacgctctaggagtggctgtacactgatgagagtagaggtagctcattaacacgtcaacccgcgggctaccatccagcagtacgagctgcacagaccagagcactcaccacc

SEQ ID NO: 79138 - DNA, 310 bp, Zea mays
  unsure (1)..(310): unsure at all n locations
  Clone ID: MRT4577_17219C.1
taaaggaacaaaacggagctcgaggccgcttttttttttttttttttgggagggctgtcttatttctgggatgcccacgctcacattaaaactttattattgcacttagctcataagaattctaagggagggcaccaccaatgctgggttgttggtngaacactgctgggtttgtcaaagcatgttggttgactggcggcgggggtggcagttgtncgagggtgccagcgttaggcgcaacgtgctggtcgaacggctacaactgtggttgtgtcgcgatggttgccgggctcccaccagcttgctggct

SEQ ID NO: 79139 - DNA, 364 bp, Zea mays
  Clone ID: MRT4577_1721C.1
tattccattacgcctcgcagcgagtatttttgcatctctgtcatttctctacatctcgagtaccccccagtaatctttggagtcctaacttatctttcatatacagcacttctggcggctcgtcgttctctctattgtgcggccgatcgactatcgttcctcgggcaccacccgtactcttgagtccgccttgtggcagcacgatcgctgtggagattatcgcacaagccccagcgagaccgcaccacgccagtctgtggccgcttccgctgcgctgggcgtctcgtcgacggacactgtatataagcaggtcggcctgtatcccacagtgccgtatgagaagtccagcgggtgctcatgagga

SEQ ID NO: 79140 - DNA, 353 bp, Zea mays
  Clone ID: MRT4577_172200C.1
aaaaaaaagaaaacaaattccgggggggcataaacaggttttgtttttacccccggggggaacagggaagggcctgctcgtttgtttgctcgaaaacccaaaagcccgttgggcccccccctttttatttgatcgacgggggggccccccttccggggagtccccccccccccccccccccgggtttttccccgggggcctttggacgatggacttgaagttgtaccggtccccctccacgggccccggtttgatgattttaaccggggcctgcctcggggcctcgcccccttttggggacagggaaacaaaaccttggaacaaacgggtttttttaaccttaaccggcccgg

SEQ ID NO: 79141 - DNA, 407 bp, Zea mays
  unsure (1)..(407): unsure at all n locations
  Clone ID: MRT4577_172201C.1
ccggccggggagacaaccccggcccaaacaacagcagggggggcacggccacaaggaacagcaggacgagcacgaggagcacgccgagaaggccaacacccngccagccaccacgacgaacgagagcaagcaagagcgcaacggccgcgacaagcaggccaccgcacgagacggcaggacccgggcaaccgggcaggagggagggcagaaagagagagccaaaagggacgcgcgcaaggcagcggaagggaaaggcaaggacaaagcaaaggccgacaacaccaccaaggngaagcacaagcaggaggccgacgccgcagccaccgccaaggcaacacaagggaaaacaaaaaccaggagccacagacgcacacaacgcaaacaaggggccaagagaaacggacgcc

SEQ ID NO: 79142 - DNA, 316 bp, Zea mays
  Clone ID: MRT4577_172202C.1
cttctggtaatttttatttttggataggaggattttttttagttttggaccaacacccaaaaaaaaggctgcaacgtgacaaaatgattatgcactcctttcttttttatccaagagccaaccaaagcccaaaatcatgaccgtaccccgatttgccttcaaaaccgaaatactaccggacttctgtggacaagaggcggctaacatggccaagcttgaaggatgctttgtagaccggtacttttaggtgcgtgaactagatcaacaccaagttgtttcttgaaccggccctaataaacccacttatagggaggta

SEQ ID NO: 79143 - DNA, 676 bp, Zea mays
  Clone ID: MRT4577_172203C.1
agattcctcataataatgaattatattatatatttcatatttatatactaataattcattatataatgcaattaaataatatcagggtgtggctcgcgagccgagccgagccaagcctggttcctcagcccgtgaaatgatcgagccgagccgagccgaactcggtcagccaccgagctgcaccgagccgagccgagcttgactcgattcgtttccagccctacacccaccgagaatggaatctgcagcgccgttggccactatacggccagtgctcgcgcagctccgtgccccgcgcccgcgcaaggaaacaacaaaccaacagaaaacgccgtgggcaatcggccgccgccggcgcctcggcgaggcgaggcggggggacaaggacaaccgccagacacacccagggtcggccacggcgcgaggagcgtgacggacgtggacgcgcggcccaatctggctctggaacgtggacgtggcggaaggcgcggacggacggacggaacgggtgactgcgaaccgcgcctcgtctcggggcgtccgcgcgcaaccgtgaccgcccggtcgcttttgcgggtacggccggggccggggccggtgcagtggcgcggcgcgtgccgagcagctgggtcacatggcctgtccatagtccagacaggccaggcggtagccgagg

SEQ ID NO: 79144 - DNA, 574 bp, Zea mays
  Clone ID: MRT4577_172204C.1
ttgggatcctcgaggccggccgtggcgcgggcgcgaggaccacctccacggccacggcaagacggccaaggtgatgcacctgctgctctggggacccaagtgaagcggcgagaggccaccgtaccgccgggctctcccgctggcgttgctcgttttgctctgcctgcaatccgccccgcacggactgtactgtacctatatatacacctacacactacgacgtgcacctgtactacgacgtgctgctgtaccatactaaatactagtgcgctgctgctcccttgccttcttgcttgcaccagccactccgcttttttgctcgaacgatcgactgctcgtgtcgcgtcgggccacggccggtcgtcagtttgggtgtgtccactccactgtaaagctccttttttgggtactccctgcatgccaaagttagcggacgtgtactaggtgtggttcggagcagcaggttgtattacttaccaccccctctgtgatgtaagaacgcgtgctgaaattatcatgtcgataccaagttatggcatatggattggataaaaaaaaaaaaaaaaaagcggcc

SEQ ID NO: 79145 - DNA, 278 bp, Zea mays
  Clone ID: MRT4577_172205C.1
tcttcttcccacatgactcttaattttcttttcttgaagattaatcccttttgctggggggtgttaatggggggttaatgataatcaatttgtatacagcaaatgatgactggaagcgtataattgtttagtcacactttttcggttcttagatttgcatttgcccgattctgttctagctgtaccaagtctgcttgcactcatttaacttccctctgtaaactaatcatatgagacacatacatgcatacattattacatatttagataaaatattt

SEQ ID NO: 79146 - DNA, 377 bp, Zea mays
  Clone ID: MRT4577_172206C.1
gcaaccatggctcatctttctttttatcacctcctctacgtctcgagacaactcccgctgccctctaggataacacgcgggggcgccatgcacattaagctgctggtatccgccgacgccaacctagacacccgtgtgttgcgctcccgttgtggcaagtgcacgttccagcgccaggatgttccgagcagtcgggcgacgaagtgcagcatcgtccgtccgcgcttcgacaaatacgcagagccggctgcgaggaggcatctacgggcataacaatgacacgtgctctgacttcatgacaagaacggacaacgagcatgtcggccaacctactacacccggtgaccaagcgctggagctgcagaagcacacaagaa

SEQ ID NO: 79147 - DNA, 108 bp, Zea mays
  Clone ID: MRT4577_172207C.1
atgtggaggaagggtggtggccatgaagataagggcgacattaggaaggtggacgggatgagaggatattacattcctcccccaaataaggaattaattaacccttga

SEQ ID NO: 79148 - DNA, 218 bp, Zea mays
  Clone ID: MRT4577_172208C.1
gacgaaagaccttgcgcacctagatatcaggtcgtagtagtgggactaatgagacgtcggctggcgtagctatagccgataacaaagaccgggcggtatgtaaatgaatatgcaggcagggataatataatatgcatgataaacaatggaaaaatattactgttcgcaatactactgctatacacagcttgtgctggtgaaattgcattaacaagccg

SEQ ID NO: 79149 - DNA, 414 bp, Zea mays
  Clone ID: MRT4577_172209C.1
atcgagatccgcgtgtgatacagtctactacagcaagaagcgcagtgcgacgccgagaaggtaaaggcgcgtagcaatatgtcgaggcacgggtacatcgataagcatctgatgtgcgcatatcgaaggagaacactctcaacgccgtcgccatcgtcgggcacgacgagagtgcttgggcgaacgccgaaaggttcaacgacctccggtccgacgacggtgccgtcacgctccgggagatccgcgagtacgataatattgcggagctggtgattcgcaaggtgacgatccagcgcctggtgagtgagatcgaccatgacttcgagatcgaactccgcttccagagctccgccgtcaccatgatgaaggacgcgatggacttgaatatcggcgtgttctacgaggccacgactc

SEQ ID NO: 79150 - DNA, 283 bp, Zea mays
  unsure (1)..(283): unsure at all n locations
  Clone ID: MRT4577_17220C.1
ctgttcattcctgaagggccctgcttcccttaataagtaattaagtagggctacggccctgatcatgcaaatgagagctcaaggttcttaactagtacatatgactgtggcatgggcatccacccctgcttgaaaatgatgtagatatactctacttgtattatcatgttgatagtcgaagaatagttgctataantggctgtatagctgagataggtgccatcctagagtggatcatactggataccagaggagcagtggagcctcatgcagcacattatca

SEQ ID NO: 79151 - DNA, 248 bp, Zea mays
  Clone ID: MRT4577_172210C.1
aaataaataacaatgaatttagacatttgtaaaagacatacagggggtttgatttgaatttagtaaaatcctaaaacgcctaatttttggggacggggcctttttcaaataatagcggtggatcaataacaagactaactgggcaaaccactgttttttccaaacaagcaagctgaaggcgctggggaaccaacttgatttaggaaaagggcaacaggctccttgcttttgaaaatgttgacaacctt

SEQ ID NO: 79152 - DNA, 379 bp, Zea mays
  Clone ID: MRT4577_172211C.1
attcggctcgagcgatttttacccaaagtgtttgaggggcaaatctgcctgtcccccaagacttattgaaagcctgccgccgacccagcaaagaactggtcattgctttctcaacaaatggccaaggctgagggagatcttgctctactaccagcgtgttcagatgatcgcaaagaggtatacaatgccatgaacactgcatatgcctcatgctggaaaagtggagctgtctagacacctaatgcaagactacgggaagcaactcgtacggactcctgaacatgtatcctagcactagatgatatgggacggaggtgtgcaaccataactctagcaatgtataagacacccccatggcgtctagttggtaccatgagca

SEQ ID NO: 79153 - DNA, 399 bp, Zea mays
  Clone ID: MRT4577_172212C.1
aattcggcacgaggctcaagtgtgcctttaagctttcttttgagagagactctcctcgggcgacgcggaggcacgcacattgtttcggccgtgaatatcaccagcaaaaccatgccgatctatgcgagcaacattattagtcccattgccttgtagagcatgctctggtggaagcattagctgtggtgagggagctatcgtgtcagacaagattgtagacgattgctctgctgctgctaaactgtgtatggctgaataggatcagtgcattatctttgcctgtgactcactggtgatctgtacgcaaatgctatgatcattcttatggtgcgagtagatatcagtattcgattgatatgctacattgtattgccgttgagcgtgtctaaagtagaactg

SEQ ID NO: 79154 - DNA, 287 bp, Zea mays
  Clone ID: MRT4577_172213C.1
aaaaaaaaaaaaaaaaaaaaaaaaaagaaaaaaatatgacagtacgggggtattctatataaataaaggccaaatcgcgcctggtaggaattacattcaggggctttacaactagttacaatcatgacccaaattgggggggaccgatcggtcttttcatctttaagtcggtgcatcccttcgccccaaaaaaaaagggttttccgaaaaaaaaaaaaatggtcgcttcgggttttgcttctgtgtttgctcttcccggggtagtttcttctttatgggccttcgga

SEQ ID NO: 79155 - DNA, 471 bp, Zea mays
  Clone ID: MRT4577_172214C.1
cattgggtacctcgaggccggccgggatctggcatcccctcatgcgatagactctctgaaatgcgggactccggccatggagtgtccacctccatacatcacgccggctaccaagttccagttggccggctcctgcagatacggcaggggagcgcccaccgcgacggctcgcaaaagctgctctctctccacttctaagctgtccagaagcccaagcgctctgcgagggctgcctcttctcaggacatcatctacgacgtcctcgaggggcacgtcgctgacaagagcgaatcgtaccagacgcactggagtcttgcacccgtcggaagaatcgaaagtacctcaccgcagatgtccccgcatactatggatacctactcctttgctctgacgaacaagacggatcacttcaccacgtaccacgtcgtacaacgatgaatccatgccacatggaacatgctcaccgccgct

SEQ ID NO: 79156 - DNA, 320 bp, Zea mays
  Clone ID: MRT4577_172215C.1
cccacgcgtccgcccacgcgtccgttgtcacgtgggcttcctctggctctgctgtgaggtgcaagcattgctgatgctgcatgtgtgtgtgcgatcagtgactggctgctggttcatagaacatgaactgaaagaaggatgattaagggctttgtcaatcgccgttacaactgcatcccatgcgcatgctcgcttagtagattgggtataatttggcttggcacacccagcatcattatgtgctgatctgttatcctttactagctaggtcgcccgatatatctctacctttttggggaatggtctactgtgtactgaaa

SEQ ID NO: 79157 - DNA, 911 bp, Zea mays
  unsure (1)..(911): unsure at all n locations
  Clone ID: MRT4577_172216C.1
gtcgcctgcagtaccgtccgnattccgggtcgcccacctccgctacaaaaagaaggagaagaactccttgcaaatactacgaacttccctttaaagatggctcaaaagaatgtttatgtgtagagaaacacacctctcctaagatggcatgacgaggagcgcatcaaggatggtttgctacgacatccagctgatgctccagtgtggaagaggtttgacgaaaagtttccacaatttgcatcagattctcgtaatattcgttttgcattggctactgatgggtttaatccatttgggaagatgagctctatgcatagttgttggcctgttgttttggtagtctataacctcccgccatggctttgcatgaaagatcacaatattatgttgtccttgatgattcctggtcctaaaagcccaggatatcgaattcatgtgttctttgagccacttttggaggaccttaaggatcttttccaaactggtatatccacatatgatgcatcgagaaatgagagttttactttgcaaggagccgtgcttatgaccataagtgatctacctggtttaggaatgcttgcttctcatatggttcatgggaaatttgcatgcccaccatgtggtgaaaatgtatggacgaaacaactgaagaatggtcgtaaatcatgtttcctaggtcatcgcaaatatattgatcttgatcatccgtaccgtttcgacgcaagttcctttgatggaatgatagagcttggcaaggagccttcaacttattatggtcgtccaattctgcatgagatcactgcacttggtaatttcaaggactcanaaacttataagtcagtaagtagcttggtctctctgccttactggggatgatatattcttagataccaccttgatgtgatgcatat

SEQ ID NO: 79158 - DNA, 1175 bp, Zea mays
  unsure (1)..(1175): unsure at all n locations
  Clone ID: MRT4577_172217C.1
cccacgcgtccgcccacgcgtccggaacgatgccttcaaatccatcagctgaaaatggtgcatctgaatcacctgttgatggtatgtcaattgttccacatgatccagagggaattaatggacaaacaacatgtaggaagggcaaaaagagaggcaggcattttgatagagaggttcgagcagagattttacagggaagctatcttactaaagcagataagtgggtacaaatcaaggccaagcaagacgaagacaaatttgcagcaaggctgcattctttcagtggcaattctgtgaagcccaaaggttcaaagtcatcatgtgagaaaattgaaatggcgagatctcttaatctaatcggtgcaccttggaagaacaaagctttaagatctgatgagcacagacctgtggtccgtccagaagtaattctctgtgttgaaatttatcagaagacatatgcctctgttaagtcccaggaacttcttttgctgggaagccaattccttactgatctgagggacaacatttattgtttgactgataaggtgatgaaggtggctgggcaacacgatcattctgggtattttcttattgaggacacgttctacaatgatacgagacatttttttgttactgattacagtaagtctatacttggaattgtcttgagacgtctttcctttcctttatgccattattttgggagttcatttcattttgtgtgtttattctattctctataatattttattgaacnnnnnnnnnnnnnnnnnnnnnnnnnnnnnnnnnnnnnnnnnnnnnnnnnnnnnnnnnnnnnnnnnnnnnnnnnnnnnnnnnnnnnnnnnnnnnnnnnnnnnnnnnnnnnnnnnnnnnnnnnnnnnnnnnnnnnnnnnnnnnnnnnnnnnnnnnnnnnnnnnnnnnnnnnnnnnnnnnnnnnnnnnnnnnnnnnnnnnnnnnnnnnnnnnnnnnnnnnnnnnnnnnnnnnnnnnnnnnnnnnnnnnnnnnnnnnnnnnnnnnnnnnnnnnnnnnnnnnnnnnnnnnnnnnnnnnnnnnnnnnnnnnnnnnnnnnnnnnnnnnnnnnnnnnnnnnnnnnnnnnnnnnnnnnnnnnnnnnnnnnnnnnnnnnnnnnnnnnnnnnnnnnnnnnnnnnnnnnnnnnnnnnnnnnnnnnnnnnnn

SEQ ID NO: 79159 - DNA, 254 bp, Zea mays
  Clone ID: MRT4577_172218C.1
gggtgtttttttttataacacatggtgtgaattacaaaaacaactcatctatcattacaacttcctgacaccgtggcaaggcagcaagggatttcattatgaaagattgggctatttcctccaaatctgatcataatggatcttacctacccatgtttccaatccactcttcattatctaatgatgtccggttaggattgatatcacaagtacaaaacttacttgaatgttcatttcaacatccaatgcatata

SEQ ID NO: 79160 - DNA, 311 bp, Zea mays
  Clone ID: MRT4577_172219C.1
cgactggttaactggaaactctgcatatcctgcggattttttaaaattttgatgggtatcataaccctattgcatatctcaggaaattcttaaactccaagaatccaaggcctttccatttatcaaaaaaagtttttcgctttattcgtcggactcactaaatcgagtcagtatttacaccatactgaatttattattagaactgatcataaggctctcacctttttagacgatcaaatgctccattccgagtggcataaaaatgcgatgaccaaccttataggtttacattttccagtagactatatata

SEQ ID NO: 79161 - DNA, 295 bp, Zea mays
  Clone ID: MRT4577_17221C.1
gtatctttttaaatctaaatgttcatatttttcctaaataaaccactgtgtaaaaatcaaattttaattttgaatggaataatttcaaagaactatgaagatgatttgaagcttctaatttatatagtcacctataaaatgttctttatatgtgttcataagtaaattttatattgattaagttaaacttttgaattgatttgaggagcagtaaaatgaaagctatatctattctaaaccttatttagacattggtaccagttacccaggtgaaaatatggagtaactttgtttt

SEQ ID NO: 79162 - DNA, 1147 bp, Zea mays
  Clone ID: MRT4577_172220C.1
agcttactagtataattattatggcgtcctctgtctctgcgtgaccgtgtccctgttggcctgttctccccacccccaaacgaatcctcctcccccacggaaacagagagaggacgacgattcttcttaataatcctactagttaagagcactcaaatcccctacatgtagaccgagggacggtgaagacataatagtagaacctgccccacctgcctccgtcgtcaagtcgaaggagacgagccgcgccgctcctgctactcccactccccccagcccccactgcctgtgcctctgtctgcaacagcaacccacatccacctcctcctcctcctctggtcctctcccctcccgcgctcccgcactcctctgtgctgtgctgtgctgtgaccaccccggcattaactgcccgcattggtggtttcctggggcggggtggttggattaggtcgctttgctgctgcccgcccgaaagcagggttgcaacgcccacctccgccctttcgggcagaaagagccagagggagagagaggtcggggccggggagcacacacccatcacccatggcctgactgacctccggactctccctgcttccgtccacgccgcgggccgcccagctgactgctcctgccctccgcccgcccgccatggcgtccgtcaagctcggctccaagcctgacgccttcaaacggcaaggccaggcatggttctgcacaacaggacttcctagcgatgtcaccgttgaggttggggatatgtctttccaccttcacaagttccctttactttcaaaaagtgcctttcttgaacggtcaattgaagaaaattctgaccaagaagaatgcatcatcaaactaaatgacattcctgggggtgccaagtcatttgagctagttgcaaggttctgctatggtgtgaaaatagagctttcacctgcaaatgttgtctacctacggtgtgcctcagagcatctagaaatgactgaagaagtagctgaggaaaacctgattgcacagtcagaaatgttcctcaaccaagtggttctccgtagctggaaagattcttggcagattggaaactgtgatgacctactccccatgctgaaacctcagattggaacagatgctcgagtcttggcatcaa

SEQ ID NO: 79163 - DNA, 216 bp, Zea mays
  Clone ID: MRT4577_172221C.1
tctctctgttgtcgccgtgcccagagctggaggggctttttttccgtgagctggcgcctcaacaccaccatgaagtttaacatcgtgaaccctgttaccggttgccagaagaagcttgaaatcgatgtcgtccagaaactactttccttttatgaccgaaggtatttttcagtagtctagttatgatatattttatctgttgtattttactgtttt

SEQ ID NO: 79164 - DNA, 299 bp, Zea mays
  Clone ID: MRT4577_172222C.1
aatgccggggcgggtttttataaaaaaaatggttcttattttaacttacacatttttagtccaaaaaaatttcaactttttttttatttggggaacatcacatattatgttacaggctacaaaaaactttttagtcgcctccccctttcaaggaaagaacggggttagaggccatatcccatgccccaacttctggcacttttgcacatgaactggaccccttataagggggaatttgtccccctccaaacctttttccttatgttaaaacccccacctttctcactctttcttttttt

SEQ ID NO: 79165 - DNA, 1012 bp, Zea mays
  Clone ID: MRT4577_172223C.1
gggtacctcgaggccggccgggccggggaacaggcgatagtgttctttaccctttcccttcctacccttggccgcagtcaaaccctaaaccctggcgagccgcggctacagtatagccaccgcaacaccgcatctcaagcgcaagacctcctcgcggctatggcgaagcgtctgatcccgtcgctgaaccgggttctggtggagaagctgctgaagcccagcaagagcgccggcggcatcctcctcccggagaccaccaagcagctgaacgccgctaaagtcgttgctgttggccctggtgatcgtgatagggatggcaagctgatccctgtatctctgagcgaaggcgacactgttctgcttccggagtacggtgggacagaagtgaagcttgcagaaaaagagtaccttcttttcagagagcacgacatactggggaagctggaggagtagctctggtctctggaccgttaaaatggagttgtttgaaagtaggtatgcaagagttttgccacggcttatcttttgtttttttgtgtgcgggggaacaaatgagaaacccaacccttgtgagaattcaataacactgcctcattcttgacatcatcatttgggatgtcaccatgcttcatctgattataatgtcttgaagtaattacggtcgtaagatggttgtgctggcctggacctacagctgactgtccacaatggcgggccttggtgttgcatgaggtccgcgaaggctggcagggccaatacgagttctatctatagtaatcagcaattcagtctgcactgaaatctgcagcgaactcctttaagccttgcccttggcggcctggcttgaactattgttgtgtccagcagatagatatatggccgtgtaaaacactattttgcattgtaaatagcgctgctgtgctcagatagcctaaacccaggtggcgccctctgcttgacaagaggaagcagaggttttttgtggcaaaaaaaaaaaaaaaaaaaaaaaaaa

SEQ ID NO: 79166 - DNA, 286 bp, Zea mays
  Clone ID: MRT4577_172224C.1
agctgtatgagtgatacttcaataatagcgacgctggcgtaatctttgccggtgtctagagagactagagtcacaagctccaagccaacgaaggaaagcaaaaagcctggaggaggaagcgcaagtatgagcttgcaagctagccaaccaacacaaagtagtcaagaaataatacatagaggagggtaactgattgtacaggcaatgtgaaaacaacggctctacgtgtaaaactgtgaactactcaaggtgaagtgatggtaatacatacaagattcgtcagctg

SEQ ID NO: 79167 - DNA, 433 bp, Zea mays
  unsure (1)..(433): unsure at all n locations
  Clone ID: MRT4577_172225C.1
gcagaaaccgagagcagaggggacgaggagcgcnggcgagagcaggcgggcggacgagccaccacaacgnccacggcgnccggggcgcccngcaccagaggaaggccgcccggccgcnggaccggccgnggngggagccgcggcggcaggagcgggcgcagcgcgcgcaggggggggggggcacgnagnaccgaaancncacgggcgaccncagggagnaccgccggacaaaagaggaggccagggccaggccccngccgncgaggagccacgacaacgccggccacgacgagccgnncaaccacggcgccgnncnggagcacggcaagacgnagcaaaccaggnnaggacccgaccccagagngaccgnnnnaaacccgaaccngncgagggacgngaaggccaacaagaanggccacnnagagaagcccaa

SEQ ID NO: 79168 - DNA, 442 bp, Zea mays
  Clone ID: MRT4577_172226C.1
cacgtctaatcaacgtagagccgcagagaagcgaaaaaattggggattgggggaggctaaaaaaactaaactagaactactcctaatgcctaaggttaaaacgagagataaactggttattgattccattgctgatgatcaatcggctgtattcctctatatttatagaggaggtgggctggacccgtctcaaacaaatctagtgagttaattacgcgaatctagccaacaactgtaccaagaaactcggaaccctaactgactctgggcgcgcggaccatccgagccaccagtgcggaccgttcgcacggtcaatttgagatccaacagttccgcgacacataatgtctgatcgtgatcgagaatattttaagggcacttacttgaatttcgcgtgaaacatggtattattaatgagaggacaccgtcaaactcaccacat

SEQ ID NO: 79169 - DNA, 181 bp, Zea mays
  Clone ID: MRT4577_172227C.1
cctcagggccgcttccacatgtggcgccgccacaccgtggaggggatggggcaaagtgcctcgcgcacagggcccagaggatcgaccctagacccatacacgacgcagactgggcactggaaaattgcatacactttacacagtcggggtccgagaacaccctctctactgagcccctacc

SEQ ID NO: 79170 - DNA, 613 bp, Zea mays
  Clone ID: MRT4577_172228C.1
cttgaaacttcaattcctcatacactccagcgagcaaacaaacaacatatcgatggtgacaatgacattgtttaacggcacagtgctaaccgttacacagctatgtaattattatgggcctctgagttccatgatcagatagaggtgcaggttgcctttcgccggctcatttgcgcagcaagtctctcagtttatcggtggctgacctcagttcggcagcgatgccaacttcattggccgagtgccctgcatctgctaccacctgcatccagtggagtcataggcggtcaagttatcgatgctcagtcacaattctaaaaaatcaggtgaatttaccaagatccctttccgaatattcaattctaaaaaatcataagttgaaccatgagtttcatagaagaaagataccagctactcagtctaccaaaaggttgattgtttgcaaccatctaagcaaaatatcgtgtggcctatatccgagttcaacggccaaccacctgcattcctaatagcatgctgtctcttgtcaaaggcagccaagcatgtattgtcattgtttgatgaaaggaaaacaattgatgacagtacgacaccgatttccgacactgaaaaa

SEQ ID NO: 79171 - DNA, 1642 bp, Zea mays
  Clone ID: MRT4577_172229C.1
acagcgtgacgatcaccgagttcggggccgttggtgacggcgtcaccctcaacaccgtgtccttccagaacgccgtcttctacctgcgctccttcgccgacaagggcggcgcgcagctgtacattcccaggggccggtggctcaccggcagtttcaatctcaccagccaccttaccctcttcctggagagtggcgctgtcatcgttggcacgcaggacgtttcacagtggcctgttgtcgaacctttgccatcatatggacgaggaatggaccttccaggttcgaggcatcgaagcttaataaacgggcagaatctagttgatgttgtaattacgggaaacaatggaacaatcgatggccagggttctacatggtggaactggtttcgttcgaataagttgaactatagtcgccctcatcttgtggagtttgtggactctgagcaaatcgtcatttcgaacataacatttttaaattcccctgcttggagtatacatccagtgtattgcagcaatgtagtggtccatagtgtcacaattcagacttcattggatgctccacttaatcatggaatcgttccagattcttgctcaaatatgtgcatcgaggacagcagtatcagtgttagccacgacgccatatcactaaaaagcgggtgggacaagcaaggcattgctttcgggaggccaacctcagacatccacataagcagactggatctgcagtcctcactgggcgccgctctcacgttcgggagcgagatgtcgggcgggatctcagacgtccatgcggaccgcctcctcatccactcttcgttcagaggcgtcttcttcaagaccgcgccgggacgcggaggctatatcagagacaccgtgatctcagacgtccagatggaagacgtcgacgtcgccatcgcattcactggtgactggccaagccacccagatgaccagttcgacccgaccgcgctcccggtggtcagccacatcaccctgaagaacatgactggaacaagaatctcggtcgctggcgttttgtcaggaatcgccggcgacccgttcaccgacatctgcctctccaacatcaacttctcactggccgattcggccagtcccacctcccactggtcttgctccaacgtctccggatactccgagctggtcttccctgagccttgcctggatctgcagacccaatcctcagatgcctccatctgctccaccctccctagcttccacgccgccgccattgcagcagcgtaaatgcacagagtacaaagtgtccatcctttttcctgttcccggtcccctgcacacttcagaggatctctcaagccgccttttcctcccccgacaattctttgaagctataggcgcgctcccgtcgttgaagaaaagaatcgttcaccgtttttctccggccgtcggcttcgagggctcagctgcatcgcctttcttgcgggaggcaagcctggcggcggacggtcgacatcgagctgttaatttgcttgtacagttatgatttcttcattcaatctgtaagaaggaatttttgtggtagtagagggttgagtcgagtccagagagttgcttcatacgattgtcgatttggtgaataaaacacatgatggattcatgatccc

SEQ ID NO: 79172 - DNA, 250 bp, Zea mays
  unsure (1)..(250): unsure at all n locations
  Clone ID: MRT4577_17222C.1
tataatcctttctatttttttttctacgatatcctattctgcatagccctttacacagcgatcactcctttccttactttcaatatacatttcttaaatccgtnnnnttggatacagattattgttattttctccctataacgatacagccgcgatggataatgtgtatccctttattaaaacctaccatttcctgtaccactttttttatttctgaactgaatcaaaaaaagccatcttggctcctttc

SEQ ID NO: 79173 - DNA, 233 bp, Zea mays
  Clone ID: MRT4577_172230C.1
cggacgcgtggcggacgcgtgggctcgagcggtgccacacggccacattgccacaagcccacaaccagacggggagagagcgaaaaacggggcgaccgagctacctcgccgtcgacatcggctcccctccctcctcccataccgttgccctacccccactaccgcggcccgtggcctcgccggggtcctcctcgctgcgctcgctcggaaccagaggcctcgcgacgtcttgc

SEQ ID NO: 79174 - DNA, 256 bp, Zea mays
  Clone ID: MRT4577_172231C.1
ggggttgatttatattggtttttgtttgtttttttttatatttttatgggtttttgtaggaaccccaaaacaacccctgcagatggggtttttccaaactctcccccgtttttttcattccgcccttctgaggccaaaccttttttttcccaaagggctcccccaattaaatttaaggcccgttccttctttatttggtttatataaaattcaaaagggccccccttttcaaaaattttccggggcctcttttttt

SEQ ID NO: 79175 - DNA, 370 bp, Zea mays
  Clone ID: MRT4577_172232C.1
acctacatttttggttcattttgttctgtcaggtgagcgtttgctttccactaagccaaaaaatattgccgatgctccataatacaggttctgctaacggtaagcggtgattcgcatagaggaaaattaaaggtcgtattgacaaacacagaaaacagtaaccccacctgaatgggtctagttgaattatggccaccctccaagagccatcaaatggcactcaggatagacgcctaaagcctccttgccttcctaccgccctttctgaaagttctgtccatggggaccgggacaacgtcctcaatgcgtcctattttgatcctgtaacaagcaagcaccctgaggcaatactggacaccatacactgggg

SEQ ID NO: 79176 - DNA, 1387 bp, Zea mays
  Clone ID: MRT4577_172233C.1
cccacgactccgggcctttatatgctgcatgtgtgcttttgcaatgcgccgctgcttggtagttaccaaagcagctggccggcatggtggagaaggcgtcgatcgaggacgtgatgaaggtgctgatggcgtcgcggaagcaggacctgcaccagctgtggaccacgtgctcccacctcgtggccaagtccgggctgccgccggaggtgctcgccaagcacctccccatggacgtcgtgtccaagatcgacgagctccgcctcaagtcctcgctgtcccgccgctcgccgttcctcgcgcaccaccaccacccggcaccggggggcggcatggaggcctcgtccgcggccgacatcgacgaccaccacaagatccggcgcatgcggcgcgcgctcgactcctccgacgtggagctcgtgaagctcatggtgatgggcgaggggctgaacctggacgaggcgctggcgctgcactacgccgtggagaactgcagccgggaggtggtgaaggcgctgctggagctgggcgccgccgacgtgaaccacaccgcgggccccgccgggaagacgccgctccacgtggccgccgagatggtgtgccccgacatggtcgccgtgcttctcgaccaccacgccgaccccaacgtgcgcaccgtcgagggcgtgacgccgctggacatcctccgcacgctcacctccgacctcctcttcaagggcgccgtgccggggctcgcgcacatcgagcccaacaagctccggctctgcctcgagctcgtgcagtcggcggccatggtcatgtcccgcgaggacgcgcacacggcggtcaacgccgcgcccatgtacggcgagccttccggcggcggcggctgcggcgtgtacagtgcgagcggcaccagcagcacgagcttggtgaacctgaacctggacaacaggatggtgtacctgaacctagggatggacgcgcagttcggcaagatgggcgacggcgatgacggcgggggcagggggccgtcttctttgttctccccgcatggctaccattgacaagatggagcggccggctgctgctctactatctccttgtaagcttagaactaattaattacatgttgttaatcatatccacattacaggagatgaagaagatgatgattggaaagatggcgagacgatcctttaattttttgcactctatctatatatcatcatgtgactcttttagcagctagagacgattagagagagacagagagatcatgcatgcaaagtgatgcatcacaagagcttgggtcgatctttattggtgagttgtctagtctattgatggaggtgttgttttggaaattgtaagaggtgctaagaggtaaaaaaatgtttttttggttggt

SEQ ID NO: 79177 - DNA, 814 bp, Zea mays
  Clone ID: MRT4577_172234C.1
cccacgcgtccgcccacgcgtccgcggacgcgtgggcgcacgctcacctccgacctcctcttcaagggcgccgtgccggggctggcgcacatcgagcccaacaagctccggctctgcctcgagctcgtgcagtcggcggccatggtcatgtcccgcgaggacgcgcacacggcggtcaacgccgcgcccatgtacggcgagccttccggcggcggcgtgtacagtgcgagcggcaccagcagcacgagcttggtgaacctcaacctggacaacaggatggtgtacttgaacctagggatggacgcgcagttcggcaagatgggcgacggcgatgacggcgggggcagggggccgtcttctttgttctccccgcatggctaccattgacaagatggagcggccggttgctgctctactatctccttgtaagcttagaactaattaattacatgttgttaatcatatccacattacaggagatgaagaagatgatgattggaaagatggcgagacgatcctttaattttttgcactctatctatatatcatcatgtgactcttttagcagctagagacgattagagagagagagagagagagagagagagagagagagagagagagagagagagagagagagagagagagagagagagagagagagagagagagagagagatcatgcatgcaaagtgatgcatcacaagagcttgggtcgatctttattggtgagttgtctagtctattggtggaggtgttgtttttggaaattgtaagaggtgttaagaggtaaaaaaatgtttttttggttggt

SEQ ID NO: 79178 - DNA, 373 bp, Zea mays
  Clone ID: MRT4577_172235C.1
atcaaggttgggattcaggtcatttttctgacagcctttttttagccccaagcggccaaggccacaacagcccgacgtcactgcccatctccttttggcaccatgtttatccaacaattctggtaacaaacaggggatgaggggacgcaaagtatcgccgtggcgcctcccgactcccgttgcgtggccgttgggtggaccgagtcgttgtgtgggcccttgtccacagtccacaccaagacctttggacgactccatccatcgccatgaccatgaccatgagtccatgacccatggaaggaggtcacagcccacagggatctgaacttgttccaggccacgggacagcttctggcatgaggctttgggtctc

SEQ ID NO: 79179 - DNA, 929 bp, Zea mays
  Clone ID: MRT4577_172236C.1
ccccccgggaaaacgccgctgcacgtcgccgccgagatggtgtgcccggacatggtcgccgtgctgctagaccaccacgccgaccccaacgtgcgcaccgtggagggcgtgacgccgctggacatcctccgcacgctcacctccgacttcctgttcaagggcgccgtgccggggctggcgcacgtggagcccaacaagctccggctctgcctcgagctggtgcagtcggcggccatggtcatgtcccgcgaggacgcgcacacggcggtcaaccccgcggccgcgcccatgtacggcgagccttccggaggcggcgccgtgtacagcgcgagcggcaccagctcgagcatggtgaacctcagcctggacaacaggatggtgtatctgaacctagggatggacgcgcagttcggcaagatggacgacggcggcgacggtgatgacggcgggggcagagggcaagggggcccgccttctttgttctccccgcatggctaccattgacacaagctggccggagcggctgctgctctacgactatctctccttgtaagctttagaactatttaattacatgttgttattcatatccccatttacaggagatgatgatgatggagataatccgttgccctctaaaaaaaaaaaaaaaaaaaaaaaaaaactcgagacacgctctcactctctctctctctatctatatatatatatatctatatatatatatatatagagagagagagagagagagagagagagagagagagagagagagagagagagagagagagagatcatgcatgcaaagtgatgcatcacaagagcttgggtcgatctttattggtgagttgtctagtctattggtggaggtgttgtttttggaaattgtaagaggtgttaagaggtaaaaaaatgtttttttggttggt

SEQ ID NO: 79180 - DNA, 106 bp, Zea mays
  unsure (1)..(106): unsure at all n locations
  Clone ID: MRT4577_172237C.1
cccggggttcgtatacataaattacatgatattatatgttcatgtaattgggtgggngattctttagnaaataatatatatgatatggggatgtgtgttcgacatc

SEQ ID NO: 79181 - DNA, 398 bp, Zea mays
  Clone ID: MRT4577_172238C.1
tatgacctgtgccgtgaccctttacgcgagccatatagttgggtactgctgacgcgagcacatatagacacatgcgtatacgtggcattacatatatcatcactgattatctggagcaacgaatgctaaagagggctaactttctaacgaagactaatctagactatcgagccatcgagcacgagcatggtctagggaactcatcactcgtccctggagcttatgctcaaccaaaggggggaaacctgccgcctcactgaccactgtgaatagggtgaaaaacacaggaactttgggactgacgtgggcctgacctttagagagcgcgccccacagaggatcgaggaccaagacagcctctgcattgtcttgcgtgataataaccgcgagcacggaca

SEQ ID NO: 79182 - DNA, 714 bp, Zea mays
  Clone ID: MRT4577_172239C.1
gaaacacaaactgatgaaaaattctgagatatgcattctgcattaggtccttcaacacacatctttgtgttctgtgctcaggtagttgctgctggagacttgtgtgcgatatgccaagaaaagatgcatgttcccatccttttgcgctgcaaacatatcttctgtgaagattgtgtatccgaatggttcgagagggagcgaacgtgcccgctgtgtagggcattggtgaagccagcagacctccggtcgttcagcgacggttcaacaagcctcttcttccagctattctagtccgagacagccaacagagcggcaagctggagcgctccacccgatgatgcagatgttagcggtgtgtgtgcgtgtgttgctgcttgcaacgcctgcgagcagtgcggccctgatgcggtgctgggagagtgtacaccaagctgaagctgatggcgtacatgattgtgtatcgtgactgcacatattttcatcatcccctgtataggctctcgcgttgatgcttgagcacctgaggattttacctgaccatatacggcacaaattattacataaatagaaatggtgagtatatacaacgataaatcaatacggtccttgtttctgctgtgctctgttcaagctgtggaataaaaccgtcaagtactgtgttgggatttaaaacaactaaaataaaggacacaaaggtcaagaaaaatgttgctt

SEQ ID NO: 79183 - DNA, 454 bp, Zea mays
  Clone ID: MRT4577_17223C.1
tcctcgcgtccgcccacgcgtccggtctgtcgctgacgtttggtgaacgtctgatcgtttttctgagaagagcctatttggagcgggaacagagacgacctagaccaccgaggaatgggtcatgtcgctgatgataggcaatgcagggacactcgagacggcacgcgaagagatcgacgccgccgtggggcactcccgcttgctcaacgctggcgacctgacgcgtatcggctacctcaggtgcatcatcgcccagacgctgaacctgtaccccgccgcgccgctgctggtcccagacgagtcgttgtcagactgcaaggtcggcggctacgacgtcccaaccggtacggcgctgatggtgaacgttgacgcgatccacagggacccgactgtgtgtgaggagccgggcaggttcgtgccggagcggttcgagggctggaaagcacaggggctg

SEQ ID NO: 79184 - DNA, 553 bp, Zea mays
  Clone ID: MRT4577_172240C.1
tctgtcgcgtgggcttaggggaagccccttggaggcttggacaagcctcggcgggcgtggcatgctcttctttgttcatcatggacactgaggctacgccaatggattcgagaaggtcaagcactggaaaccaatggcgaaggacaagcttgcaaataacatcactacacagcaggggaagacgttgaaagatgcttggggtgacgtgttctggagcctagaggtggagcatgcttgtggaatgggaacattgcaaatgggcgaatatgaatcaaatgtttctaatgggaacgacaccttcatcattcgggagccacttggtgtttgcgctgggacatgcccatttaattttcctgctatgattccgctatggcgaccaagatcttcatttgaaattaataccagggagccgatgctagagttcgtgatcgctatgtggatcgcagtgcacggaatagccggagctgctcatatcttctactattatagaagaatatatattgctaatttgttatctactgacatcataatcttggtttgattggtgcaatgt

SEQ ID NO: 79185 - DNA, 2314 bp, Zea mays
  Clone ID: MRT4577_172241C.1
cattgggtacctcgaggccggccgggacacggcacaacaaaaccaaaatgggacctcgagccggcgggaccgcaccgcatctccctcccattccactccagtccaccaccgctcccattccccagccgccgtcggccgtcgccatggccaccgccgcccactccctcctgcacacaccggaggcccacagggccgccacccgctcgcccttctctcctcccgcgcccactcccttcctccatctccgccctcaccgcctccccctccgcctccgctccacctccccgaccgcctccgacctcaccgccttccccccgaacccgaacgggatcttcgcgtccgaccggcccatcgacgtggacgccgccacggaggccgagctgcgggagaacgggttccggagcacgcgccgcaccaagctcgtctgcaccgtgggccccgccacctcgcgcccggaccagctcgaggcgctcgccgtcggcgggatgaacgtggcccggctcaacatgtgccacggcgacagggagtggcatagggccgccatccgcgccgtcaggagcctcaacgaggagaagggcttcgccgtcgccgtcatgatggacaccgagggcagcgagatccacatgggggacctcggcggcgcatcctcggtcaaggcggaggatggagaagtatggacgttcagtgttagatcatttgaattgcctctcccagaacgaactattaatgtgaactatgatggatttgctgaagatgtgagagttggtgatgagctccttgtggatggtggaatggctcggtttgaggtgattgagaagataggaccagatgttaagtgccgttgcacagatcctggtttattgttgccacgtgccaatcttacattctggcgtgacggcagtatcgtccgtgagaggaatgctatgcttcctacaatttcatcaaaggattggcttgacatagactttgggattgccgaaggtgtagatttcatcgctgtttcatttgtcaagtctgcagaagtaattaggcacttgaaaagctacatagctgcaaggagccgtggaagtgacatggcagtcattgcgaaaatcgagagcatcgactctctaaagaacctggaggagatcatccgagcgtcagacggcgccatggtagccagaggggacatgggggcgcaggttcccctggagcaggtcccctcgatacagcaaaagatcgttcagctctgcaggcagctgaacaagccggtcatcgtcgcctcccagctcctcgagtcgatgatagagtaccccacgcccaccagggccgaggtcgcggacgtctccgaagccgtccgccagcgcgccgacgccctgatgctttccggcgagtcggcaatggggaggtacccggacaaggctctcagcgttctgaggagcgtcagcctgaggatcgagaagtggtggagggaggagaagcggcacgaggcgctggagctccggagcgtctcgtcctccttctccgacaagatatcggaggagatctgcaactcagcagctaaaatggctaatggcctgggagtggacgccgtctttgtgttcaccaagaccgggcacatggcctccctgctctcgcggtgccgccccgactgcccggtcttcgccttcacgacgtcgacgtccgtcaggaggcggctgaacctgcagtggggcctgatccccttccgcctcgccttctcggacgacatggagagcaacctgaaccgcaccttctccctgctcaaggccaggggcatgatccagtctggggacctcgtgatcgccctctcggacatgctgcagtccatccaggtgatgaacgtaccctgaggtagaagagccttacctttacctccatgccgcacggtcccgtatcggaaggaacacgcgtgttatcggcaccttggaaggacggtttcttccttccctgcgcctaaatcgctgccctttgttttcgctgtatcagatgctgctatgctatgctaggctctagtctggcccagggaactgtggcaataatctgtggctttcaggctggtgttagaactcttgtactacttgtaggcttaggtgatttttatcgtgcaagtagttggtttgatgtttttgtgtggtataaaagcgactcaagctatgggcctaggcctctttggtataccttttttttctgaagagtttttttagagaatctggattcgttgataaaaaaaaaaaaaaaaaaaaaaaaaaagggcggccgccgactagtgagctcgtcgacccgggaattaattccggaccggtacctgcaggcg

SEQ ID NO: 79186 - DNA, 683 bp, Zea mays
  unsure (1)..(683): unsure at all n locations
  Clone ID: MRT4577_172242C.1
ccggccggggcagatcgcagtcgcagcaccgaagatggtgagcaggcgcactctcctcgtcatgatggcgacggtagtggttctgcatcggagtcggactctctgcgctgctgcctcggcggctgcagcgccgccggcgacgacgaagcaggcgcggaccccggcgctgttcgtgttcggggactccatcgtggacccgggcaacaacaacgccatcaccaccacggtgcgctgcaacttcccgccctacggccaggacttccccggccacaacgccaccggcaggttcagcaacggcagggtgcccggcgacatcgtcgccagccggttgggcatcaaggagcacctgccggcgtacctcggcacggagctcagcgacttcgacctcctcaccggcgtcagcttcgcgtccggcggctgcggcttcgaccccctcacagccgagnctcgtgtccgtgctcaccatggacaaccagctggacctgttcaaggagtacaaggagaagtgancgcgnnnntcnccggcggcgcccaccaggccgcccgacatcgtgtccaggagctttttacatgggtggtcacggggcaccgacgacctcgccaacacctactttcaccacgccgttccgccgcgactacgacctcgagccctacattcgagtttcgtcgtgcagtgcgcctcc

SEQ ID NO: 79187 - DNA, 177 bp, Zea mays
  Clone ID: MRT4577_172243C.1
gacatacgtaacttgacccttgagttcgacaatctggactgccaaacgcttgatgcgatcacgtacgcgtgctgtacgatgtagcaagtcatgcgcctgcctcactacaatgaaggacctccctgataaacagcgctcactcctttccggcagtatcatgatctctgatgaggctgc

SEQ ID NO: 79188 - DNA, 563 bp, Zea mays
  Clone ID: MRT4577_172244C.1
cggtgtgcacgagcggatcatcctgccggagtcccctacctcaccgaccagaacggagatatctatctcgaggtcgacaacgaggacgcgctgctggagagcatcatgggggaggacaagatcgcgcacgttatcatcggattggacaacacacaggtcttcgccgacttggatctcgtctcggcctccggcacagagtttgcgcaagaagacgacaacggcgatgaggacgatgacggctccgacgatgatgaggaaagcgactttgacgaggacttcaacgacgtggagggtgtgttttcggttgatgaggacgacgaagatgacggagaggaggaggaggacgacgacgacgaggacctaccaagctggtccaaccttgagaccgtgaattcctgccatccactgtactttgcaaggatgatcgtagagactgcaaccaagtctagcatagactggctggaccggccacctgcaagccttgtcgtcgagggccagctgaggcctgcctttgctgaggagagcaccatggttgccaagcatatatcaagtgacgcgccaag

SEQ ID NO: 79189 - DNA, 338 bp, Zea mays
  unsure (1)..(338): unsure at all n locations
  Clone ID: MRT4577_172245C.1
gcgcgagcttcttgatgatgaggaggccgaggaggttgcattcctcgtcagcggcgtacagcagcgacgacacggactcgatggcgccgggcacgcccgcgacgcgaagggcgttgcgcttcttgctggcgagcttggacacgacgagcgccgcggacgcccgcgcgccgcgctcggcggcgcccttccagctgagcatgtccacgaggcgctccacgacggcgggcgacgtgccgacgcggcgcagcgcgccgtccccgagccgcgggctcgcggccacgttgacgaggatgcccacgccgatgcgctgctcgtcgtgggacccgncgacgatgagc

SEQ ID NO: 79190 - DNA, 398 bp, Zea mays
  Clone ID: MRT4577_172246C.1
gggcgtgcgctgctgggagtacaggtaccagccgtacatcgtccgcctaagggggggcactcgtaccgacaaggcgcgtcctctctgctacaaggccaagcacggatatgatgccttacccgcctccgtttgaacttttgtggcatgaacacgcctgtgctcaaaggtgttgtctatgttaagcctaatctccaaggtgtcacccatctcaagttccataggaacaataggtctgtctctgactatagagctggacgtaaactctgtcgactgagcgatcttaactcctactgactgaatgatgatcgcacctacaactacttagagatcatgctcgtggacaatacctactaagtcatcaaagctgacccgaggatcaactgactatacaaccctgt

SEQ ID NO: 79191 - DNA, 634 bp, Zea mays
  Clone ID: MRT4577_172247C.1
aggatgcgtcgtacagcccacactccccactcgctcactcgtcgctcccagcatcccaaaccctcgatcccctttctccaccgcggccgccatggcgtcgccgccaccgccgctggtctccatccccatccccgacgacctcctggaggagatcttcctccgcctgcccaccccggacgcggtcgcccgcgcctccgccgcctgcacctccttccgtcgcgtcatcaaaggccgcgccttccgccgccgcttccgcgcgctgcaccggcctcccctcctcggcttcatggacgcagccggattccaccccgcccaggcgccgcacccctccgctccgctcaccggcgccctcgccccctgcgccgccgatttctccttcgtcccggccgtcgtttcttctgcctcctacatcccgcgaggtgtccaagccgatggggaaggcccccgctggcgcccccgcgacgtccgcgacggccgcgtcctcctcgattgggtctccctccacccacgcgccatgcgcatatgctgctacatggaagacggctacgaagtaagcatcctcatggatttcggtgagctcgccccgcgtgaccgccccacctggactgaacgggagcggtgcaacgctgccgag

SEQ ID NO: 79192 - DNA, 354 bp, Zea mays
  Clone ID: MRT4577_172248C.1
tttgcaaccaagttctgcgtcgttagcccgtcggtggtcgggtgctgcccgtggcagaggaagatagcgcaggacacgcacgacgtggacggcttcggctgcctcggcacggcgaacaacctctccaggcagctgtaccccatgatcggctccatgctggagagcctcagccaagacgagctgcccggcatgaagtactcactgggagacgccgtcgcgatggcccagtggatattcacccacgctagcacacctcccaacaacttcactacgcccgaccgcgcgtgctgcggctcaggggatttcggctcgggcgcgtgcaacagctcggctccgctgtgccccaaccggagc

SEQ ID NO: 79193 - DNA, 282 bp, Zea mays
  Clone ID: MRT4577_172249C.1
aaaaatgagacaaacaacgattttaacaatcctttaatccatgggaaacaaaatgagagatggggcactttcttcagtggggaacggttttccaagtacatggagttgagcagaaacaccaggcacgcgttctgttttttttagccgggcaaactttttaagaaattaaaagggctggtttcaccagttcttcaccagcaggagctggagcaacttaacagggaaggggggaattacattttaagacacgcccacaccgggttccccgccacgagatcaccc

SEQ ID NO: 79194 - DNA, 659 bp, Zea mays
  Clone ID: MRT4577_17224C.1
ttcgtttgcaaaaccggagctgcccccgtgccaaggcgagagcaactgcaagctgctcgtctcgtccaataatagccgcaggagcgcaagcgcgaccgaattcggtgcgttgctcttgtcgccatcgcatccgcctccgcctccatccccacctccccctccaatccccgcagaaaccaccggcgccgtcgaccgcaaccagcagtggttccgtcgccggcgcgggattgggccaccagccgcggttgtcgatcggccgaatgattgattgatcgatcgatcggtcggtccaccgcggcaaggccggggagggagccgtcgtcggtggttcctggcggttgcatgtatgcgggcggggagagccggcccaatggtgggggcggaggcggagacgcgctcaggcggcggaggcagcccggcccgtccgcgtctcccgctgcgtcgtcgtccggcaggggagcggaggaggaaggcggggaggagcgtgggcgaggccagaagcaaccgcggcgcaagaagcagcaggggaggcgcgaggcggtggccagggcgatccggggcgggctgccctcctgctggggcggcgtctcggtagctgaggaggccgcctccggcggctggaggaccggggggaggaggtggagccggcgggaggagag

SEQ ID NO: 79195 - DNA, 236 bp, Zea mays
  Clone ID: MRT4577_172250C.1
gcaaattttaaaaagaacagatgtagcgctgaggggcgggatggctcccgtcgcgagcgacaggcccgccgccagctccccagccagcccgccggccgccactccggccccggcggccaccttcccgtcgcagccctccgccgtcaaacatttgcagagagaatgtatcttgatgggctgcgggaacttcctttgttgtggttaacattggacttactgcaacttcatgcgtggcc

SEQ ID NO: 79196 - DNA, 890 bp, Zea mays
  unsure (1)..(890): unsure at all n locations
  Clone ID: MRT4577_172251C.1
aaaggagtttcctttgccgagtgtctgcctgacagcactcggcaaagaatcggccagatgggtccccatgtcaggtactntgccgagtgcctggtatggcactcggcannaacgtgttctttgccgagtgccagagccactacactcggcaaagaaccacacatgaaatcatagagtttcaaaatagttctcttaggtttgtacacataacgcgtcacagttttctcgaaacattctcaaatttttatcacagcctctacatatgatatcatgacacgtggacaagtttcatgattttctgactttgtttgtgttttatacaatttttaaacatgtggatggcaagttcacggccatgtttagtgagcatgttgctcgaagtttccggtccgctcctggaatcggtcgtaacttgtgctaagtaacatgaatatcatttttgcatgcacggttttccaagtttcgagtgacctgcagttcaaatctgaattttccgaagaaattcaaataaacgaactaaatctactaacgattgaaaacactgttataattgtcccaaaatgatacatgtaggtctacatagtgtaggaacataccacaaaaagtttggtagaccaaaataaaaaaaataaaaatatgctttggccgagtgtctagagaagacactcggcaaagcgccctttgccgagtgcccaataatttgacactcggcaaagactgacggtcgtcagctatagacggccgctaacggccctttgccgagagccatctttgccgagtgtttgactctcggcaagccagtctttgctgagtgcttggctgtgccgagtggcctgcactcggtaaatcagatctttaccgagtgtaggactttgtcgagtgcggcgctc

SEQ ID NO: 79197 - DNA, 244 bp, Zea mays
  Clone ID: MRT4577_172252C.1
ggaaccagatccacactttagacctccattcttaatcccaaaattacatatggtttaatttaatacattcattcactcaagggggttcgagatagaggctatatccgggggagaaaacagaaagtcacagttacaacaaatttaggcgggtttggagggaccacccgttgccctttttaccgaggggggggcccccgaattgggggaccccccccccgggggaggaggcccgggggcccctttt

SEQ ID NO: 79198 - DNA, 411 bp, Zea mays
  Clone ID: MRT4577_172253C.1
cggccgcccttttttttttttttttttttttttttttttttttttttttttttttttttttttttttttgaaaactgaagccttcctcaaattttatgggtcataattacaaggctccgaagtcccaaagtttaagggttctttcaacccccccgctaaaatcgataacaggggcggccaatcatttttgggggggttttgaattttatgaaacgggtggggggtttttacaattttatcattaagtttgggtctgaacaaaagctcccatttactttttcgggccaaaaaaactgggaacgctggccctgttttctgggaacataaaccattaaaggctcacccttattacttggagtctggaaactccatatgaaagtttcatccccctcaaccctgggggaagattta

SEQ ID NO: 79199 - DNA, 424 bp, Zea mays
  Clone ID: MRT4577_172254C.1
gggtacctcgcaggcggtcggggacccagtacacaaaggcgcccgcctccccctttcttctccgccctttcttgtgaccgccgccgcgggccctagtccgccgttccctctcctgagccccgctcccgcacccgcaccggatcagtccgggccgcgtggtcgcccccacctaccgcctcgggtccactcgctcgcggttgcgtgtcccgcggggcggcccctcgggcctcggcagctccggacacgaatggggatctcgccagccgccactggcgagacgatgcagctccgcgtgtgcgacctccccaggcgggaccacgagggccaggagctcgccaagatcctctaccgcgagttttttttttttccccccccccccccgcggggctagaatccgcccacgcgaggccaccacaactaccaa

SEQ ID NO: 79200 - DNA, 388 bp, Zea mays
  unsure (1)..(388): unsure at all n locations
  Clone ID: MRT4577_172256C.1
gtctctttctttttccattgattccattcaagatcactactgttaccagccaaacagaaaaaccaaaaaaagagagggtttttttttgagagagagaggccctaaaaagggggaggttttttaaaaaaagggggggaccccggggcaaaacccacccctaatctgtttgggtggaaaaataatccccggcgctgcaaaaaaaaaaaaaaacaagaagggaaaacccctgcccctccccctttaacccttttgaaaccggagggggttacccgaggccacctctttcctatctgccccttggacccgaaaaactcccccaccgggcctttttttttcataaaaataaaaaaggcgccnataaacttgaagggggtgggaaaaatggccc

SEQ ID NO: 79201 - DNA, 846 bp, Zea mays
  Clone ID: MRT4577_172257C.1
gcacaattgattcgcccaattgccattatcgaactggtgtcacacgctagaatgctattttgtaccttttctctccaaattaatcattttcgaatcttccacaaaaaaatcattctagcatctgctgccttttaacgacaacggaggtgacattctgataatacatgaaaactgaaatgttaataaactgtgtacaggcatgccccagttacttcaattgcacaaactatcagccaccataaggtattcacatggaagcatctacctaatatgccgagcgaaacagaacacataaactctgctggagatcttgtggaacaactaattaggctccctcttatagttgaacacttcagatggctgtttcacatgcacacccatctcacccagcagcgaaagcatcacagaattctgttgaatgaaataccatcttcagcaacatggcgtggttcatttgatcatacaaggctcatccccacatctttctccactaccttctccttcatcaccttccttactttttcgacatcatcccatcttccttccgtggcataaatgtttgacagaagcacgtaggagctgaactctgttggcttcatttcgatcagtttagttccaataaactctccaagtttggagctgtcctgagttcgagaggctgatattagtgcaccccataatgcaggtgacacctttgcctgcaaattattgatgagattctctgagtctctgagcagtccagcacgaccaaggaggtccatcatacagccaaagtgctcagccttgggctcaatattgtagaacctgaccatcctatcaaaacaccaccagccttcaagcaccaag

SEQ ID NO: 79202 - DNA, 1865 bp, Zea mays
  Clone ID: MRT4577_172259C.1
aattcggcacgagggttcagggagagggcgggcggacgtacctacagtaaaaaacaaagcaggtcttcttcttcttcttggacgggcaagctgagttttctctggcagagatggataggctcgacggctctgcccacttccctccctccaggctccagtccggtcctgatctctgtccagctagctagctagcgcctccagccgtccagccagcggcggcgcgacgattcttccctccccggccggaagcccccgcacgccgccgcccctgcagatcgaccatgatgaccgggagaacctgtcgttgctgaggtttgaggcgctgtgggaggcggagttcgcccaggactctctgctggtcttctccacggggaggacgccggtgagctacaagggcttgcggagggacaagcctctggtgacgccggacgtgaccatcatgtccgtggggaccgtgatagcgtacggcgaggagatggtccgtgacgtcggctgggaggagcggctggacagcgactgggacagggccgtcgtcgtggaggagacggctaggctgccccagttgacgcgcatgcagccggagaggaaccagggtccccataaggtgagcttcttcgtcgacaagcagggtgctcaggaagtgatggactatctccccaagaagctggagagacgtggggtggatgtgaagatagtctacagcagcgggaacgccctggacgtgttgccacgaggtgcaggcaaggggcaggcgctggtgtacctgctcaagaaactggattccaacgggaagccgcccaagaacaccctcgtctgtggcgactccggaaacgacgccgagctattcggtgtgccgtctgtacatggagtcatggtctgcaacgcccaagaggagctggtccagtggtaccaagagaacgcgagggacaatcctaggatcatccaggcgaccgagagatgcgctgccgggatcatgcaggccatcgggcacttggggctagggcccaacgtctctgcgagagaccttgttgggttccctgcttattatcccaacaacaacaagaagggggcagctgccaccgctaagcccgcagatgtggtggtgaggttctacgtcctctacgagaagtggcggaggggggagctccccagttcgaattatttttcttcttcgtcagccatgcgctacttgaaaagcatcactcatccgaacggtacaatcattcacccttgtggatcggagcgttctcttcacgcgtctgttgacgctctgctgagttcttgctacggggacaagaagaacttccgggtgtgggtggacaggctggtgacatcgcccatcggcacaagcagctggttggcgaggttcgatagctgggagatggaaggtggcgttcggtactgctgccgcactactattctgctcaacatcaagcctgagagtccagagggcctcgagctcacacacatccacaagacctgggtccaagggcactctgcagggccagggagtgcgctcgtcttctagactaaatcagtcaaacgcgaagcagcatgtcttgttcaattaatttccagagagaaagaatccatccaaatgtacgacagacagacagacagacagacagacatgcccaatgctgggtacttccatattccatatgtacaacaaaacaaaacaaaagatgtcccgatgctgggtacttctcatgaattattagctgaagctcttgtcttggatttttcatatttgcagaatgtagtttccagtgtggcccaatgccatcattcagaatgctagctgaaaagttagcgctgttatttgtacttcacaagaaaggaaaagagatacattttaggtttcc

SEQ ID NO: 79203 - DNA, 312 bp, Zea mays
  Clone ID: MRT4577_17225C.1
cgacactcgtcgcgcaccaccaccaccgctgcggttgacagagctacgcagcccgatctgccaacccccccgtgccctgctcttgttgctactagcacatagagtggctgccgaatgagatcgccgactgactccgatagggttcggcccgatcgccgtttcgacctcccggctcccggggggacccgctcgagatgtaagactggagctcggcggctgagccaacgttgttcccttttggcccgcacgccgaggggagggacgccacgcgcataggtcaaatatagagatacacttaaaaggttttatggg

SEQ ID NO: 79204 - DNA, 834 bp, Zea mays
  unsure (1)..(834): unsure at all n locations
  Clone ID: MRT4577_172260C.1
gttcaacggcaacaagaaggcgaagatggtaatcgtctaatcgacaacaacgggtatgggtgaactctctcggggcgaaaactgtagctctgcccccagagcatggattaacaagccgcaaaactgtagctagtatctctttctctttgggatgtacaaacccgacgacgaagcaccatcagttctgatctcgagcgctcaaggcccgctctcatctcatcccatctcactgtatgtatgtatgtatgtgtacagacagctacactacactcaattcccctcccgattcctgaagctgcaactggtggcctccgccatggcccatggcgatccccaccatgccaagaaacctccctcccctctctaaacagtgaacacacattggtggcgcagcagcagcagcagcagcctcttcatcatttccagccatagctctcggaccggccgtcttcctcctcgcagctggcggtggcggcggacgagacggcggccaccgaggtggacaggtggtggagggggccgtggggagatccagactgagggctgccttgctcctggggaatccacagccctctcccacgaacnnacgatcggctnngggcgcaccacgcnncggatnnccaggcgccnactgacggttgtgacaagccgggtatttnctgaagatggactttatcactatcgtcgtttgtcnnagcccatccaccccttcatcagggctcncctgatttgcttcnnggcgtggcaannnttgggggcnnncaccgagctgaatnccaagggcggcgacnngaaccttgcgatgcaaagctcccgtcgcaccaagcagacgcc

SEQ ID NO: 79205 - DNA, 152 bp, Zea mays
  Clone ID: MRT4577_172261C.1
ttaccgcggccgtggatttggcaacttcgggtgaacctgccacctccggggattttccaacgggggggcaactggcggcggcggggcacctggcaccggcggggcatttgcccccccccggttatatgtcgccgccaccattgcactatcct

SEQ ID NO: 79206 - DNA, 199 bp, Zea mays
  Clone ID: MRT4577_172262C.1
ggcactcgtccgcttacgttaacggttccagatcaggagggacctcgcagcctccggcactttcgcaaggtcctctgcctctgcagtcgacgcgctccggggctggtgggatgacgtcaactgagtcgccccattgccaggacgcggccttcttatccctctccgacgtctactcatttgactcctccgtagcactgat

SEQ ID NO: 79207 - DNA, 906 bp, Zea mays
  unsure (1)..(906): unsure at all n locations
  Clone ID: MRT4577_172263C.1
ttttttttttttttttttttttagttgcactctgtttgaatgtcttaatctaattttagcaatcagctctagtacatttaaacaactcttaattacttctttttgcgccatagagttgtcttttacgccgcggatgcctctccctgctctgttctagtgttcttccttttgtccgaatagtcaaagctcaaaccaagcaatagcagtccttgctcctccaacttccctcctggcttctgcccctttgtctgcgctcctcacgccgccccccgccccagcctcacacccgcattccccagatctccatggactcgacccctcccacggacccggcggcctcctgcttggcctccgcctctgcggcggtggcatcgggggacgtcgccgcgatgctgccggactcgccgccgcggcgtggggcgggccaccgccgcgcacagtcggagatcctcctcggcggcgccgcgctccccgacgacctcaccttcgacgcggacctcggcgttgtcggggaggcctgcgtggccggcgacgaggatgaggaggatgacgacgacgacgaggaaggggtcggcggcgctggcggcagccggatgttcgagatgttcctcgagaacggtggcaagctcccaggaccgccggagccgtcggcgcatccgcattcgacgccgccgcggccacggcaccatcacagcatgtctatggatgggtccacgtctttgtttggttccgccgccgccgggacgcctgggaggtcgggcgctgatgccaagaaggctatttccgacgctaagctcgccgagctcgcgcttgttgaccccaaacgtgccaagaggtgagaatttaacaacctgtggaggagagcttcccttgttgtatttggcccgggggatnccggnaccggta

SEQ ID NO: 79208 - DNA, 399 bp, Zea mays
  Clone ID: MRT4577_172264C.1
agctcgttcgcacggaggccggcgacgaccgagggggcattgatgaaggaggccgccctgaacagcaggaagacgccgtgggaggctgccgcgctgagggcggaggcgctgctggcgtcgtccgaatcggcggggatcacctgcgggcaggtggggagcgcgctggctccgtgcatcccgtacgcaacagggagggccagcgggctccccgggtcgggctgcagcggcgctaagagcctcaacagggcggtgcggaccagcgcggaccgacaggcggcgagcacatggctcaagagcctcgccaacagcgacaagagcgtcaacaggggcaccaacagcaccatccccggcaagagcgggggatccgtcggagaccgcaacagcacgggcaccgactgc

SEQ ID NO: 79209 - DNA, 450 bp, Zea mays
  Clone ID: MRT4577_172265C.1
gggatatcccctcgatccgtaacccacgccggaatctctggcgtccgccgccccatggccctgcccaggcacacataagatggcccctgcgacctcctctatgccatcgacgagtagagaaaaacagtgagcgccatcagtaccaagccatggttgtgagaagctagcatgctccgcgacgccatctcccacctctgacccctgtggactccctcaagcccaagcgcgggacaccttcgcgtgctccatggtcgcgcgcgccaggccttctccatcggtggagcccggcgtagctcccttggccgcggtctgccgtggagctcgccctggcttccgcgacgttctttaccttcggtaacccgctgacgcctactgtgtacgcggcggcaaatggactccatgcgggcgggggcgaaggatctgcgcgaggacacatgtcatccgaaaagc

SEQ ID NO: 79210 - DNA, 163 bp, Zea mays
  unsure (1)..(163): unsure at all n locations
  Clone ID: MRT4577_172266C.1
gcgccgacatttccgcccanacatccgcgcgggcgtgaggggaagcgtcacgggagaagcgagatgcccatccaagaccccgaccacaggctaccagcgctctttatgaacgtctatggcttccgccgcgaccccttggaccgcctctacggacccatccacc

SEQ ID NO: 79211 - DNA, 371 bp, Zea mays
  Clone ID: MRT4577_172267C.1
agccaggcagggtcacagcagactggaaacatcggccacacatgtgcaggctgggtgggagagactgttctgttccttgtgtaattgtgttgctgaaagactacctcgttcttgtctttgtgtgtcaccggggcaactgtgtgggggcggggatgggggcagggtggcagcgcgcccagtttggtatcaaaggtgctacatctctgtgaaggggtggggtgggaaggaatttctggtgctatagaatctgagatgctcccctagaccagcaaatgttccttttgttcaaagtatttttttattcttttttttttaatggcataggattcagtgcaattacctttcctgacggtgctatttaccaagggagg

SEQ ID NO: 79212 - DNA, 120 bp, Zea mays
  unsure (1)..(120): unsure at all n locations
  Clone ID: MRT4577_172268C.1
aagcagtggaacaacgcagagactttgtttttgtacatcactttttgattcgggaatagaagncagcaaatcagaacagaccacactaggtacagcgggaccaacaacgcacaaggaatc

SEQ ID NO: 79213 - DNA, 319 bp, Zea mays
  Clone ID: MRT4577_172269C.1
gcgacttctaccaggacacagagatgacctggggcaatggccgcggcagggtatgggccgggggcgccggcttgaacttacccttgaaccgaacttccggttccggtttcaatccaagagccagtacctggtcggcaagatcgacatgcagatcaagcttgtgccaggcaacttcgtggcacggtcaccaacttctacctgtcgttccaaggcgacacgcacgacgagatcgacttcgaggtcctgggcaacgtgagcggggagccctacacgctgtacaccaacgtgtttacacgcggacagaggcagcgggagcagc

SEQ ID NO: 79214 - DNA, 368 bp, Zea mays
  unsure (1)..(368): unsure at all n locations
  Clone ID: MRT4577_17226C.1
gcgtgcggggagacgaatagagccaaaacgaagaacagccgggtagaggaaagggagacatgctcgcctcaccggggggggtctttgcccaatccttcgctgctgcccacccatggaaacatacttgatgcgtcgcctcccgtgcncacgccggcacgctgcgcggcgctgtgcgtcgtagcaaggtcaaggtggccactccccagaacgaccgcatgggccgccaacgccggctacgcaggaaggtcagagggaccactgagaggccgaggctgagtagccgtccgatcaaacaaacatatgtacgcataactcatcgaccacacaaagcagagaactatggctcagctcaaaccatgcacaaatct

SEQ ID NO: 79215 - DNA, 488 bp, Zea mays
  Clone ID: MRT4577_172270C.1
aaaaaaaaacccctttgggataaaaagggggggacccgagcccagaccaaatttttcccctcggggtaaaaaaactttccttaggacaagcccagagttacccgaagagggaagcccccctttaattaaaacataaggggtttcctcacaaacggggggaactaaccccaaccccccggggggggccccccctccccaaaaatggatcgatcgaccccccccaatttttttttaacaacccgggaacatttgttgcccccggggggttttcccttaaaagctccaaatctgggggaggcccagggcccccccaaaacagcccttttcccgggggacgattttccagcgggggtgggccccctccccccctttccaaaacacaatgttgggccccccccccccccccccggggtccttgtccccggggaagggctccaaatttgagagaaaatgttgtttcaccatgcggacccagggaaagccggggc

SEQ ID NO: 79216 - DNA, 127 bp, Zea mays
  Clone ID: MRT4577_172271C.1
tctcgaaccaactcaaacctatcctggttcaagatcactatgttcagggttattgcccatcttgctacctaatccaccgcaaataaaaccttaacatctcaagcaccatcacttcactattcacaca

SEQ ID NO: 79217 - DNA, 509 bp, Zea mays
  Clone ID: MRT4577_172272C.1
cattgggtacctcgagccggcgggaacttttctcgatattgatccctgtccgaccctacctagcttcctgccccttcgaggacgtctatctggtacgagctcctccaaactgcgacgtggagatccggtgcttcaggtgtcatctgagcgtttctcggggtagctgccggatacgcggagacttgcgcggtcgaccaatacgtactggcgtcactctctgcattggcttggagatggacagctgcgcggacgcctctgactgcgtacgtggacctctccctctacgagctctacttcctcgctcaccaggtctacctcgttcgccgcctcccgaccttataaagctctacctcctctcctctcgattcctgacagatgtcctcgtcgcacgtcttgctctgacattcactgctaccctgtctccatcgagctcatgcactctcagatcgtagtctctttccctcaagacctatagatgctctgtcatctagtaggtcgactcttcctca

SEQ ID NO: 79218 - DNA, 437 bp, Zea mays
  unsure (1)..(437): unsure at all n locations
  Clone ID: MRT4577_172273C.1
cttcgagcctaaaaaatgggcctcgccgcttgatgaatcgcaaagcggaagggttttttttttttcttccacgccttgcggcccctgaactgattcccggagcgcttgcgctgccgcttcttctcctgccgggaacgggctcccttggcccctaggcggtgccaggggcagcctccgggtgcgctggccctgcttattgctcccccccccggaccttttctgtttggcggccgcccttgccctgggcggccctttatccggtctttcagcttttgccgtcgccaacccggctttcttgggcttcgtccccctgccgtgggcctgaagcccaagtggtttgtttcgcttcctgccgcgccgggcnggtgctggcgtggcaatggttccgggcccgggggccccacccctgctggtgtcctgccggtcccgggccaggg

SEQ ID NO: 79219 - DNA, 608 bp, Zea mays
  Clone ID: MRT4577_172274C.1
aaaaccaaacaaatgaaatcgttccaaaggacaaggggggaaaatatttttttggttggcagaagaagaataattatcccaacttaacccggcctgggggaaaattaacggttggtttttggttgggggggggggggggaactcccgggggtaagaaccgccaccccaacacggaaacaagttggccgggctgccagaaaaggaaaagggccccgccggctttttgaacgggaaacccaataagggccatccgttggagaagggcctgggcctggaactggggaaacgggctggcctgaaccggaacaaaccccgccaacccaagcacggcccgccacggaaggggggggggttggtcaacggccattggccggggggggggggaaaattacgcgccgttcaaggtggggctgaaccataaagggctgaatcctgccaaccgcttgggggtccggccccccaacggggtgaagggagtccagcagggacacccaggacgggaacgcctgaaacaggggcgggctgaacaacagttccgggcggccgaagccggggcccacggccacaaccactttggggccaagccgtttacaaggggaaccacggcc

SEQ ID NO: 79220 - DNA, 585 bp, Zea mays
  Clone ID: MRT4577_172275C.1
agcaataaaaccttctttttattcctttgactacaatataaacaggtatgcatgggtagctttacctagttaagtatagtgtagagtagtgatgcacacttgtgaaaactagttctaggtaatcccaggagagagaacatgataagtttgagaacaaacccatctccaaaaaaatgttgaaataagcaagatggcggtgttgtagcgacatcggacatgggactgccctgtttaaaatagatatgacaccagtgtgtcgggtgtgcattggacaagtcatcaagaaatcttgcatatgaaacttaaatgctaagtactcactaaacatgtctgatgtgtcacccaaacatggcaccggacaggtagccataaaggctgcaaattgtgtctaagaggttgagtactcattagacatgcatggtgtgtcaccaggcatggcaccatataaggtacttagataggtatagaaactatatatttgaatggtatactcgctggacatgtggggtgaagcaccatataccagtacataatgacttgtttttaaaagtagccattggagctacaccaaaccccacgcgtccg

SEQ ID NO: 79221 - DNA, 1163 bp, Zea mays
  Clone ID: MRT4577_172276C.1
ggcgtattaaacggtaaattcgaggccggccggaagttgctgctactcggcacaccaaaccactccagtggagtccaacaccgcctcttctcctcttctcgattcgaaatcgagtgcgtccgaatgctctagaaccttccgggcctagggatctcgatggggcccgagcaggaggaggccgtgctggagaccatctgggacctccacgacaaggtcagcgacgcgatccacgccctctcccgcgcccacttcctgcgcgccgttcgccgccgctcctcggcctccgcccccggcctcgtggacgtcaagggcgggggtctgggtctcggcgcgcgcggcggagacgaggtcgtcgccctggcggccctggctgaggaggccaggagcctgcacgccatccgcgccgcgctggaggacctcgaggaccagttcgagtgttttctcgccgtgcagacacagcaacaggccgaacgagatttcgcgatggcgaggctggagcaaagccgcatcatgctcgcgataaggctcaaagagcatcacgggagaaaccacaaggtcatagacgaggcgtctgccttcgtccgcgatgtctaccaggacgtctggccttccctgtcagctaccaaggccgagagacgcgccgacagttcaggtaacccggcgaagggtccgagcttcctcgcgcggatggtgtcctctagccttgctgtagctgggagcggtttcagtctcaaaaggctggctttagctctcggcctagtcgcggtgctgcagtcttcaggggtcggtgaccgcaggtacaggaggaccaccagcgagaggagctcgtcgtggctgggatcatcatctccgagaggcggtagaacgggtcgtcttgacgtgtctctagccaggggttgaaaggggggagggccttgttttgttgcctgtacatgactcgctaggacgtagtgtcgcagtaaaaggtttgttgttcggtctagttggtgtctgttgtcatttcgattggttttgatcgtgaaaaccgcatctatttttaaaaaaaaaaaaaaaaaaaaaaaaaaaaaaaaaaaaaaaaaaaaaaaaaaaaaaaaaaaaaatacgttcagggtttgttgggcgattttgtactaggatttatttccccccctccggtttgtggc

SEQ ID NO: 79222 - DNA, 692 bp, Zea mays
  Clone ID: MRT4577_172277C.1
ggccgcttttttttttttttttttggcaatgtaagcatttcatcttccaagttccgttcacgccttcctatcaaaatctaagcactttatgagagcgtgctgtaaagaaatggggcattgacacgattcctgtttattgcggccaaaatacaatgataactaacactcatctagaagccgagttcaagtacaacaaagtaggtgcaagataagtccatgcagttggagcatgggcaggtaagtctgtaattttcatggtaaaattcattcgactacagctaacaaatctgactcccggcagaagcagtgcttctcatccgtatcaaggtccacctcgtaagcattgatgtctgaggagagaacctgcaagtgcaaaccaggttagggtattcttcatgatgagcattgtacttcagtaaaagtacatatatgacaaactatgcaaaactgtaagacttgacacaataacaatacccaatgcagggcgaaatagacaagggcagtaccaaaataaagcatgtttattttcagagtttgcagcaagcagatttcagcagcagacagtgccataatggttgccgcttgcaagttagcacaatgtatttgtttcaaaaacataaccactcttcgttctactcaagtaagcatagcacattcatttacataattacactacagttcatatgcccaaa

SEQ ID NO: 79223 - DNA, 1141 bp, Zea mays
  Clone ID: MRT4577_172278C.1
cgtctaaaccatccatggagtccaacaccggctgttctcctcttctcgattcgaaatcgagtacgtccgaatgctctagaaccttccgggcctagggatctcgatggggcccgagcaggaggaggccgtgctggagaccatctgggacctccacgacaaggtcagcgacgcgatccacgcgctctcccgcgcccacttcctgcgcgccgttcgccgccgctcctcggcctccgcccccggcctcgtggacgtcaagggcgggggtctgggtctcggcgcgcgcggcggagacgaggtcgtcgccctggcggccctggctgaggaggccaggagcctgcacgccatccgcgccgcgctggaggacctcgaggaccagttcgagtgttttctcgtcacgggtctcaagtgtctgaaaccccccgtgctatgtgctgttctgaaattacgggccgtgcagacacagcaacagaccgaacgagatttcgcgatggcgaggctggagcaaagccgcatcatgctcgcgataaggctcaaagagcatcacgggagaaaccacaaggtcatagacgaggcgtctgccttcgtccgcgatgtctaccaggacgtctggccttccctgtcagctaccaaggccgagagacgcgccgacagttcaggtaacccggcgaagggtccgagcttcctcgcgcggatggtgtcctctagccttgctgtagctgggagcggtttcagtctcaaaagtctggctttagctctcggcctagtcgcggtgctgcagtcttcaggggtcggtgaccgcaggtacaggaggaccaccagcgagaggagctcgtcgtggctgggatcatcatctccgagaggcggtagaacgggtcgtcttgacgtgtctctagccaggggttgaaaggggggctgcggtttgtggccttgcactgtatgcccctgtggcaagggccaagctcaggcccgctgcggtgttttttttgttgctttctcgggccagcagcaccaggcttcatcgctgaggctgctctctgcccatcatgccgggcgcagccggtgggcatgtttgatttgtggctaaatgtgacacattttatctaaggttagtcttttgaatggaagaattaaacttagccag

SEQ ID NO: 79224 - DNA, 546 bp, Zea mays
  Clone ID: MRT4577_172279C.1
gcggtgcaggcttaagtatagctggaatttaaaataattctaactatcaatcagaagcacaagaaaaatatctccatgccaatttactgattttgttgtgcttcacagagaacgagttcattggccacttcccctttcttccatggccttcacagtttcagcaggcaacaccttaatatgggtggttgcaaccaaccaaaacactgattgactgataggtggagttcaaaaacaagcactgatatgtgccttggagttgtagtattcactatttgttatggtccatggtcgagtaaagactgacgaaaatattgaaagttatttattcaataagacgatatattaatggcttagaactgctgaattaagtgtcgtttgtccgtgcttccttgtatgcttgaatcaagaagatacgacaggctgtacacctcaagagatcagagatgccctttattgttggaatcatggtttcatcctaagaaaaaatggtgtgggctgccataccaagatgcccttgatctggatacatcgactcactacatttaa

SEQ ID NO: 79225 - DNA, 405 bp, Zea mays
  unsure (1)..(405): unsure at all n locations
  Clone ID: MRT4577_17227C.1
gcagtgcgccacggctgctggtctcggcggacgagcagaatttggaccgtcgtgntgtgagagcgggaggagtacctgcatacgatggcgtgtgctgactgccgtgcggcagctggcgctgctgcatagtcgtggcgcatagcggaggggcgtatgtcgcaactaccggcgatcaacgggactacaatggcgatgagatgctgaaacgcgcgcgtgatggctcgctgcggcatatgacgtttgggctagcatggtgcgcggaggatatgattcaagcgggcgagctgcgctaggactatcaccgggtccatgtacatattccggcttctgcagcgcgagaacgattgtatgatccgcgtcagcacgctgaccaaaaaaatgggtttaagcctttcaaagggttat

SEQ ID NO: 79226 - DNA, 190 bp, Zea mays
  Clone ID: MRT4577_172280C.1
ccgagaaggggtttccttttaaggaaggagctcctgcggaccatcctcagcggactgtgcatcctgagcagcacctgctaggcaagctctcactacaatgacacgacgctgacccctgcccttgacgagaagcctaacgcacaagatgaactgaccacactcaacgagcgcaccctctactagatcaacg

SEQ ID NO: 79227 - DNA, 313 bp, Zea mays
  Clone ID: MRT4577_172281C.1
cctatgtggtccgaaaacctttatgagtccttcagctttttccttatcttgccacggtaaaagaccttcgacagcaagtgcatgggtaagggcaaccgtgtcccgtacgtcaccctggtggccacacatgaccccaaaaaagagccgatcttagtcccgactctcatctacaccgtggtttacatctggggattcgtgctcggcatacatttccacagcacgcaaacaaaccacaacaacggctagaaccaccgctggaacgcctacgtacacttcctgatacagactgccattgacaccggcggtctcacac

SEQ ID NO: 79228 - DNA, 253 bp, Zea mays
  Clone ID: MRT4577_172282C.1
ttaacattcaccccaccacccttaacagtctgctaatttaatagcctacttcttctacccgttcaaacaagacctaaactcactgttgaaaatatctggaacaaggctacatcgcatatacaacaaatacacatgcaagacatacacacataggttgatgacacatggccggtttctaccactttctctaaatacctgtcgaagctctagaggcacaataccaggccctacctttatatgtactacatactga

SEQ ID NO: 79229 - DNA, 231 bp, Zea mays
  Clone ID: MRT4577_172283C.1
gacagcgcgagcccaacgcggaattcgatctagtgcgccacgctgtccttctcgatcacctacgacccaatctggccgctgctgtcgcgggtcacgacgatggccacaatctgacgagctgaacacggggagcgaggatacagtacagcaaggacacgggtcacgcacgccgcgcgcgcacgacaccaaacgcgaacagatcttgcaaggtcgccgacaagtgggcacgca

SEQ ID NO: 79230 - DNA, 270 bp, Zea mays
  Clone ID: MRT4577_172284C.1
tttttgggggaggttttttgagttgacaacccaaagaaccacgatgaagaaggggcaagacagaaagaattacatgagctctgaaagacccaaaattcagggagaaacacatggtcaccagacacaacaagggcagaccggaggaaaaataaagcgggggacagaataccatgaggaaaaggcagggcttatcagcgcaaaacagaggaaagacaaacaagtgcagccctaggtaaagttgggtcccgcgaaatgaccgagacacggatc

SEQ ID NO: 79231 - DNA, 456 bp, Zea mays
  Clone ID: MRT4577_172285C.1
gttagtcatcaaagtcttcagcgaaccaaatgggcgaaaaaacacgggggctgcacacagccacccaccaactcgccaaagcaggggcaggaggggggaggcaaggcaaaagggcccaaaaaaggggaggcaacgaaggcacaaaacgcttcccagaagggaaccaacatcgagaccgggggaatcaagccccggaaaacaagcaggagcccatattcttcggggacaagcagggccaagccccaggagcaagagacagggggcacaagcccattcagcacggggctaagaaacgggccaaagggcacaaaggggggaagaactcttccacgccaaaagggcgcccaaaaggaagcccaaaaggcggggggaacaccaaggactctttcatcacaggggcacatcccaggcatttcgcaaatacacgggcaaaggaaaggccccaaggggaacaaa

SEQ ID NO: 79232 - DNA, 858 bp, Zea mays
  Clone ID: MRT4577_172286C.1
gccggccgggcctgtctctctggtgtcccagctctcggtccgtcggttcatgtactgcctgccaccgcccatgtctaggacctcgggaaagctcgtgctcggcgcgggcgcgggcgcggacgccgtccggaacgtgtcggaccgggtcaccgtcaccatgtcgtccagcacgcggtacccgtcctactactacctcaacctcgacgggctggccgtgggcgaccagacccccggcaccaccaggaacgcatcgtcggcgctggcggtgccaacgcgtacgggatgatcgtggacgtcgcgtcgacgatctcgttcctggagacgtcgctgtacgacgagctggcggacgacctggaggaggagataaggctgccccgcgccaccccgtcgctccgcctggggctggacctctgcttcatcctgccggaaggcgtggggatggaccgggtgtacgtgccgacggtgtcgctgtcgttcgacgggcggtggctggagctcgaccgggaccggctgttcgtcacggacggcaggatgatgtgcctgatgatcagcaggacgagcggggtgtccatccttggaaacttccagctgcagaacatgcgcgtcctctttaacctgcgccggggcaagatcaccttcgccaaggccagctgcgactccttgccatagatagataggttccgcctggactggaaacttcgtctcatgatcttgcactccgtgacaggattttagagaatttgcacatcggagattagatattggtgctctgtattagcttctgacagaaattcctgaactgtatatgcagaaacgcgtaaccattcagtaaaaaaaaaaaaaaaaaaaaaaaaaaaa

SEQ ID NO: 79233 - DNA, 385 bp, Zea mays
  unsure (1)..(385): unsure at all n locations
  Clone ID: MRT4577_172287C.1
agtgttgtgggtgctttttgtttttttttctttttttttttttttttgaggtattttcctttcttactgttttgtgattgttatgatagctcgccgaaaagaagaggcccttttaagaaaaaatgtgtcattgtgccgccccccccactgtgtctttgaaccggggggaccttttttatttataggggagggggggccctggcaaatacccttgtgtacacccccattattatgttttgtccagaccccagagaactttgttacattgccggggaacaagggggggagagccaaccccatatcgcctcggggacgggcccctagnctttcccccctgcggatctggttgctgactcttccgacttaagcccccgtattagaaaaa

SEQ ID NO: 79234 - DNA, 234 bp, Zea mays
  Clone ID: MRT4577_172288C.1
catgaacaaggattttaggacagggacattttaaacaaaaacaaacgagtttaatgtaaactgaaccacgacagctttggatttggatataatacatagacagtacccaacccgggcatgggatactaacgtacgcctacgcctagaacttgttatgaccatgaccgaaatagaagtatgggaaagtcggggcaccatccccataacttggcaaatgccaataccacataatcc

SEQ ID NO: 79235 - DNA, 1396 bp, Zea mays
  Clone ID: MRT4577_172289C.1
atgggcaaatcgtgggaatttccattggcttgccccccaattaagaaccacctgtaccgggccccccctcgagttttgttcttgtcgtaaactgatatacgaactctgtgttaaagcataaaaacatacagtttttagcgtaaataatacatgtggtaggcataaaacataataaacgaaaagaaaaatgcgccggatcagaggatgtcacgcgcgatcatcgctgcgcgcatctcgccctttccgtgacgtcgctcgctcgaacatcgcgcctcatgcgtcgccgtcgctactcgcacgtcgacgggcgtcgcttgctcgccggccttggaagtgccgcctcctcggggcttcggggacgccgccgcttgcctgcacaagggcctcgctgcggatcgaggcaagcacgtgatcgtacagtttttagcgtaaataatacatgtggtagacataaaacacaataatcgaaaagaaaactgcgccggatcggaggatgtcacgcgcgatcatcgctgcgcgcatctcgcgccttccgtgacgccgctcgctcgaacatcgtgcctcatgcgtcgccatcgctactcgcacatcgacgggcgtcgcttgctcgtcgaccttggaagtgtcgcctcctcagggcttcggagacgccgtcgcttgcccgcacaagggcctcgccatcgctcgccctctggatcggggagccgccgccaccgacctcggaaccgccgccactactccggatcgaggaacctccgccaccgcgtgtcaaggtaatggagttgcgaccaccggccggggaaccgccgccaccgcacaagggcactgccgtcgctcgccctctggatcgggagccaccgcatatcgaggtcggggagccacggccactgcagccactggccggggtccaccgccgcgcgcgctatcaggcaaccgtcgtcgctaatgaatcgagatggggcgtgaaaaactgaaccctagcactacgggtcctgttttatagacgtccggacgtggtccggctcgaccggattgcactgtctggcccgggcttcctttaattattggaagcccagggcgcctaatatacaatctatatatatatatatatgttactattgtttttatttatattaaaatatgtatgttctattggctagatggtgtgaatataggtttaaagtcaacaatcttaatttaaatctttatttatatataattttattattttttatcatttaaacataggaaaagcacaacggtgaaaaccgatcctcgtacactggagatgggtttgtccaccaagaacaacggttcaacagcaacaatttaggtataaagatcacctgagctatccaccgatccacatcagtttggttccgatcccctttccttt

SEQ ID NO: 79236 - DNA, 170 bp, Zea mays
  Clone ID: MRT4577_17228C.1
ggaaaagcaggaacacccgcaggaaccgaaccggaaaacccgggacgacccacgcgaccgggttggtgacagaaggcgcaaacccagcagcagaagacccgcggaaacgagaaaacagccaaagcacccgacagagaacgccaaaagaagaacaaagaggaagaggacag

SEQ ID NO: 79237 - DNA, 199 bp, Zea mays
  unsure (1)..(199): unsure at all n locations
  Clone ID: MRT4577_172290C.1
tccgcgacaacaagcctcctgggtcgtcatcctgctgcggtgggcgtcgccaaggacgctcttcatcgcgggtggccgacgttcctgtctggaccgcgccgggtcgtcggctctctgcttgctgaccagctacgggttggaatgatntgtctcgctcgtcgtgtctcgtgttcgtgtcctcactcgtcttgggtgcacc

SEQ ID NO: 79238 - DNA, 480 bp, Zea mays
  Clone ID: MRT4577_172291C.1
aagcagaacatgcctttttaacacaaacaaagttatatgtctttaaggccttaatacacaaattttaaaaggtctttagtggggtaatcaaggaccatcacaatgggcttggtaaggttttaaacccttactgaaggcatgccgttgacgacaggtacaaatttgttccccacaggctaaccaataaccaagtcccttctctattgaaaaattaggctccggctttatgccaagctcctgctacaccagggtctggcatcattactcccctaaccagggagatgcatatttgtcacaacattactatgtgcgacctgctataagtgccttcacgagccggtgaaggagtacggttccttttgagaacgataacgagggctgtagctccttttattatagataggacttctgccgtatctacggctgggactgtgagatcctgctcctgctgctacgtgttacactggcctatacctgcag

SEQ ID NO: 79239 - DNA, 587 bp, Zea mays
  Clone ID: MRT4577_172292C.1
cggggggtcttcacagcgagagctagccaggctaaaaaaaccgtctacgccttgcctggtcagtttccttctctttccgcaggccgcattgacgaccagggtgcaccgtttcagagtatgccagcgagatcccgtgtgtggttggcgcgatggcggaggagcagtccaacccccaagaccaggaagcggcggagagggaggatatggtggagcagaggacgcgagagagggtccagtagctgaagtacctgcacttcgtgcaggtggcagcttgaccaggccgcggtgtgcctctctgagatctacggcctctacatggaccacgccgtcccgctgcgcctgagcgttgacgccggcgagtctgctgtaagggcgtggttgtctcgtgtacgaccgcttctcggactgccgctggacgacctcgacttcgctgaccgcacggaggacgacacggtgcatgatgtggaccagcacctcccgcgcgcgctgaaggcagcgtcagcagcatgtctacctgtggttcgacccgtgccggagtgcagtgctagttggcgctctaggagctttgcatgatcgtgatgttcgca

SEQ ID NO: 79240 - DNA, 375 bp, Zea mays
  Clone ID: MRT4577_172293C.1
gcggcatctgtcgacaccaagaacgactacagcatggaggcaggattgttgagcactgaccgagaagagaggaccatgtcgtcaaaggaagcactactccaggattcggaatctgcccagaccatcccaaggacaaagaccagaaggatatccccagctggcaaggccttgattgctttggccgcttgctgtcttctgggcgccggtgtagcatccattggaggcgctacccgattctgccctggacatctccgccatagtgatgttggaaagtatggcatgaacgctcatcgaccaaatctttccgattccatggcccaaatggttcgacgacaaaacacaccaccacctaccgatacagcgcatggcactgac

SEQ ID NO: 79241 - DNA, 206 bp, Zea mays
  Clone ID: MRT4577_172294C.1
gctacaaaacacccagggaacgcctagcacggcctgacgcatggctgaaggatgtagactacttgccctcgtcactttttgtagccgacaaggcataccttttccacatcgtgactggttgcctggcctcttagtcaagcatttctagtgacccgcgcgtggaaccctcacgccaacgtgaactcgctaaaaataatcaatgtatt

SEQ ID NO: 79242 - DNA, 531 bp, Zea mays
  Clone ID: MRT4577_172295C.1
ggggttttacagaaaaatcagtgaatctgtctttatagaaaacagacacaagaaagtgcataaataagattttcagtctaatatacaaccgcaccattacgaacactgcataaccttcagtttttacagaaaagagacacacacaactggcgtaaacttcagttctcagtccaacacactacaactaaaaacagaactcagagtgtccacagttatgtctgttgctaactcattcaagatcacccatctagtcgtcatcgctattatcatcaacaacatttgggatattgctctcgtcattatcactggcatattgccatcctgtttcatcttcttcatcctcaaaataatcttcttcatccatttgtctatgtagatcttcaactacacttgcatcaataatatcaacattttgtaccccaacaatatcattgtttatatccacttcagtatgctgaatattagaagcaacacattcatcgtcttggtaagaaagcgacacaccattgggtatttcatcactacaatttt

SEQ ID NO: 79243 - DNA, 218 bp, Zea mays
  Clone ID: MRT4577_172296C.1
gccacacgtccgtagctaagctctttgcttacaatcagtgaaatccatcatgattgatctggggacatgtgtgtggaaggagttgttcttactatggaggatgctggccgtatggtgcgaagtcgcttatgctacgactctgcaatgactcatggatatgtgagtactgccatggatgatatttgatgcctctgaatgacaagatctgattattgact

SEQ ID NO: 79244 - DNA, 1014 bp, Zea mays
  unsure (1)..(1014): unsure at all n locations
  Clone ID: MRT4577_172297C.1
ctcgttctaaaaagatgggatcctgtgtaataagttcttgatattccaccacttccttgtaaaaaaaaatcacagatatctaaacatttaatccatccatccataagggagatcgggcagcgactccttccgatgcgaaagtaatttatgcatctttcgcatacttgtagcagcttcaaatagatcatataccaattctctctctctaaaaatgtaaaaaaagggagtctgtgccccgagatccgccataaaaggtccaagccataacaaatgagaagctatacggctcaattctaacataattactctaatatagctggctcttttgggtatttgaatattctctaagaattctggtgcatttaccgttattgcttctgtaaacatagtagctaaataatcccatcgtgttacataaggcaagtattgtataatacttctgttttccgcgattttttccattcctctgtgtaaataccctaatatgggttcgcaatcaataacatcttcaccatcgagagtaacaatcagtcgaagaacaccatgcattgatgggtgttgagggcccatattgactatcgtgcgctcttttcttttaagcgatagactcgtatccttgttcttattctttattcgccctccccctacatatttgatttcttctcctatacaaaaaccagcaagacctactccattggtaattccatcaatgacacctttatcaaaaaaatgcgttagttcggctaatcttcttatacctaggataaaaaccctagtatagaaaaaatctatatacccccgattatatgaccagctgtattctttttttttacttcacccccaaagctcttttttggattattttttgcgagggaattttgaaaattcaaattctgaaggggggataagcagaacaataaaagttatatgatataaatagaccannnnttgctaaacttacagaagaaattgcattagtgagaaactcacatgcacggaggaagaatagaattt

SEQ ID NO: 79245 - DNA, 555 bp, Zea mays
  Clone ID: MRT4577_172298C.1
cccagcgtccgattatcttgtataaaaaggagcttagaagaaacagagttaggatgcctttttcttttgcctaataaagagagagctttacgaattactcaagaaagaatacaatctgcagcaactagatactcgacacacactggacaattattgcaatctgcagtatgaaacatccattttgctagctgggtgagctcgtgagtaactgaattctgctccttttgtgtgcttgaggagagataggcatgtgcgtctagagaggacctatccctgactgcgaattggacaccccaaccctcaagaaggcacacttgggtcagattgcaccaacatcatcaagcacctgatcaaactaactgctcagagacccagctatagctttgttatccaggaagcactagaagtagcagatatactcccagtagttaggatgcaattgtgcccgttttgaacttgttttgatctatggcaagttctgaaccggatgcccaaggaaacttgaactaggaaaattggtttcaacggaaacatatacaaactgaagcaattttt

SEQ ID NO: 79246 - DNA, 926 bp, Zea mays
  Clone ID: MRT4577_172299C.1
gatcgagcacccctccagcccaggccaagccaacacacaaacaacacccggcggccaaaccagccgagagcgctgactgctccaccctccttcctgcttcgctcgccttggtggacaccgcaggccgcagcgcgtagcttgtaacgtttccggaggccgacatggagcgtggccgcagcagcacctcttcctcttgccggtccttgctgctcctcctcctcctcctagtctgcttctcccacggcgcggcggtggcggcggcggcggctcggctcctgactccactgcaggcagctgctgccgttcctcctctggctcttcgccaagcggagagtaatggcgccacggcggcagctgccgacgacggcctcgtgatgactgaggaaggtgacgctgacgccacgagcaatggcaacgacgacgacgagatcttcttcgtcttaaaaacgacgggcgcagaggaggaggcgtgtgggacggagggcgacgacgacgacgaggaggagtgcctacagaggcggctgctcggagacgcgcacctcgactacatctacacgcagcacaagggcaagccgtgagccgagcccgtgaccaatgcatctcggcctcggcctcgccggtttgcatggatggcttggtttgttcagagtgcgtacattacatgcatgctgctgggaagaagtcgatgacagacgatccatcaggctgctgggatcgaatctagtgtgtgcgtgttagctgttgcatgacatgaatctctctctctgtgtttggttgttttctcactgatgcctgatgtatataggccggccggtacggtgtgcaagctctactaatagtttggttggtttggtgtgagcaagcttaatcatggccgtcatcgatcgatctactcctcctccttaatcaaatggaacttgctcatt

SEQ ID NO: 79247 - DNA, 271 bp, Zea mays
  Clone ID: MRT4577_17229C.1
ggaacaaaacctttttaaattgataagcaacatccgggtcaattccagaaaaataaaccaggggtgggggtttttttcacataacataatacaggcttcaggtttctttagcgggcaagcccaatttttttcaaagccggggcccaccatgcttttcaaaaattaggtggtttggtcaccgggatttttattaaaaaacactttgttgggtggggttttgttcattaggattaaccccaattttaactggcccctgaccaaattttgtttc

SEQ ID NO: 79248 - DNA, 1605 bp, Zea mays
  Clone ID: MRT4577_1722C.1
tgggagtgacctgagtcatgaaaaatctggtggtccgatgttggctcttacaggaagtggtggtagcggtggtgcttctactggaactgggagtaacccgccttggtcggccggtggtggtgccgcttccactgggctcaatggtatcaagaaagattatgacgagacaaatctttatattggatacctgccacctacaatggacgatgcaggtttagtcagtctgttttcgcagtttggggagattgtcggctaaggtgatcaaggatcgaaacaccggacagagcaaaggatatggatttgtcaagtattcagatgtgtcagaggccaatgcagcgattgctgcaatgaacggtcaccatcttgaaggtagagttattgcggttagagttgctggaaagccaccacagccagcaccagcagtgtcagcacccccatcatatcctcctccggatcctacttcaggtggctattcctcccaatcctacatgggggcaccaccacctcctcctccagggagttatgctccagttccttggggccacgcgccaccctatgcttcatatcctccgccaccaccaggctctagtgtctacaatcctgcaccccctgcacctggccatgctgccccacctccatatgggatgcaatatccaccaccaccaccccagcagctccaatccctccaccaggcactgctacatcaagtgatggagctcagaactatccccccggtgtaacaccaccaagttctggctcatccactcaccctgttgcaacatcagtatatgcatcatctggcgcaccaaatgcaccatcgatataccctccaccaccttatagttattcctcatactaccctccccaccatttcagccaccacctccaccaccaccggctagtgttgatccctctcagagtattgcaactgcaccttggctaacccacagtgtggtggtgccaccaccacccacgagtgttgatccttctcagagtatttcaactgcaccttggttaacccacagcgcagtgccgccaccaccaccacctttgtcctccacaaccgaccagtctactgcttcctatggtgccgatgcagagtatgacaagtttatgtcagagatgaagtgatacgagcgaagctggatgattcttccaatgaagggcaaaaggcttgatctttcttggagcttataccaacctgatttatttcttgttggaagtttcggactcacatcttaaccttgctgtgtgctgttgtgaccgttgcagaggttgcatgcttaagaaggcatcaagtattactggctcagctggcatcagaatatttgctcatcttcttggaactattttaaggaatcttttactaatgcttttgttgtgatgtctattcttgttattatttgagattactctgtgttttcactttaatgctctgttctttgtgacatgtgttaatctcactttattattcatatatattattcatcatctgttcttcataaaaaaaaaaaaaaactcgatggggggcccggtacccaaaaaaaaaaaaaaaaaaaaaaaaaaaacaaaaaaaaaaaaaaaaaaactcgagggggggcccgg

SEQ ID NO: 79249 - DNA, 272 bp, Zea mays
  Clone ID: MRT4577_172300C.1
cgaccggtcgccgcggcgactgcgacgatgatggactgcgctggatgccgagaccccgtggaggacttgctgctcggcggcgcgagcgcggtaacgaggagatctcgtcgccgtgttctgcgacgatcgaggacttcggattgagggtctccatggagatgcttgtcgattttagcaatctaacttcagccaaatggctagcgatgaaccatggtcatctaggtcaacatccgaagcttgccgtgctaacatgaggagggataagctgaata

SEQ ID NO: 79250 - DNA, 187 bp, Zea mays
  Clone ID: MRT4577_172301C.1
cggtctcgaattccctgtcgacgcacacgtccactcccgatcagcacctgatcgctcactgttccaactcgatcatcccacacatgcgcgaacgttagcctctaccgctagctaggagctacccaatcggtcccgtacccatcacccacttcatcctcacccatctccactagtacggttcattctc

SEQ ID NO: 79251 - DNA, 162 bp, Zea mays
  Clone ID: MRT4577_172302C.1
cccctgtggcacgaaaattgccccaccaaaatcgcctcccccacccccgcaaaaatcgtcgtggccattatttcaacacctgcaccgcctcctcttatacaaaagactactcctccgactctgtttaggaggctgtcccccgcccggagggaggtggcgaag

SEQ ID NO: 79252 - DNA, 377 bp, Zea mays
  Clone ID: MRT4577_172303C.1
aacaaaccatgcacttgattcattcattaaaacaaacatgtctttttaagtaccaattgactggttggccactgcaataaacaagaccgttgctaggctgctggtacctaaaaatcacatttataaaaaatgcagccattatctgcagaatttcgcagttcatgtgctttacaactatgacgctagacattgagactaaaaaacaaaaataaatctgaaagaacaacacttcctgcacatcctttaaaagttcaggaacattttcaggtccactatataactcgaaatcggtcttcagtttgtgttctagcaatttcaaacagccatcgacccttgcataagcgattggtttcaccggacgcgtggcggacgcgtgg

SEQ ID NO: 79253 - DNA, 718 bp, Zea mays
  Clone ID: MRT4577_172304C.1
acgcctgcaggttctcggtccggaattcccgggtcgacccacgcgtccggagtattttgctttcctttacgaatttgccaaaatgggtgaagaagagagccagtttctgctttcattgcaagccatatctacaatggtacatttctatatgggaaccaaaggacctgaaaatcctcaagttgaagtattgtcagaggaagaaggggaagaagaggaggaagaagaagacatcctctctctggcagaagaaaaatacagacctgctgcccttgaaaagatgatagctttagttgctcttttggttgaacagtctcgctcagaaaggcatttgacattgtcacagactgacatggctgcattaacaggaggaaagggatttcccttcttatttcaacacattcgtgatggcatcaatataagacaaacttgtaatctaatttttagcctgtgtcggtacaacaatcgacttgcagaacatattgtatctatgcttttcacttcaatagcaaagttgacacctgaggcagccaatcctttctttaaattgttgaccatgttaatggaatttgctggtgggcctccaggaatgcctccctttgcatcttacattctgcagaggatatgggaggttattgaatacaatccttctcagtgtctggactggttggcagtgcagacaccccgaaaaagctggacacagctgggtcctccagatatg

SEQ ID NO: 79254 - DNA, 193 bp, Zea mays
  Clone ID: MRT4577_172305C.1
acaaaacaggggtttattattacaaacaagacgcgttgttggacaggacataccgggcgttaaggttacacacttaactctccccggggggggatgcatgggagggcggttaattaggtacgggcgccattattggggatgatgatagcgggactacttaacttgggattaggctttgggggcagagcgccgg

SEQ ID NO: 79255 - DNA, 659 bp, Zea mays
  Clone ID: MRT4577_172306C.1
aaaaaatccaaaaaaaaggaaaaaaaaaaaaaaaaaataaaaaaaaaaaaaaaaaaaaaaaaaaaaatcgctcaacgagagttcttcttggatcggggactcgatcgagtactcgatcgcggcgccacacattgcccacgccgcgccgactagctagctaccactctaccaccaacgaccaccaccacaccactgcacttcgtcccactgctcggcccgatcacgatcgatccagtgaagatgccgccagctcccagccccggcgcacacggcgccagcggcgcggcgacgccgcccagcaagccgcagagcccgctgcgcatcacgcacgagggcgagttctacgcgcgtctgctcaccagggagagctcgctgggcaacccctccttccgctactacggcgcggggaccggcgccgtgccgttcgtgtgggagtcccagccggggacgcccaaggacgcctactcctgccgggtgctggccgcaccgccgccgccgccgggtcgggccggtcataaccccgccgccctcctactacctccacggggggcaactccgcatcctccactgctcgctggctcttttccggttccagcgccgccgaggcccgtgaccaggagtgctgaggttatgacgatcctgctcctgcgggtgttgag

SEQ ID NO: 79256 - DNA, 2031 bp, Zea mays
  Clone ID: MRT4577_172307C.1
ctagcatttccccgtatttccgctgcgcgtctcagactctcggtcccgccacacacccccatgccgcttctccacctctcgctcccgtcgcaccgcctcctcgtcggcggccgaggtcggctgttcttcccgtcgtctccccgtcgtatctgcctatctgtcagggcggctggggatgcggcggtgtcagttgcggcgggggcttacggactccccttccggccggagggcgccgctcaccaccgcgagctctccgcggcagtggccgtcgtcgagcgcgcctgctgcctctgcgttgacgtgaagagatcactgttttcaggtggcagcagtattcttgagaagaatgaccaaagtcctgttacagttgcagatttcggagtgcaggcccttattagtttggagctccagagattgttcccatcgatacctcttgtggccgaagaggattcagcttctctaagatcatccaaagctgatgataatagcagtgatatacttgttgagtcgatttttagcgcagttgtagacaaagtgagtaataacggttcacatttaactcaagatgatgtcttgagagcaattgatagaggaggcaaggatgctgtctcatttgattcaaaccctgctacttattgggtgcttgatccaattgatggcaccaaaggtttcttgagagggaatgatgctctgtatgtggtgggtctggcacttgtggtgaatggaaaggtaacagttggagtgatgggatgtccaaattggaccaacgatgacatagtcaacaagaaagatgatagcgttgctgcatgtaatggtcgtggtattcttatggtctcccatattggctgtggcacatggtctaggcgtctgtctgctgatattggtcagttgaatacagctcaggatatttggaaaagatgttttgtggacacttgttcgatcgcacacatggcacactattgcattccagatagccaaacatgggatatgataccgttatctgctacctacgattcaacaacggatgcaactgatcctagaaatgagaatgaaatccttctcctgtccgttttttgtggcagcttgtgcaagtatctcacaattgcttccgggagagcctcggtttttgtccttcaagcactgccgacaactcagatcaagtcttgggatcacgctgttggggtaatctgcgtgcaggaggccggtggtcagaccagtgactggagtggagaaccgttggatcttgcagctgacctaacatcgcgcagaatcatctaccctcggggcggtgttctggtgacaaatggtgcgctgcatgacaagcttgtcgaaatgatctcagcaagttacaagtagctgcatagcttcacaggccaacacaccttgtcttttcgaatttgaatcattttaccttatctattcgatcttcagtgaaaccgtattcgatcttcagtgaaatcgtatttgatcttcggtgaaattgtatttgatctgcacattcagtatagaaaccacaagcatgttcacttgttcagatggcttccattgccacaagagttacaggaatgaaaacacactgtttccttgttgtaccgtgatgaactattgcttaagcaacttcattccagaagcaatacatgcaagcgaaggtcgtttttccaattttaaaaaaaaactccagaaccttttttttggcttcccaatgtgtgaatttgttgcgcagccctgatgctctactctcatggtcgtacgacgcccacgcacgcacacctgaatcctgcaaaaaagaaaaaaaaaacaaaagcgtgatgtttggtcaccaattcagactgatgaaaaagacgcggaaatagaccacaacatgataaccacctcacctcacgaatatacaaaagggtccatctaaatacgatcaaacactagccaatactaagattgtgtcctacagtttacttatatggttattcaaaacactgttttgcatcgtagcctgtagtatttatagagtggagtttgaattcacttgttcag

SEQ ID NO: 79257 - DNA, 468 bp, Zea mays
  Clone ID: MRT4577_172308C.1
gctctactgctgggtactggagcggcccgtcgtatgccgttcgtagctttggtccctgtctcgtgggggcccttttcgcccccgcccccgtccccagttgccggacatggcggggcagtcatcgtcgttcggggccttcggggaccactttctaagacacttcttaaacttcccctccgtggaactgcgccggcgctgcctggggccacgcgctcgccgttgttatcggtgaccaccctttaaggctcacccttagcctggacgccgtcgccgaagccaatccgggccgagatgccgttcagttcgccaaactctttccaccggtgttcgctttaaaaaaaaaaaaaggaccagccgctctttaggggcccaccttacgcacaggtgtttcaggcgcactcgattttctttgagggaggcatggtgccttaaccggcacccctttcccaggtgcgcgcgggaaaaccg

SEQ ID NO: 79258 - DNA, 806 bp, Zea mays
  unsure (1)..(806): unsure at all n locations
  Clone ID: MRT4577_172309C.1
cattgggtacctcgaggccggccggggccacacacccccatgccgcctctccacctctcgctcccgtcgcaccgcctcctcgtcggcggccgaggtcggctgttcttcccgtcgtctccccgtcgtatctgcctatctgtcagggcggctggggatgcggcggtgtcagttgcggcgggggcttacggactccccttccggccggagggcgccgctcaccaccgcgagctctccgcggcagtggccgtcgtcgagcgcgcctgctgcctctgcgttgacgtgaagagatcactgttttcaggtcgcagcagtattcttgagaagaatgaccaaagtcctgttacagttgcagatttcggagtgcaggcccttattagtttgggtaatccatagcaaaatttcaaagttcagatttgtgactttgtctaatgccatattttgccatgttgctattgaaagagctccagagattgttcccatcgatacctcttgtggccgaagaggattcagcttctctaaggtcatccaaagctgatgataatagcagtgatatacttgttgagtcgatttttagcgcagttgtagacaaagtgagtaataacggttcacatttaactcaagatgatgtcttgagagcaattgatagaggaggcaaggatgctgtctcatttgattcaaaccctgctacttattgggtaagtgataagttgctgtgtttttggttatcatanatcgagatctgtgaagttgattcataatttcatacattgggtatctgccagttcatatcataaactttatgcttt

SEQ ID NO: 79259 - DNA, 480 bp, Zea mays
  Clone ID: MRT4577_17230C.1
ggaaattcgttcccctttttctatctttttttcttttctttatttaaaggcgggcgtttgtttggggaggggggttttttctttttctttcctagaaaataaaaaatttaatatatatttaaatatattaaaaatggcaataaattcaaaggattttttttattgggggaaaatccctggtttaaaataataaaatatttttaggcatatatctattatttaaaaagatgggacttaaaaaaaaacatttttttaaaaaaatccctccaacggaaatttttaacctatcaaaaagcatgttccaaaacacttttttttaaaaaaacaactcattcttattttataaaataagattttcatagcaacttaaatttaaaatgggatccctcaaacaagatttatgcctcatcatgaaggcatcaaacccttgacaaaattttatgtaatcaagaaatcattaaatttatttatatccccatt

SEQ ID NO: 79260 - DNA, 805 bp, Zea mays
  Clone ID: MRT4577_172310C.1
aagatgatagcgctgctgcatgtaatggtcgtggtattctaatggtctcccatattggctgtggcacatggtctaggcgtctgtctgctgagattggtcagttcactacggcgcaggatatttggaaaagatgttttgtggacacttgttcgatcgcacacatggcacactattgcattccagatagccaaacatgggatatgataccgttatctgctacctacgattcaacaacggatgcaactgatcctagaaatgagaatgaaatccttctcctgtccgttttttgtggcagcttgtgcaagtatctcacaattgcttccgggagagcctcggtttttgtccttcaagcacggccgacaactcagatcaagtcttgggatcacgctgttggggtgatctgcgtgcaggaggccggtggtcagaccagtgactggagtggagaaccgttggatcttgcagctgacctaacatcgcgcagaatcatctaccctcggggcggtgttctggtgacaaatggtgcgctgcatgacaagcttgtcgaaatgatctcagcaagttacaagtagctgcatagcttcacaggccaacacaccttgtcttttcgaatttgaatcattttaccttatctattcgatcttcagtgaaatcgtattcgatcttcagtgaaattgtatttgatcttcggtgaaattgtattagatctgcacattcagtatagaaaccacaagcatgttcacttgtccaaaaaaaaaaaaaaaaaaaaaaaaaaaaaaaaaagaaaaaaaaaaaaaaaaaagcggcc

SEQ ID NO: 79261 - DNA, 374 bp, Zea mays
  Clone ID: MRT4577_172311C.1
cccacttttacgctaacgcttgtccggacatcagggcgttatctttgatgacagcagtcagcatcttgagaacgaaaccataagcctgcaatagaaaacatattggctgcaagataaactggcttcttgtatcaacactcgtcgaccgtgcaaatccaactaccctcactgatgacatataggatacttatactataaaaaatgcaaagaaaaaagagtacactaggaacaaattgcaacagggaaacgcgacttaaggaggacgagagaaagaacataggtgcacctacaaatgcaataccatagaaggcatcgggtgctgcaaaatacaagacagattccacttaatactacaagaaaaggatcaaacctct

SEQ ID NO: 79262 - DNA, 699 bp, Zea mays
  Clone ID: MRT4577_172312C.1
atttcctacaaaaaaatttctggctgaggttgataatgagtactatctcgaatatttgtcgtccaatagttcatctttgaactaaaacgcgacaaataaaaaagaacggagggagtatattacagccattagtgattaccgattggtcttccgcacatgagttcatgatgatgtgctcttgttgctattctatagcttgtgcaagtatctcacaattgcttccgggagagcctcggtttttgtccttcaagcacggccgacaactcagatcaagtcttgggatcacgctgttggggtgatctgcgtgcaggaggccggtggtcagaccagtgactggagtggagaaccgttggatcttgcagctgacctaacatcgcgcagaatcatctaccctcggggcggtgttctggtgacaaatggtgcgctgcatgacaagcttgtcgaaatgatctcagcaagttacaagtagctgcatagcttcacaggccaacacaccttgtctttttgaatttgaatcattttaccttatctattcgatcttcagtgaaattgtatttgatcttcggtgaaattgtattcgatctgcacattcagtatagaaaccacaagcatgttcacttgttcagatggcttcaaaaaaaaaaaaaaaaaataaaaaacaaaaaaaagaaaaaaataaataaaaaaaatatatatcag

SEQ ID NO: 79263 - DNA, 1666 bp, Zea mays
  Clone ID: MRT4577_172313C.1
agttgccgcaagcacagaaccaactgctgttttcactgatgtgggacgggtcaacggtacttcagcggaaaggtttagatctgcagtgagtggaagaagagcaaatgttcttggtgagattacccagattgatacacgaagtctacttcttgagaaagccaaggcaactgtccgcaaaaaattgcaggagttaaacattacatcatcttcacgatttgcagagagaagaggatctgaaggaaagctaaatccttgtggcaacaacataaaggtcaatggtgtcctctctgacaaacctggcaagggagtcaagctatgtagctcaagaagcatagaaatccaagtgcctgatactgatgacaagaatccagagcagcgccgtgtacctgtgtcaattgacgtcccagaccccgacttccatgatttcgataaagatcgaacagagaaggcatttgacagtgatcaagtgtgggctacatatgacagcgaagatggcatgcctcgcctatatgtaatggttcagaaagttctttcgatgaggcctttccggatccgcatgagctttctcaactcaaagtcaaatatcgaactggcacctataagctgggttgcctccggtttccagaagacatgtggcgatttcagggttgggagatatcaggtcagcgaaacggtcaacatattttcacacagagtgagctggactaaaggtccccgaggcgtcatcaggattgttccccagaaaggggatacatgggccttgtaccgcaactggtctcctgattggaatgagcttacacccgatgatgtgatatacaagtatgagatagtagaagtcgttgatgatttcaccgaggagcaagggctgaccgtcatcccgttgctgaaggttgccggattcaaagctgtcttccacagacacatggatcccaaggaggtcaggaggataccgaaggaagggctgttccagttctcacatcgagttccttctcgtcttctgaccggtgaagaaggcaacaacgccccgaaaggttgccatgagctggaccccgccgcaactccagtggaccttcttaaggttatcacggagctcaaggaagatgcggtgggcgcagactgctaaataggagaagggggcaactctgaacactgaagataggtagctggatgtctggacgatcagatcccacttggttaatgacacggtgcaagcacatgatggtatctaaagctctactacgtcatcttatttttggctgatgacttggacaatactgccagggcaagcagcctgcgtgacggagttctgacccttttaattcttaggcatttctaacatttgatttcatctctacacgaactgattaaatggccattgggaggagactgcacacggcatcatcggtgaggaggttagtcgacgggaggttgtttacttgtttgtgttgccgctctgtaatgtactgtaggaggcaagtctgagtcgagggacaagagctgcaaggcttggcttgcccgtgtaccccgcatttgtgtaccctgtttttttacttgtgatgttgtatttccttcggttttatagtaattcatcgccatgatgttgaacctgataaattgtagactctgaactctggtaaccatgtcggaaaatctagcggctttatct

SEQ ID NO: 79264 - DNA, 290 bp, Zea mays
  Clone ID: MRT4577_172314C.1
acccgggctgcctgggctgttggcactcacagacctggagcccctgggtgggtggtgtggagaggcgcaggcacagcgcggactctctggcctcccacccgatgctgctttcccctgtggggatctcaggggctgtttgaggatatattttcactttgtgattatttcactttagatgctgatgatttgtttgtgtatttttaatgggggtagcagctggactacccacgttctcacacccaccgtccgccctgctcctccctggctgccctagccctgaggtgtggggg

SEQ ID NO: 79265 - DNA, 291 bp, Zea mays
  Clone ID: MRT4577_172315C.1
ggcttgtggctgagatggaacatatagtggtccaacacaggaatgaccggcgtactgcactcacatcacgcatagggatgcgaagcccgtactgagcatgttcacagaacggtgaccatccttgcatgcctgttcatgacatctcctcttgaatgttgtgagtggcatgtgctgtgctccaaagcgaggatgaacacgaggacacattggagggcgacagcttcacccttgcacacagatgggcctttgtttgacagggcctactggaccaacaaagccacgggtccacct

SEQ ID NO: 79266 - DNA, 266 bp, Zea mays
  Clone ID: MRT4577_172316C.1
gtgagagaatgcataagtcacaggctacctattggccgtatgggcattagttgggggggtatctgggcaccaagtcctgattttgaccgcaactgttcgtgtaacctaatgtatcgagttgtgcaccaatgatacgctgcgtgccatgcatgttgcactctgtgtcatacggtacaaattatcgcctactttttgcgacaattagccattgcgttgcgtacagatgcatctgggcccaagttggccgtataaacaaaaaaataatg

SEQ ID NO: 79267 - DNA, 562 bp, Zea mays
  unsure (1)..(562): unsure at all n locations
  Clone ID: MRT4577_172317C.1
gcatctcgngcacaatgatatgggcacagacatcgtgctctgcacaatgccatgcacagcagactagcaggcagccagcatgagcaccgatcaaagagacttgtgtgtgtacatactatctctccgtctgaccatactcgactaggccctcctgtactttcccacttgcatcgaatgcacactagctactcaccgctatccacactgagaatgcaacggttctgccgagaacgcttctacctctatgatgtagatctcaggctcgtggaaactccaacagagatttgctgccgccctgtgggatttctgagaatcccccccccttgagcagatcgcatgcggggctgcccggcaatgtccagaggctgaagatctgatccagacgactactcctactcttcaccggactatcaagaggcatgctctgattctactctggaggatgttaccactgctacccaggtacgagaggagctacctgaactgtactctggcatagcacatagctctgtagaggctggctggactcatactaaatcatggcgtgtgctgcctatgtgaa

SEQ ID NO: 79268 - DNA, 257 bp, Zea mays
  unsure (1)..(257): unsure at all n locations
  Clone ID: MRT4577_172318C.1
tgncccctaacaggggccctactcagccctcctaatgacctccggcctagncatgggatttcncttccactccanaacgntccncatantaggcctactaacnannanactanccatataccanttatggngcnntgtaacacgaganagcncataccgaggccaccacacancacctgtccaaaaaggccttcgatacgggntaatcctatttattacctcagaagttttgttctgcgcaggntttttctgagcct

SEQ ID NO: 79269 - DNA, 414 bp, Zea mays
  Clone ID: MRT4577_172319C.1
tcgcccacgcgtccgcccacgcgtccgcggacgcgtgggtggtattcaaagttgatcattggatcacttgagagggattgagtgcaatccttgacagaaggaggtcaccacaacgtggagtaggcattggctgaaccacaggataaaaatcattgtgtctcgtgtccctattcattgtgattgattttcttgtagagttctaactttagcaactttgattttaattgcactaacactaataaaccaagttttgggctatttagtattgaattttataggatcacctatttacccccctttaggtgctctcaattggtattcagagccgtactcttcatttaagggtctaaccgctctaagagatggatcctaatggcaagggtatggttatcaacgacatggaggtgtcttttt

SEQ ID NO: 79270 - DNA, 725 bp, Zea mays
  Clone ID: MRT4577_17231C.1
ggtgcctatagtcttattaatggggtaatttgatacaaaggtcgagtttggttaggagctaacacggagttacaacagactgttttattagcgttacacgacagtgctgaagggggccattctggttttccagcgacataccgtaggcttaaggcgacctttgcttggcctggtatgaagaaacacactaaggaatttgtacaatcctgcaccacctgtcaacaggcaaaacctgatcggggaaaatacccagggcttcttcttccccttccggtcccagcgcatgcatggcatactgtcactctggacttcattactggtttaccgagatccaaacactacaactgtattattgtggtggtcgataaattttcaaagtatgctcacttccttccattgggccatccttttactgctttatcggtggccaaattatatctgtcggaagtctatcgtttacatgggttgcctgttgctatggtgtcagacagggatccagtgtttactagcaaattgtggcaagaacttttcagactggctggtaccaagttgtgtttgagcagtgcatatcacccacaatcggacgggcaaactgagcgggtaaatcaatgcttggagacttatttacgttgctttgtccattcctgtccaacaagtggctgtcatggttggcattagccgagctttggtataatactaactctcattcaactttggggtacttc

SEQ ID NO: 79271 - DNA, 216 bp, Zea mays
  unsure (1)..(216): unsure at all n locations
  Clone ID: MRT4577_172320C.1
agtttgaaaggaacattagtcattagttatattgatacttgaaaacttccnacagggttgtttggtttcatttctacttctttcatttgtgtaatttccaaagttcaacagagtagccaaagcatgttcgctttctttgtgactgacaaagtttgattttgacctttgtaggggtcaagttttgaatttgtgtatcagccttgctggaaggagttt

SEQ ID NO: 79272 - DNA, 147 bp, Zea mays
  Clone ID: MRT4577_172321C.1
gacagagctgaacgatgcagccaagcgcatggagccgtctctgagcacgccagacgccacggtgactcgagaagatgccgacccgctattcgtgcgcgcccaccgcggcgcgcgcagggctggtgccgacgtgcgcgctcacagaca

SEQ ID NO: 79273 - DNA, 927 bp, Zea mays
  Clone ID: MRT4577_172322C.1
atgatgatcaaggaggcaagatacgtcgatgatgcattgaatgacccaatccacgagcctcaaaccgtggctctcaaagcaacgaggagcaaggaggcgctacctagcaaggtggcgcaagttgaggcggccgggcttaacgaagaagaaatggccctcatcatcaagcggttcaagacaacactaaaaggtcgcaaggagcatcccaacaagaacaagacgaaggggaagcgctcatgtttcaaatgtggtaagattggtcattttatcgctaattgtcccgataatgatagtgaccaggaacaagagaagaagagggaaaagaagaagtcttacaagaaggctaagggcgaggcacaccttggcaaggagtgggactcggattgttcgtcgtctgactccgacaatgaaggactcgccgcctcagccttcaacaagacgtccctcttccccaacgagcatcacacatgcctaatggcaaaggagaagaaggatagattgttagaaaagcaagaggatcttttgtatgaagaacatgataaatttgtagaggcacaaaactctcttgctttagaagttaaaaggaatgaaatgctttcatgtgaattgtctacatgccatgaatctatctctagcctaaaaggtgttaatgatgatttgaatgctaagttagaaatagctagtaaatcaacctctcgtgaagaacatgttatgatttgcaataggtgcaaagattttaatgttgatgcttgtagtgaacacctagtttgcatttctaaactaaatgatgaagtggctagtcttaatgctcaacttaagactagcaaaaatgattttgataaactaaaatttgcaagggatgcctacacggttggtacccctcaattaaggatgggcttggtttcaagagggaagccaagaacttaa

SEQ ID NO: 79274 - DNA, 1164 bp, Zea mays
  Clone ID: MRT4577_172323C.1
atggatcctaagggaaaggggatagtgatcaacgacaaggagaaggagtccttcatcaatgagccaaaagacgacaagcctactgactcgggctcaagtcataagaaaaaggaagggaagaagaagaggcgcatcaagaagatcgtctactacgacgacagcgacgagtcctcttcttcccaaaaggacaacgatgacaacgactacgagaaaaagaagacggttaactcgaacttttcttttgattactctcgtatgccgcatagttcaaatgcacatttactctccattccacttgcatcattgtgcagggatgaataccataaggtgagcggcatggataacgctaagcagatctgggacaccctcaagatctcgcatgaggggaacgatgtcaccatgctcaccaagatggagttggtggaaggcaaacttgggagattcgcaatgatcaggggagaggagccaacccaaatgtacaaccggctcaagaccctcgtcaacaaaataaggagctatggaagcacacaatggacggaccacgacgtcgtccgcctaatgctaagctctttcactgtccttgatccacatcttgtaaacaatattcgtgagaatcctaggtacaccaagatgacgcccgaggaaatacttgggaagtttgtaagcgggcggatgatgatcaaggaggcaagatacgttgatgatgcgttgaatggcccaatccacgagcctcaaaccgttgctctcaaagcaacgaggagcaaggaagtgctacctagcaaggtggcgcaagtgaaggcggccgagcttaataaggaagaaatggccctcatcatcaagcgtttcaagacgacgctaaagggtcgcaaggagcatcccaacaagaacaagacgaaggggaagcgttcatgcttcaaatgtggtaagattggtcactttatcgctaattgtcccaataatgatagtgaccaggaacaagagaacaagagggaaaagaagaaggcttacaagaaggctaagggcgaggcacaccttggcaagaagtgggactcggattgttcgtcgtctgactccgacaacgaaggactcgccgtctcggccttcaacaaattgtccctcttccccaacgagcatcacacctgcctcatggcaaaggagaagaag

SEQ ID NO: 79275 - DNA, 118 bp, Zea mays
  Clone ID: MRT4577_172324C.1
ctgacgcgtccgaccgtgaagcacacctattagctatcgcagcttaacgacgactgcgaccagaccgattatgtcaagctgctgaatgtactgggttccggatcacaacgctaacttg

SEQ ID NO: 79276 - DNA, 101 bp, Zea mays
  Clone ID: MRT4577_172325C.1
cccacgcgtccggacacgcatcctgtgtggcctgtgtcctgcaggcagcgcggcgaccgagcgtagcttagctagctgcccctgctccagaccaggtgcgg

SEQ ID NO: 79277 - DNA, 1010 bp, Zea mays
  Clone ID: MRT4577_172326C.1
tgactaaaattccaagtttatgcttgggctaagtttatattgggtattttatacccatgggttaacatgtatgggtgaaagtggaacgttctaatacccgtttacccattgggtcaagatttttgaccaataaccgacccacggataaaatatttagcccacatacatactttaatggagtaaatattcatcaggtcgcgggtacccattgccatctctactgacgcatggtcaggccgcatggtggcacagaccgggtgcgacaacgacacggaccacggagatgactcgctcactcgcccctgctgccggtccgttgcgcgagaggcgacgcaccggcgatgacggtggcacaggtgagcgtggcgccgtgggtgggccgggcggggccgcggcatacagcgtgagcctctggtggacggcttcaacgtggcggtcgtggtgacaggctgccgccggagggcgggcggcggtgccccacgctgggatgcgccgtggacctcgctgccgactgccccgcgcgcccgagcgccatgaggaggatgcggcgctgttcaaggccgagtgcccagacacgaggaccaacgccacggacgtcgaggtgacgccgcaggaccgcgtcaagcccgttgagatcaaggttgtcttgtgccccaagcccgccaccatcgtcgcgggccacctctagcgcgccgcgccatgcatgcgtcgtcctggtgggcgcggcggtggtgtgccggtaccgcaaggaggaggcctggaacgagtcgacgtgcccggtgtgcctggccgacttcgacgacggcgaggtcgtgcgggtgctccccgagtgcatgcactacttccacgccgactgcatcgacacgtggctgcgcgggagcaccagctgcccgatgtgccgcgccgagaccacgcccacgcccacgcctagcccggcctccgtgcgccaccacctcgagctctccgtctccctcgaggagatcctcgtcgcgacgtgagcagcgccccga

SEQ ID NO: 79278 - DNA, 366 bp, Zea mays
  Clone ID: MRT4577_172327C.1
cctcgaggccggccgggccgggtttcccttccatctccgccgccgccgctttttcctcctccagagtcgcgcatcttcctcctcctctccagtcgcggggtcgcgtcgtccccttgcgccccttcctcctcgcagtcacggccgcgcggtacgtgctccgcctcgtcgtcgccgtcgccgtcgccgccgccaagtaaagagagacagggaggcgcagtcgacagaagcgtggtgaggagggagtaaagcggaggaaagagggaaggaagtgatactgtggccgccggtatactaccgtgtcggctctgggaacttccaaggggatcctggagatcgccaacatacataacgcacatcatacgcgcc

SEQ ID NO: 79279 - DNA, 531 bp, Zea mays
  Clone ID: MRT4577_172328C.1
ttcggccggggtgtattccttcgcttccgtaggtcgggtccgcagcctccccatctctcagatccccacctgctccgccgccggccaccgcgttgctcccctcggcagccaggtacgcttcgggctctctcctttcctttaccataaacctagccagccgacgcgccgaatgcatcgcctgcgtcgttgggggtctccgtgcgtcggatctgtgctggcgcgcgtgtgatgcgcctttgtttttctctgtttcccgtcgatgtgatggagagtaccctcgatttaacgtgatccccgcgattttgcatgatgttctcttgtccgactttggtgttggttcgctctgctgcctatcttgtatcctacctattccaggcattaggttaagtggttcaaactctctggcttgttgaattgtgccgtgcggtgtcatggttaactatgtctctcggattgctgctaccttgcgatcccaaaacattaggttgggactttggcgtattagtgaatgcgaaacagatgtgaagccat

SEQ ID NO: 79280 - DNA, 267 bp, Zea mays
  unsure (1)..(267): unsure at all n locations
  Clone ID: MRT4577_172329C.1
tttatttacaaatttacaacatttgcttactacacacagacacnaccaacttggggggggccctctttcaaatcaactggccccacctacttgactgaactgcctactttaaaaaatgataaaagcatcatttcaagccaatctcctaacaacatccagtcaatatctaatgagccatctaaagatgcaataagatcaacttctgcttttggtggttctaataaaacttctttaagctcttcacctatccatttaatggcaaacaat

SEQ ID NO: 79281 - DNA, 385 bp, Zea mays
  Clone ID: MRT4577_17232C.1
gaacggatcatcttcatctcatctcatgggaccaacttatcaggaacctgtttcactggttttatgcagttactgttagctctgcagtgcaaatcagatcagcagagtccaacaattcctgcaggttcatctgaatgttagcttctgatgctgtttattactataagtacgtgttattagtactatcttagtcaattaggtgagttgatgttaatcagtttcgtagtcggttgtattcacatgggtgcagttttcagacaagttttcaggcacctgtgagtacgtcaacctgccttctgcgtctgtagtctagcgcccagccgtactagtttttatgtaaatctgcactggcatgggaaataataaccaagtttcgtttggcctt

SEQ ID NO: 79282 - DNA, 468 bp, Zea mays
  Clone ID: MRT4577_172330C.1
caggcaggatacatcggagggcgcggcggagagcacattcctgggaacccgactggctggactcggcgccactacaagggcgcatcgagtaccggaaaggattcgggttgggcggctaggcgaagcctgctacgaagaaggtggcgaagacatgaacctactatgacggggcggtgtggatcccctgcgccgtggcgcacgactacctggacaggtcactgatcggggactacggcttcaacacgttcggtgtcgggaagccagcgaagtacctgacagttggagttgtactagctggaccagaacctgactcaagaatgaggacggcgggatcatcgtcaaccggtttgagtgctctgaggcaagtgcaacgggttgaagccttacagcgaggagttcggggcttcagctaggtcaaggaagttgcaagcagatggcacgtgacgttgggacctatgctggccacct

SEQ ID NO: 79283 - DNA, 1666 bp, Zea mays
  Clone ID: MRT4577_172331C.1
gaccttggaggccggccgggagcggcggcgaggcgcggagaatccgtcgagagttggggagaagaggaaggctcccgacgacgcggcacagggggccggggaggacgaggaggaggcgttcgacgacgagagcaagctgctcaggaccgtgttcgtggggaacctgccgctgcggaccaagcgcaaggtgctcatcaaggagttcgcggcattcggcgagatcgagtccgtcaggatccgctccgtgccgctggtcgacaccaaactttcgaggcgaggagccgttttacaggggaaggtcaatggattggtcgacaatgtgcatgcctatattgtcttcaaggatgagcagtctgcacgcgctgctttgtctcataatatggcactgttcggcggcaatcacattcgtgttgatatggcatgcccccctcgtaagaaacttcgaggagaagggcctctatatgacagaaagaggactgtgtttgttgggaaccttccatttgatgtaaaggatgaagaggtctaccaggcgttctgcagttctagtggatcagaaggtgatgttgaggcaatacgtgttatcagagatccaagttcaagcctagggaagggtatcgcatatgttttattcaaaacgagggaagctgctaattctgttgcacgaaaacgggatatgaagataagagccgcgtgtgaggctcacccatgcaaaaccggtggacgcagcaccaaagaaaacagaagtcaagaaaaggagccgcgtgccaaaccacaaggaggtttcgacaccaggcagcaaatctaatgaaggcagtgacaaagccaaacgtaaagcatcagtgctgtcgtatcaaggcctgaggtcgagcaaatctggtgttgtgaagaaggtgaaagtgacccagcaacccagcaaccaagggaagcagaggaaaactgatgaaactggagcaactgctggcaaagctaagcgacccgctgtggctgcaagaaaagcaaagcagctggccaagaaacgcaaggtggatgcatcaacccctgagaatacacacaggagcaagaaaccaaggaagtaagttgtccattgcgctggtcgtttgcccttgcttcgcattgtaacaggagtttcactaaatcaaattctggacgatcttgtcagatgattgtgttactaggtagaggcaatgtgcgacctcaagtcaggttagggcaaatacaagagcgctctcgctactgtaaaccttgtaaccttatttggcacttgttttgttttactatttccctccacaaacatttgcattttactatctccggcacaaagtttcttcctaagtcaaaatatcggaattacaattacaactctggatcttactcttttgcttgctctatctactgcggcatattcgatcagccaactagtctatgaaatgtacatgatcgagtacagtatctctttgtgtgctatgcaatcttgcatatcgtttctggcaagctgtatcaatgccattccctgatgaccccttcttgaaattatatactagtggctaaagggtctctagctgagttggttaggtggtttgagtagcactcactagggcttgcgttagactccccgtgttagcgaatttcaggttgaggtaaaaaaaaggcttcttgactgtcccac

SEQ ID NO: 79284 - DNA, 569 bp, Zea mays
  Clone ID: MRT4577_172332C.1
caagaatctggtgtgacaatattggagctacctatctcacagctaatccagtctttcatggtcgtgttaagcatgttgaaattgacttccattttgtgcgcgaaagagtggcaaggaagctcctggatgtgagagtgatttctacaaatgaccagatagcagatggttttacaaaagctctgacgaagaagaagatggatctgttcagagacaatcttaacttatgcaagttatgattgaggggggatgttagataatattaagaatgtatctgtaaagtaaggaaagggtgatgcgcctgtgtaaagataggaaaggatctgttcaggatctgttcagttaggaaaggatctgttcagttatagatataatctgaggcaatcaatcagatctgttatagatagaatccaatcaatcagatctgttatagatagaatccaatcaatcataatctgttttgattgatttgattgattgctggcgccagcccctttgtaatctgatgatggtattccatctcctataaatacatacaggcggcctactacggtaggtaacaaacgcttccc

SEQ ID NO: 79285 - DNA, 326 bp, Zea mays
  Clone ID: MRT4577_172333C.1
gtgttaagagccacacctgctaaataataaaatccgtttatttaagactcgactgaatgtttacgggtacacagctgacaaaaaaagcttaattgattttcaatatggccataggatcacatttcaaagagagtaaactgcagcccaatttttcagagcatgcagtaccttgacactttcatggattcaggtcgagaaacttgcaaactgaggccttaatgggtgtactagcattttagggcgcaatgcaaaactcagaagttcaaatcatactttatcaggtgtgatttataagccgtaaaaaaacgggaacttttttttgattg

SEQ ID NO: 79286 - DNA, 523 bp, Zea mays
  Clone ID: MRT4577_172334C.1
gaatctaggattttctagtgcgtgtgcccaccctttttttttttttacagaaacgaacgccacagggggacttttttttaggagttctgttcattttaaataaatcatcacatcattgtgagacatttgttccatttatcccatatttgatttgggagacgactgtctttaccttgtacgaacatgttcacaacattcttcatgcgccttattttgtggtacctgtttttgaccactccttgtatatttttactgttgatatccatttcagtttttatggctacgagctcttcgatcatcgagcttgcacgaagtaggtcctgttcacactcagtgttcccgactaccccttctttagcacatgccttgttctatcgacttttatggtgtgattcatgtgtatcgttccaccgtgatccctatctattattcaattctccttatgctttcgatgagggcttttgaatatttgctttttgggcctttaggttgcatggtttatgttttattcttttttgtttac

SEQ ID NO: 79287 - DNA, 757 bp, Zea mays
  unsure (1)..(757): unsure at all n locations
  Clone ID: MRT4577_172335C.1
ccggccggggctcaccacgagcctggcttcttcacgtcacctcctccccacacattttccctctcaatccatggacaccctccctgctctgatccctccgatgctcgccgtgggtgccgtttgctgcccctacgccaacgttggctgatgatgctccctgcccgcccaccattcccctgcgtccagccggtacctccgccgagcctctccttccctgcacctccccttctatggtgttcgcccaacctccacttccctgttccagccatctcccatggccgccccaactccttccatggacgccaatagcagcagcccctcgctgccggacatcctccggtagtcccgcaccatccgcacccgtatggtgtttgataaaatgtccaagtgaagtatcgtgtcatggacaaccctattagcgtagtgggatgtttggtattttgtgcagcccatccacgacaccgtcgaccctcggagcgaaatccgtggaatctgagtgaagaagaaacaaagcacgtccgtcgcttactagctgctgggtgaaaggattgaatcggctatcgtggttgtttagtgccgatcgagtcaactttagtcatggtacgttaattgatcacgtgatgtggaagacaaggtttggattgatctcaagataatgctgatggacgaagctaaagtgngtgaatcaaacaagtgccaggatgagagatgctcaccaagtggtctccatctaaacacactaacttagtgttatccc

SEQ ID NO: 79288 - DNA, 1534 bp, Zea mays
  Clone ID: MRT4577_172336C.1
aatcctaatccactatggtattatcatcaccataatattagccacataaaaaggtcatccagtattaaatgataatactgtccagatttggtcggaattcgattactcacttcaaaactccataactgaagatttaggcatccaaaacaggtgatccaagaatttctagaaagcttataaaattgtctacaactcatttataaacatcttaggttgattcaatatatatcaaagtcagtcaatacaaacaaacattgctgtccagatttggacagattcagtcatcacatttcaatcaaccataacttgacttctagaccaccaaaaagggtgatccaaaacttgttggaaagtttaagaaaagtactacaacttctttataattactaagaactgattctaagtttaacttaatcaaacaagacagttttcgaaatctgtacagaatctggatagattcgtatactgtacttggaaaaatcataactcctaaactactaaacctgtggtcatgaaatttatacacaagcaagataaagaagtgatctacaactttcctatataacatttctacagaaaacatggtttacttcactaaactacctgcatactaaaactgaacacagtccaaacagcaagtgttaacatgttctttgtataagtaatttatccataaacaaaactctatcctttatgatttattaacacaatcatatcaatgcatatgcgttcaccaagcatatttcatacaacatatcatcacacctatcactagactgaatcatcgatcatatcctaatcaatccaccatacacgctaactagcgaggatagcctaagagctcaccatgactaaagttgactcgatcggcactaaacaaccacgatagccgattcaatcctttcacccagcagctagtaagcgacggacgtgctttgtttcttcttcactcagattccacggatttcgctcctcaacacacataggcacataaacacaatttatgttagcaaatatacgtcgatcgatgaaacggcaaagcaagaatgaaacctcaccgagggtcgacggtgtcgtggatggactgcacaaaataccaaacatcccactacgctaatagggttgtccatgacacgatacttcacttggacattttatcaaacaccatacgggtgcggatggtgcgggactaccggaggatgtccggcagcgaggggctgctgctattggcgtccatagaaggagttggggcggccatgggagatggctggaacagggaagtggaggttgggcgaacaccatagaaggggaggtgcagggaaggagaggctcggcggaggtaccggctggacgcaggggaatggtgggcgggcagggagcatcatcagccaacgttggcgtaggggcagcaaacggcacccacggcgagcatcggagggatcagagcagggagggtgtccatggattgagaggtgagagggaaaatgtgtggggagaaggtgacgtgaagaagccaggatgcgtggtgagcccc

SEQ ID NO: 79289 - DNA, 225 bp, Zea mays
  Clone ID: MRT4577_172337C.1
aataagggggaacaagccgagctcttgttattttctttaatttgaaagtgacccgttgaaaaaaatattgcatgtttgcgagtgcttttgtgccttactgcacatgtatggacgctgctcttactaatgcgcgctttcggttgggaagcaggcctccacctttttttgtttcagaagaggacgcaccaggcgttgatcactctccctgccccggcggccgttcga

SEQ ID NO: 79290 - DNA, 373 bp, Zea mays
  Clone ID: MRT4577_172338C.1
ccacttctgacgaggcggcgtgtgagctacctggagctggaggtccagttctttggctatgtggcaagagggttgtggttagtaatttattcgatcagcaaccaagctccaatactgggagcctgcaacgacaacgtgtggcagacatggaactggacgcttcagctcctgagtcaccgactagttgtggaactgggaagaagctgtcctcccatgccgcagaggaagcgaagacatggcacccgtggctgaccggtacgcggcagtttatgcactgtcttcctcaaggcgaggaggtgttctccgtgcattctgcttgccgacccctgagctacggtgatggaagcatgccttgcaccacggtgtggaacgc

SEQ ID NO: 79291 - DNA, 250 bp, Zea mays
  Clone ID: MRT4577_172339C.1
ccggtccatgcgtttgtagagtgcagacacttagggggcccctacacaaatgttcatgcgggttgtgttcaacccgcgaaaatcttatgttggaaaggtcacagcggaattatatcatcatataacatattcgaaactgcaccactggtgacaccttcatggtggtctacgccgacgccttttttattagcaactaccacgttggtcaatcgggaacattgtttgttgtatgtttgcacgaccgtaccat

SEQ ID NO: 79292 - DNA, 1286 bp, Zea mays
  Clone ID: MRT4577_17233C.1
tcgcacggcctcaaggacggctggtacgacggcgtcagcatcttcctcgccgtcttcctcgtcgccgccgtgtccgcggtcagcaaccacggccaggccaggcgcttcgacaggctcgccaccgagtccgacaacatcgccgtcgccgtcgtccggggcggcaggaggcaggagctctccatcttcgaagtcgtcgtgggcgacgtcgtggtgctcaacatcggcgacgccgtgcccgcggacggcgtcttcatgcagggccacgcgctgcaggtggacgagtccagcatgaccggcgagccgcaccctgtcgacatcgacgccgagaagaacccgttcctcgcctccggcgtcaaggtcatcgacggatgcggccacatgctcgtcaccgccgtcggcacggacaccgcctggggcgagatgatgggcagcatcaccagggagaagaccgaacccacgccgctccaggagcgcctcgaggccctcacctccagcatcggcaaggtcgggattgctgtcgcggttctcgtcttcgccgtgctcaccgcgcgccacttcacgggcagcaccagggatgagcagggcaacccgacgttcgacaggcaccacgtctctttcaacaccgtcttcaccgcgctcgtcggcatcttccagcaggccatcaccatcatcgtggtggccatccccgagggcctcccgctcgcggtcacgctcacgctggccttctcaatgaagcggatggtcaaggagcacgcgctggtgcgcacgctctcggcgtgcgagaccatgggctcggtaaccgccatctgcaccgataagacgggcactctcacgcttaatcagatgaaggtgactgagttctgggtcggcaccgaccgacccaaggcggcggccacggtcgccgccgccgtcgtcagttttctgcgccagggagcagggctcaacaccaccggaagcgtgtacaagccggacaacgtctcgccaccggagatatcgggcagcccgacagagaaggccctgctgtcttgggccgtggcggagctcggcatggacgccgacgcgctcaagaggagctgcaaggtgttgcacgtcgaggcgttcaactccgacaagaagcgcagcggcgtgatgataagggacaacgcgacgggcgcgctgaccgcgcactggaaaggcgccgcggagatggtcttggcgagctgctctgcctatgtcggttcagacggcgcggcacgcgaactcgacgcgggcaagaggaggaagctccaagagatcatcagcgggat

SEQ ID NO: 79293 - DNA, 2808 bp, Zea mays
  Clone ID: MRT4577_172340C.1
ggcttggtaagtttgtcatgctatcggatgtattataattcaagttttcatccgaccataaagaattgatattttgagcatatggagtctgaactaaacatgctctccatggtccgacaccccatacgataagggactgtaagcacactgtattgtcgtaattactgcttatccttcggcttaaaaaagcctgcttagtctttgaaagatgttttggactggtagatatcactcgggatgttttagttattgggatagcaattagtaattggattagtaatttgaatgtgactgcacagttgggggctccttgttgcaaagttttgtgccgttgctgagacaagacctgaggacaacattgatatttcttttttttttcctgtgaagcgagcggtactccggggagttatcaaacgcattggcatattgtgttcatgctcttcatgcaaaggccgaaaagttgtttcaccttactactttgaggtgcatgctgggagtaccaaaaagcatccatcagactacattttcctggaaaatggaaataatctgcatgatgtgttgagggcatgtacaaatgctacattagacatgttggagcctgcaatacgaaaggcaataggcccagcacctcaggagagaatatccagatgcaaatcatgcaaaagttcattcagtacactccgcagtgggaaatttgctttgttttgtgattcgtgtcttgagtccaagggagctaagaataatatcagttcatccaaagttgggcgaagtcaaacttcatctgccaaggtatataagagtgcatcaccaggagcaaagtcttcaagtgtaggaaggcttacaagaaaggataagggtatgcataaggtcgttttcatgagtggcattttaccagagggcactgatgttggttactatgttggtggaaagaggttactggatggatatataaaggaacttgggatctactgtcattgctgcagcacagtggttagtccttcacagtttgaaggtcatgctggtcgagctgctcgacgcaaaccttaccacaacatatatatgtcaaacggcgtttcactacatgagctgtcaatttcactcttgaaaggtcaaaagatgtcaaacagacaaagtgatgacttgtgcagcatttgttcagatggtgggcaactactcctttgtgatacctgtccaagagcttttcatagagaatgtgttggcttatcttctgccacaaagggaacttggtgttgccgatattgtgagaatagacaacagagggaaagttgtttggcatataacaacaatgcaatagctgctgggagagttgaaggagttgatgccttggaacaaatattcacgcggtcgatacgtattgctacaacacttgagactggatttggtggttgcgcactgtgcaagctccatgatttcagcaaaaagaaattcagtacccgaaccgtgctgctttgtgaccaatgtggtagagaatatcatgttggttgcctcaaggaacataatatggctgatctgacggcattgcccgagggagcctggtattgttctacggactgtgtgaggattaaccagacactgcaagatttacttaacagtggtggagaacctgttcttgccatggatttagatgtcattaagaagaaacgagaagtgaaaggttttaatgatgatgatgctgaccttgatgttagatggagagttttaaaggacaagagctcagacgacagcaaactagtgctctccaaagcagttgccattttccatgaaacttttgatcccattatccaggtttcaactggacgggacctcattccagccatggtttatgggaggagtgcaagggaccaagattacacaggaatgtattgtactgtgttaactgtgaacaatattgtagtttctgcgggtcttttccgcatcatgggtagtgaaattgctgagctgccgttggttgctacaagtagggatagacaaggcttggggtatttccaagcacttttttcctgcatagaacgtctgttgtcatctttggaggtgaaacattttgtgctaccagctgcagaggaagcggagtctatctggactgagcgttttgggttcgcaaagataagccaggatgagctgcgcgaatacctcaagggtgggcgaacaactgtgtttcaggggacgtcaaacctgcacaagctggttgcgaaacttgaatgctagttatgtgagaattgtatggcaagagcaaggacatgaagctaagaagcagctcattgtttgtgtgcctctgggattgatgcagacaggaaagaggcaccctgatccctttcttgtaaatgttggtgagcatgttggcattggcatcttgatctgtttccataggtaaggtgaagaggattgtgtaagataaaagggacaagctgtatgtaaagacaagccaaagctgagtgaatttcaggcaccttattgtgtggagggtcctgtgtttgttgagtaggcaacgctcgggctggtgtgagatgatgactgcatttgtgttgtgttggtggtattttcactgctgacatgactgttgtatcggatgacatcttttctgttttatgacagtggcagtgtgatactaggctgttaggaggggacgggggaggtcaaacccaacgtacatcatgagtggagctgctgtaatgtaacagaagtattgcacccccccccccccccccccccccagtatgctttaacggagatgcacgttgtacccgtggtaatatatataaatttgcgttgtaaagatcaaaaaaaaaa

SEQ ID NO: 79294 - DNA, 658 bp, Zea mays
  unsure (1)..(658): unsure at all n locations
  Clone ID: MRT4577_172341C.1
ccacgaaagtctaccagtgacgcaccattgttgctagcagcctaggacggccagactaatacctggtgggggaagacagactcctgctccagcaagcggtggtagtaggaagacaattggtgcgagaacctggttcgctaggcccccaaactcccgcaccacggcacccacgcttgtactccacgagacgggtacttctccacataccactgcgcggttggatatagttggccttccgagattttcgcactagaccttgcagtagtttcttctctacgacttctgttctacactcgagcgtagcactaagcacttgccagtcgtaggtgttactaaggttggcctctggagtgtgcgttaaagtcgctgtgggttctggtgaagtactactaaaaatcgcctatactaaaacgagggtacaacggacgggcatgcatcccaccccgacaacgagtcacacaactgttcggaacaaacagaagggggggacaacgacgcgagggacaacagtggtttcgcgcgactccgcttaggtgagtgtcaagggatccgttctctgcgactgaacgtccgcccgaggttcttttntaccgggcgaaatcagtacaaccaagggtacacaggtnactaccgctgctatacggaccggccatccgac

SEQ ID NO: 79295 - DNA, 169 bp, Zea mays
  Clone ID: MRT4577_172342C.1
tcttcctggatgaaaatgctaataagacggtcattcaatacgtacacttaggaaagatcacagactttttctacagaatagagggactaaacaaatacaataacaatgatcatcataaagccaacaatccttaccatcactaacatagctttaatcttccaaacatttt

SEQ ID NO: 79296 - DNA, 307 bp, Zea mays
  Clone ID: MRT4577_172343C.1
aaaaaacccggggggccagttttaaaaaaaaaccatttggtaaaaaaggggcgggaccaaaagggaccgggccccccaggcaaaaaacacagtaaaaacagggggggaaacaaagttggtggtttaaccccggggtttaaaaaaaagggcaaaacccccgggtgaaaaaaaaaggcccccccggggcaaactttaccaactgcgcacaaaaaataagcccaggggcaaagaaataaagacttttccctttgggcgggggcctcgggttcccaaggggtttaaggcgggcgggcaggggggggaaaac

SEQ ID NO: 79297 - DNA, 473 bp, Zea mays
  Clone ID: MRT4577_172344C.1
taaaaataaaaaaaaaaaaaaaatacaaaactaaaataaaaaataaaaaaaaaaaaaaaaaaaaaataaaataaaaaaaaaaaaaaatttaaaggtaaaaaaaaaaaaaatttttttttacttggggcggttccccctttgggggaaattttccaatggtcctttacctggggggccctttaaattttcctttttgggggggcctcatttttcccttgtgggggaattcgcttttaaattaccctggcttaaaattttaaagggcgcatgttttgaaaaaacctttgttttaaaaaatttaaaggttttaaaaaaaatccctttttaacaaatttggctgttttttaatgaaaggggggaaacccaatggctttccaaaaaattcccctccctaattgggaaaaggcccacccttttaggtccccttttttccggggtaatttggggtttttccccttggtgccctttctttt

SEQ ID NO: 79298 - DNA, 217 bp, Zea mays
  Clone ID: MRT4577_172345C.1
aaaaaaaaaaaaaaaaaaaaaaaaaaaaaaggggaggggagaaaaaaaaagaacaaatataaaggatcaaaaaataatggtaacgcgtatcaatgcaaaatatatagttattttaatagcgattcattaaatcaaattcattggaacgtcgtttttgaacaataatttttgggtaaaacaatttaattgcgggggtggatatacttctttcacatag

SEQ ID NO: 79299 - DNA, 766 bp, Zea mays
  unsure (1)..(766): unsure at all n locations
  Clone ID: MRT4577_172346C.1
gatagtgagatgaaaaaataggagaaatttagaggtaaccggatagtctaatttccaaaacaaaataccccacacggccacacacaacagaggcgacgtgcaggcggcatcacactattgcacacctcgaggccggccgggggtactgttcgcgatgataggaccacgccccagtgccccacacaccccgaacactccgcggacagaggaagcgcaggcacgagaacagctcagtcgcggcgagtcccggcctcccgggtctccagcgaggagagagtggcgactggtggcgcgggctccctccgaagttctccgcggcgcctcggcgcaatgctggctttccccctgggcggttcggcctgagttgcatcacggttctcgaatcggcctctccttcgcatggttccggccagagcttgcatcttgccgcgcaaaacgcaaggagggagagtgggagggtgtcgttttgggtttcgccaaaaggtttgggaccttctctgttcttgaggcagcgctttccttttctgcactcgtttctttccgggcctgagaaattggtgccaagattgggatttcagctgggtttagccccgctctccatttttggtagaaaatttagcaatggatgtatgggctattgtaggttactgcaatgcagtttgtgtgtccgctcctcctgcacaaaaatcacagntcggaatctgataaaacgctagcatggttgctgggctcgatttttcataaaaaaaaaaaaaaaaaagcggcc

SEQ ID NO: 79300 - DNA, 4938 bp, Zea mays
  Clone ID: MRT4577_172347C.1
cccacgcgtccgggtgggtctgctcaccattgtttgagaagtcaccagtaagaattgggggccccaaagcaatgccaaatggttaacatgacattctttgatgagaacacccggagttgcgcccacgcgtccggcaagtaagtggtgatcttgaggacgaatactttgatgaagagattcagaaacttagggatgatgttatacacaaaggacttggtattgctgtttttgctgagtggtaccatgttgatacaatggttaagatgacattctttgatgagaacacccggagttggtggactccaattactgggggtgcaaatattcctgcaattaatgaacttctggcaccatttggcattgctttgggggacaaaattcttactggtgacttctcaatcaatggtgagcagacccactatgcttctggaactgatatagtgcaatttcctgcgggaggtttcttgcatagcttccagctccaagaaaactcaaagacggtgcaagatcacataggaacactggatacagaaagcacccaggggaaaggcaagctctcctcaattcttggagtaatagaagcaggggaagggaggattgcagtgtatggtgattcaaattgtcttgacagtagtcacatggtaacaaactgctattggcttttgagaaaaatattggagttcactggaaacagagtgaaagataatgtccttttctcagaggcagcacagttaaagtttcctgtttttgagaatatccatcatccatcacgtagaacggatgtaaacttttcaacatactcaacagttgttggcaaggaattacactgccaccaagattcccggtttgaggtttggggaacgaaaggctatggtgtccaaccaataggcacatcaagaaagcttccagagtaccagatgcatgaaagttctagttctcccaatgtaacaatacaaattgctgacagtagacaagataaagttgaaaggcttcaaagaaatctttcgataccaaatgctgctaaatttgatgataaaagagattattttggatttattggtcatgaggaggttgacataggaatgttaatggcaagccaatggatgataccttgcttcgctgccactgcttgccttatgttgtatcttagttgtagagtgcaacaaaaacgccgcagacgaaggaaggggtcggtggctagtgctaatcggctaacaagtatggtataattcgtcattcgcgcggtggtgctgaaaaggttttttttagcgtatctaagtttcaggcctccagccatgatggataaccaggaagcgccatctgcgcagcatgacagaattttagtagccagaaatccctggtagtgcaccaagacaccatttaactcggcaactgtccgctgaacttgagagaaagctggctcgtcacttctgtggtcacatggaaagcagcttgtcttcccagattcagccattcccattcgtggcatctactgctgttgcttgtagtcgctcacaattttgttcttcgccacacgtagttgtagccacaaaaatcgctgctaagggccggtttgatgaccagagatcacgaggggatccataaatagcaatgggattcctctgacatggatcctctcgcgatccttggccaccaaattagtccttagatcacggggattggaagggattgagagcgaaattagttcattttctcctctccaatctccccaatcttccgtgatcccctttgtcactaaatcaaccctaagagctaatatctagggtagaagctagagctagtcatctgtcatctccttggaatatgtgaaggggatttgagcttctctgtagatccatgagcaataaggggcagggggactcggcatgagcttggcaggtacaaaggaggcttaggcttattgggaactttgtaaagtaaattttgtattgttatttttttaaaaaagaaccaggcctgtttgaaacaatggcacctctggcttctggatctgtttggactttggacacaaatgtctacgaagaacacaaacatttgtttcgtacctcccggccggggcctcgcttgcttgtccccatccgtaccagaaaacgggcagatcgggagggggatgactcttccgctccccttcccctcctcacctcaccaccatctccagctccatccgcaccaacatctccaccaaccgacacggcgaggagatgaacgcgtcgcagttcatggacaagcagatcctcggcctcgccgcctccgcctccccgtccggcggcggcgcggggggcggtgggggtgtggatctcagcgatctgatgatcccgatcccccaggaggacggcgaggaccgtctccgtcgccggcgtagcagtagcagcgtcaacggcacatcagacgacatgctacccagctacgatttccagccgatccgcaccggcggcgccaccgccgccgcccccgtgtctcaggcctcgtggggatcgctcgactccaaggcaccctccgcctctgcctctgcctccgccgccgcctcatacaacctcaagagtgctggtatattggagccacatgtgctgaagaaagttagtcatgaggaagacaggagtaacttccctacagttactattgcagatattgatcgaaccatgaagaagtactctgataaccttttgcatgcactggaaggtgtaagttcaaggctttcacagatggagggcagaacacaccaactagaaaactctgttgatgagttgaagttaacaattggtaactataatggtagcactgatggaaaactcaggcaccttgagaacatgctcagagaggtccaagcaggtgtgcagattttacgagacaagcaggaaattgtcgaggcgcaactccaccttgcaaagctccagacaaccaaaactgatgcccactcatcagaaaatagtgggtctggacatgctggctctcagccggtgcctcctccacaagcagccattcagccacagcaagtcttaaccccttcgcaaccacctgcacttcctgcccttcctgctccaaatgcaccacttccaacgcttcaaagccaaccaccatcacagtttccaagtcatttacaacattcacaggtaccatctgtgccttctgttgcaccggttccctcagttccggctttaccaagggatgcttactatgctccatcttctcagccgaccgaaaccatgcaccagcagtatcaagctccgccagttccacagcctcaggcccctcctgcacctcagcagtaccaatccccatcccagttccctcaatattcacagccatctcagccttcaaatgttaaccctccaactccacatgtgccccctgcaccccagcaaccagaggaaactatgccttacgcaccgcctcagagctatgcacctaatgcacgccctccttcaccttatatgcaaccgcctagtggacctgctcctccttactatggacaacaaaaccctaccatgtatgaacctcccgcaggccgggctaaccctgggccgccatcatcatacggttctggtggctatggaccacagggtgggagtggtttctctgactcatatggttacgctggatctccttcccaccgcggcaatgctggaatgaagccgtctacaccttttgctcaatcctctgggggaagtggcggctatggcagtggcaggctccccacggctcagatactaccacaagcagtgccggtaagctcctccagcaccagcggtgcttcaggcaatagagtgccacttgacgatgtagttgagaaggttgccacgatgggattctcgagagagcaggtgagagcaaccgtgcggaggctgacggaaaatgggcagaatgtggacctgaacgtggttctcgacaagctgatgaacggcagataagttgagcagtagtgccatttcaacagtatgtgtatagtatggagacttgggaagtgtcagctgaaccgattttctgtctgcaactttgtaaacctggagaactctgatgaccgaacagccgctcatcctgattgccggtcatggttgctccacctgaaatggaaacagcccagtgtgcctgtcagtgaactatagtattattgcaatctgaatacgttattcatttgatgtatatgtggtgctgatgatattttaaaacatataccgtggtttcttgtgatatgttaaaaaaaaacattaaaagaaaaaaaaagaaaccaaacggacctcattatttgctcgtttcaatcatagtaggttcagctcaactgacactcgaacctagatagcagggcttctgaaacagctaaaacaaaggcttcttgccgttcagaagagccatgagatactcgaagacgtgcgagccgccgtcgcggatgcccgagtgcatgtactcgttggtcacccagagccggatcccagcaatctgggaggcggtctccttggcgatgttgaagttaacgaacatgtcctcgtagtacaccgcagccgctaccggaaccttattgttgttcaacacgctgacatcatagagcggaggccagtcttccttctcagctaacaaacaggcagcctcctttaggtctcgtagagcagggatgtcatcgaacatgcaagggaacaccatctctccagtaaagtacacagctcggccttcttctgtagctttaatagggtcaaacaaactcccatattcgccatgaatcttttcagcagaccattttgatgaagagccctcacagtagatagactcgtgcaagagggcataaagaggattttgatcaaaatctagccacatttcgaactcttttaagaagtaatagcttatcctctgtttagcttcaacgacgagtacaagattatccacaccgttgactccatcatatctttcgcaaattaaatctactgc

SEQ ID NO: 79301 - DNA, 579 bp, Zea mays
  Clone ID: MRT4577_172348C.1
cattgggaccctcgaggccggccggaacgatatgcgtcctccactccgagagtggatgcacttgcacgactgtgtggcatgcgcccgcgcctatctactgagtcggctcctacgccgccgcgtttctgctcttactctcttctctccgctcatgactctagcatcttctgcctgtctgagaccggtgcactactatctcctgtctctgagggcgccatttcaactctgcacaccaacgtacgtggcttacaagttgtataccacacaccacgatatcctcaggatgatctgccctgccatagctgaggtccatctccaataccttgtactacgagcgctgcttcccatattaagacttccatgtgctcggcgttgttgtcaccagaggacttcccttgtgatatcacctatgatgctggagatccctatgaaacacctgaaaataaggctccaggaaagacaactacttttgttatatccaccctcgtatgatacactagaatctccgaatgctctataggtccctggcgggaatgatgacgcatctttgacaccactacatcacatggatgtaactat

SEQ ID NO: 79302 - DNA, 546 bp, Zea mays
  Clone ID: MRT4577_172349C.1
agaccaccgaatagagagggccaccgttgacagaaagcgagagagagaaaggagagggagccgccgcgctcggtgatcgcatccaccgacgtatggtgcctggggagaggtcacagaggttcgccagcgtgcgaaggtcacgtgtgagcattcccttgggcacataagtcatcggagtccagggaatcgttcaccggagcgaaggagtccgccacggaccacgattctccgtggttagagcactgaatagcacaatcgtagttcgagtagacgagcaagttactgagaaacccgaagcacaacaagtggaggaatctgagcaggagatcataaaaggcaagttgtgtccttgatcacattctttgacctaataatgttcatgattctgataatcactgtggcattgtcaggcttaatttgatgggacctaatagattgcctagttttagttatcctacaccttgcatacaaatgaattattaggtagtcttgttgtgctttatctgattttgggtgttatattatatatgaatcatggtcatgcct

SEQ ID NO: 79303 - DNA, 260 bp, Zea mays
  Clone ID: MRT4577_17234C.1
gacccactcgtcctctcagtccaactaccacccatcttaacctttttccaacatcaccatctactaggactaagtcaaatttcacaccttcaatgacactcaataactattatacttcttccattatgaccaactataaaaaacacccacactatctaaacacttacctaaatcaacattctactacaattacctactctacaaataacaacccatcacatccttcatctcagtttactcacaaccatctacttcctatt

SEQ ID NO: 79304 - DNA, 238 bp, Zea mays
  unsure (1)..(238): unsure at all n locations
  Clone ID: MRT4577_172350C.1
cgataaaaaaacaggaattncantaattttataaaagtttcaaactaaaaaaagggggacactccgcaaatttaacaattttttacaaccatcaaaaanaactccccaactaacaacaccctaacacacaaaccaatgaaacccaaatacacacgcataaccctaaccatatccattaaacaactacacaatcatcatcacccaaaagcatgacaacttaacggacctaacaaaccct

SEQ ID NO: 79305 - DNA, 259 bp, Zea mays
  Clone ID: MRT4577_172351C.1
gcctgagggtagaagaggcttacgtggaactgactgccggctatgatggctcttgatgtggccaacaaaatcgggatcatgtaagtgctgcattaggcatctgctgctagctagttcaatctgttgtgtcctaggtctatgacaaaccagggttttccagctatggatctcaattcgatccattaccatgtgttatgccacacttctgactttgatatcatccaagagaccggttgaactaaaaacaaaaaataaacat

SEQ ID NO: 79306 - DNA, 1371 bp, Zea mays
  Clone ID: MRT4577_172352C.1
cggacgcgtgggtgttagctgaggggaggcatcgatggctggagccaagagaggaatcctgctcgtcctgtgcctggccgtcgtcttggtggcgctcgggagtggcggcgtggaggcgaggaagcgagggaagcagtccctggggttctacgagctgcgtcggggcgagttctccatggtcgtcaccaactggggcgccaccatcctctccgtcaggctccccgataagaacgggcacatcgacgacgtcgttcttggctacaagaacatcggatcgtacgtgaacgacacgacctacttcggcgcgctggtggggcgcgtggcgaaccgcatcgccggcgggcggttcaccatcagggaccacgcctaccacacgtatcggaacgacggcaacaacacgctccacggcggccaccgcgggttcaaccaggtgttctggtccgtccgggagcgcgtcacgggggagttcccgcacatcaccttcgcctaccgcagctacgacggcgagcaagggttcccgggcaacctggacgtgctggtcacctacaagatcgacggcgactgctcgtacagcgtcaccatgtacgcgcggccgctggacaagcccacccccgtgaacctggcgcagcacacgtactggaacctccgcggccacggcaacggcaccgtcctgcgccacgccgtccagatcttcgcgtccgcggtcacgcccgtgggccgcggcctcatcccgacgggcgcggtcacccccgtcgccggcactcccttcgacttccgcgccccggcggcgcccggcgcgcacatcgccgaggtcgagggtgggtacgacatcaactacgtgctggacggcgagacggacgggcaaggcgtgcgcaaggtggccgtggtcagcgaggcggactccgggcgcgtcatggagctgtgggccgaccagccgggcctgcagttctacactggcaacatgcttaagggcgacgagggcaagggcggcgccgtctaccccaaatacgctgggatgtgcctggagacgcaagactacccggacgccgtgcacgagccggccttcccggccgaggtgtaccgccctggccaactctacaagcactacatgctctacaagttctcaatcagcaagtaggaacttctagtacctctcgtgcctgatgcctcatagtttcggtaggtttgcaacctgttgcgactagtaataagggttctgagtctttttttttagaaaaaattgcaacagaaatgtatggttcgagttcgtccaaactttgtctagtcaacattttctgccatttgaatgccatcttaatagtctaataccacttgtccactttcaaaaaaaaaaaaaaaaaatttgcggcc

SEQ ID NO: 79307 - DNA, 384 bp, Zea mays
  unsure (1)..(384): unsure at all n locations
  Clone ID: MRT4577_172353C.1
caccgcttcccgtgcaacgccctccctctacattcccccatttcctgtgttggcggggattgcgcggcactccgtgctcaacaccggaaccaatatcccatacgtggggctcgtcacctgacagtctgaccccggcgtccttggcaacgctgactacgccgtcatcaaagctgcttacctacatatacattgagccacattctacatgtacgaaaagaagattgcattggcgctgaagaagctatttcaacacggtgtaatgaagctagaagatctgtttatcacctataagctatcgaatgatcataatgctcctgaagatatgcctgangcactaaatgacagcctgaatgatatgcagcttgagtacctgcatctttatct

SEQ ID NO: 79308 - DNA, 402 bp, Zea mays
  Clone ID: MRT4577_172354C.1
gctcgaattggctcgagcggctcgagtggtatcgttgctgccgctcgcctttgggtcacgatcctctattctttttacaaattactttttggtagtgagtcatcacattaaattagcaaaaatgtcaaaccctgaaactgaagaggtagccgtacaatccaactcggtgtacacctttggcaaaaagaagaaggcaaccgctgttgccatttgcaaaccaggcaaaggtttgatcaaggtaaatggtcgcccacttgaatctgtgcaaccagaattattgcgattcaaaatttttgaaccaattttgaccttaggaaaagacaaattccgatgtgtagatatcaaaattcgcgttaaagggtggtggtccagtagcccaagtttatgctattcgccaggcta

SEQ ID NO: 79309 - DNA, 1441 bp, Zea mays
  Clone ID: MRT4577_172355C.1
cccccgcgtccgtgcccaacccaaccgctgcttttatttatacacctcctttggcctcttgcatcatcagctagtttacttgcgctgggcaagtctctagtgccagcttgtttacttgtagatccaggctctctcctctccaagcctttagcacagcaaagtcccagtgccatccctgttctgccgttgtatgtgaaccctcctatgcaatagcaagatctccatctctctcagctctctccagtttcatttccactcaagagttgagcacggatgaagaggccgaccagcagaggttcttcaatggtcagcgggcaagcaaccacagatctacaagaagatagctgcaggtccatggagccgcacggagtggacggcgatgctacggccgcggctgagcgcgacgacgtggacgccggggcgtacgacgaggaggaggacgaagaagaggagctcgcagggtcccgcggcggcctcggggagaagaagcggcggctggcagcggatcaggtgcgcgcgctggagcggagcttcgaggtagacaacaagctggacccggagcgcaaggcccggatcgcgcgcgacctcagcctccacccgcgccaggtcgccgtctggtttcagaaccgccgcgcgcgctggaagaccaagcagatcgagcgcgacttcgccgcgctccgcgtgcgccacgacgcactccgcgtcgagtgcgacgcgctccgccgcgacaaagacgccctcgccgccgagataaaggagctgaggggcatggtggaaaagcagatggaggtgaagctggagtccgcggcggaggagctgctgccggtggcgacgaggtcagcagcagcagccgctgtgtataacaaggacgggtcgacggacagcgactcgagcgccgtgttcaacgaggaggcgtcgccctacccttactccggcgcggccttagaccatcagcagcagcaagaaaccagccacccgctgggcttcacgggtttcacctccttcttgacgtcctctttcccttccgtataccatggggattcgcatttggaccaggaagcggacggcttcttcagcgccgccgccgccggcgacggattcttcgccgaggagcagagcgcaggcatcggcagctggtacggcggtgagggttggtagaacagcaacagctaagctgttggctgcctggaggctggagatcactcttggtatcgtatctaccattcttgtaaaatatggcgctgtacattatattatgcatgcatgggtccgggacgcggtaactatatactactatgtagagttaatttatatggagtagttaatttctgtatttttcactggcgggctgaaagcctgaaacacgggctacgagaggagataggccgggtaatacggttattgttctataaatcttggttgacatgcagttaatttttag

SEQ ID NO: 79310 - DNA, 318 bp, Zea mays
  Clone ID: MRT4577_172356C.1
gtcgtcgtctgctcgtgcagcgcggccatgtcttgcacgtggtggaagtggaacgctcccgccttcggtactggctcgtccccaccacgcgccttcttgagcctttgccccgttgcgttgttgccatattcttcatcgtcgagaaacaaccccgcgtgggactgctggtggtcgcctccgccgacgctaagcagggagacgctgctgctggtggacacgctctgcgcgctcccacttgctaccacgcgcaccgtgtacttgtgcatggggtgcttactcggcgttacgccgttcacagtgtcaccgctcttgctgcgg

SEQ ID NO: 79311 - DNA, 413 bp, Zea mays
  Clone ID: MRT4577_172357C.1
ctctcactcgcagtggatctttctactgtctggggggttctggcaagcctgcacagggtctctgtagagtagacccatgaaagaggccatggatctggccattgacacgccatcggcggtgccagccacgccgacggcgccatgggtagcctacgagagccacactcgtgcgacacataccatgcttctggagcaccaactgaagcacgtgcctctcgagtccgtcggtgccacctttctgttgaaccaccgagtcgccgagaaggagatcggcgaccagctatgcttcaactcctaggccccctcagatagctaagccggcggcgtctaccacgttacctaactcgtctatggtcttcacgggctacagcgcaagatggaggagggctcactagcggaggaactgcaggtgc

SEQ ID NO: 79312 - DNA, 567 bp, Zea mays
  Clone ID: MRT4577_172358C.1
gacaagcaccagatactttagctagcttcttctagctctagctaggctcgtgtgctagaagaatgcaacgataacctcacggcatgtaggggaaggatgaggacggccggctgaccgctaataaattctcgtagggtcagaccatcggaaagggatgataagtcacgtacgactaggactacaaggaacccacgacggcgccgctctgctgcccggggagtgcagacatgagcctgctagcgcagcctgcatctcctagatagatgacagcttcctcttcgtctacatctccatcctcatcgttatgcgaggctccgaatgcacctacgagtgtggcagacgaccatatccactgcatcagctgattatttggggggatgatcttcttcctcgtttactgcgccgccgtcatatccggatgatacatcaaaccggagatgacctatcggggtgtacctggcgaagaatgagctgctcagcaatgtgtggctgtacattatgatgcaaagatctgaacgccgtctgcgacatgaacgttgtcatggatggccagaatcttctgtatat

SEQ ID NO: 79313 - DNA, 418 bp, Zea mays
  Clone ID: MRT4577_172359C.1
ttcttaacgcgccggaccccgcgcgccacccggagttccggttcgtgccggagccggtcggcgtgccgggccacgtcacggacctcgggagcctcatctacatcatcgaggccattacctcagtcatggaggcggacgggtacgggcccgtgaggccagtcctgaagtgcggtggtccatgacgtggagcagacacctgccgctggcattgtcttggacgccgaccgactaaccgcgcccacgggtgactatgccggcgggctcaagacgctggagctgcacagccagagcgcagactgactgcgatgctagatggcgtaccccatgcttcaccagatgggctagctagctactcaagaatcagacctatacatgccggtgaaagagctgtcagcgctgagggtgccggacctctttt

SEQ ID NO: 79314 - DNA, 532 bp, Zea mays
  Clone ID: MRT4577_17235C.1
ggggggggggtttttttttttttttttttttttttttgttttttttttttttaatatgtaatttttccaaaagcttgagccaaaatcccccaagaaaggaacaaggaggggaccataaaaaaaggccccaagagaaggtaaaaaagggcacagggggggggggggcggggaaaaaaaaacaaaagctacaagcccagaaaaaagggacgcgaaacccaaacaggggagagcactgaattcaaaaaaacggcgggcaggggggcaaggggggcaatctgtcggggggcagggaggtgaaggagcaggggccgacttacccgggggaccctgaaccggggccaaaagagcccccagaacgggtaaaaaaaaagggaaagcaggccggaaaaaggggggggaatcccagcagttttgaaggaaggccaatacctttggaggcggcaaatttgggaggactgggggcaaaccctgtggaaaacctacggccgcttggagaggggaaacgccttcatacgggaggggggacattatt

SEQ ID NO: 79315 - DNA, 385 bp, Zea mays
  Clone ID: MRT4577_172360C.1
gcacgccagctccgttggtaagggagcttcgcaggcggcccgacagagtctccaccgtaccgtggctgtcctagatgccatggcgccaccgtcttgcggctgcgagcgattcccaaggcggcttccgccgcctcctgcttttgattaccccccccgcccgacaccaatagagtgtgacctacagactttgtgctcaggagcagacaaattgccacgcttccctgcatcttacacttaagaggcaccaaaccaagctaccttggcgttcataagagacctcgctctgttgatttctagcctgcaaccattaactgtgtttgcacattacaagaaataagcgactcaaatcactatgctcccccattgtactacaatctcaaggatg

SEQ ID NO: 79316 - DNA, 156 bp, Zea mays
  unsure (1)..(156): unsure at all n locations
  Clone ID: MRT4577_172361C.1
tttcttgtttactgatgctattgntgcggtgaagtttgtacattggagccgcggggagagtttccgcccaatgatagtgtatagggtcacgcataataacacgatgtgctggctgatggtgcccattcaggcgagagcgatgttatcaacccatct

SEQ ID NO: 79317 - DNA, 290 bp, Zea mays
  Clone ID: MRT4577_172362C.1
aaaaaacaaaaaacaacaaaaaaaaacaacgcaaacaactataaaaaaaaacaagctggcgtgctcgtaacatgcgaagttacaaagtttactcttcgcgtcgccttcgttctattttattggccctcgttttacctctcgtcgactggttataccctggtgttcccctacttaaccgcctttccgcacattctcctttggtcagctgtcgtccttctgatagggccctgaccagctggcctttctcccccttgccccctttctatcgcccttgggacccgctctgtagc

SEQ ID NO: 79318 - DNA, 302 bp, Zea mays
  Clone ID: MRT4577_172363C.1
gacttgtgcagcaccacggaccaaccccaacgaagtgcggaaaaggggggacaaaccaccgcccacagcgggcccacaaacccaccaagggacccggacagggccacaatagttacacgaacacaacgcaaaaccaagcacgaacaaccaataactaaccagcgcccgccgcccgacggaggaaaacccgggaaccccaactctaaagaaacgccggcaaacaacccaagccaggcagcctgcgcaagcggggacgggacggacccgccacagcagggcacgcaaagaaccaggaagacaca

SEQ ID NO: 79319 - DNA, 311 bp, Zea mays
  Clone ID: MRT4577_172364C.1
ttctttctactggtggtgaagccccacaagggccggaacgggaccacccggtgggccttgatcgactggcgcatggcagcgatcaatggttccgcggtcacgctcggaccgcgctgtggactactaccgagccaccttaagataatcccgccttatgtatctatgtatctgtctctgcatgtaataccatgtaaacaaccggatacaggaactcaagacccaaagggaattcatgccgtacttattctgctcaagtctcaaagactgacaaagggagggcaatcgcgacagacgagaaccctatgacagat

SEQ ID NO: 79320 - DNA, 263 bp, Zea mays
  Clone ID: MRT4577_172367C.1
atcacaagaagcttctccagttcctgcggccggacccggcggtggcggcagcgccggcgaggtcgtccacgacgtcggacgacgaggacgacggcacgtcgtgtttcacgccggcgactccgaccacgagcgcgagcgcggcggcgtcgccgtacgcctcgtccccgtggacgcatctcccggggctcggccccgacgaccctggtggccccgcggcggaggcgaccggcctccttggctcgcttcgtaagggggacgggggc

SEQ ID NO: 79321 - DNA, 1132 bp, Zea mays
  Clone ID: MRT4577_172369C.1
ggccgggactactgctcgagctcagctcaaggaaccacagaaaatggcgtcacttctccgccctctcgtcctcgtgctcctgatcgcctcctgcgcagcgcagcagtcaccgccggcgcagcccccgccaacgccgaacgcgccaccggccaactcgccgccccaggcgcctccagccggcaacccgccgccggcgccccaggcgccgccggcaggcaacccgccacccgcgcccaccgccactccacctccggccccgaccactccgcccccggccccgaccacacctcccccggctcccacaacgccgcccccggcgccgacaactccacctccggcccccaccacgccgcctccgtccccaccggcgtcgccaccgcccgctcccaccactccgccaccgtctcccccggcaagcccgccgcccgctcccgccaccccgccaccgtctccacccatggcgccacctcccgccacgccccctccacccgccaccccgccgccaccggccgcgcccacgccggccccgagcgtggccccgactcccccgcccgtggcgacaccggctgcgtcccccaagagccccaagacgccgagccccgccgccgcgacgtccccggcgccctcgctctcgcccgcgggcacgccgacgaacgaggactcgggtgcaagcgcgcgcgcggtcggcttcgccacggtggtggcgttggcgggcgcgggcctcgccgtcctgctttaaaaagtagactccgactcttcctcctgtcctcacgccgatgttgtcaccccctccccgtgcctcgacgttgctgctcgctccatttcagtttcatcttttttttttttcctttggtgttgttatttaattttaccggccctacgatcgattcttgatgtacacgatgatgatgacattggttgctttggatccgcgggcgggtggtggttagtgttctgcccgcgggtgtcgccatgtacttttaccgcactacattttggttctatagagagaggatttgtgtatattctcgtgcattatttctatggccgttgaataaaatctctgtgcagattaactcgaaaaaaaaaaaaaaaaaaaaaaaaaaaaaaaaaaaaaaaaaaaaaaaaaaaa

SEQ ID NO: 79322 - DNA, 251 bp, Zea mays
  unsure (1)..(251): unsure at all n locations
  Clone ID: MRT4577_17236C.1
atcacttttaccaaccctctcccaacaggagagagtcttacatttattatgcggcccaaatccaaanccaagcatggaaaacgcggcggcaaacacaaaacccctcccacgcgtagccgccaactacggctccctccacaaagcctcctacaaccacagactacaccacgccaccacaaaaaatatgcgaagactccatcccccggctccgcaccgacgagctcgacatttacgacctacccatcaacaac

SEQ ID NO: 79323 - DNA, 347 bp, Zea mays
  Clone ID: MRT4577_172370C.1
aaaggaaaggggctccagggcccctacgttttttattcaaggggcaacatcccatccaggaaacaaagggagccccacccctgattggacacacaccaccaccaccaaggttccttttaaaccgacgcaacgcaaattactaacagtccattagactactaaaaaagcgccccccggatcaatgatggaacaagaccttgacaggggaggaaaattaaacttttgaagcaaagagcagcaacgaacgcccgccgcctaaaaaaagcaaactttttttttcccctccgggaagggaaaaaaagaaagaaatggcaggggaaaagacaccaccctccgagtgctccctt

SEQ ID NO: 79324 - DNA, 133 bp, Zea mays
  Clone ID: MRT4577_172371C.1
cccttgtcgcccagtttttggcaattacataagttacacagggcaactacataattgactgtcaaagcgttttggcatatttaacccagtatgtttgagcaggggtcgactatttttaagtattttgactttc

SEQ ID NO: 79325 - DNA, 508 bp, Zea mays
  unsure (1)..(508): unsure at all n locations
  Clone ID: MRT4577_172372C.1
cacgaaaccacagaaaatggcgtgggttcttcgacctctcgtcctcgtgctcctgatcgcctcctgcgcagcgcagcagtcaccgccggcgcaggccccgccaacgccgaacgcgccggcgccaccggccaactcgccgccccaggcgcctccagccggcaacccgccgccggcgccccaggcgccgccggcaggcaacccgccacccgtgcccaccgacactccatctccggccccgaccactccgcccccggccccgaccactccttccccggctcccacaacgccgcccccggcgccgacaactccgccaccgtctcccccggcaagcccgccgcccgctcccgccaccccgccaccgtctccacccatggcgccacctnccgccacgccccctccacccgccaccccgccgccaccggccgcgcccacgccggccccgagcgtggccccgactccccctgccgtggcgacaccggctgcgtcccccaagagcccgaagacgccc

SEQ ID NO: 79326 - DNA, 1112 bp, Zea mays
  Clone ID: MRT4577_172373C.1
cggcaattcggcacgaggctcagctcaagtaaccacagaaaatggcgtcacttctccgccctctcgtcctcgtgctcctgatcgcctcctgcacagcgcagcagtcaccgccggcgcagcccccgccaacgccgaacgcgccaccggccaactcgccgccccaggcgcctccagccggcaacccgccgccggcaggcaacccgccacccgcgcccaccgccactccacctccggccccgaccactccgcccccggccccgaccactcctcccccggctcccacaacgccgcccccggcgccgacaactccacctccggcccccaccacgccgcctccgtccccaccagcgtcgccaccgcccgctcccaccactccgccaccgtctcccccggcaagcccgccgcccgctcccgccaccccgccaccgtctccgcccatggcgccacctcccgccacgccccctccacccgccaccccgccgccaccggccgcgcccacgccggccccgagcgtggccccgactcccccgcccgtggcgacaccggctgcgtcccccaagagccccaagacgccgagccccgccgccgcgacgtccccggcgccctcgctctcgcccgcgggcacgccgacgaacgaggactcgggtgcaagcgcgcgcgcggtcggcttcgccacggtggtggcgttggcgggcgcgggcctcgccgttctgctttgagtagtagactccgactcttcctcctgtcctcactagtcacgccgatgtcgtcacctcctccccgtgcctcgacgttgctgctcgctccatttcagtttcatcttttttttttcctttggtgttgttatttaattttaccggccctacgatcgattcttgatgtacacgatgatgatgatgatgcattggttgctttggatccgcgggcgggtggtggttagtgttctgcccgcgggtgtcgactcgccacgccatgtacttttaccgcactacattttggttctatagagagaggatttgtgtaaaaaaaaaaaaaaaaaaaaaaaaaaaaaaaaaaaaaaaaaaaaaaaaaaaaaaaaaaaaaaaaaaaaaaaaaaagggggggccggtttt

SEQ ID NO: 79327 - DNA, 369 bp, Zea mays
  Clone ID: MRT4577_172374C.1
cccactcgttcgaggacgcgtgggtgcgcctacatttaggatctttgttcttagcaagttcaagcttacctccaaccatgggtaaagagaagtcccacatcaacattgaggttattgcacatgtccactctggcacgtcgaccaccacaggacaccttatctacaagctaggtggcattgacaagcgcgtgatctagaggatcgagacggaggctgctagaatgaacaagcggcccttcacgtgcgcactgtgggctcgacaagctcactgctgatcgcgagagaggtatcaccatcgatatcgctctgtgtaaggttgagaccagcaagcactactgggcggggattgatgcccatggacaccgcgac

SEQ ID NO: 79328 - DNA, 171 bp, Zea mays
  Clone ID: MRT4577_172375C.1
catggctgggggcaataaaacatgatagtgaagtcgcctcatctcatccgtgctgaacacagggcggcgagaattggcacgtgggttacaggccctatgcctggcaacaccatgaaggccccagggggactgaagacgcgggcgtacgacgcgagcccggctcgcctgcgc

SEQ ID NO: 79329 - DNA, 229 bp, Zea mays
  Clone ID: MRT4577_172376C.1
acgtttttcgccgatcatggaggatgagaggaacacccagcagcaccagggcggtgagaggcccaggaccaggagaacgaggtgaaggacaggggactcctggaagcctctcggcaggacagacgacgacaggagagagacagagagagagagtcggacggatggagagtccgggtgaccgacaaagagaggcacagcgcgaaagagcagctctgcaagctgcacgaca

SEQ ID NO: 79330 - DNA, 1194 bp, Zea mays
  Clone ID: MRT4577_172377C.1
gggctgcgcatcattatattaagaggataagaatggtctaaggtagaccaaaatacaaactgccctagaaagcagtaaaagaggggaggggacagaaaaaagaaaaaaagaaactaaaaactaaaaagaagaggaaaagaggaggggcagcaaccccacactaaccctacaccttctaaattaaggccacaactgtctaatatcatttgctcctgctattccccaaagcttaatattggagggaaaaccctaaccctaggatagggtggggctgtatattaatagccatgagttgggcctatcccattacagaggggcaagggagtaaatgtacccaaaccctaatacagttccaacaccccccccccccgcagtcacaactctatcctgtatagatgttgagactagagcgaaagtcaaaatacactcgacggtaaccccttggtgaagatatcggggaactgcagcgtaatggggacgctgagaacccgaacgtcaccggcggcgacacgctcgtggacgaagtgcaggtcgatctccacgtgcttcgtgcgctgatgctgcatgggattgatcgagagctatgctgcgctgacgttgtcacaagctaatgccgtcaaggatgtaaaatactgcgtgactccgcacctcatcagtaaacataaagttcaatgcctccaaaacaatatcctgatccggtgatgaagacagggagcctaagacacgtgatttctcctgtggttcagatgcttctctgtagattttaaggagagcatcaaaaccggatctgcttgaggtgctaacagttcgcatcacggcaagatatgcagcctttctagtatctggtggaagaagggaagttttgccgtcttcaaagaagatgtggaaacgccgaactccttcatttatagtttcattatgtccaagtctgaccagcgcagtcaagagcagtgatctaagcattacatcaagatgactctcaccatccttggggtcccagcctaactttctgaaatattaggcacatggagccttttaatatgatcacaagtcacgacaagggagcagcaagaatgtttgtagtagcagaaattaacactaagcttaagctagttctctgtttacatgcacaaagatacacagaagtaggacacaacacaaataaataaacatggaaacttaacacaattttat

SEQ ID NO: 79331 - DNA, 199 bp, Zea mays
  Clone ID: MRT4577_172378C.1
ttctgtggaacgcctgggcgccaacgtgaacgagggcggctgtcaccagataattggccattgtttcaacacccacgctgagatggagcctgtcgtgatcaccaccaaccggcctataaggatgactgaccctgggcccgagctgctcctgacgtactaccgtgacaccatgaacagtaacttcaacgcgcgccagatg

SEQ ID NO: 79332 - DNA, 213 bp, Zea mays
  Clone ID: MRT4577_172379C.1
cgccaacatatggtttcacctttaagtgtgatgagagatctgaaaaacgactagagaactgggccaagcttaaagagaagatgcatcgcaacacagatagaaataagctatttgcaagccaagtcaaaggaaactgaagaagcaaaactcagaatgctagttaaagagattgacttccatggcaacatcaatgccgagcttatataagaacca

SEQ ID NO: 79333 - DNA, 216 bp, Zea mays
  Clone ID: MRT4577_17237C.1
aaactaagacctattgccgggagctgctcccccggcgaacctccgaaggaggaggctgagccaccaccgagtgccacggagggggcggcgatccgaccacctgtaaacaagaaccggtcgtgcctgggaccaccggaggagccaacgccaggcggttcagtacaatataatatatagacaagactggggtaggtagagtataaggagggggggggg

SEQ ID NO: 79334 - DNA, 539 bp, Zea mays
  Clone ID: MRT4577_172380C.1
ggtaccctcggagcctgccgggcacgattaagaagcactcacctacttccctcactccacgtggctcggaccgacggagaggagaagaagaatgcgcgcttatggtcaagaagcgcttcaggatagggaagccaactgccttggagggtgacctaggaagacctggacgccgttgaggagtcatagctgatgaagcacatggagaacccggactgggccctaacgaacccgcagcgcaggagggtgaagctccagctcttgctcgacgagcacaaggtcaccgtaaagcggcccgaggacttccttgcggcggttcggtacatggaacactacttcctgagggtgaggacccccctcacgggccggaaacagacgaccgcccatgctctcagctcccaactggtgttggcaatgcagatcccttggtccgtggacttgcatacccacatgaggcaggatttgaggaagctactggtgaaaaggggcctgacatacggccaaattatggtcacctatctgacgctatagaggcttcttgc

SEQ ID NO: 79335 - DNA, 511 bp, Zea mays
  Clone ID: MRT4577_172381C.1
ggccgcttttttttttttttttttcaccggcaaaaagaatggatctatatatattgtgcgaatcaagcactcctatgacgaccgctattacaagtctaaactcctgggtgaggaaccatgatgctgaaataaacaagacagtgatgacacaaaaaaattgatcggctttctgcatttacacactggacctgtgaaaaaaaaataacactgactgctttcttttcctaaccctatctaactttggctaaaattcttgcagagcacattgtaacatagtatattctttggtcgagctacataacggcgccccttttaaaagtaaacatctatggctgaaggaagatctgataaaagctttggagagcttgaacaccccaaacctgttgtgaaagccagggacgcttggtgatattcaacacatagtgtaacatatggaactgatcaaagcattttcggtgcaacttcatccgggcttttattagtgttgactcttcagttttctcatgaaata

SEQ ID NO: 79336 - DNA, 582 bp, Zea mays
  Clone ID: MRT4577_172382C.1
gggggggggggtttttttttttttttttttttttttttttttttttttttttttttttttttttttaaacaaaaagggggaggggttattcatacccaaacttactacacgaaaccacaatgcaaatgcagcgcgggatgcgtttggggggggggggggaagcccttttttaaaaaaagggctagttgcttcgtctccagcctcactaaaaaactccctccactaggcagcgcgggagcacgagggcgaggggcacggatcaagcccaggggcaagatgcccaattgcaggaccccccccaagaacagttaaccctcctgttttcgcgggcggacgggattggggcccggccacacgtgcacgggctggactcgcagggctccccccaaccccaaggcgtgggctccccctgcccgccgctccccgaagggcacctggagtttttgcccccggggcacgggacggggcacccccacttgggggcgcaccccatgcccgatcgaagccttttaatttcctttaccgggctccgggtccgctcgccggacttgaaccaactaacgggggtagtaccgttggggg

SEQ ID NO: 79337 - DNA, 365 bp, Zea mays
  Clone ID: MRT4577_172383C.1
ataaaaatataacacgatactgggggggggttgcttaaaaaatacagcccctccccaaacactcaaaccaataaaaggacatagacaaatggcaccctggacgtaacgaaaatggctacctgcctaattagggtatggtgaacaaagagctacttcattattcctaacaaaacccgccctttcttgggcagccaatactaggccggaccacatattgacacacacatatgcacttgaggaggggcgcggtgcaaacaaacaccaccacaaaaaaagggcactgcatgcacaacatcctagtctattctacacgcaaaagacctatgtacaaacaatagagcaacctcgtactaacaaaaccgaac

SEQ ID NO: 79338 - DNA, 1289 bp, Zea mays
  Clone ID: MRT4577_172384C.1
gctgcacccgcgtcgctcccgtcgacccacaaaccaaggcgcgggatctgccgttcaaccgtccggcgtggctgacgacgcacaactcgttcgcgcggctcgggcagcggtcgcagaccggggtcgccatagccacgccgtggaaccagcaggacaccgtcaccgagcagctcaacaacggcgtgaggggtctgatgctggacatgtacgacttccgcaacgacgtctggctctgccactcctacggcggcatctgccagaacttcaccgcgtttcaaccggcggtgaacgtgctccgcgaggtggagcgcttcctgtcgcggaaccccgccgaggtggtgaccatcttcgtggaggactacgtggagtcgcccatggggctcacccgggtgctcaacgcgtcgggcctcgcgcgctacgtgctccccgcctggcgcatgcccaagagcggcggcgactggccgctgctcagcgacatggtccgcgacaaccaccgcctgctcgtcttcacctccaaggccgctaaggaggccgccgagggcgtcgcctacgagtggcgctacgtcgtcgagaaccagtacgggaccaaggggatggtgaaggggacgtgccacaaccgcgccgagtcggccgccatgaacgacctgtcgaggtcgctggtgctcgtcaactacttcagggacctcccgaacctgccggcggcgtgcaaggacaactcggcgcagctgctggacatggtcaccgcctgccacgacaagtccggggaccggtggcccaacttcatcgccgtggacttctacaagaggagcgaccggggcggcgcggcggaggccacggacaaggcgaacggcggcctagtctgcggctgcgggagcatatcggcctgcaacgccaacgggacatgcactccccggcacggcaggacgcccagaggcatcttcaacgcctcatctgacgcagcggcgtggaggccgccgccgccggtgctgcaatggcagaggctcatcctgctgccttctctccttgctcttcttctgggcctgtgaattctacgtattttgttgtatagaccgatacggatcggtttggttgcaggcaccgagcgcattttgttgtgtatatatacacacagatgacagattggttgaagccagctagcagcttagtccatggtagtctgtgtataagacagagtgcatatacaaggttaacacaacatcaacaatcagatgcggaaaactgcgtttaataaaaaaaaaaaaaagggcagccgctccgtctaaactagc

SEQ ID NO: 79339 - DNA, 391 bp, Zea mays
  Clone ID: MRT4577_172385C.1
ccacgcgtccgcacatgcagaagttgataatcttttctacaaatctgatcaaatttgaagtagagactaaccggtttttaacagtccaaattcttaaattggtaatatctaaaaaggtcgtctgtgcaagttgagataaagatccgaaaaatttgggccttggcctaacaaatctacacacgcaagtgcgatctgggcaatgatattgattgggcccaataaatctattgagtctcggacgggagatcgtcagatcataagcttctgcactgcagtattttccaacacatgcattttattcattcattatatattgatgatgattgacatgtatatcgatcaggtagcagcacggatggatgcatgcattttgtacgtttcaatatggaca

SEQ ID NO: 79340 - DNA, 513 bp, Zea mays
  unsure (1)..(513): unsure at all n locations
  Clone ID: MRT4577_172386C.1
acaaaaaacgcgcccccccgcgcgngngaccgagaaggcgcngccgaagcaggggaccggggacaaccccagccncaagcgcggcaacgccggcgacgggggaaccggnacaaacaccaccgcgaagaggcatgggggggggagaggcnnattataaatatnaaccaaccattgntgtggaagttcatgcgttggatttcaccactaactgtggtaagatcaggttctactgctgggataccgcagggcaagagaagtttgggggcctcagggatggatactatatccatggccagagggccgagatcatgtccgatgtaacctcaatgcttacttacaagaaggttcctacgcggcatagggacctgtgcagggtgtgcgaaaacatccccattgtcctctgcggcaataaggttgatgtgaacaacaggcnggctaaagccaaacaggttacttttcaccgggaagaagaatctgcagtcctatggaaatttctaccaagaccaactacaa

SEQ ID NO: 79341 - DNA, 227 bp, Zea mays
  Clone ID: MRT4577_172387C.1
catacgcccgccggatgctgggagacgactcatgaggagggagccagactagactctgagagcgagctccgtgacctctctgttactctctattcccttatcgtgctgtgcatgatgccacaccagatgtgcccatctttgtttatttaacaccgttcaacactatgctggtctacctcatccacctgacgacttggccctggactccagctcctaagagtccaaca

SEQ ID NO: 79342 - DNA, 417 bp, Zea mays
  unsure (1)..(417): unsure at all n locations
  Clone ID: MRT4577_172388C.1
ttattccacaatgctcactcgctccaagttccattattacacagttcctcccaccagttacttcaatgggcttcgaacacccagctgtgcaagcctataggctacaacaagcaattgctgcgagcgtcttacaacaaccaatttctcagttgcaacaacaatccttggacatctacaatactaccatcgaacgcacagcacaacaattctaccagactgaccacctagcatggtgaccctgccgctacttgaacagcagtgcttgataaacccacttgctctggcaacgagttgaaaccagcacacaacagctgaacagttctgcagcgctagcaactagcctggtgaccctgccgctacctacacagcaacaactgctttaattagcccgctcgctgnggcaatgcacctacatac

SEQ ID NO: 79343 - DNA, 211 bp, Zea mays
  Clone ID: MRT4577_172389C.1
gatggattcatccatcgccctccggttcgaatgcagcttcgagagggtctgccgggttgcgtttcccgggcgagctgatccaatagcgcggcccctgaggtcgactaccgcttatcgggcggcggcctggcctgcgacacgaaccaccacttgctacacaacatcttgactaacaacggtgaagtcataaagtccaacatcatactttatc

SEQ ID NO: 79344 - DNA, 505 bp, Zea mays
  Clone ID: MRT4577_17238C.1
gcgattcaccgtctgatgcttcccatttctatccttctgatgagctcactctccggggccgtgtcgacgacgttcacgctggccaactcctgcggctacacggtgtggcctgggctgctgtcgagcgcgggctcggcgccgctgcccaccacgggcttcgcgctggcaccgggggagtcgcgcgtcgtggacgcgcccgcggcgtggtccggccgcatatggggccgcacgcgctgcgccgcggacaaccaggcctccggccggttcgcctgcgccacgggcgagtgcggctcgggggcggtggagtgcgcgggcggcggggccgcgccgcccaccacgctcgcggagttcacgctggacggcgccggcgggaacgacttctacgacgtgagcctggtggacgggtcgaacctgccgatggccgtggtgccgcaaggcggcgccgggaccagctgcggcgccacgggctgcctggcggacctgaacgggccgtgccccgccgacc

SEQ ID NO: 79345 - DNA, 391 bp, Zea mays
  Clone ID: MRT4577_172390C.1
ctctctctctccgtctgccctccgcatctccgcgccgccgccgctacgcctctccccggggagcctcgccggcggccaggtggaagatggaggcgggcggcaaagatggcaaccctttgaagaattaccgtattgggaagaccctggggattggttccttcgggaaggtcaagattgctgagcatataaaaactggccacaaggtggccgtcaagatccttaaccgccggaaaatcaaaaacatggagatggaagagaaagtgaaaagagagatcaagatattaagattattcatgcacccgcatatcatccgcctttatgaagtgatagaggcaccagctgatatttatgtggtcatggagtatgttaagtctggtgaattatttgacta

SEQ ID NO: 79346 - DNA, 541 bp, Zea mays
  unsure (1)..(541): unsure at all n locations
  Clone ID: MRT4577_172391C.1
ccctctcgagttttttttttttttttttttttttttttttttttttttaagcatataacacttggtttttctctaatagttgatatcagttgtagagttaatttagactataataaaaaaatatagtaagtagcattcaacccccgtacatcaagacctagcaacagtgtgcttgcaggtgttaagtctatatgtatagatccacaaataggctaacagctagttcatatttaaagggaagcattcatggttcaaaagtgatggtgatcctgatagtgataggggcacaaaaagcaaatacctgtttacaagagagagaaaaattagatctgttgaaagtctccccaatagtttgctgatgtgtattgggtaaaagggtgaggggaatacattgggttgactgtgtataaagatagatatttgttgtgtatgactaaggatcgcacatggtgttataccttcattgagctgatctaggagcttttctttctgggataattattgtattatcgnggaaaataagatctaccatttaaaatga

SEQ ID NO: 79347 - DNA, 271 bp, Zea mays
  Clone ID: MRT4577_172392C.1
ctcgggttcggaaggcgtcttccttctatattcgccgctcctcttttccgggggattcgggctttatgctggcgggggcgccccttctccccgttggcattttattccggtggcgattttgcaggggggagggggctgctccggaaagggagccgtcccgcggttcctgatggcgtgcactctttcaaattgtcacaacgaacttcctttatgctcgcgcacccgccttgcccccgggctgccttttacgtagcctccctcgccatgttgg

SEQ ID NO: 79348 - DNA, 394 bp, Zea mays
  unsure (1)..(394): unsure at all n locations
  Clone ID: MRT4577_172393C.1
ggagcggggcgtccggtacaactacactcaagagacggtgggctcctccagcgtgcagacccacacggactcctgcgtgctgaccgtgctcgaggagggcgagttcctctttggcctcgatgtgcttgaccctggcaccggcaatgttctgcccttggaccccacaagcggctccttcctcaacaacatgccgcgacactcatgcacatgcttgtgatcaactgggatgctccacaacgggaagcaccggatacatgtacatcncacgcctcccattacatctccatctgcattgatctgctccaggccaaggacgaccgcgtcagctccccggaagcgaacgtctacccggcccatccgttttgtgacaaacctgtcaactactacgactacc

SEQ ID NO: 79349 - DNA, 341 bp, Zea mays
  Clone ID: MRT4577_172394C.1
aatgggggaccgtggcggacaacacccagagggggattctttcaatggatgcgccgttgaaccggcagccggagggctgcacacgagtggcaaagagtaatgcgggagggcaccgacagaccatcaaccgcacgaaggctaccgcacacacaacgacaacccatgcgagagagaagcaagaggagaaagcagcccatggcatgtaaaaggaaagaggacaactgatcaaaaaaagacagaccataaagacagcaataatactgagagaaaaacttacaagctggccagggtcgtccatgaacagaaacaaaactattcagattcacacggaaactcgaatg

SEQ ID NO: 79350 - DNA, 714 bp, Zea mays
  unsure (1)..(714): unsure at all n locations
  Clone ID: MRT4577_172395C.1
cgggaaaaaaaaaaaaaaaaaaaaaaaaaatactccattccaaattctgtgttattttgtcttttctagatgcataccttattagcttttgttatgcactttgatatatggtatgtctagatatatagcaaaaactatgtacctaataaagcaaaaacgacttacaatttgcaattgaaagagtatggtgcagatctgccttaaatcgtatccagcagttcactcataaggttacccaaaatactgttttacactgttcgcagagtgaagtttaatatgggtgtgagcatgggtaaaagtcttagttggcaaatagtcttttggtgtaaggatttagaaaatactccagtgaacacgtgggaaaatcacttgtcagagagggagggtggagccacaaaccaaggagccgcacagatgccgacatcaatacacttatgttgtggagaggagccgcatctcgtaatgtctgattttgtttagatgccacacagtagtatcccagccatgggcgcatggatgggggatttggacccagggtcaatggaatttaattcccagatttagggggtgtatggtacggatccaggttccagctttaatttaaaggtgtagtttataatagaaatttaaatagttttaaaaatattttttaatctaaataatanataaaatgacttatctaaatgacttacggggggttcacaacttcaaaac

SEQ ID NO: 79351 - DNA, 323 bp, Zea mays
  Clone ID: MRT4577_172396C.1
atcgtgcgagagaaacggaacatatttgtcgtataacacacaaacaaagtacagtgatacatgcgagaggccggcacgcacctgcatatttattctaggggattgcattattattctcaacgaggcacagcaacatatttggatggcttaatggcatacgaacatgcactggttcactcacacggtctcgtgtgacgacatcttcatcagattaggcagcgtgtaatttccggacttgtagctaacggtgcggtgggtcattttgcagcggttggggatagtaatgggcacctccggcttgatcccggcaggcctggcggtgc

SEQ ID NO: 79352 - DNA, 471 bp, Zea mays
  Clone ID: MRT4577_172397C.1
gcccctgccctagcgcgcgtgtctgggagcgccgccgccgcctgcgcgcgctctccccggccggcttgctcgcgtctgcgcagccgcgccccaaccgctgcagccacgtcgcgcatgccgctcatccttgcccacgacgccttaaccccctcccccacgcaggttccatttggagcctcagcaccccatttccctctccctctctctcacacgcgcccacacctccgctaccaccgccgttcgcgtcgtgctgcatgtgcagccgcgccatcgcccgtcacctggtgccccgccgcgtcgggctcgcatcgtcgtccgccgaggagcctgcgtggagccattgtcgagatcacgatttgtttccgtgatgctaggaatcgaagatcaatagttgccgaccaagtgatctggttcttgcagttctatgacattgaagcaccttagcatctgtttgctaaaggcgtcgtttcc

SEQ ID NO: 79353 - DNA, 248 bp, Zea mays
  Clone ID: MRT4577_172398C.1
acaagcttttctttttttgttccttttgtccagctaccgcaccaacccctgtggagaccaaactgtcttttcaccctgcttatgataatggatattccagaaatgaaaatgagacacgtcttactgtctttatacatatatatgtagagagagaacgcacaaggaaatgtgcggtatgaccaataatatatgcatgggcataagaaaggggtggctctaatggatttagcgcgcgattgagtccggtg

SEQ ID NO: 79354 - DNA, 226 bp, Zea mays
  Clone ID: MRT4577_172399C.1
tagcccctatcaccggcgacccatcgacggcagagaggatgctccaagactagggcagactcaagcctggaggcgccataggccataatggcgctgccaatctcgctgagcaccaggttatagctagttgccagaggacatgatatattgagaccatgagcatgatagggggcaggccagcagtcagaaggaagcacatagcgcactgccacagcctggagcgaag

SEQ ID NO: 79355 - DNA, 281 bp, Zea mays
  Clone ID: MRT4577_17239C.1
gaaggcatgtccttgggttagccctgctgtggataagtactgttgtgttgttgttggtcgcagttttgttcgtcttattttgttggttgattggaagctgctgttgtctgtaggctgcagggtttgctccatcttgctgtgtcagagctggttcattctgttgcttctgttgttgttgcttgtatttttgttcattggccacagcgagcggtcttgatgtatgcttttgttgttgttgtaggtaggcggctgggttccccgtgtgctgttgattgatctgc

SEQ ID NO: 79356 - DNA, 203 bp, Zea mays
  Clone ID: MRT4577_1723C.1
ctcaattactcccacaccctagggccccccccaaccttgatggtcatttaagaaggcgacggggggtgccagacccatatggttgacaatcaggtgggggaaccagggcaaacagctgccgaagggaaaccaccaggccctttttttaaacttctcgccggccccggctcggcagcacttgattccctgcacttgcttggcgg

SEQ ID NO: 79357 - DNA, 357 bp, Zea mays
  Clone ID: MRT4577_172400C.1
cctcggtctgtggaggccttttttggaaggctaagacggcggatcacactcaacactgtggctggaggagcatactggagtgcaccacgaggtagacaacatgtcaggcgccgactgcgaagactacggccggatcttctgcatgacactgaactgtagagcaggtgtttgggccactgtactcgcgcatatgagaaaagtacaagaacggttgcagcttggataaggctgaatgggagacacaggtttgcgcatcttggaatcatgcagcgacatggcacagatgagtagtttaggagacgctgcttctctggctggcatagattgttcacggatgcgtcgggcatcgacctggac

SEQ ID NO: 79358 - DNA, 1179 bp, Zea mays
  unsure (1)..(1179): unsure at all n locations
  Clone ID: MRT4577_172401C.1
ggctcgtgtgtctggaaaccctagccgccatatctcatgatccactcgagcaccaagccgagggaaggtgaggagcgatggcacgcggcgtggtgtnagaaaaggccggggggtaccaaacagtcgcggagcctccaccgctccacgtgacctcccaaacctagacctagttgtccttcctgttcaacctgcatagcggcggcgcgtcctgccttcagagagagagggagagagagcgcttgatctccgtaggcatggcatgggaggaggaggcggtagaagaggaggattacggggaggagatgtcggcttcggagtcggaggaggacgtcgtggtggggcagatgccgacggttatggtgccaaagcatatcaataagcggtccctgaagaacaaggcgctgtctgttaccctcgacaagaaagcgctcagggatttcgtgactgggttccacaagcggaagaaaaagagaagaaaggaggcgcagaagattttgcaggagaaggagaggaagaagaaaatacaagaccgcaagaggaggaaagaagagaaggagattgctctgtatggtagagtactgacatcggataaaaatgatggtgctggattagaaaacgaagatatcggcgatgatggtgaggatatggaaaatgacaaacctttgtctgaaatcaaaacctacgaagatgatgggaccagaactgtagtcaccaccagtgaaattactcctgaagaagatgacattgtcccgaaaactgtcggccccgtggcgacgagcctcaccagcaagaatcctagctcttttgccaagaagaacagcagtttaggtgtgaagaggaagccaccgaagagaacgttcaagagcaaggctagagcgaaaaggggtgacaagaagcggggtgctgcaaagggtaaaaggaagggcaagggaatgaagtagtgttttgtgaaccctctgtaggaagaattatgctgtcactggctgtggacctgtggttaatctcgcatcacctgatctgcagtttgtttggtaatatattgatgatcatttgttccgcaaacaaattgttagggaacaaatttgtgatatcgatgctcagttgttgggttgtgctacatgtctgttgccagtcttgttggtcaatattacgtagacagtttctgctccaaaaaaagag

SEQ ID NO: 79359 - DNA, 1060 bp, Zea mays
  Clone ID: MRT4577_172402C.1
gcgtttgaccttttcttgtgtccattttagatcttgctggtccttgtgggttctatctcttttatgtgtttccccgtttcgttgttttcggttctcctttgcctttgtttcccttttctgttctttgggggttgagctctgaggttttatacggggtttcatctctagcctaccccaacgcgcttgggacaaaaaggctttgttgttgttgttgttgctgatgcttgcacttttgacattgcgtcgcgatctttctcaggaacctttccccatgggtacaaacatccgacccaggtctgggagatcccggacttcctctggtgaagaaaatcaccatgatatccagacagtcttgaccaacggtgacacttcttccaatggagctgacacttcaggtcccaccaaggacactgagtagctgaactgcagcttgctgcgttgctgaccacaaaggcccaaactataactttttgcaaacccattttcagttctttcccccctttcccattttggttctgttttgtaaagtctcccgatctgtatttattgacttccacgatgcgggtcaccgaagacttaggttgctgcaaaattttgtccctgacgggaagctatatgcaagagggtggtactggctatgtgcttgttaacctgaaggccgagaaaggtgaaaagcgcagggagagcctccagattttggtcgctgtaagaattaaccccatgttgtacagcaggtcccagtaacttgtagtgatgggagagtggagtcattttcatcagtttttagtggtggttgtgtggagaggaagagtcttgcctgcgttttcttttggaaccttctcttgtgcctttacatttttttagtcgagggttcctcttaaattgtgtgcagagggggctcaattttgttaaccggaacaaggcgcatgtgcgtcttggatcaaccccggtcttgtcttcaggcactgttaccttatttatcaaacatatgtacacctccatctatatatagtatgagttttgatgcctatctgaaaaaaaaaaaaaaaaaaggtcccta

SEQ ID NO: 79360 - DNA, 418 bp, Zea mays
  Clone ID: MRT4577_172403C.1
ccacgcgtgcgcaaccgtacggtttgtttttatattcgtgagctttttcatgctctatacgtaccacaacatggtgacgatctgcttgttatcgaagattatgacaaaacatggctgtttgcttactaagagcggctatcttcactctaacatgtgcttacgttcattgttgcatctcgctacgcagatgatggactccatattgatacgtggcacaccactaccgagacgtgatgctatgcagattatcaccatctgtctcgttgcaaacaacaactcgggcttggacacacacttggctatatacctcgatcacagatggaacatctcgaatggcaaatattgtagtaatattcaacttttagaatatgcaataggctgaccgggacgatctctgatatatcattaattgtgggat

SEQ ID NO: 79361 - DNA, 322 bp, Zea mays
  unsure (1)..(322): unsure at all n locations
  Clone ID: MRT4577_172404C.1
aacaaaagaaaggacccccaggcataacgagggncagcacgaggaaagcagggncacacaagacaaggcacgggaanaccccanacacnnaaaanncanggngcacaaagcaaaagagggaggggggaaagcaaaacggcggggancgcannccaacgggagangggacnnaagcaacggccncgaggaaagcccncccaggagcacgcnncncaaggcnnccaagggnaccgagcagcnnngcggngacaccancaggaacaanncnacccncacncnnggaccncaggggggcggcacggcggaaccgggggaagcccca

SEQ ID NO: 79362 - DNA, 229 bp, Zea mays
  Clone ID: MRT4577_172405C.1
ccacttttatatggttttgtgggctattacgagcatggtgcaaaataaatttgttgtgtcttttggtctttggatttggatcaggcaagtacttgccttttggctagaccaaaagtaaatatgttaaaaagaaaaaaaaaaaaaaaaaaaaaggaaaataaaaaaaaaaaaaaactgggcagacaatatagtagatccaagataacaaacagcaatgcaatgaaaagta

SEQ ID NO: 79363 - DNA, 218 bp, Zea mays
  Clone ID: MRT4577_172406C.1
gcatgccagatgctacagaggacaccatcactgcaaagcgataattttcattagaagagctgacttgtagccacccatctagtcgtcatatgtaggctctaacttatcagtatgtaaccttttcctagacatggtatcataggaacactgtgtgatctgggtagaggtgtgggcaattaaactatgtaaataaaggactggcagcgcattgtttgcca

SEQ ID NO: 79364 - DNA, 445 bp, Zea mays
  unsure (1)..(445): unsure at all n locations
  Clone ID: MRT4577_172407C.1
cccccgccccccctttcccttttcccaattttttttctaacccacccccaaccccctnggggcaggacaaacaaaaacacccttatccccaaactcccaacaaaagccatctccccaacaaagacacaacacctgacttcacaataatcacagcctaatacgcccataatctccactacacacacaactccaaatacaaaaaagctaccttcacatcaaacaaaaccaatctcacctcaaaaacaactctaactgccaagaaacccatgaactccccaaacacaccgttacacatattaaacccccaatacaacactccctcaatacactgcatgcaacacaccaatgaatctacccacccccttaccccacctgctacaccataaccaaacctccattcacctaagcacaacacatcaacaaccaagcctagtaccccaaaccc

SEQ ID NO: 79365 - DNA, 629 bp, Zea mays
  unsure (1)..(629): unsure at all n locations
  Clone ID: MRT4577_172408C.1
cccgggaagcgctatggnacaagcttgttatttgtccccagcaatatggcttttattctagggatgattttgtttacttggttgtccattcggttagggttggtttggtgacccggaaattggaggggatccataaagtagaaatccccttgatatattcattaaatagcaaagggattcctcctccatagacccccaccaattccctggtcaccaaactagcctttgggctcatttgagagcccgaaaaccgggattgaaggagctaaaatcaccttcttatttaatttgaataagaaggtgattttagcccctctaatccccttcagttttcggactcccaaactagcccttaatgtcttgtaaattccatggtggccatttaatatgagggttgagtactgcatattaccctttgtaattgcaatattcacagcgttaatgaatcaacaatgactgcgtttactgttcaaatttattttttaatgtagcttttgcttgtcctgattaacttgaaattgcaattttggactgtttgcattgtatgtggctggtgcagtggtgagagctgtttcactaagtcatcaggttacgggttcgaaacagtcaatctgcatttgtgggagaag

SEQ ID NO: 79366 - DNA, 430 bp, Zea mays
  Clone ID: MRT4577_172409C.1
ctgtctcgtgggcaaaagactgagatccgaataggtatccgttttcattcctaaatatagcatcatgtaagatgggtagagattgcgtggctggtgcctagaactgcgataagcgtgcttggaggatgtcaaccatctgtggacatatatgtccatgaacatggagtctatgtttgctttcaaaagtgggaaaatgaggaaggtccaacaagctctaactgtttatggcccaaatgaagcacatgcaatttgtgacatagatagtctatgagtagctcagtttgttatgtgaccgggcgaccatggttcagggcatacccgtggtcatttatatgctcaacaagctagttcacactacagtacacaaaactcgactgcaatgcaagttgatgggagcgctccctggaggcgggcccctgatgctcccact

SEQ ID NO: 79367 - DNA, 1580 bp, Zea mays
  Clone ID: MRT4577_17240C.1
attgggtacctcgaggccggccgggctcgtataccctcacgacacctcccctcgcgcctagagaggaggcatccgctttcggcgccgtcgccactcgccaccatctccaccgcctcctctcgacgcgcatcccctcccatacccatggccactgaccgtctcctccaccttctccgagcgccgacaggctctccggctgccgcccaccacccgcgcggctggttggggtcgtccacggacgcagcgcgtcgacgtctggcagggtgctgcggggattcgccgcgcgtccgtgtcctgctcgagcactagctctggcgggcaggggggactaacatataaggatgcaggcgtggacatagacgccggcgccgagctcgtgcgccgcatcgccaggatggcacccgggattggcggcttcggcggtctcttcccctacaatgacgattatcttgttgctagcaccgatggggtggggacaaagctgaagcttgctttcgaaactggtattcatgatacaatcggcattgacctggtggcaatgagcgtcaatgacattgtaactctaggtgcaaaaccattgttcttcctagattactatgcaacgagcaagcttgatgttgatcttgcagagaaggttatcaaggggattagggatgggtgcgaacaatcagattgtgctctcctaggaggggagacagcagaaatgcctggtttctatgcagagggtgaatatgatctaagtggttttgctgtgggtgttgtgaagaagaataaagtcattgatggaaaaagcattgttaagggagatgtacttataggtcttccttccagtggtgttcattctaacgggttctctcttgttagaagagtactggagaaaagtggactttctttggatgatcagctcccaagaaatgatggcataacaactacggttggtgaagctctaatggcaccaaccttcatctatgttaagcaggtgcttgagattattagcaaaggtggtgtgaaaggactagcccacatcactggtggtggctttactgacaatatcccaagagtattcccctctggatgcggggcaaaaatttttactgggtcatgggaaatacctccaatcttcagttggcttcaacaggctggaaacattgatgatgcagagatgcggcgaacattcaatatgggcattggaatggttcttgtggtaagtcgagagtcagcagacagaattattgaagacacccatggatccaatcctgcttatcgcattggagaggtgattgagggtgatggggttcagtatgtctgacctcgtatgccttttatagtggcttgagacttgttggtctgctctgcaaagcagcagagtttatgtaacaacataatcttgtggtgttaagttctgcaccactactcccgctagaaagtgaagggtaaccaaataattatttgattggatccacgggaacttctctaaaggcttaccagaggaggccattagggggaaatacagttgttgagaatttttcatggagagcggtattgttttcgttgagtaaatttaaatagtgcaatttatt

SEQ ID NO: 79368 - DNA, 398 bp, Zea mays
  Clone ID: MRT4577_172410C.1
aggaatattaggcgcgcattagacatcaaataatcacgagaacacactcacgtgtattccgtccagcacacctatgggagaactcgaaaatccatacttccacctagggtacattaatgagggctaatttggaaaccacaatttcttaagggatttttattttcataaggcacattagttcattcttctatgggaataccgagtttccaaactagccttaaaagagtgcagaacttacatctgttatgccatgaacatacactctatgattaggcgcccgtttatgtttgaactcccagatttagagagcggctacacattggatgcaagttgccttacgtacaaggtagcaccatcctcgagccttgccctattgctcaatgccgggccataatgtg

SEQ ID NO: 79369 - DNA, 918 bp, Zea mays
  Clone ID: MRT4577_172411C.1
ccacgcgtacggttcgttgagagaccacccgggataacagtgcaaccatgagggtggaatggggtgcccttagcctaattaattaaaggaactagaagtgtacttgcttcgccgacgtgccgtcaatggggtccaggcacagtgcttgctctgccgaggttctttcgttttgctttttagtcgccctcctgcggggagaggtactgtgtttatcaaactggagaaacctaacgggcagctatgacctctacggaatctttgcaaaggcttcgatagtctccctgtacatacaccttgccggagaataacggggtctgcaaggcccgggactagaaagggaatcacggctcatgggtaaagagcgcgacctctgcatagggtagtgaaactgctatatcagccgtgctcacggttaagagcatccttgggatcctctttgattagagatacaaatggttcgagttacaatggttctatttatgattttggttcgatgatgataatgatgttcctcgatgaggaaatggttcacgggtttgttattactaaaatttggcttcccctgataataaaatacctgaccaagtaaaagcaactgcttgagcttaaccccacataaagctagtccccctcagccaaacgggacatttgctgagtatgttgatgtgtactcacccttgctttcacaaaacaccaggttacctttggtgcaatctatgcttaggtaaaaaaaaaggcgtcgaggcggatctccaggagttccggggcttcgatgagttcgaggattaggctagcgactacccccagtcagctgcctgtggtgggtttatttacgttggctacgtttctattctgggtactttgattatattatgtaaatgactctagtcttttatattattacttactctttattgt

SEQ ID NO: 79370 - DNA, 124 bp, Zea mays
  Clone ID: MRT4577_172412C.1
gcccgcaggctcggatccggaatttcgggcgcgaccgaggcgtccggagaccaactagcacaatagaaagcacattaggtgttccaacaaaggcagccataatatatacgggtccgtatgctcc

SEQ ID NO: 79371 - DNA, 224 bp, Zea mays
  Clone ID: MRT4577_172413C.1
gccggatactactttcacgcgatatcgagctcatcgaaacttgaatcgatcctccaaggacagaatgcatcgcagtatacaggcacctcaggatcgcgtatgggaatctgcgctccgacgacagcgcagtcgacccagtaactagactggccagcgatggaacatcatgcattcgtgggacggtataaagtcgactcagagcattacacgcagcgatagtatgc

SEQ ID NO: 79372 - DNA, 209 bp, Zea mays
  Clone ID: MRT4577_172414C.1
aatatcagatgttttttattggaagatatcaatatatacggaggcttaataacataaagtgtatagtctggcagagtatgtaaatgaattttaacaaactaacgatcgtcagggccaatgtgaactgacaaagccgcgtcacacaaaatcgaactcctaagtgttaggcgggtcctcttagaccacctgtacttatcctggcacttgag

SEQ ID NO: 79373 - DNA, 382 bp, Zea mays
  Clone ID: MRT4577_172415C.1
acacccttccggcccccaagagaaacccttttccccattctgtcggttgaggaagaggaggagaagaggaggaggttggtttcctccgattgggcctaatggtccaagcgttggttccgtcccaaggtccttcccccgttgttgtttccaatttaatcgttaattcggtttttatcattcggggattggggtcttcggggttggttggttggatctgccgggttttgccattcccggtttcggccgcgtccttggtccaggtgtccccgttgttcgtcccattggccggggccttggccttttgttggtacgggttggggggcaccttatcggccaaccccgaggtgcggttacccaatggatataaggtcgtccgttgtcc

SEQ ID NO: 79374 - DNA, 388 bp, Zea mays
  Clone ID: MRT4577_172416C.1
ggcacaacaaaacttttttttgaattcagcacaaaaacccccaacatccatacgttaattcaccccgggatcaaaaaatgggggaaaagccgatttttttgccatataaactaccacccggaaacccatttttcctattggcccccggattacatttttagggacaaaaggggccgggccctggatgtcgcccgactcattatacatcaggcgcgggatgctgagctgctgcccctggaaacgtttcccctgcaggaaaactggggaatgcacccccagtcccttgggaaggggggcccccaacaggggcaacagctggctggactaggcccccaggagacatcggggacattgaagatgtattacccagggattgttcaggggccgg

SEQ ID NO: 79375 - DNA, 425 bp, Zea mays
  Clone ID: MRT4577_172417C.1
aggaaggaaaacctaacaacataaacaggacccggccccagttacccgatcacacctacaaattcaccccgcaaggaccggaaaccggccccgcccccggccccggcacaagaacaaaggggggggccccctattcaaggggttatcctaatatccaaggaaccccgaaaaaaccggtttgacccccccgcccaacacaacacaaccccctttaggcccccctcaaggctgtcccggccgcttctccttgaacttggccaaaaagcccttcttctcccccgggcccccggggcccggggccaaagccccccccgggtgtccccgctgccccaaggccccgcccgggggtccccgctgcccaaaagccccccccgtcctcccccgggcgtgccggtcccccttgtggcccccgggcagcctctctt

SEQ ID NO: 79376 - DNA, 544 bp, Zea mays
  Clone ID: MRT4577_172418C.1
attccgcacctaaggctatcgcgtcgccgccgcgccgtcgcgcatcgcatcaatgccgtggcacaacaccttccggatcaagaagaagatgtcgaagaatatgagccagaaccgccccatcccctactggatccgcatgagcactgactataccatcacggacaacgccaagcgcacgcactggcgccgcaccaagatcggcttctgagcgtcgggattgggcggctgctgcgccagaaggctaaggcctactagctatcttccttctgtattatcaatgagtcagattttctgcacccttgcaagtggtgctatgacgatgttattaagattctgtggagcggtgatgttaaaacactataggctctactgcgttgtaccacaatattccttgcagcattgctatgctaagtatagaacccttgatcgtattatatatgtagtgatgcattgattgatgcccacagtgtgatcaacgattcatggattgtggtatctttcttaccctagcacctcaagatacaaaatagtgctctaggtaccg

SEQ ID NO: 79377 - DNA, 497 bp, Zea mays
  Clone ID: MRT4577_172419C.1
aattcattccggccattttaccccaccaaattttctttagaaaccttggaattctggggatttggtttaaactttggcctttggccatttttttttaaggaaatttttacctttaaaagcacaattttatttttttaaaaaggaatttaaaattttcccgttttaggctaaatttatttggattttttattttggaggcagcgggtttgggattccggggtttagggcaggtaaaaattaaaaggttaattggctaaacctttcggaatatggttggccggattccctattaaaattccggccttctttatgggaaatccttggcttccttccaatggcatgggccctttaaaatttaggcgatttattttttagaaaggcggcacttttaccttttttaaaaaaaaaagcttggtaccgcctggtaaaatgggcctttccgagaacctcaaaaaaccaattttcccttgaaaggaggattttatttaaaaaccaag

SEQ ID NO: 79378 - DNA, 169 bp, Zea mays
  Clone ID: MRT4577_17241C.1
tcgtaaaattctgtgcatctgtcattgtttctgtttcttaccatcgttttttactatcaggttcaggggttctaccatacacatttcataaatcaaaccagtggttacttcttcatcaatttaatacataggtttccccacctcacccgttaattaatgcttatacccc

SEQ ID NO: 79379 - DNA, 560 bp, Zea mays
  unsure (1)..(560): unsure at all n locations
  Clone ID: MRT4577_172420C.1
ccggggcgtgaatgacactcttttgtgtgaagactatttgcttgtttgaagacgttttggcatgtaaatgaaaggcgtatcttcaatccttttatctgttttaagtcggattgcatgtagtaacatcataaaataaaattaatatcttttagcgccttagttgggtggttatatataaaaatctgacaatgagcctcttattttttcctgaacaaccctgagctcctgagtcctgacatagggtaaacctagcttactgtttcatgtctcctttaaggcaacttatacccatcttatctggatagttaattaattatatggcttcctgaaggtgattagtagtaatcagctcatgcaatgcatagtaactcctgtttgttgcttacagatctgggggacacctgacccaagaagagctggatgtgtaaatcgcagagtacggctggatgtgcaaatgtcatggctgtttggatttcttctgacagctcgacaaaaccgtacatcatgcaaagagtcaggattccattctccctcataaaacaggaaaaccntcccttttt

SEQ ID NO: 79380 - DNA, 260 bp, Zea mays
  Clone ID: MRT4577_172421C.1
agaacaaaaaagcggcgttcgattttcccatttggggggggcaaatttcacggaaattaacaacagagacttgttgttaatattccaatattaagattaccattattcacataggaagcatgttttttttatgtccgaatataaaagcttttacaagcaaacaacacttaggaaccttcttgtaaggaggagtttcaaaactacgggatcgcaaagagaagcaacttaattcttgttgtccttgacgtgaaggctttttg

SEQ ID NO: 79381 - DNA, 413 bp, Zea mays
  Clone ID: MRT4577_172422C.1
atcacgacaagatggctttctcaaacaattcgatgagagccttgttggtcctgttcctggtctgcatggggcatggtgagaaggaagagtcaaagggcatcgatgctaaagcgttctttcctggtgggtccttcgacatcaccaagttggtctcctccgtcaatgtcatgacatacatcacgaatgctgttcaggaggcatggtcatcagcattcgtcgtcactgttaagcagacaatcctcatacccaagggtgacttccttgtctgacaactcaacttcacagtcccttgcaagggctacttgaccatccaggtttatgtcaatctgctggctaccactgacctaatccagtacatggaccatggtaattggatctagattctacttgtggattacctggtcatcaccttc

SEQ ID NO: 79382 - DNA, 443 bp, Zea mays
  Clone ID: MRT4577_172424C.1
actcggctcgagaccaagaaggtgccggaggaggagaaggagacggcggcgctcgtggagaggctggaggagctggaggagtgcatcgacggcctggaggccggcagcgacaaagtgttcaggagcctcgtgcagaccagggttgcgctgctcaacatacacacccacatcgtctagctccagagtccagactccaatctactaattactcatatgcatgctgtttacttgttgattagcagtcgtcgaaaaatgaagatgcatgagtgtaactgtaactctgtaaatacgtgagctttttgtacagttacgcttgtgtatgtttactgctgaatcattatacgtgctttgattatgttgttgggttgatctcattccagctatcgagtcggtctgaatcgaacaccttgtgttcctgatttggggcacaataatgacctttt

SEQ ID NO: 79383 - DNA, 429 bp, Zea mays
  Clone ID: MRT4577_172425C.1
gccatgccatagatcatagtcaatatatgtgcgtgccgaaccaataacataacatagaacttgaaaaacaaatcatcatatcacttggccttctgctgtatcggccatgttgtgaaactaaactatatcttaactagtaaatcgagcgcgcttcgcggcctagaaagcatcaaagcgtgcggagtgtctcaatgggtgcacaaatagtggttggttgaaagatgtgacagagtcactggcctttaacatgggagaaaagctacatatgccttctatatcctgaaagatgggtaaagatctcatacaaagaaataagggcgtgaatgcataacgccacccggttgtatccttagaccttaggattgtgaaacagatgggtcttcagtcttccgaacgggatgtgctcatataccagcaggcagcagcctc

SEQ ID NO: 79384 - DNA, 282 bp, Zea mays
  Clone ID: MRT4577_172426C.1
tcgagtgtaataaaagtctgcacaattcggtctgatgcagtgaactgatagctcatactctttctcatgggagagatgcggatccaggactacgtgtgtacaagtctgctgattagaactgcacgccgatgctaataaagcccgacccatgcgaaccaagcaatctaatcaatcaacacgctcacggacaacacagacgtggtgctagttggacccaaaccacaggccgatgttaaggcgctcgacctccgtaccgtctacatggagccagtaggtcactgt

SEQ ID NO: 79385 - DNA, 623 bp, Zea mays
  unsure (1)..(623): unsure at all n locations
  Clone ID: MRT4577_172427C.1
tgggaccctcgagggcggccgggagggcgtccaaaaccctcctccctaactggcccctctgtagacgagacgcttgttgctggggttatggtgcacgtcgcgcacggtttctgaagcttttagacgatcgaggactgggaggccagggtcgcgtcggcgacagcggagaatggggttggccaggggatggggtgggagcgccgcaagccatcgagatcatctgcggtttggtccagagcagcatccccatcgacagctgcctctactggagaagcgaaagctgatgaacctcctcctcctgggcgttatatcgctgcctaccgtcggnatggtcgtaccctacggcgctttcttcgtcccagacgcttctgggaacgggggcggcgggacctatgccaaggacaagctggctaatgatgatcacggagaaggagtggcntaacattgtggggtccaaacgaccgtacgctcgcgcaggggctattagggtgacctcacgtacttggtgcgggagaaggacaagacgctggccacctattggaataacgtcgggtgctcccacctcggctgggccgtgccgtggaacgggggcgagaaacaagttattctgcccctgccatgga

SEQ ID NO: 79386 - DNA, 286 bp, Zea mays
  unsure (1)..(286): unsure at all n locations
  Clone ID: MRT4577_172428C.1
ggattcctcggggggtatttcccgcggttttgcttggttttgcacccaatgtctttgctttcccattaggtgcccgcggggtcctcttggttgcgcccgcttatccgtggtccgcattggttatggaaannnttaggacggcatctgatcggctgggagccccgagctttgggtttttgtttctgcgaacgtctttgggggacggttggccggccgctcgggggtggtttcttcgtggggttgccctggccctttgtcatgctggttgccctcggctgctcctttt

SEQ ID NO: 79387 - DNA, 495 bp, Zea mays
  unsure (1)..(495): unsure at all n locations
  Clone ID: MRT4577_172429C.1
tgagcggactgttttgtgactgtagntcgatcgaagcccggggggctgatacagttcgattcggggggaggcattttgtccgagagggagttcacgtaccaaaaactcggcggcggcgtcgcggcggggtacgcggcgcgggagttcgccaagcagggggttaagcctggggagcttgcaatattggaaganggtgtggctttntttgttcgnccngccctaagcaaaggnnaccacaatcctacgagggctgcaagactccccccaccnnangnangngngggaagnggnggagagaagcnanngccngagnggaacacaaagaaaggcanngagcnganccccagnacagaaanngncaaagcngancnnnccaccaagacncngaccagngcagcnggagcaaacnncacanangagancnngcncanngcgacgggccccccggccagaaagcgcaccgaannnggcacacaaggagccgagnccaacaac

SEQ ID NO: 79388 - DNA, 1133 bp, Zea mays
  unsure (1)..(1133): unsure at all n locations
  Clone ID: MRT4577_17242C.1
cctcgaggccggccgggccggggtctctgcttgctagctcgtgcggtgccaacgaagaacaaaggatccatccgcggatcggcgatcgcgatggagatcgagcaggcgatgcgcggcagcagcgacgtccggctgcgcgccaagtacgacgccgctgtctacatcgtccgccgcgcctacgccttgtacccgttcgaggagctggctttcagtttcaacgggggcaaagattcaactgtgctgctgcatttgcttcgggccggctactacctccacagagcaagttcaggtggtgacgtggacgacgacagcacggtcctccagaccgtgaagaactgccccatgcggaccatctacttcgaggaccccgatgctttccccgaaatcgactgcttcacgtacgagacggcatcgacgtacggcttgccactggaaagtatcaggacagggtacaagtccggactagaagccctgctcaaggagaagcctaccaaggcgatcttacttggcactagaaacggcgaccccaacgcggttggtcaacaagagttctcccctagctcgcctgactggcctcctttcatgagggtgaaccctatcttggattggtcctacagtgacgtctggtctttcctgttaacgtgcaaggtccaatactgcagcctctatgaccaagggtacacttctattggcagcgtacacaacactgttccaaaccagcttctgcgtgatggcccgggcgggtcgtacaggccggcgtatacgctgtcagatgggagtcttgagagggctggtcgagcaaagaagaccgggaagagagatggctcggctaatggcacgaagaacaacggcaatgaaacgaaacaatagcctatcaactctggttgttctcaggtttattgtgaagaaaaagaatttcgtatgaaaaaaatgacaactgtacatgtgcgcgttcgaaggcaactcactattttatttactacttgattttatgatgtggtgggtgagggaccaagtatcgtgaacgttttctttgtgtgtgtgtgtgtttgggaataatggttcctccaccaaaatatgttctttttaagtgaaaaaacccaccccccgatgntntggtctgtcattgtggt

SEQ ID NO: 79389 - DNA, 1436 bp, Zea mays
  unsure (1)..(1436): unsure at all n locations
  Clone ID: MRT4577_172430C.1
tacaagaacaccatctacgaggccaacagatcccatccctgcaaaagccacctggtccaccacagaattttgctgtacaactgcagaatgcacagccaggacagcctctgcaggggcatattccacagattgggcagcttcaggccccacaatccacgggacctgtttcatctggccagaatatttcatctatgcaattacctggtcaacctcctgcatcacagccattgatgcaacggaatgcttctctaggtgctttacatgcccctccatctggacagtccaatccaatgcaagctgtccctggccagcagcaacttcccaccagtgttgctccccaaatgctcccacagttccggcagcagatgccttcacaagcgccacagttgctgcttcaacagcaggcagctttgcagtctagttatcagtcttcacagcaggcgatttatcagcttcagcaacagctacaactaatgcagcagcagtctaacctaaatcagcaaccctctgcgcaggttggttcatctgcagtttcttcaacatgtaactggacagagcatacctcccctgaaggttttaagtactactacaatagcattactcgtgagagtaagtgggagaagcctgaagagtatgtgctgtatgagcaacagcagcagaaactgcttttgcttcaacagcaccaacagaatatcgctgtacagcaactgcagtcaccgccacagggtcaatcacttccatccatgcaaccgattcaacagcttccccaggcacaaggacaaacacaaatgcatatgaaacagcaggaattaaattattctcaatttcaggcagctggttccattgatcccaacaggattcaacagggcattccagctgcgcaagaacgtgcttggaaaaattaagtctgcaggtcgcaataataaagcgctagtcaaagactggggaagtgtacaagcccttgtgctgcccaatttcagtgcctgcacagcctttcgccaacgctgatgagtgtaactccggatttagatttagactgatacgtagatggtagatcccgtatgtgtacattgttgcaacttaggtcatgtactcgtgtatatttttcagcgtgctgccgtgctggtgtccgtacctagttggtagatgtcgtcacttgtgttttattttcgactgtggcatgatttgttatgttcggcactacgtgtgacgctctggttcttctcgtgtgctgtgttgataggggttaggaggaactcatgttgactcgctggccatttctcagagtaagcggacatttgactcgcgaaggcctggggcaaaaaaaaaaaaaaaaaaaaaaaaaaaaaaaaaaaaaaaaaaaaaaaaaaaaaaaaaaaaaaaaaaaaannaagggcgncccccggcatgtgagcctcggccggaccccgggaatt

SEQ ID NO: 79390 - DNA, 858 bp, Zea mays
  unsure (1)..(858): unsure at all n locations
  Clone ID: MRT4577_172431C.1
tgggacctcgagccggcgggagggatcagttctgctcgcacacgccgcctcctcctcctccccgtcacctcttcgccgcggtggctcccatcgtcccacgcctccctcgtcatgtcgaagaaggcgactctccatcccttctgagttccgagctcatgctcccctccgcccctggcatcacgccacgtcccgcggaccgtactatcacctccatagccgtggtcgctcggccacacgtaccggtcgctttgcctgccgtcgctgcggcaacagccgtgatacctgcattcgtcagcaacacgtcccaaaccgactaagcgtcccgggccaccgcgatacttcatttccgaaatcgctgcggctgcagcagttatgcctgccttgctccaaatatatagcattgagactgagtagcaaatcaagttgaagtcctcggaagttgtcaaacctcttttttctcttttttggtatgttttttagagtccaattttgctggacctagaaataatggctacgacttggtccacccggcttccaacatatgtaacttcttgcgtcttcattaaattgtgctaatataatgtgtgtttcgttttgttttgtcctgccacaggggtgaagtctatgtgggaacactgaacctgcaaacgagatcgtagcgattcgacaatatcacaagaggatcatacttctactccatganaactgtaacctacttgagctnaaagaaatacagagcctataagaaggaaatgtatgagatgcaaccaatgtacagtaagcaacttaccatatttctttatgacaattgttccaagaattaataagtattccagtgagcgtctcanaaatggaatc

SEQ ID NO: 79391 - DNA, 2347 bp, Zea mays
  Clone ID: MRT4577_172432C.1
agcagcctttggctgtacacagccaactctccacttcttttcttttcttcttcttttctgttcttcacacttgaacaagatattagtacacaaaaccaatgcactgaggcttagaaacatacctttacttgtgatttgcactttgttcatccatgggcatattttcacatttaagcacttgtgtttgcactcaatcaccaaaatacttagaaatggcccaagggcacatttccctttcaatcctttcctaccccctggtgcttatcgcagggagactcagctgcgtgctttctattcaaccacagaagaaatctcttctctgtttgcgaaacagcaggaacagctgaaagctatgcagagaactttggaggatgaagagaactatgagagcaccttaatgggtgtggatcttaataaagtgcctctagccactgataatgctggtatgaagccagtagactgctcaaaaaatacagtgggagcttcaagtgcttcaccagaaaatactcaggtaagtgaacatgattccagtgacgaagatgccaacatgactgagcagcaggatgatgatggtactgccattggtggcagcactcaaggtctagaatgcaccagtccagaaaggtcagaggggaggaggtcaggttttcatggcaatcctgtttctacagctcctgagagagaggttacagataccgagcaagttcccgagacagatagccaagctggtaatgctggttgcgatgaccaaagatgtgacaacacaggaggagagactatgccactagaagatgatatgctgctcccagataacgaggaacctactgcattgctgaaagatgcagggcagccacaagcaaatgtggttcctattccaatccccggtgatggcgttgggcactgttccgaagaaaaacatgagggtgcctgctctgagagcaaacgggaggacacacatgctggagccatcagaacggctgatctgttggcctcagaagtcgctgggagctgggcagtggaaacagctccgtctgtcaatggggagaacgaatctccaaggagcttgggcgatgctacagagcacgatgaagctggaggcagcgtggcaggcgatgctttggtaactctggtgaactcagagggccaggcggctgggagccagaacaatgttgagcgtggcagctccaaaataacccatcatcatcatcatcatcgtcatcaccatcgtgttcttagtgccatgattggaattgttgatcctgagttcaggaagcaaatgtccggcagaagcggagttggaaacgaggaacccatgtctgacgccgagacgggtgagggcatcgaggaaggcgattcagattcaggttcagacggcagtgacagcgaggaggctatggttgaggattctgtcgtttagcttaaacagaagtgactgctcactgtaaatatacctcaattcgttttgtgtacctttcgttgtatcatcatgcgtagcgtaagcccctcgtgtgcatttgattattttattcgttaggtgtcctcagcagctcgtggtgcatgttgtacgaaatcgaggccttttggtcttcaacacaaataaatatatgtactcacttggtttacaattataaaccgttttggttttttagcatgagacaatagacttcatctcagtctaaactacaatttgaacccaaaacgtgtcgcgcccgctacaaatgataatgtgatatgaaactgaacttaattccaggaacctgtcattcaacttgtccctcattttttcatgacaagccttggattttagaccagatgaagatgacccatctctacccctgctcactgtggccttgaagaaaatacatcactcgactatcgaccgcaggcaatgaaacaagagagccggcacatgcatgccacaactcagaattcaggcacttgtgctcttcagcttctcgagggtcgcacctgctctggcaccacgttggcagcaaccatcatcatcacagcataggcaccagcaggccggcgatgaccgcacaggctctggcaccacgaggccgtggacggaaatcgacgctggccatggacggaaatcgacgctgcgaggtggtctggcagagtggagcctcgttggagggttgaaggcgacacagttgtggtatagacaccggaagtggttatgcggagatagaacttaggagccgaagtgaaggaggcggatgtggcgcggaggagcacggagggcggtgccatggatggggatgaggaatgggagaacgtgtgctagggttgccgcagggaatgcgaattgaccgggtaggtgagacgtccccggccggcctcg

SEQ ID NO: 79392 - DNA, 294 bp, Zea mays
  Clone ID: MRT4577_172433C.1
atggctagagtcaggtctactgccagagtatcaaacgaaggagaagaagctgaagctactaagacgacccctatttcagaaatgatgaaatgttctaggttagttgtacgagaagaggaagagtctcttctgacaaaatatgttgttgttgccgaagctgaaccaactattgccgaagctgatagtgatgatgaagaggatgacaacattttgagtccgagcaaacctagccacattgagtttggaaaatccacagttaaggcggaagatttggttttaatgaagaaattatga

SEQ ID NO: 79393 - DNA, 476 bp, Zea mays
  Clone ID: MRT4577_172434C.1
gtcgacggtatcgataagcttgagcattgctctcaacttcctcggattcagctcagttgaatgacattactatatgaaaaacatgtttaaaatgatcaggagatatcacactatcacagattatataatggcatgtatagctagactcgtatacaccacgttagtccgataatcgactaaatcgtagctctgataccaataaaacatgcattagaaacaagtcaaaacattagaatctcaaagaagtattttgcaaaattttaaattttttcaaagtgcaggggacacacgcccgtgtggtcaggccgtgtggtatttgacgtagggcacacgaccatggccccaacgtgtgtaaccctttgacttgcaatacatttaagtgcaggggtcacatggccaagccacacgctcgtgtgccaagccgtgtgattaattctgagcattctgttttgaaattttaagatgtaggggacaca

SEQ ID NO: 79394 - DNA, 773 bp, Zea mays
  unsure (1)..(773): unsure at all n locations
  Clone ID: MRT4577_172435C.1
tttggccggaatactatattgtcatatctacatgcctttagaaaagccgcccagatgtattgatgtgtcattgtccgtaggggaatcttagggaaactaatgatgggtttagcttttagccagttgaggggataagcaactctcgggttgtagctgtgacaagtagcaaattggttgaagaagtggcaaaccgagacttagagcatgtttgtttgagattataatttgcataggttatataatctaacttattttgaactaaacgttccttcaaaataagtcagattatataatattataatcccaaacaaacatgcctttaattgacaacaacctagaacattttgcaagagtttattggcatatcttcataatgcttttctttgcatcgttgtttgcgatgacagagaatcacaatgcaatttctgccacaccttaccattatgcaccagacattttgtttgcgtaaccttgatccacgcatgccgttactaatctgaaatatgttgatgcagggaggggaagaagttcctgagctacttccggtgttgtatcaaggcctgaagaggtgctgctctagtgcctgcagtccctgtgtnttttttttcgcagcagaacacttgtgagcaatcaggccctcggttttgntaagtaccccgtgtccaaaaacgtgtaatatatttgtccttatggatcagtcgttgggcctgtatgaagaaagaccagtttatggggtaagcaacgttctttttgtacacatacatcaccatcga

SEQ ID NO: 79395 - DNA, 1400 bp, Zea mays
  Clone ID: MRT4577_172436C.1
ccgccctcgaggccggccggggatcccaattcccttcccatcccacccccgcacccaccgtggcccgagtcgccgtggccgccgcgtcaggccggcagcgccctcccggcggtgagcgcagcccggcgcgcgcgccgcggccaccgcgcgcgctcgaagcgcctagatctagggactagcggcccccctcctccatggcgcggcgactgccgttgtggacagcactgctcctccccttcctcctcaccggcgttggtaccgccgtcgctgcatccccgccccacgatgagtgcccggtgcctactatcgtggaatccgttcttagtactcgagacgcgtgctcgacgctggatcttggcaacccggtcggcgtcatggagggggatgagttcaccttagcaacggcagttaatcttcttcatgcaaacaaggatgactatattgctgtacttttctatgcctcgtggtgcccattctcacaagaatgcaaaccaaatttcgagacactggcctccttattcccaaccattagacattttgcatttgaggaatctgcaattaggccaagcataatttcaagatacggcatccatggtttcccaacactctttctcttgaattcaaccatgagagtacggtatcatggaccaaggactgttaaaccacttgcagctttctatactgatgtctcaggtatcaatgcctcggtcaatgtcaagtcaactgcaggggagaccatggtacatcccttgcacgatattgagcgtaaaaaggatgctgaacaggaaaattgcccgttttggtgggctcggtcgccagagaaaatacttcagcaggatacttatctagcattggcgaccgcatttgttattttgaggctgctgtatcgtctttttccaaagatagattcctttgctagatgggcatggaggaggcataatctgtttgcaaacttgatgggggcacatgaatatttcctcacctaccttgagcaaggaagacagaagtttcatcggctatacccttcaagttcgaagcgaggaaatctgcaggagggggcaatgaacgctaccgcttgggcctccaaatcattagcatcagtttcgattggagaaccaagtgcgattggaaggacaaactctacaagtgagcttagatgaagtgtaaccttttttttctccccagggattatatgtacagtacagtagagcgatcaggatatggacacccagaaactgttgtaacggctgtattactctttgtatcctctcctccttagaataaatacatccatggttttgcaccttttttttgttgttacatcccaattctttggaggagtaaagtttctggtgtattgtgtagtgtcttgtgttctgaaatttgaaatatgtaccaag

SEQ ID NO: 79396 - DNA, 695 bp, Zea mays
  unsure (1)..(695): unsure at all n locations
  Clone ID: MRT4577_172437C.1
ggagttgtcccattctcctaaagaaagcggcagtggaggggcacttgtgccgtcaaccgcaccttaatagctcagctcaatcgaaataccaataggaagatggcattgaaactataaacagaccgaaaagatccaatctttcgagggatagtttgggattagggtgccatccttgcctttccatcccgaaccggatatacagaactgtgatagaaatctagggacaaaggtgccattcatagcggtagatggcgcggaatgcctaaacaaagagaaggggtgtagcgagatccaatgaaccctggctcttactcttaaggaattggaggcagtggacaacacacacttatttatttatttaatatttaatcaaatgaaatgcncaccagggagttgantgccgtgctccccaaggagaggcccctggaaaagccttgttttttatgttctggagctgccatcgtcttattcggacccttccccgcatatgatcccgcgcaacaacacgcaactgctaagcggatatggaaacgagagcagttcgcctctttcgagggatgtcccaatcgcttaaccgagtcgacccatggcccatacccctattttggtttgatctatacccaaaaggtatggagctcttaagcccttttcgaggcgagggatggatatgggctttccctgccaacatctctagt

SEQ ID NO: 79397 - DNA, 268 bp, Zea mays
  Clone ID: MRT4577_172438C.1
cggacgcgtgcgcgaccacgatgaggatgactaagatcatgatgacaacttcccaaacaacggggggcaagctctaaaaaacaagggctctcaaaagaaagatttgaaacatcacgtcattcaacacctcaagagataccaccatgaagtggaaagggcatgtcaacaacgtgtcctgtatggtaaagaaatcgtcgtaaggggcaacgaatcctgccaaatctaccaaatgcaaacttcagctctgaagcattgtttaatcacttca

SEQ ID NO: 79398 - DNA, 258 bp, Zea mays
  unsure (1)..(258): unsure at all n locations
  Clone ID: MRT4577_172439C.1
cgaaatgcctgcaagaaccaagatcggtggtggttcaagtacctccgaagcatagggaagaagtagatttagggagactagttntttnnacttcctgttcaaaaaaaccactttttggcttcttgtcaatcttgctgtgaaggggttagacttgttaagtggggggtgggggcgccgggnaaacattagcctctaaggggtgggtttatatctgtgaaaacttgcatttgccttttaccgtttgctctttttaattac

SEQ ID NO: 79399 - DNA, 840 bp, Zea mays
  unsure (1)..(840): unsure at all n locations
  Clone ID: MRT4577_17243C.1
ccggccggggtttgaacaatgaaccagaattcattgatgagctgttatcactacttagctatgaggatgagatacccgaaaagattcggatactgggagtcctttcattagtcgcactgtgccaagatcgacctcaccagcctactgtattgtcctcggtaacttctggtggtcatcggggtatccttcctattctcatgcagaatacagtggattctatcatcaatggttctatgaaatggtccataatatttgctgaagcacttctttcgcttgtatctatgctggtatcatcaacaccaggttctctagctctacaagaagcaggttttataccaactattttgcctcttctcaaagacacaaacacgcaacatttacatctagttagtaaggcagtgcatgttattgagagcttcctggattatcacaatccttcttcagcagtgttcagagatctaggtggactagatgacactattgctcgtcttaagctagaagtatctcaagttgaggttgattcaaaactaattgaccattctaccaatgaaggaaacgaggttgaaagttatccacctgtgcaagatatacaaccttcatgttctgaatccttgattttgtatcataggaagaacttaataaaagttttattacgtacaatatctctggcaacatatgtgcctggtagttctgctcgtgttgatggttcagaagaagatgtgttacctccatgtttatgtgcgatttttaagagagcaaggacttncgntggntggtgttttctcacttgctgcaaatgttatgagtgatctcatacataaagatccaaacatgctatac

SEQ ID NO: 79400 - DNA, 2614 bp, Zea mays
  Clone ID: MRT4577_172440C.1
cattgggtacctcgaggccggccgggccacgatgggccacgccacaccactgagcacccttcctccctgttcttgcctctgtcctatactactactactacccatctttagccgccgcgtgcatgcaagaagagaaatagccgccgatcgatcagcgctcgaccgacccgtcatccttgacgaacgaccagctaggaaacaggaggcaccttctttgcacgtgtcagtgccagccagacgaacccaagggctagctgtcaggacggctcagctccagctttgcggccctccagctctccccagttcaagttcaatattggcgagcatgcgagtttgccctcttccgtcgtcgtcatcatcatcgtcctcgcgatcccggcgtccctgtttcggcctacgcctcccgtagacaacagttgcgccctgctctccggcaagctatggccaagctgagctgcttccccgctctgctccccggcaagaggaagaagaagacacgcaagatcaccgatgctatcaaggccagcggcaacgagtgccccaaggtgaagccggtcgaagtcgaactcatcgacccgacgcttggtgcaggcgtcgtccaggacgtcgtccccgccgagctctcggtcccccgtggaggaccgcaacaataaggaagcggctgatcaactggtgttggtgaaggagagcgatctgtcagatttcgacttcagcttccacgcggccatgaagcccgtccggtccgacagtgacgtggcactggacacctcggccgacgctgcggtggcggacacatcgccgaagctgaagcggtcttgctccaacatcgagactaagcgaccaggctcgcgttccgcgcccgagatgccggcccggtcgcgctcctacggcgatctgggcaacctggtcgccggcctcgccctggacgcgacggcgaccccgcacggcgcgccggaggccagtccggcgtccgtgaagacgtcgcgcaccgccgaccgcgtgatgctgaagaagcggtcgtccagccaggtgctgccctcgcgcagccggaagctctggtggcggctcttcctctggagccaccgcaacctgcacatgccgcggtcggcgcgcacggcccaccgatcgttctcgcctggccgccacgacgggtacacctcggacacgttcgaggagggcccggccgccgaccgcaagaacaagacggtcatggtcgacgagtcgccgccagcagcgtctgtgcccaaccagtgggtcgccttctgcgccgagagctccatccacgaccgcgtcagcgcgtgggtcagcagcatcgaaagcgagcctccgttcgatatcgccgaggaggatgacgacaactacgacggagaggacgatgaggagaatggcgagtgtgcggcgtcgcagccgcgccatctcgagctcggggagccatcgtccgggaagggcggaaacagcaaatccaagcgctgcgcaacgacggccgacgaggtcgtccaggccaacaccgtggtgcagtccctgaacgccttctcgtcggtggcgcacatctcagggatgggcctcaaggtggtgccgatgatcgcgcccttctcaaccctccgggccgtcaacctctccagcaacctcatcgttcatatctcccctggatcgctgcccaagggcctccactctcttgatctgtccaggaacaagattgccagcgtcgagggcctccgggagctcacaaagctacgcgtgctcaacctcagctacaacaggatttcgcggattgggcatggtctgtcgaactgcacggccatccgggagctgtacctggcgggcaacaagatcagcgacgtggagggtctgcaccggctgctgaagctggcggtgctggacctgagcttcaacaagattacgacggccaaggcgctggggcagctggtggccaactaccactccctcctggcgctcaacctcgtaggcaacccggtgcaggccaacatcggcgacgacgccctgcgccgggcggtcacgggcctcctcccgagccttgcctacctcaacaagcagcccgtgaagccgcagcgcatcgcgcgggaggtggccacggacagcatcgcgcgcgccgcgctcagcggctcggacagccggagcatccggaagaggacgtcgcggcggctcacgcagagcccccgctcgtcgtcgttgaccagggcccgtggcggcggcggcggcggttcacccacaccaagaaacacctctcgtcgtcgttgaccagaagaaccaactgcgtgattcgcgttgctctttggagacgggagacggcggcgtgactgcgtgcaggcagactcagacgacaccatgattcggcacggcgccagcatgatatgagacaaaccaagtatataaagcaagtatgatgtgagagaattgcgatgcaacacataatgtacatacttgttagggagatattgcttagattaatactacgaccgatgcatctttgtacctgaaaatatcaatttgagcctggttgaagatgaacatccatccaacatcgcagtactgccgcttcatggaaaagggcggaaaatctagaggatccaagctctacgtatgggtgtatcgt

SEQ ID NO: 79401 - DNA, 186 bp, Zea mays
  Clone ID: MRT4577_172441C.1
tcctcacttggccaccataacccaacctcttctcccctgtttcctctcgtgcgttctccgcaggagcgaggagggctcgcggcagcggcagggtctccggtgtttttgttccagaatctgtacaaaatgaatgacggagaggacatccaaccccttgtttgtgacaatgcaactgccatgaacaag

SEQ ID NO: 79402 - DNA, 301 bp, Zea mays
  Clone ID: MRT4577_172442C.1
gttgtaacaccgccgcccatgcccgctcctcgatggcccttccccaccaggccacgacggtctccgtggaggccgcctttgcgttctgctcagagtaggtccacaccgacgggggcggctccaccttccgcttccccggcttctactcctccgcgtcctcctcggtccttgccaccgtcgcgtcgccgcctcagcaatccaatgtccccgatgaggcgctgaaggtttcgaaccagctgcctcgcataacatcaatagaaggggactgatggggagctcaccagtgtggccctgtttggcg

SEQ ID NO: 79403 - DNA, 403 bp, Zea mays
  Clone ID: MRT4577_172443C.1
ctttgggctgatttatgtgcttgtggatgtgcgggcgaatactaagggctcgcctgattcgattcgctagatcgccgtcgatacgactaagggtaagatattagatgagacctgtaagattcctaacactaagaacgatcctattttcgaggaggaagaggagacttgtagggagaattagcgggttcctgagcaaggaggcgtcggactcaccgacgttcaagcccggcggcgctcatcatcacgctcatctcacgccgcttcaacggccgcaagcaccccgggagctatcccgtccgtgaacgctctgtgcaagatccacgcggctaacggctggccaccaatccaccattacgaaagtatcccgctcgtcgtttcaagaggcccagctttacccgtacca

SEQ ID NO: 79404 - DNA, 380 bp, Zea mays
  Clone ID: MRT4577_172444C.1
cggacgcttgcttcgacccacgcatgcagtcacgctcacggctgccttacaagggtagggtattgacaatactccgatgtgcaagatcgccgaccagaaggcccctgccgtcagcttactcccaatagccctggccgacgaccccgagcactaccaccagctcacagtaaaggagctcaagaacgctcgactgcccaccttgtacacgctaggtttctcggtacacgtatgctcatcgtcaacgccatgaccgagatcctccctaaccacctcagtaaccaatacaacaccaacgcatactcctacctgagaaacttcaagtacctcaactaagctaaacggctatgctatgcctactcactggcattcggattctacac

SEQ ID NO: 79405 - DNA, 238 bp, Zea mays
  Clone ID: MRT4577_172445C.1
ccacgcgttccgccaatccatcttgggcgggcgccgctcgtcgagggctagccaatgcttgccatggcggacgtccggtctgcctgggtccagcaccatcaccgtcgttccgatgcgtcgtctccggcatcctccgcggttgtgccggctgcgagggtcgctgacgccctgcgccaacgcccgcggggtctcgtgcaggtgtcgtagcgggaccagggctcgttgtcgactgagcacc

SEQ ID NO: 79406 - DNA, 352 bp, Zea mays
  Clone ID: MRT4577_172446C.1
aagattttaggggtgttatgaagacttgtgtcttagggtgttatgatgattacatttacttgaggcagttcttccctcaagcactaaccacatagatgtttggagaccttcgctgctccttaagtcctaaaagggccatgcctcatgaaaccgattgggctttgaactctttggggttcgaagcccatgagaataagggacatggtctctttttgttggatgtaccttggccgttataacgggtttttaataatcgaatgctttgtttcatagtctatatctataaaaaaaaaaaaaaaaagaatcccttgaatcaacgtaaaagcataatatatcaagtcatagtgataag

SEQ ID NO: 79407 - DNA, 661 bp, Zea mays
  Clone ID: MRT4577_172447C.1
cattgggaccctcgaggccggccgggtactgcatcttccgtctcctatcctcctagcgtattcgccacagatttctcaccagccgctaccttgcgatggctcccaagtgcggataatgaagacgtaggcgaacatgcctgcagaggaggccgcgacagaaaaggagaataatgatccggcggagaagaattccaaggtcgagaagcgacttccggtggcaaagaccgccggctaaggatggtgcgtagggcaataaggggaaaaagaaagtgaaccatagccgatggagacctacaatatctacatcttcgaggtgttgtgggaggtgcaccccgacttcggcatctcgtccaaggacatgttcatcatgaactccttcatcaacgtacatcttccagaagttcgcggccgagtccgacaagctgacgctgctataacaagaagcccaccgtcacctcccgcgagatccagatctcatggcgcctcgtgctccccgagcgagcttgccaagtatgtcgtctccgagggcaccaaggtcgtgaccaagttgactctcttctttagggtcgtagtactaagctggatggagctggtacacgtgcctctagttatctgctactgctatcgatgcatgatatgatctgcgtctatttgagctgat

SEQ ID NO: 79408 - DNA, 208 bp, Zea mays
  Clone ID: MRT4577_172448C.1
taaaaaaattcaaaatataataatataaaaaaaattaacaaaaataaaattaacaggctagcgggacactttcattacgcgatttaagctcttctataatcctctcctaaattcaaatcactttaccttcattttacaactcttttactttttattccctttctctacccaacttaatcctttttgctttcattatcctctttcctaa

SEQ ID NO: 79409 - DNA, 1015 bp, Zea mays
  unsure (1)..(1015): unsure at all n locations
  Clone ID: MRT4577_172449C.1
gtttacaggcttaactcatgtgatcagcttgtaagaaaaataatgaaacatcaataaattttccattgtttttaggtgtaaaaagatttgcagaaagtcagaaaaacaattcagtaaatacacccactggtagaattggagattgggatgctcagggcagtgagtactgagagcttctcgagtcccattgttgcacctatgccttgacaattatgggtaaccatactagcagagaatagttgcgagtgtagatactgtaagtttttgtgtacatttcaggtgcctgattttttgttgttgttcgggcaataggcaattggcacgaggtttgactatagaaaaaaattgtgaattgtcagttgtcccggtgcagtggtgagagctgtctcactgagtcactaggtcgcgggttcaaagcagtctcttcacatttgtggggggagacttgtctcggtttattgcttccccaaactccacccgtatgaaagcctctggcagtgggtctgcccttttcttgtgagctttccttttaattgtactatttggttgtataagattgttgcctgcccaaatttcaggcacatgaaatatagcaattctcaaccatgttcgtctgtgtgaagtggcttgtagctttaggggaagaattaagttaaaacagaatattgcactttaagttcttatatatatctaagagttcatgactcctctgtccatcaaatgtgttgacctaggcaatattatggcttctaattagtgttgagttggtgggttttatctgtagtgttagtgaattgtgctgcatcaagtggaattgcgaatgaggtaaaagggaaccgtgaaatgtgaaacacccaagattaatcacctagtacattacaagagaatcccaaaaccaaactctagctttttcaatcctagatgggccagtctgtgattaagttgctttaggtgattggggtcacacattgnttcttctttatggaactattgtcatttgaccctttcatgccca

SEQ ID NO: 79410 - DNA, 294 bp, Zea mays
  Clone ID: MRT4577_17244C.1
cggcaaaccatttctttcccttaaaccctagccaaaaacccttctgctgctccccgcccgccgcccgccaccatgtcgatggcggtggcctccctccgctccctggcgcgccgccaaccccgcctgcgcttgccccctgcgccgctcgtcgtacccggcggccgggcagcattactttccggcgcggccgaggaggcggccccgttggctgccgcggaagcggcggcgccgccacctgttcccggtcggaaggtgctggagagtttccgcgaggagtttgagatcggggggcgc

SEQ ID NO: 79411 - DNA, 879 bp, Zea mays
  Clone ID: MRT4577_172450C.1
aacagtgggaacaacgcagaggcccttttttttttttttttttttttttttggttttttttttttttttttttttttttttttttttttttttttttttttaaagcaaagttgaaccatacatatcctctcaaattacaactttgttttgcctggttcagcttaagtacaagcttataaggttacatgctccacttagattagaacaaaacgctcaggatcaattatgccactgccactaacacttcttgcaggccacttagtcctgtccatgatctatctgactatctgtatagctcagggagacgatagcctgtcattactatcttatctgcaaacattttgccagtctttggcataatgtgccagtgcattgtcaagttgaattccttgccctttagattgcttccctggtcaataaatcggtacttgtttgtggtatggatcaaaaacttggcatgctcctttgcaggtataatgccatcccaaagggaaacttgattcaaagcattctgtggagtttcatactctgctgccacaaaaacaaacacctcgtcgttgccgttggcctccttctggaaccagtttagattcaagatcttaacggaggcagtgggtgtcggggtgttgaagttgtcggagaaggaggcggcgaagcaaatcgcggccagtatggtgaccgcgaacgttgccaccgcgttggcgcggtgcccaaaggagtgcatcctgtcgcggctccggttactccctcgccgcacgcagcagacgagatcgccgggcctccgctgccgctgctgctccttcctcctgtcgcggcggcgccggcgacttcactgcagtttcctactctgtctcccggccggcctcgaggtacccaatg

SEQ ID NO: 79412 - DNA, 400 bp, Zea mays
  Clone ID: MRT4577_172451C.1
aattccctggtcgactttgcgttctagtcggcggccgccttcaggatggccaacgaggggaaggcgtagagatcgagcatgtgtacgtacgtgcatggtaaactggagtgtgtgctccggagcacggtacattcttggctgctgctgttgctttcatgcatggctacgatgaaacactcaaacacacacacacacacaaacgcacacaaccaaggcacgtgaggggcagaattagagatcgagcatgtgtacgtacgtgcatggtaaactggagtgtgtgctccggagcacggtacattcttggctgctgctgttgctttcatgcatggctacgacgtaatacgtgccttggttgtgtgcgtttgtgtgtgtgtgtgtgtttgagtgtttcatcggtgaa

SEQ ID NO: 79413 - DNA, 840 bp, Zea mays
  unsure (1)..(840): unsure at all n locations
  Clone ID: MRT4577_172452C.1
agagaaggaaactgcagtgaagtcgccggcgccgccgcgacaggaggaaggagcagcagcggcagcggaggcccggcgatctcgtctgctgcgtgcggcgagggagtaaccggagccgcgacaggatgcactcctttgggcaccgcgccaacgcggtggcaacgttcgcggtcaccatactggccgcgatttgcttcgccgcctccttctccgacaacctcaacaccccgacacccactgcctccgttaagatcttgaatctaaactggttccagaaggaggccaacggcaacgacgaggttagcatgacgctgaacatttcggccgacctttcgtctcttttcacgtggaacacaaaacaggtaaatgtgtatttctggtacttcagacccttcccttcatggtcgccattcccagtttccactaagttttactgcactagaaagtatggttttagttttgtgtacgaggtcaacactgaaaagtaaggaatcctcgagcacaggaagtactctctccttaatgtttgtgtctttgagcgaatgcgaatttgaacctgagccttggataactgttagagtgttctcagtttgcagaatggtctatgagaaatataatgggaatttgccagaaaatttcggtgaatcatgatacatctgtgcgactaaatctataatgcacctgatctattagtgctgctcaaacgaaactttaaaagatcgctgcttaactttgcttttgttgatgcttaataggtgtttgtttttgtggcagcagagtatgaaactccacagaatgctntgaaatcaagttccctttgngatggcattatacctgcaa

SEQ ID NO: 79414 - DNA, 954 bp, Zea mays
  Clone ID: MRT4577_172453C.1
agacttccaaacgtagtgctccacgaattgcaaggcatacctttcaagttcagaatcaacatttgataggcaaatcaaaattgaaccatacatatcctctcaaattacaactttgttttgcctggttcagcttaagtacaagcttataaggttacatgctccacttagattagaacaaaacgctcaggatcaattatgccactgccactaacacttcttgcaggccacttagtcctgtccatgatctatctgactatctgtatagctcagggagacgatagcctgtcattactatcttatctgcaaacattttgccagtctttggcataatgtgccagtgcattgtcaagttgaattccttgccctttagattgcttccctggtcaataaatctgtacttgtttgtggtatggatcaaaaacttggcatgctcctttgcaggtataatgccatcccaaagggaaacttgattcaaagcattctgtggagtctcatactctgctgccacaaaaacaaacacctgttttgtgttccacgtgaaaagagacgaaaggtcggccgaaatgttcagcgtcatgctaacctcgtcgttgccgttggcctccttctggaaccagtttagattcaagatcttaacggaggcagtgggtgttggggtgttgaagttgtcggagaaggaggcggcgaagcaaatcgcggccagtatggtgaccgcgaacgttgccaccgcgttggcgcggtgcccaaaggagtgcatcctgtcgcggctccttttactccctcgccgcacgcagcagacgagatcgccgggcctcccctgccgctgctgctccttcctcctgtcgcggcggcgccggcgacttcactgcagtttccttctctgtcttccttttctcgggaagtgcttacggagcccgtgcagtgccgatcctcctacacgggctaggctcgtgc

SEQ ID NO: 79415 - DNA, 220 bp, Zea mays
  unsure (1)..(220): unsure at all n locations
  Clone ID: MRT4577_172454C.1
ttggcttacactcgctcggttcccaacgcgcacccaacatgggcggttcgaccggcgccgtcgacactggcggcccggcttcttcttccttggcagaggccgcggctggacctgtactggatcaaaagggcttttctgctggtggcccttaggccgatgcgcccgcgcccgcgcccgngccgaagaagcggaagctcgaggaagcggggtttcacacctt

SEQ ID NO: 79416 - DNA, 308 bp, Zea mays
  Clone ID: MRT4577_172455C.1
tagctgccatccgctcgtagctgaatcggtcagcggcactgcgatggtgataccacggcggcggcaaggtgcccgaggcctgcccatgtagagcggctgcaccctggtccatggcaaacatgttgtagccagtgcacacgtaggttcctgcatcactcagctggacgttgcgaatggtcaggatgccattgaaatccatggctcgcgtgggcacgtttcccgttgtgcagacgggtccacaccagggtataggctgtggacttgcttttggctgttcagatgaaggtgacgtcagctgcggggcgcac

SEQ ID NO: 79417 - DNA, 356 bp, Zea mays
  unsure (1)..(356): unsure at all n locations
  Clone ID: MRT4577_172456C.1
ggccacgcgnttcgccacgcgttcggccattcgttcggccacgcgttcggccacgcctggggaggaaaccattaaaggtcaagttgaaggtcttggtttcaacaattcattccttgatccttgtgggtttccttctttagattgtgggtttcactgtcttccatccaagaaacactgtacaaatcacctaaacaggtaatgtactcaggagggggtgatgaaaacaagaacctcaaactcaaataagtacaaagagggttctcatgttatggagtatggtgataagaccttcaaggatgagaagctntccttttatcaaggttttgatcctgctaatgccaacattgcaaacatgc

SEQ ID NO: 79418 - DNA, 334 bp, Zea mays
  Clone ID: MRT4577_172457C.1
actcatgggcaaatacaagcctcaaaactgagtcgtattagaccgtgtcaagcagccctcgtcgcacccagaagtcgaaaatcttgggccctgccaagatggcgtgaatcagtccgttgccgacgccttcgaaggcctggacacagaagataaactcgctggcgtcaacagcgcagtggactgcaacctcctcgatacgtatgcctcaggttcggcaactgtcatcgtcaccgatgaggccccagcgcagcccaatgagtcgaacaactccttcatggaatacatcaacaccaatggcagcaattaaggtaacatctccaccggcaactccaac

SEQ ID NO: 79419 - DNA, 1310 bp, Zea mays
  unsure (1)..(1310): unsure at all n locations
  Clone ID: MRT4577_172458C.1
cccagcgtccgcggacgcgtgggcggacgcgtgggcggacgcgtgggcgagcgccgccgacaacgtcttctcaaggttcctgcccgacgaccaccacatccgggacgacaagccgtcgcctgcccacttcccgagtgcggccgacatggcctcccaccaccagcaggagcaaatgatgttgcactcccagtcccagtcccagcaccagcaggagacgggtaggtccgggggcggcctctaccgcaccgtcagctctgccatggaagcgggcggcactggcgtcggcgccgccagcagcctgattcggcagagcagctcccccgccgggttcctggaccatttcggcatggacaacgggtacggggcgatgctgagggcgagcatgggcatggggttccaggaaggtgttgccagtgactccctcgcgggcggcggcggcggcggcggtagcggcaggctcgggggccagctgagcttctcgtcgcggcaggggtcgctcatgtcccagatctcggagatggacagccaggaggatgtcgtcgtcggagcgagcagccccgacgctggcggcggcggggacgccgcctacatgccggggtacccgatgagctccggcgggtgggacgactcgtcgtcggcgctcttgccggacagcctgcccgcgacgaataaacgcccgcgggactcgttggagcacggcggcgggctggcgcaccagttcagcctccccaagacgtcgtcgtcggaggtggccgccatcgagaagttcctccagttccaggacgccgtcccctgcaaggtccgcgccaagcgcgggtgcgccacgcacccgcgcagcatcgcctggcgggtgaggaggacgaagatcagcgagcggatacggaagctgcaggagctcgtgcccaacatggaaaagcaaaccaacactgccgacatgctggatctggctgtggactacatcaaggatcttcagaagcaggtcaaggtgctgaacgacggccgcgccaactgcacctgctccggcggcggcaagctgcaggacccgttcaccagttagaaggagcagcagccggcgcgtagcagtgcgcggccatgcatggcccgccgcaaggccggcctgactgacgcctccgtgccggccggcggctaagctcgcttcgagcgctcctcctcgattggagtaagagtcgtcgaagtatagtagtatcagtgtacgtgttcggctttacatagttaactgaatgagtagtacgtagtctgttatacatgcaagttncttnnnnaaaaaaaaaaaaaaaaaannncccccc

SEQ ID NO: 79420 - DNA, 446 bp, Zea mays
  Clone ID: MRT4577_172459C.1
acaaaagaaacatccaacaacttccaagggcaaaaggaagggtatgaacatgtcaaaaaaaacaacaaaaatttatgccggggattatttaaaggggagcaatcccgggggactaaagagcaaaaacacccaggttatttacaggggaggggaaaaacaacaggcttgaacttggtgacttgcccttaaaaaaaaaaggggggcgcttccacccaagggaggatcttggggaaaccaaaattggcttccggaagggccccacaccttggacctttccaaaaaaaactttccttccttggatctcgggctcttctaaagagcagcctcatatttccatccaacgaggggtccacagccaacacaaaaaatatcaaaaacagggtgcattcctggcaaaaaaaagcgaaactttttttactccaacgaacccgggggtcgacccggga

SEQ ID NO: 79421 - DNA, 226 bp, Zea mays
  Clone ID: MRT4577_17245C.1
gaataatctaatccaccaaatcaggttgttcagacttcagaacttcttcgatccagatgcaaccgaacaaggcctcaagtggacgagcacacctccatctcatgcttacctttcaaccaaagtagtcatatcagtagatcagtactattcttacatggatgcttttcattaacaacattaattttctaatacttctaaatttttcagttgagtcagatcatgaatc

SEQ ID NO: 79422 - DNA, 371 bp, Zea mays
  Clone ID: MRT4577_172460C.1
tcccattgcgccctgccaagggtgcgcttttgttcaggtgcatcgtgaaggcaaatcatttgtttgccgagctggctgatgaagacctccaccaactacgatgtatcaataacgcctgtggttccttcacagtggtgtcaatagcgctgtcatgaaagagcttgtaaccttcatagacactgacatctggatgggcgtggtgctgcatatgacggaagggagagtgtctatacagccggagcattgccgcttactccgcagacattcgaacatactgtgccagatgatgaaaacagtcttggtggacgacaaagacaccaaacgggccagagggcctttcaggcggtgatcgaatctgttgttcgcgctga

SEQ ID NO: 79423 - DNA, 382 bp, Zea mays
  unsure (1)..(382): unsure at all n locations
  Clone ID: MRT4577_172461C.1
gggtcctctacacgggcggccggggttggtgctttggtcgcccggcggggttgtttttggggctcggtgccctctccaggtggttttgcttctgctgcttgttgtaggtggggctctgcttttttggtcttggctgttgcgtttagggtccctttgttttggtcctcggtgtggggggggntgcgtttgtctcttgtgctgtttctggtgggctttggtgttttgtttgccctttgggcgttggttgtcccttgctggttgttcttttcctttgttttcttgccctgttttttgtggttggttgtgtctcggtcgcctgtggcctttgcttcttttccttggtgttgttgggtcttgtcttgttgtttctgttgtgcggtct

SEQ ID NO: 79424 - DNA, 2284 bp, Zea mays
  unsure (1)..(2284): unsure at all n locations
  Clone ID: MRT4577_172462C.1
aaaaagnaggagcacgcggcataagcccnaaactcggctcgagaggaaagctgattcttcaaaagaaaaatagaagtgcgagtgataataatcagttaccgtcaaacggaaaagctgatgcaattgatgctagactcacaagtaaagctctgatctggggcagctctgtactcctcctggaggatgttgtctctgtatcatataattctggagtcaaacattttacattgcatgcatactcaactaaaaagtctttatttagaaagacatgcagagttcagaaagatttctgctttatagcctctacccttgacgaggccattttgtgggtgacatgctttgctgaacaaagtatatatgttaacttactacctcgccttggagcatctagtatcaatcaagactcagaaaatcccctcagtgagtctttatttgaccaaccaccgattaaatgcaaatctccgcaaagagtacttgttatattgaaccctcgatctggacatggtagatcaagtaaagttttccatgagaaagctgaacctatatttaagcttgcaggttttcagatggaagttgttaaaactactcatgctgggcatgcaaaatctcttgtatctacatttgatttcagtgcatgccctgatggaatcgtgtgtgtgggtggtgatggaattgtgaatgaggtgctcaatggtcttctcattaggagtgatagagcagaagctgtatcaattccagttggaataattcctgcagggtctgacaactcacttgtctggactgttttgggagttagagatcctatttctgcatcattattaattgttaagggtggtttcacagctctagatatcttggctgtcgagtgggttcaatctgggcaaatacattttggctcaactgtttcatactatggttttgttagtgatgtcctggaactttctgagaaatatcagaagaaatttggtccacttcgatattttgtggctggaatactgaaatttttatgtttgcctagctacttctatgaactggaatatcttccttcgccaaaggagatggccgtgaatggaaaaggtacagatcaagacaaggcccacctatccaatgtctataccgatgtgatgcacagcagatcaaagaaagaaggaattccaagagcctccagtttgtccagtattgattctattatgactccaagtcggatgtcgcttggggatgttgatacatcaggtagtacagtggcaagcactgaaccatcagactatgtacgtggtcttgatccgaaagcaaaacgcttgtctctgggaagaagtaacattgtttcagaacctgaagaagtgctacaccctcaaccacatcatggatcattctggccaagaaccaggtccaaagcaagggctgatagaaattcagttggtataacgtctactaatgacacacggtcgtcttgggcagccccatcaatgcatgataaggaagacatttcctcaacaatatcagacccaggacctatttgggactgtgaaccaaagtgggacacagggccaaaatgggatagtgagctaacttgggagcctgaccaccccattgaacttcctgtaccacaagaggacatgggaattggagcaccgatggaacttgtgccaaatttggatgagaaatgggtagttaggaaagggcactttcttggtgtcttagtatgcaaccattcatgcatgacagtgcaaagtctgagttcacaggttgttgcaccaaaggccatccatgatgacaacagcttggacttacttttagttggtggaaaaggaagatggaaattgctgagatttttcatacttctgcaattcggtcgccatctctctttgccttacgtcgaatatgtaaaggtgaagtcagttaagcttaaacctggtgcaaacactcacaatggctgtggcatagatggcgagctttgccgtgtcaagggacaggtactctgctccctgcttccggagcaatgcagactgattggccgacgatgtagacaatctatttaagcgctgtgttgaatttcatggatcttggggttctttccacttctaacaaatgtttatataactatactttctgatgggactaagcttgggttggtgttgcaaatgttgagagtttgaaccagaagcaatgttgtgaggtttctgtatatttgagcggttataggatgatatgctgattctgtttaattatgttgattttgcttatatatattcaatagagtaatttagtcccaaaaaaaaaaaaa

SEQ ID NO: 79425 - DNA, 1933 bp, Zea mays
  Clone ID: MRT4577_172463C.1
cccgggcggccagtggtcttggttccgtggagggagatggcgaaggcgatgtctgggggtacgcgtgggttgcccgtgccgaggtccacgttgcagcgactgtgggagcaaggttctccaggtcgcacccgctccgccggtcactagtcggcgggtccaactctggattccagcctggtatccttttaagatgattcatgttgacggagagggcaaggaaattccgatacttgcaggatttggacacaaagaagaatgcgacagaactctccatctcaaggcttgaggaggacaacaggaaacttcatgaggcatataatgaagaaatgcgcaatcttcatcgtagggctcgtgaaaatgctttgcggattttccaagagaatgaaaacttgaggattgacttagaaagtaagaagagagaactgaacttgcgagctaaggagcttgacaaaatatcaactgagaatgctaacgacaggaagacacttgatgatgagaagcagaaggcaaaatacgataatagtgaacttgagctagcaagtatagagcagcagagggctgatgcagatgttctgaagctattggctgaccaggagagggaaaaggaagatgtacttgctagaatgcttcaactagaaaaagagctgcatgagaagcagcagcttgagctcgaagtagaacggttgaatggtacactccaagtgatgaaacatttagagggagatgatgacgggggagatatccatgagaagatggagaagctgagcgaaagatttgagcgtgaaaagaagcgtctggaggatctgagtggggatctcgtgagaaaagagcgtgaaagtaatgatgagctacaagaagcccgaaaagaactgataaagggtttggaggaagagctaaatggacggacagctatcgggatcaaaagaatgggggaactcgatgaaaagcctttccaaaatgcatgtaagacaaaatacggaaaggatgagtacgagatcaaagcagcagagctagtcacaagttggcaggatgaactaaagaagccatcctggcatccttttaagatggttgaggttaacggagaaaataaggaaattctggatgacgatgacacaaaactgaagttcctgtggatcgagtacggtgatgatgtgtgcaatgcggtgaagaccgcactgatggagatcaacgagtataaccccagcgggaggtatgttgtgccggagctctggaacttcaggaaaggccggaaggcgacggtgaaggaggtgctcaagtacctgttcagtcagatggacacgacgacgaagcgcaggaggggctgaggaggtgcctgatgccgagtagtgccttctatgttgttgcatcagtcgtgtgctgctcgatccccaagtggcagtctggcataggagatgcccctcttgtgtagtgaaatctggcacgataaagtgcccgcgatccaggcttgggtatgccgtatgcatcatgttcatatgcttgtgcatgtggtgctgttgccgcaggcgccctagcctaaacctgtatgattgttgagatgagtagtctttcttgctgctgttactcccttcgcccctcaatgtctctgaataaatcaattcctaaagttatcataaaatcgagcttttttaatcagactttttaaagtttaactgaacttatagaaaagagtcaggatttatgataccaaattagtaccattacatatgttataaagcatatttttataatatttatagttctacaaatttggtaaaatattaaaaaaattatcttaaaagatagtttcagcaattgatttattcaggacggatggagcagttgtctatattgttctggtgtttgtaagtgttagacatacgtgtgtatcacaactataatctgtttaggcctagtttatatactttttttatct

SEQ ID NO: 79426 - DNA, 267 bp, Zea mays
  Clone ID: MRT4577_172464C.1
cccctgtgcggtccccggccaccgccccggcgccggccgccaagccgccgaccgccgcggcgccgtcctcgatggcctctcattcggccccgcccaccgagggcccctacgcctcttgagcgtacgccaaggccccgaccaagatcgtctacatcatcaccggcgaggctgcccacagtccgaattccgatgacggatcgtcctcttttacagacatcatctactagctcgacaagtggtacggtcctgacaggaggatctacctgc

SEQ ID NO: 79427 - DNA, 324 bp, Zea mays
  Clone ID: MRT4577_172465C.1
catatacaaaacaaggtttttccccccactactttgccaatttgaattttgcaagttcaggacctccttttacaaaaggttttttttcccccctcccagttggatttgctcacccgggcctttcttttttgccatccccccccctttttttttgccggtgtcgaatccgggatgcgttccatcccatcctttttgaaaaagtgacgggggcgggcccaactaaaagttttttacatgctaatatagaaatttgctaatctttacctcgattgggtgcgctgcccccaaatttttgcggtttaaaccccccaattccttgggggg

SEQ ID NO: 79428 - DNA, 304 bp, Zea mays
  Clone ID: MRT4577_172466C.1
ctcttacccgggaccatgacgccatcgagggcgtgatgctgggctccttcacgctcaagttcggcatcaaatagtgcatttacctagacctacgggcgcttgactcccacgcgcgcgtgctctccggggtcgcctgggttctacacgggcttccggccacgcgcctctacgggctggtctgcagcgtgccctacaccgggctgaggatgaccggcattctctgcgtctaccggtaaatccgcatgctcaagcgccgtaaggaggtcaaggcccacggcaacggcaaggtcatcagagggctgct

SEQ ID NO: 79429 - DNA, 305 bp, Zea mays
  Clone ID: MRT4577_172467C.1
gtatataaatattaaagttttgtacgcgacggattttatttataaaccggggttcttttaaaaacagaccccaaggggggccaggggtcgggaccccttgaaacaatttattgggggggggggggcctttgaacttaaccataaccccacccccccccccgggggggctgcccaataaaaaaaccccccttcgggcccatttgggcgcattaattttggggtttacagaaatatttctttcccggggccccatttgcaaattaagaaattgtcccttaaggccttggaagtgggccacccctggg

SEQ ID NO: 79430 - DNA, 175 bp, Zea mays
  Clone ID: MRT4577_172468C.1
gggggggtgaaccttgaccaacagcggggaagaaaaccaacggaaaaacgggggtaacaaccttaacaagaaaacgagggggagccgggccccataaggaccagcatttggaaaccagccggatggcaaggaaggacaaactattacaactcgcacggaaaactttgaaaacaag

SEQ ID NO: 79431 - DNA, 301 bp, Zea mays
  Clone ID: MRT4577_172469C.1
cccacgcttccggacaagggggttcatggttgttaaaaggctgcttgaggttcctgttgcccagtaaaccggaggggtcctgccttttactctttggaggaaggtggtccaaagcaccaatttgcctttaacggcccaagccttggggtttaatagatcctccccggaaccaattactccatgtttttagcaccaggtgtttaataaacacttccctgaaacatttactccaacacttgcttgcatttaattgttgggcaccaggtggttttgttgctgggtttagcttggccattattta

SEQ ID NO: 79432 - DNA, 2526 bp, Zea mays
  Clone ID: MRT4577_17246C.1
ggtccctatccgctgctgcgaacagcagaagctgcggcacggaggtgcgctcttcccggcggtggagttgcagctgcagggggaagaagcgagctagagctgcagggatgataagcgccaagtccaacgccgccgtgtacccgtgcccggagtatgcggaggtcgaccccaccggccggtacggacggttcagcgacgttcttggcaagggcgcgtccaagattgtgtacaaggcgttcgacgtggaaccaggtgaagctgcacgacttcctgcagagccccgaggacctggagcggctctactgcgagatccacctcctcaagacgctcaagcaccgcaacatcactgagatgttcacctccggcaccctccgccagtacaggcagaaacaccggagggtgaacatgtgggcggtgaagcactggtgccggcaaatcctcagcggcctgctgtacctccacagccacaatccgcccatcatccaccgggacctcaagtgtgacaacatcttcgtgaacggcaaccagggcgaggtcaagattggcgacctcggcctcgccgccatcctccgcaagtcccacgctgtccactgcgtgggtacaccggagttcatggcaccggaggtgtatgaagaggagtacaacgagctggtggacatctactcgtttggaatgtgcgtgctcgagatggtcacctttgagtacccgtacagcgagtgtacgcacccggtccagatctacaagaaagtgatctctctacctgtttgatttggtagggtactaagccagaagctctgtacaaggtgaaagatccagtgctgaggcgctttgtcgagaagtgcctagtatcgtcatctcagagactgtcagcaagagaactgcttgaggatcccttcctacagggcgatgacgtggctgtttctttggatggtggagattatcatgtaccgaccaagtacgtacggcagccttcatatctagggcatacctatagcaatggctccatggtgagtaatggattctcagaaagcatggatgaggacgctctgagtgaagactgcgaggatgatgacatgaaaggccaagatggcattgacctgttcaacgagaatgaggatgaacctcttggcaatgtggacataacaatcaaagggagaaagagtgaggatggaggcatattcctcagattgcggatttctgataatgatggacgggtacgcaacatctattttcctttcgacgttgaggctgataccgcactaagcgttgcaactgaaatgatagccgagctggatataactgaccatgaagttactcggattgctgacatgattgatggtgaggtcagtgcattggtaccagattggaggcctggtccgggcatagaggaagctcctgacacttcatactgccataactgtggatccaacgtctcatcgtgcggttcactttacgcctacatgtcatcaggccgtcgaggttgccaatgtgcagagctacatgggcggtttgaagagatcacgttccaagccgatggagagcagtgtgatttgcaggaatcggcaggcagctctgacgatggaggtggccaaacagagcattatgtcaaaagcaacgagtccactcatgtgaatggcctcgtacagatgggaagaagagatctttctaatcagctttgcttcagttcattccaagagcaatcatgttcatataaccgttacgagaatgacactaaccatcatgtgaatgggttcgacataaagcatgaggtaaagatcgccaagtacaaagcacggaaaatggcacagtttaagagggctatccatccatctcttgacttcgacaatgcatatggagtaaataggggtaagccttcactgaacaagctgcaatctttccatgttggaaagaaccacaatttccgtgtgccaacctgtgatcgaagcccgggtaaagtaagcacagactatcattctgacttgaacagccaagtattgcaaagtaggcaccccgatccgggagcccaaagggcccggcattgtgaggtcaatgcagctgggagcagcacggagtgtatgtttacagggaggcgctactacaccggagctcagctgccgccgaatctcccaagaacaaaatctgtacccctgaatgctgtcgacgcctgaaatgctttcttgccatgtaaatttttatagagtgtacatttgttttggttccttttgtacccattatgaaacatcgttgttgggcaggagagactggatgtggattctggctgagctgtttgtaaattttccatcttgtgaatccagagaggttaggctgtaagcaggaaactgaatgttacgaggttgcatgtggattacggctgagctgtttgtaaatttccatcttgtgaattcaaaaaggttaaattgttcgagtccaatccccatcttttgcccccctggggcaaccagttttatcctttttactataggcaaaagccgatttccgagatgcaaaattgttgtttttcaggcc

SEQ ID NO: 79433 - DNA, 830 bp, Zea mays
  Clone ID: MRT4577_172470C.1
gccggccgggtccgagagcccaccacacaaacccctgcctcccaccagaaaagcaagcagaccacacccacccgcctctaaaccaaccagcctgtccccattccccgtccccggcgatgcacgccagcatccactccctcccgtcagcctcttcttctccccctgatgagcgctgagttctgtgctgccgctgctggtgctgtggccatggagctcggagtcggggatgtgatggggctgcagcaaggcatcgccgccgccaccgggccatcgtccggagacagcgacctgggtcttctcaagcgagcaggcctcgcccaggcagccacctcctacccctcccctttcctcgaccaacagaagatgctcaggttctccaaggcggcggcggctcacacgtcgccctcaggcctagacttcggaggaggcccgagcgagcaggctttcctgctgtccaggaccaagcggccgttcactccgtcgcagtggatggagctggagcaccaggctctcatatacaagtatctcaatgccaaggcccccataccttccagcctgctcgtttccatcagcaagagcttcaggtcatccaacagagtgagctggaggcctctttaccaaggctacgcaaacgcagactccgacccagaacctgggagatgccggcgaacggacggaaagaagtggcggtgctccaaggaagcgatgcctgatcacaagtactgcgagcgccacatcaataggaaccgccaccgttcaagaaagcctgtggaaaccaacctagaaaggggccaccaagaggtgactaccgctgctgctggctcgttgcc

SEQ ID NO: 79434 - DNA, 377 bp, Zea mays
  Clone ID: MRT4577_172471C.1
gagaaaagccattagggggccggcggggaaccgggggagggaaatatggaggggtggaaccccctggggcaaacctatatggcaaccggggtaagaaaacccggcggggggccggatctgggccgggggcaaaccggggacaaggcagcagagcccggggggggaacaggcaaaaaagccggcccggggggggaaccgacaaaaaggaaccccccggggccgggtcaaaacccaacaggaaggaccccggcccggtccggttttccaggacggttccggcggacggttcccttcaggtcaccgacgaagaaggcccggacaaagggtcgggcaccacgacctcgggagaaaccaaaacggggctggcgttcagcccc

SEQ ID NO: 79435 - DNA, 283 bp, Zea mays
  Clone ID: MRT4577_172473C.1
gccccttcgataacttcctgaaggggctgtgtggtgccaacttcactgtgggacatgattcacatgatgcgccccacgtgacgagttctaccctgcaaatccaaaacctatggtgctagatgatcgattggatcttatctatgacgatgatattagttgtactatcactaactatgtttatctatctactacacgtctgtaatgtatgcatatgtagttgaaagccgcgagttctgtgtcgcatgtgcagacgactgagtcgaattagaatactgagtatgct

SEQ ID NO: 79436 - DNA, 427 bp, Zea mays
  Clone ID: MRT4577_172474C.1
ggttgatggaagcattgactagtatactgataggctcactctgtcacagtaaggggtgtgggggtcggatgtccatgtgtatatatggatagatgcgtgtatgtgtgtcttgggctcttggctggttctggaaggaccaaatgggctctcggctggttctggaaggaccaaatgaaaaaaagggtgtgctgttcttgaacaggggacctgcctgaaattggcttagaacaagcaatcaagtatctatcaactacactgtcattattgtgtgattttgcaaatttgctcttgcgaaacatggcaagttcatcatttcttctgcatggagttggtgttgcccacccctttgtgctagttccttggtaatatgtaatatatgatatatcaagactcaagagtgtttctgaaaaatatgcaacgacttcag

SEQ ID NO: 79437 - DNA, 126 bp, Zea mays
  Clone ID: MRT4577_172475C.1
tgtccattagttatatttacttcagattgcattttaacccgtatcgttaccatgggggggctgttagttgccctggttattctggatctcgctttgtgcgccatcttcattcatacaatcgatgtc

SEQ ID NO: 79438 - DNA, 2023 bp, Zea mays
  Clone ID: MRT4577_172476C.1
tgggtacctcgaggccggccggggtcgtgtcatccactccgccgcacaggcgctcagctccgcaacgccgccggaaatggtcgccgccaccgccaccgcccatggccaccgctgcatcgccgctactcaacgggacccgaatacctgcgcggctccgccatcgaggactcagcgtgcgctgcgctgctgtggcgggcggcgcggccgaggcaccggcttccaccggcgcgcggctgtccgcggactgcgtcgtggtgggcggaggcatcagtggcctctgcaccgcgcaggcgctggccacgcggcacggcgtcggggacgtgcttgtcacggaggcccgcgcccgccccggcggcaacattaccaccgtcgagcgccccgaggaagggtacctctgggaggagggtcccaacagcttccagccctccgaccccgttctcaccatggccgtggacagcggactgaaggatgacttggtttttggggacccaaacgcgccgcgtttcgtgctgtgggaggggaagctgaggcccgtgccatccaagcccgccgacctcccgttcttcgatctcatgagcatcccagggaagctcagggccggtctaggcgcgcttggcatccgcccgcctcctccaggccgcgaagagtcagtggaggagttcgtgcgccgcaacctcggtgctgaggtctttgagcgcctcattgagcctttctgctcaggtgtctatgctggtgatccttctaagctcagcatgaaggctgcatttgggaaggtttggcggttggaagaaactggaggtagtattattggtggaaccatcaagacaattcaggagaggagcaagaatccaaaaccaccgagggatgcccgccttccgaagccaaaagggcagacagttgcatctttcaggaagggtcttgccatgcttccaaatgccattacatccagcttgggtagtaaagtcaaactatcatggaaactcacgagcattacaaaatcagatgacaagggatatgttttggagtatgaaacgccagaaggggttgtttcggtgcaggctaaaagtgttatcatgactattccatcatatgttgctagcaacattttgcgtccactttcaagcgatgctgcagatgctctatcaagattctattatccaccggttgctgctgtaactgtttcgtatccaaaggaagcaattagaaaagaatgcttaattgatggggaactccagggctttggccagttgcatccacgtagtcaaggagttgagacattaggaacaatatacagttcctcactctttccaaatcgtgctcctgacggtagggtgttacttctaaactacataggaggtgctacaaacacaggaattgtttccaagactgaaagtgagctggtcgaagcagttgaccgtgacctccgaaaaatgcttataaattctacagcagtggaccctttagtccttggtgttcgagtttggccacaagccatacctcagttcctggtaggacatcttgatcttctggaagccgcaaaagctgccctggaccgaggtggctacgatgggctgttcctaggagggaactatgttgcaggagttgccctgggcagatgcgttgagggcgcgtatgaaagtgcctcgcaaatatctgacttcttgaccaagtatgcctacaagtgatgaaagaagtggagcgctacttgttaattgtttatgttgcatagatgaggtgcctccgggaaaaaaaaagctttaatagtattttttattcttattttgtaaattgcatttctgttcttttttctgtcattaattacttatattttagttctgtaggagattgttctgttcagtgcccttcaaaagaaattttatttttcatttcattgcccttcaaaagaaattttatttttcattcttttatgagagctgtgctacttagattgccttggatgattattttgcttctgcgtttttctggaagtacaaacaaattcaaataaaaaaaaaaaaaaaaa

SEQ ID NO: 79439 - DNA, 1059 bp, Zea mays
  unsure (1)..(1059): unsure at all n locations
  Clone ID: MRT4577_172477C.1
ctcgnagccggccgggaagaaatttcagccccgacggacccgctcccttcaactaacccatcgctgccgccgagcgccttcgactgcggcacctccagcgagaggggggaacccgaggagatgaggctggtcggcctgacgggcgggatcgcgtccgggaagagcactgtctccaacctattcaaggacgccggcgtccccgtcgtcgatgcagacatcgttgctcgggatgtagtgcagaaaggcactggaggtttggaagaagattgtaaaaagccttcgggaatgatattttgttggagggtggagaaattaacagagcttacttaggacaaattgtcttttctgacccatcaaaacgtcaacttctgaaccgtcttctggcgccacatatttcttggggcataatgtgggagatggcaaaactatggatgaaaggatacaaggttatcatcctggacatcccgctgttgtttgagaccaagatagatcgatggacaaatccagtaactgtggtctgggttaacccagaaacccagattcagaggttgatgtcaagagacgggtgttctgaggaacaagctcagaacagggtcaacgcacaacttgcgttggactggaagaggtcggaagccgacatagtgatcaacaactctggatcactggatgacaccagactgcagttccaggatgtcttgaggaaagtttctgagccattaacatggaaggaacgcttgagatcccgagatggcctgatctccgttgtcgtgtgtacggcagtgggcgtattgcttgctcggaagaatctactatgattctgataaggttcaggaagctaagaacagtgatatgtcgttttagagtagaggacgtacacaattaagcttgtctggtgcctgtgcctgacaaggaaattgaacggctgtatgtggagctttgattgatgaaataatttttttgtttgacgtgnnananananaagagaaaaaaaaaanaaaaaanaaaaaaaaaaaaaaaaaaaaaaaaaaaaaggggcgggccgtttctaaagggatccaa

SEQ ID NO: 79440 - DNA, 303 bp, Zea mays
  Clone ID: MRT4577_172478C.1
acgcgaaaccaagccaagccatggcagccaaccccaaccactgcctccgccgactagcctgagctctctcccacggtccccggcctccgactcctcccctatccctccttttccccgcctcgcgctctcagctcggccctcacgcccgcgcgcgcgcggagcgaggagggagagagaagcggggagtggcgcgaccgcgcgacgggagagagggctgagcgcgggtccacggaacaagcaccgcgagtcgggccgggggccagccacagacggatggacgccggcgtgtcgatttgaacgcgt

SEQ ID NO: 79441 - DNA, 815 bp, Zea mays
  unsure (1)..(815): unsure at all n locations
  Clone ID: MRT4577_172479C.1
gaccctcgaggctggccgggaagaccancccctgcttccccaaaccccagctgactgactatacccggggttcctcgcgccttggccctgctttgccttgccatatagcatccaacaagtacccttgttccgaaatcgctctccttctacccacctcaggaccatccactcactttctctttccggacccgccagagcctcaccgccacaaccctcttttttcctaccttaccctcacctccgccaaaaaaaaacacacgaatgcaaaggacagtcgttaccatcaacagcaatggccgccaatcggcgagcttcattcgcgtcgctgccgcactaggatggcaggtacgggcccagatgcgagacttgaatggcatagtcgcccgagagctctctgaactcgacaatgtcaccgtcttcatcggggccctcgaagacaaaaaatttctcgatgatctattcagaagcgctcagtgcgctttcatcaacaccacgcactggggcgacgaggttgccattggtcgagcactagccgatgccgcaaaaaaagccggaatccagcactacatctactcgagcatgcccgaccactccgtatttggccaaggctggaaggcactaccaatgtgggctccaaaattcactgtcgagcaatatgtccgccagattggtctcccggccacctttgtctattgcggcgcataccacaacaactttaccggcctcgatttccccctgtttcgcatggaacatcagtatgacggcagctttgtctggcagccccgtttcacccagatcagccactcccctggcta

SEQ ID NO: 79442 - DNA, 713 bp, Zea mays
  Clone ID: MRT4577_17247C.1
ccggccgggatgccttctcttcgtctgccatgcatcagatcaagagagagcggtgtcttcgaaccaacgccggcgttttgacggcctgcacgggtgccgtcgaatcaggtttctaggaagtgctttgcgcacgtctgctcgcggtcctcaccatcactcgtggaagtcattggccttaaggatggtgaggaggatgagacaagcgacgcatggcatcagctgacagctatcactatcaggccaagaaccgaaaaaacaagcatgcatgattgcttttggtgtcccaataatgtctaccccgaccctcctggacaggtggtatagcaaaatgaggtcgcttcaccacctaaagatagcccacgtgcacgttgcaaatccgctgtctgtctgtcaatgaatctgcgtcgtcccccctgtgcgacgacacatttatcagacatggcgcttgacatgcatgcatctcgatctgcatgcactgcactgggcttctgcactgcacccgatccgtttctgcatatggaatgcgtgggactttcctcaagaaaccatctaaacccatatccagggccgctaacgccaattgtcgttgaccaccagcggcacaacgcagtcatcagtcatcactcgtcagcttctagagagcgttgaaacttgtcgtactcgtccctgttcatcagcattcagcagcaggctaaacaaagccttgataaacg

SEQ ID NO: 79443 - DNA, 332 bp, Zea mays
  Clone ID: MRT4577_172480C.1
aaggccagagaccatttaacttaatgtggtttggcccatttaatggccggacttggattggtttggttggccatccggccgaccccaagtgttttttcaacacgtttttgttaggaggaaaaggggggggaggggcgggagtaatcccatttttttggttgaaccaaggcgggcttaaaattttttggtgggtccagaggagtccattgcaccggagattattaccggggctggccatacaagggtctgaaatgggggggcgctaggattttttttttttgagatgttatatggttttccaccctccagagggaaaccatgccaaaggcctt

SEQ ID NO: 79444 - DNA, 326 bp, Zea mays
  Clone ID: MRT4577_172481C.1
agtgcctcatgggcggacgcgtcggcggtgccctggtcaccgcgacatggggatactgctccccgaggtggtgcagctgtcgtaggagcaccacgcgactcgcgcccatatggacgccatggccaagcgcattaccaatgtggagtagactcagaatcagatgacggtgttcctcacgcgtgccatgaacaccccgagcttcaacccgatgctggtcgaccgggacggccttggcagctgcagcaaggagctctacgacgcgctctccacaaagcgcctgcgtgccatcgactaactctcgcgcgacggtcatatatgccgcactg

SEQ ID NO: 79445 - DNA, 807 bp, Zea mays
  Clone ID: MRT4577_172482C.1
actgttagaaactacccccacaggaacataatggtcattagcttctgaacagcagtgtagtgtttatacctttacatgaaagaaacaactgaatttttggtcggtgtgctccgtttttaagtgcaaacattgattggagttcctatgtaaagttgttaagttactatcatcacttcatctgcttgaagtcatgttctaaataccacttgttcattgtggcaagtctgtgtggctcaatagttcaagtgtttgtcttgcagcaaaaactgcccgcacttcaggaaacttttcccagagtatgttgagaagtacaatcaacagctacaattggagaacactgctgcagagccggtgcctcaggagaatcctgcacctgctccatcccctgctgtccagcaagctccgaccgtggccaatagggcacaaccactggcggaggcgcgccgtgacaagaaccagaagaaggcggtgcccttctggatggtgctggtcatgttttcagttttcggacccgtgatggcggtgcccctaatgcaactttgacaataataaagacaataagtacgtgtgatgcgttgcccaatagactttagtttcacattggtttgcctgagtgactccgtggtccctaacatacctagaaccgctatctcgcttggatgaacgcgtcagaatatcgttcgtatttctttgtagttcttgctttcgttcccaaaatcgtatagttattacttttcttgccaaaaaaaaaaaaaaaaaaaaaaaaaagggcgaccgctcgcctgacgcgtgttcggaggccgtggg

SEQ ID NO: 79446 - DNA, 317 bp, Zea mays
  Clone ID: MRT4577_172483C.1
tctgactcgtttgaaaaaaaaaaagatttaaaaaaaaaaacaacaaaaaaaaaaaaatactaacatacaaacacatacatacaacaacaatatctattctataatctcacctactttcaattctcttctcctctttttacaacatcttaactaataaaaccctactgtcacccaacttaataatctttcaccacataaaccttttttcacctaacctaatatccaatacaccccctcctattttccttcctaacattttctcatcctaattaattacttatactccccctcttccttctcattattcacttctcttt

SEQ ID NO: 79447 - DNA, 331 bp, Zea mays
  Clone ID: MRT4577_172484C.1
gcacattgcacagccaaaaaaaaaacaaaaaacaaaaaaaaaataaaaacataaagggaaaaagaaaataaaaaaaatgggaactgccaaaaaaaaaaacaacaaataaaaaaatatactgctaaattttgataatacacttagcaattctaaataagacagattaacaccagaagaagcaataatgattgagctagttacccttacagttttcatggaatataatagtccttacgatacttgactaacttgtgcaatattgaactctactacgccaccctattccaaacgattattagggaatatatcactttgacatccattgcatctc

SEQ ID NO: 79448 - DNA, 685 bp, Zea mays
  Clone ID: MRT4577_172485C.1
cctctctcgagtttttttttttttttttttttttttttttttttttttttttttttttttttttttttttttttttaaaaaagaaacttaaaaccccccctttttttgccttgaccccataaccccaaatttttttttaaaaaaattttgccacagggggaaaaaaaccccccaatcaatgggccggggggaaacaacaaccaaaaatttttcacaattcccagggggttagaattggaaactccaatggttacaacgggttaaaaaaaaacacgggggccccccggggggaaccaaaacggcccccgttaaaaaggccctggctttgtgaacttttttgccgcccccgaaagggggggcccggcctggttgggtttggggttggggggccccggggcccactttcttcgttggtttgggccccactttacggccccccttaaagggccccaaggaaggggccgccgttttttttttggcgggggggggggcctttttgcgttgggcctttcccgccaaccctttttttttccctttgggggccggggggggtttcctttcttggggggggggaactttaaagaaacccttaactttaacaagggggcctttgggggaaaacccgcccatttgcactgccaaaactttggggaaatgggggggaagcacgtccgggggtttttcc

SEQ ID NO: 79449 - DNA, 547 bp, Zea mays
  Clone ID: MRT4577_172486C.1
aaaaaagaaacttaaaaccccccctttttttgccttgaccccttaaccccaaatttttttttaaaaaaattttgccacacggggaaaaaaaccccccaatcaatgggcccgggggaaacaacaaccacaactttttcacaactcccacggggttagtcttggaaactccaatggttacaacgggttaaaaaaaaacacgggggcccccgggggggaaccaaaacggcccccgttaataaggccctggctttgtgaacttttttgccgcccccgaaagggggggcccggcctgttttggctttggcttgcccggcccccgggcccactttcttcttttgtttggggcccactttacggccctccttaaaggggcccaaggaaggggccgccgttttttttttggccggggggggggcctttttgcgttgggcctttcccgccgaccctttttttttccctttgggggccggggggggtttcttttcctggggggggggaaccttaaagaaaaccttaaccttaacaaggcggcctttggggggaaacc

SEQ ID NO: 79450 - DNA, 476 bp, Zea mays
  Clone ID: MRT4577_172487C.1
ggcgcctttttttttttttttttttttttttgttttttttttttttttttttttttttttttttttttttttttttttttttttttttttttttaaaaaccaatgaagaaaagaaggggtattgaacgaaaaaaaaaatataaaggggccactttatgaatttaccgcaatccaaaacggtccaggcagttaaaaacaagggacccacatatcaaaggttcccaacccccaggggcccccaagtttttagcaaaatcaagcccgggccaaaccagaccgaaaacctgggacccccccaactcggcccgggcccaaatgaaagcaatcggattccagggcaaaagggcccaaacttccactggacggggacagaaaaactagttcagccccaggggaatctgggggcaagtgcaaccacaccaattactcaacgggggcggtgtcgggcttgggtttcaggcactttgccaaaatca

SEQ ID NO: 79451 - DNA, 156 bp, Zea mays
  Clone ID: MRT4577_172488C.1
atggcgcacactcaagtcatagatcacagcctcacctttgaagcaaatctaatagagccagcccatggagaaagatgcagatcaggtgaacggactactggatggggcatcgacaagggaggagaaccgttcgctggcgatgaatgggaaatctaa

SEQ ID NO: 79452 - DNA, 281 bp, Zea mays
  Clone ID: MRT4577_172489C.1
aagacccaccatcgaacaagcaccctccgcgccgccggccgccggccgccgtgtccgtttcagcctccgaatcccccatcccccgttgcctcgcgttcccaagccacatgatatcccccaacctccccctccggctccgccacctccaccgccttctcgccgccgcgccctcgtcctcccccgccgccgcatactactcgcgcgcatcctccccgccttcaaaccgcgctcaggccccgcccccgcccccgcccccgcggcgccgtctcccggacctcccg

SEQ ID NO: 79453 - DNA, 2664 bp, Zea mays
  unsure (1)..(2664): unsure at all n locations
  Clone ID: MRT4577_17248C.1
cctcgctctctcccgacaccatgtgtgtgcccagattcccctaaataggtgtctcgcctctggcatcagtcccctcttccccttccttctcctcggtccctatccgctgctgcgaacagcagaagctgcggcacggaggtgcgctctccccggcggtggagttgcagctgcagggggaagaagcgagctagagctgcagggatgataagcgccaagtccaacgccgccgtgtacccgtgcccggagtatgcggaggtcgaccccagttgattccaaggacagttatgtgcatctaacgattatggggccgccacgaacgatcacaaggcgtgggacgagtagaaggggatggaagtggcggggaagcacgtagcacggaaagacttccagctgaagcgcgcggacctggagccgctttactgcgagattcccctcctcaagacgctcaagcaccgcaacatcatgaagttgtactcctcctgggtcgacgtctcccccagcttcccatgttggaacgatgaacaattcccgtgtgccaacctgtgatcgtacaggcagaaacaccggagggtgaacatgtgggcggtgaagcactggtgccggcaaatcctcagcggcctgctgtacctccacagccagacccggcccatcatccaccgggacctcaagtgtgacaacatcttcgtgaacggcaaccagggcgaggtcaagattggcgacctcggcctcgccgccatcctccgcaagtcccacgctgtccactgcgtgggtacaccggagttcatggcaccggaggtgtatgaagaggagtacaacgagctggtggacatctactcgtttggaatgtgcgtgctcgagatggtcacctttgagtacccgtacagcgagtgtacacaccctgcccagatctacaagaaagtgatctctggtactaagccagaatctctgtacaaggtgaaagatccaatggtgaggcactttgtcgagaagtgcctagcatcgtcatctcaaagactgtcagcaagagaactgcttgaggatcccttcctacaaagcgatgacgtggttgcttctttggatggtggaaattatcatgtgccggccaattacataccgcagccttcatatttagggcatacctacagcaatggctccatgatgagtaatggattctcagaaagcattgatgaagacgctctgagtgaagactgcgaggatgatgacatgaaaggccaagatggcattgacctgttcaacgagaatgaggatgagcctcttggcaatgtggacataacaatcaggtacgcaacatgtattttcgttttgacattgaggctgatgccgaactaagtgttgcatggtatgcacaatttgtaacggataaacatctgaagttaggtccatatatggaagcttatttttgagatttttgcaagctaatttttcaagatgatggacgggtacgcaacatctattttccttttgacgttgaggctgataccgcactaagtgttgcaactgaaatgatagccgagctggatataactgaccatgaagttactcggattgctgacatgattgatggtgaggtcagtgcattggtaccagattggaggcctggtccgggcatagaggaagctcctgacacttcatactgccataactgtggatccaacgtctcatcgtgcggttcactttacgcctacatgtcatcaggccgtcgaggttgccaatgtgcagagctacatgggcggtttgaagagatcacgttccaagccgatggagagcagtgtgatttgcaggaatctgcaggcagctctgacgatggaggtggccaaacagagcattatgtcaaaagcaacgagtccactcatgtgaatggcctcgtacagatgggaagaagagatctttctaatcagctttgcttcagttcattccaagagcaatcatgttcatataaccgttacgagaatgacactaaccatcatgtgaatgggttcgacataaagcatgaggtaaagatcgccaagtacaaagcacggaaaatggcacagttaaagagggctatccatccatctcttgacttcgacaatgcaaatggagtaaataggatgaagccttcactgaacaagctgcaatctttccatattggaaagaaccacagtttccgtgtaccgaccggtgaccgaagcccgggtaaagtaagtacggattaccattctgatttgaacagccaattatcgcatagcaggcaccccgatccaggagcccaaagggcctggcattgtgaggtcaatgcagctgggagctctgattgtatgtttacagcaaggcgctactatgccggagctcagttgccaccaaatctcccgcgaacaaaatctgtacccctacatgctgtcgacgtctgaaatgctcttgccctgtaaagtttatagtgtacatctgttttggttctttctgtacccattatgaaacgtagttgctgagcaggagagactgcatgtggattacggctgagctgtttgtaaatttccatcttgtgaattcagagaggttagattgttcgagtccaatccaaaaaaaaaaaaaaaaaaaaaaaaccaaaaaaaatataannnnnnnnnnnnnnnnnnnnnnnnnnnnnnnnnnnnnnnnnnnnnn

SEQ ID NO: 79454 - DNA, 831 bp, Zea mays
  unsure (1)..(831): unsure at all n locations
  Clone ID: MRT4577_172490C.1
cggccgggccgggtacgaaccgagcgcccgcacgagttcacccctctcacgccgtcttttctaaaccctactcgccggcgagagaagagaaagcccgtcgccgacaatggcgtcccgcgtcatgttcgagaactctagcgaggtgggcgtcttcgcgaggctcaccaacgcctactgcctcgtccccgccggcgcctccgagggcttctacaggtcggtcgcccggcaggcttcttcgcgaaccatacataaaaaaaaaccctctagctcttagcatccgtgctgcgagtctgcgaccgcgactgattgcggcctggcctacagcctactgacaccgaactcacgtgctctggccgcggcgtgcatgcagtgcggtcgagtgcgagctcgccggcgccgtcccggtggtcaggacctccgtcgccggcaccaggatcgtcgggaggctctgcgtcggtgaggactgcgctttggtctggcgctgcgccgctgccggctcctctgaacatgttgggtggtgtcttgtcttgtgtgtctgtcaggtaacaagagagggctgcttcttccccataccgccaccgaccaagagatccagcacctgaggaacagcctgcccgatgaggtggtggtcaagtgcgtcgacgagcgcctttcagccctgggaaactgcattgcctgcaacgaccatgtcgctctcacacaccctgacctggacaaggaaaccgaagacgtcatctccgacgtgctcgggcgcggaggtgttcaggcagacgatcgcggngaacatcctggttggaagctactgcgccttcacgaacaggggagactcgt

SEQ ID NO: 79455 - DNA, 649 bp, Zea mays
  unsure (1)..(649): unsure at all n locations
  Clone ID: MRT4577_172491C.1
cactgcccttccccagcgcctcggccgccactgtgccatcaccgcccgccccccgcgcctcggccgccatctgtgcaatcgtcgccatcaccttccttccccacgcgccgaggccgccatccgcgccatcaccttccttccccacgcgcgcgccgaggccgccacccgcgccataaccttcattccccacgcgcgcgccgaggccaccatcaccttccttccccacgcaccgaggccgccatccgtgccatcgccttccttccttacgtgcgccccccctccgtgtgtgccccgcccttgtccttcgctcaccctatgccctgccacctccgccgtgacagcctcactcacctcggatatccatgggacggcgcagtgcgaccccgacctcagcgttccatggaagggcgcgatccactctgctgagctcctcgtccttgcataggcgtacgcgcaggccgaggagctctccatcgagcgcgagcatctcatcgctgagctccagttcttgcagagcgccagccgcgagcgcgagatctcccaggcccacctccagcagaaccttctcatcagcgatggnggaactagatggtgaggaggaggaggaagtgnagcgcatcctgtgacggcgatgcgggtagcactaggg

SEQ ID NO: 79456 - DNA, 362 bp, Zea mays
  Clone ID: MRT4577_172492C.1
attcggctcgagggagcatggcatgatgtatcattggcgcatgctgaactgtaggatttgcttaggaatcaggcactcgaagtgtggcaagctggcaactaacctaatactcacattgaattgtactgggaaaataggtctagtggactgcatagagctctctatctaagacatcagctgatgaaccacacatatcactgtcgcattgactgttgaacgagggctcggcttatcccttctcatgagacacctcatgttggagtctttagcactaacgctgctgtagcacttagctgatatttatactgctgcgaatccgataatcatattcgctgctcatgacactgaaatacttattgaac

SEQ ID NO: 79457 - DNA, 302 bp, Zea mays
  Clone ID: MRT4577_172493C.1
ccaaacacaaggaatacataattccagcacacttgttcttccacaatagggggtaaaacatccaaggggcccaccacaaaggttggaagcattaaaacagattgcccgtggttctgacaaagttctaaccacaaatttgttttagcaagggcttaaaacagttggaaccttttcttgtttccaaacagattcctttttttaaggtgggagtttttccccaaacggatttaaaatttcttaaagggcggccaatcttagccagctaatcggggaacttggtgaccgccgccgagttttttttg

SEQ ID NO: 79458 - DNA, 5691 bp, Zea mays
  Clone ID: MRT4577_172494C.1
atgaaggtgggtcaaccaagttccaaacttgattgtctcccatggaatctatctcggttctcatggcgacttgccatatctcgaaatttgggtctatcatcgctttcacatatgttgcagatatttttcacgggtacgagtttgggatggcaaaacctaacgggtttgtaccagttgccatctctaatcccgctgtggtcgacatatgctcgtggcaccggtccagaactcgggttcgctcggttgctccgtctcacagacttgctcgggggacatggtcgtcccgccttgcaggccttgtttggtgagtacttggttggtcgttctgcctcgcaaccttgctcgatggggacttggtcgtcccgccttgcaggccttgctcggcgggaaaacagcgctattcaccccgttccgactactgtgccaaccactagggtaaaactggcaactcctcttcagccagggacggtgctccgcttcgggagtctcgagttcatgtcccgcgacggcagctacgacatggtattcctccccttgcagcacgacaacaacgacggtcgtcggctcacccagcggcggcgaactcgacaacgacttccccccgtggtggaagaggaacacccgggtttgtcccgccaccctcctcgccggaggaggaggagacgaggcaaccgtggccaggcaggaggcggcacctcgtcggctgtcggaccagagcgagtcgacgacgctagcacccctgtgggggacatgtcgggtgttgtcctcgcgcctgagacaacgacgggtgtcgcttccccgcaacgtgccaaccccaagcggactgatgacaccagcaccctcgcggaggacttactgggcgttactctcgtacctgagataacggtgcatttcgtccccgacgcgacttcaccaccatccatcgaccaaaaggtaccgtccgttttccaccctgttccctttagattcagcttcgatccaccaagcgaccctgcttcggtaagcgctttcgcaagggcatatcctgaccttcccgggtaccatatgtggtcaacttgggaccgactggcggccgtctcaacctacggacccgtgggttccgaggaagaggacgaccccgactttggttgggatttctccggacttcgtgatcccagtgccatgcgagacttcatgtccgcatgtgactactgcctctcctgctgctctgacgatggccacagcctcggtgacgagggttatggcccaaactgcgagtgtttccacatcgatcagggggatcacgatgaagacaaccacctcggcatgccggaagatgacaacgcccctgtgcctgcgtctcgcgttgagatcctgtgggagctagctgtggtctcagtccctacggggggtcaggacacacagctcgagcaactccgcgagatgcaggccaagctcgacgaagaaaagggggcagggatgcccccgaccttcagtggggccggccagaacctagctgcagcggcgatgctacttcgaacgatgccggagccatccaccaccgaggagcggcgtatccagggcgaactcaagaatctcctggaagatgccgcagtccgacgagccgagagctctgcctcccgaaggcgagggtgcccctcggagcatcgtgcaacgtcctcccgacgcatgagggaggcctcggcccgcaccgagcgcacacgggacgggacgcctgcagccccggatcacctcagcagtgaacaacaccgccgcgaccgtcgagcccgcctcgaggaaagggtgcgccgaggctaccaccctaggcacggaggacgctacaacagtaaggaggatcgaagcccctcgcccgaaccaccaggtccgcgagtcttcagccaggccatacgacgggcgccgttcccggcccggttccgagccccgactaccatcaccaagtactcaggggagacaaggccagagttgtggcttgcggattaccggctggcatgccagctgggagggacagacgacgacaacctcatcatccgcaacctcccccttttcctctccgacgctgcccgggcgtggctggagcatttacctcctgcgcagatctccgactgggacgacctagtcaaggctttcgctggaaatttccaaggtacgtacgtgcgccctaggaactcatgggatctccaaagctgccgccagcagccaggggagtccctgcaagagtacatccggtggttttccaagcagcgcaccgagttgtccaacatcaccgactcggaagtcatcggggcattcctcgccggcaccacttgccgagacctggtgagcaaactgggacgcaagactcccaccaaggcgagcgaattgatggacatcgccaccaagttcgcctctggtcaggaggcggtcgaagccatcttccggaaggacaagcagcctcaggggagacagaaggaagacgcccccgaggcgtccgccccacgtggcacgaagaagaaggccagcaagaaggcgcaagcaaaacgcgatgccgttgacgcggatctcgtcgctgctgccgagcacaggaaccctcggaaacctcccagaggggccaacatgttcgacaagatgcttaaggagtcgtgcccctatcataggggccccttcaagcacacccttgaggagtgcgacatgctccggcgttacttcaacaaggctggaccctcggcagaaggtggcaaagaccaaggcaacaacaagaaggggggcgacaaggaagaggagttcccgaaggtccacaactgcttcatgatctacggcggacaggtggcgaacgcctcggcttggcaccgcaagcaagagcgctgggaggtctgctcggtgaaggtagcggcgttggtctacctagactgctccgacaagcccatcaccttcgaccaaggcgaccaccccgactgcgtaccgagcccaggaaggtacccgctcgtcgtcgaccccgtcatcggcaacgctaggctcaccaaggtcctcatggacggatgcagcagcctcaacatcatctatgccgagaccctagggctcttggggatagatctgtccacgatccgggccggtgcagcgccttttcacaggatcgttcccgggacctatcacgcggtgctgggaagaccatgctacgccaagttcatggtcgtccccaactacacgtacctcaagctcaagatgtcgggccccaagggaatcatcaccgtcggatccacgtactgccacgcttacaagtgcgacgtggaatgcgtggagtacgctgaggccatcgccgagtccgaggccctcatcgccgacctagattgcctctccaaagaggcgcccgatgcgaagcgccatgccggcaacttcgaaccagccgaggcagttaagcctgtccctctcgaccccagcaacgacgccgacaagaaagaagcagtgctcgtcgactttctccgcgcaaacgccgaaatttttgcatggagtccctcggacatggctgacataccgagggatgtcgccgagcactcgctggacatccgagccgatgcccgacccgtgaagcagcccctgcgcggctttgatgaagaaaagcgcagggccataggcgaggaggtccacaagataatggctgcagggttcatcaaagaggtatttcatccagaatggttagctaaccctgtgcttgtaaagaagaaaggtgggaaatggaggatgtgcgtagactacactggtctaaataaagcatgtccgaaggtcccctaccctctgcctcgcatcgatcaaattgtggactccactgctgggtgcgaaaccctgtcattcctcgacgcctattcaggttatcaccaaatcaagatgaaagaatccgaccagctcgcgacttctttcatcacaccttttggcatgtattgttataccactatgccatttggcttgaggaatgcaggtgcaacataccaaaggtgcatgaaccacgtgttcggggagcacatcagcaaaacagtcgaggcttacatcgatgacattgttgtcaagacaagaaaagcctccgacctcctctctaaccttgagataacattcaagtgtctaagagcgaagggcgtaaaactccaccctgagaagtgtgtcttcggagtcccccgaggcatgctcctaaggttcatcgtctccgaacgaggcatcgaggccaacccggagaaaatcgcggccatcaccaacatgggaccaatcaaagatttaaaaggagtacaaagggtcataggatgccttgtggctctgagccgcttcatctcgcgcctcgaagccctcttgatctacgtagccgcaaccactgaggtggtcagcgccgcgatcgtagttgagagacgagaagaagggcatacactgctcatccagaggccggtctacttcatcagcgaggtgctatccgagaccaagatccgctacccacaaatccagaagctactgtacgcagtaattctaacacgacgaaagttgcgacactacttcgagtctcatccggtgactgtggtgtcatccttccccctcggagagatcatccaatgtcgagaggcctcgggtaggatagcaaaatgggcagtggagctcatgggcgaaacactttcattcgcccctcggaaggccataaaatctcaagtcctggctgacttcctggctgaatgggtcgacacccaattgccgacagctccaatccaggccgaactttggaccatgtacttcgatgggtcgctcatgaaatccagagcaggtgctggcttgctcttcatctcacccctcgggaaacatgtgcgctacgtactgcgcctccattttccggtgtcaaacaacgtggctgagtacgaggccttggttaatggactgcgcatcgccatcgagctaagggttcgatgcctcgacgctcgtggcgactcgcagctcgtcattgaccaggccatgaagaactcccactgccgcgatcgaaaaatggaggcctattgcgacgaagttcggcacttggaagataagttccacgggctggaactcaactatgttgctcgacggtacaacgagaccgcagatgagctggcgaaaatagcctcggggcgaaccacggttcccccgaacgtcttctctagggagatatatcaaccatccgtcaaaatcgacgacacgcccaaacctgaggagacctcgacccagcccgagaaggcacccgggggcttcacgcacctgctggtcgccatcgacaaattctccaagtgtatcgaggtccgacccttaaccagcatcgggtccgagcaggcggtggcattcttcacaaatatcatccatcgctttggggtccctaactccatcatcatcgacaatggcacacagttcactgggaagaagttcctggacttctgcgaagaccaccacatccgtgtggactgggccgccgtagctcacccaatgacaaatgggcagggactaaaaccgaggatctacaatgacctcaacaagtttggcaagcggtggataaaagaactaccctcggtggtttggagtctgaggacgatgccgagccaggccacgggattctcgccgtttttcctagtctatggggccgaggccatgttacccacggacttggaatacggttccccgaggacaaaggcttacgacgaccaaagcaaccagaccagctga

SEQ ID NO: 79459 - DNA, 378 bp, Zea mays
  Clone ID: MRT4577_172495C.1
atcctccctgtgtcgcgccctcggcgtgctggacgtaatgccgcagcaagcgtgggcagcgacgcccttcgctgcgacgcgctcgccaggtcggtccactcgccgtcgatctgcgcagcccctgcacgtcgtcgtcgaaacccgcgccctccgtcgatgtcacgcctcgtgctatgcctatgcgacgcaatgctagccggtggacagcacatgcgactcaccgatccggccaggaccgagagatgataatcgcgcaagtgatatggtgccaaccacaaggtgcagtcggtggacgacccaaggaaggatggacttaaccagtggatgctcgccaagcaagtaccccacccccagcaaacactatctaagtgttaaatt

SEQ ID NO: 79460 - DNA, 4284 bp, Zea mays
  Clone ID: MRT4577_172496C.1
atgcgggaggcctcggtccgcatcgagcgcacgcgggacgggacacccgtagccccggctcacctcggcgacgagcaacaccgccacgaccgtcgagcccgcctcgaggagagggtgcgccaaggctaccaccctaggtgcggaggacgctacgacagtgaggaagatcagagcccctcgcccgaaccactaggtccgcgagtctttagccaggccatacgacggacgccgttcctggcccggttccgagccccgactaccatcaccaactgccgccagcagcaaggggaatccctgcgagagtacatccggcggttttccatgcagcgcaccgagttgcccaacatcaccgacttggacgtcatcggtgcattcctcgctggcaccacttgccgagacctgcgcggcccgaagaaggccaagaagaaggcgcaagcaaaacgcgacgccgttgacgcggatctcgtcgctgctgtcgagcacaggaaccctcggaaacctcccggaggggccaacatgttcgacaagatgctcaaggagtcatgcccctatcacaggggtcccgtcaagcacacccttgaggagtgcgacatgctctggcgttacttcaacaaggctagaccctcggcagaaggtggcaaagaccaaggtaacaacaagaagggaggcgacaaggatgaggagttcccagaggtccacaactgcttcatgatctacgacggacaggtggcgaacgcctcggctcggcaccgcaagcaggagcgccgggaggtctgctcggtgaaggtagcggcgctggtctacctagactggtccgacaagcccatcaccttcgaccaaggcgaccatcccgactgcgtaccgagcccgggaaggtacccgctcgttgtcgaccctgtcatcggcaacgctagtctcaccaaggtcctcatggacgaaggcagcagcctcaacatcatctacaccgagaccctagggctcttggcgatagatctgtccacgatccgggccggtgcagcaccctttcacgggatcgtccccggtaagcgtgtcctgccccttgggcatcttgatttacctgtctgcttcggaactccctccaactttcgaaaggaaaccctcactttcgaggtggtcgggttccgagggacctatcacgcggtgttgggaagaccgtgctacgccaagttcatggccgtccccaactacacttacctcaagctcaagatgccaggccccaacggaaccatcaccgttggatccacgtaccgccacgcttacgaatgcgacatggagtgcatggactacactgaggccatcgccgagtccgaggccctcatcgccgacctggattgcctctccaaagaggcgcctgacgcgaagcgccacgccggcaacttcgaaccagccgaggcggaagcagtgctcgtcgactttctccgcgcaaacgccaaaatttttgtgtggagtccctctaacatgccaggcataccgagggatgtcgccgagcactcgctggacatccgagccggtgcccgacccgtgaagcagcacctgcgccgttttgatgaagaaaagcgcagggccataggcgaggagatccacaagctgatggctgcagggttgatcaaagaggtattccatctagaatggttagctaaccctgtgcttgtaaaaaaaggtgggaaatggaggatgtgcgtagactacactgggttaaataaagcatgtccaaaggttccctaccctctgcctcgcatcgatcaaattgtggactccactgctgggtgcgacaccctgtctttcctcgacgtctattcaggctatcaccaaatcaagatgaaagagtctgaccagctcgcgacttcttttatcacaccttttggcatgtattgttatactactatgccatttggcttgagcaatgcaggtgcaacctaccaaaggtgcatgaaccacgtgttcggagagcacatcggcaaaacggtcgaggcttacgtcgatgaaatcgttgtcaagacaaggaaagcctctgacctcctctccgacctcaaagtaactttcgggtgcttgcgtgcaaagggcgtaaaactaaatcccgagaagtgtgtcttcggagtcccccgaggcatgctcctggggttcatcgtctctgaacgaggcatcgaggccaacccagagaaaattgcagccatcaccaacatgggacccatcaaagatctaaaaggagtacaaagggtcatgggatgccttgcggccttgagccgcttcatctcgcgccttggcgagaaaggattgcccttgtaccgcctcttgaggaagaccgagcgcttcacttggacccccgaggccgaagaagccctcggaaacttaaaggcactccttactaatgcgtccatcttggtgccccctgctgcgagagaagccctcttgatttacgtagctgcaaccactcaggtggtcagcgccgtgatcgtagtcgagagacgagaagaggggcatgcactgctcgtccagaggccggtctacttcatcagcgaggtgctatccgagaccaagatccgctacccacaaatccagaagctactgtacgcagtaattctgacacggcgaaagttgcgacactacttcgagtctcatccggtgactgtggtgtcgtccttccccctaggagagatcatccagtgccgagagacctcaggagcaggtgttggcttgctcttcatctcacccctcagaaaacatgtgcgctacgtactgcgcttccattttccggcgtcaaacaacgtggccaagtacgaggccttggttaatggactgcgcatcgccgtcgagctaggggttcagcgcctcgacgctcatggcgactcgcagctcgtcattgaccaggtcatgaagaactcccactgctgcgatcgaaaaatggaggcctattgcgacgaagttcagcgcttgaaagataagttccacgggctggaactcaaccatgttgctcggcggtacaacgagactgcggatgagctggctaaaatagcctcggggcagacgacggttccctcgaacgtcttctccagggacatatatcaaccatccgtcaaactcgacgatgcgcctgaacccgacgagacctcggcccagcccgaggtaccctcggccgccgagggtgaggccttgcgcatcgagggagagcggaatggggttgcgccaaaccgaaactggcagaccccgtacctagaatgtctcctccgaggagagctgcccctcgacaaggccgaagctcgcccctcaggcattctccaacgatgcatatccgtcgcccaaggacaagagctgttacaagaaatacactcgggggcttgcggtcaccatgcagcacctcggaccctcgtgggaaatgcttttcgacaaggtttctactggccgaccgcagtggccgacgccactaggattgtatgctcctgccaagggtgtcaattctacgcgagacagacgcacctgcccgctcaagccctgcagacaatacccatcacttggtcgtttgccgtatggggaatggacctcgtcggtcccttgcaaaaggcacccggggacttcaagcacctgctggtcaccattgacaaattctccaagtggatcgagttcactgggaaaaagttcctggacttctgcgaagaccaccacatccgtgtggactgggccgccgtagctcacccaatgacaaatgggcaggtggagcgcgccaacggcatgattttgcagggactaaagccgaggatctacaacgacctcaacaagttcggcaagcggtggataaaagaactaccctcggtggtttggagtctgaggacgacgccgagccgggccacgggtttctcgccgttctttctagtctatggggctgaggccgtcctacccacagacttggaatacggttccccgaggacaaaggcttacgttgaccaaagaaaccagaccagccgagaggattcattgaaccagctggaagaggctcgggacgtagccttactacactcgacatggtatcagcagtctttgcgacgctaccacgcccgaagggttcggccccgaggcttccaagtgggagacttggtactttggttgcgacaagacgcccgagggcgccacaagcttactcctccctgggaagggcccttcatcatcgccaagattttgaagcccgggacatacaagctggccaacgatcaaggcgaggtctacaacaacgcttggaacattgaacagctacgtcgcttttacccttaa

SEQ ID NO: 79461 - DNA, 267 bp, Zea mays
  Clone ID: MRT4577_172497C.1
ctgagcccgacagaaccggtttggtcgatttgggacctggtaggccggtattttttttattgaagtctaactttctaaattaggtcttattggtttgtgttggattgcgccaggaatcctttcaagtttatataaattttttgtaatccttagtgttttttgtaatccttattggttttctaaattaggtcttattggtttaagtgagaaacaatccggttagaaatcgtttcgatccactaatcctaaacaatggattgacacctt

SEQ ID NO: 79462 - DNA, 1085 bp, Zea mays
  Clone ID: MRT4577_172498C.1
gctaccgacatcgtccctggccctgcctccccgccgctgccgcctgccgcgagcatccttcgtcggcgtcgtccccggctctccggccgccctgctgcgatcggccgctgcgttggtatgtgtttaaaaggtgagacgaggcgttcaggggactactggatccacctagatgcctaggcgatcgagaaggcgctactgttttccatgtggaattatccaggtaataaacacaagccgaagaatgcacagtatgcagaagtttgcggatgtcaggtggcactttgtaagaaacaagaatccattatgcattgcagggctatggaatgagttgaaaacaggaaccccacacagcatcaaccagaagagacgcatttcaggcattaaaatagccccagagaacaggtcattggaaggtcagaaatggtaccaatccgtttttttttgtctgccgatatttctgtcagagtcgggctttgtttgtgatcagtttcagatcattgtgtcgatcagaaccttaagcaggcagtccatttgccgcctaatcacagatagcacaagattaacattgcatataaaagttcttgacaacatggtcaattcattcctggtgacatggccatccaacagaagaaaaaaaattgatattgctgatcaacgaaacagttctggacccagattggtcagggaatcagttggtttgtttattctacacctggaagggcatcgaagaaaatctctctttatttctcaccagaatcttcagttgtcagaaggccagctaaagaagggcaaagcttcagatgcatacgcgcataaactaaaagtaaatcatgttcctgtttttgtacaggagaagggatctgattgggcagtggacctggctacctagattttcttgaaatttaagaagcctcagtatcgtgtatttacatgttctttttccagtacgatagatttacttttccgtaaagtggcgtaaaccgtaagtattttttcctcccaacagtcctctcctaacgactaacaaagttcaattcatgcgaaattcggatgtttcattttaaaaaaaggatcttcagtgtgtg

SEQ ID NO: 79463 - DNA, 762 bp, Zea mays
  Clone ID: MRT4577_172499C.1
agtacaaaagaaggccagcgcgcggcccattcctgcacggcgcgcgcgtacgtgtgcctcgttgcactaaacaaaagggccgtccctcccatcccatcgccgccgacagagcacctccgcctccattcattcgtggagaagcgaaccgattcccgttgccaccggccgactcgccgtcactttcccggtggtgcccgcgacagcgaggaggaggacgatggtcgtaactgtagcagcgacggggtcggacacggccgagccgctgcactccaccaccttcgcctcccgctacgtccgcgaccagctcccccggtaccggatgccggaggggtcgatccccaaggaggcggcgtaccagatcatcagcgacgagctgatgctggacgggaacccgcggctgaacctggcgtccttcgtcaccacctggatggagcccgagtgcggcaagctcatgatggactccgtcaacaagaactacgtcgacatggacgagtacccagtcaccaccgagctccagaaccgttgcgtaaacatgatagctcacttgttcaatgcaccgatcggtgaggatgagactgctatcggagtctcaacggtggggtcctcggaagcaatcatgcttgcgggcctggcgttcaagaggaagtgggcaaacaaaatgaaggagcaggggaagccatgcgacaaacctaacattgttactggtgcaaatgttcaggtttgctgggagaaatttgctagatatttcgaggtggaactgaa

SEQ ID NO: 79464 - DNA, 359 bp, Zea mays
  Clone ID: MRT4577_17249C.1
agcagtggtaacaacgcagagtacgcggggcccaaagggcccggcattgtgaggtcaatgcagctgggagcagcacggagtgtatgtttacagggaggcgctactacaccggagctcagctgccgccgaatctcccaagaacaaaatctgtacccctgaatgctgtcgacgcctgaaatgctttcttgccatgtaaatttttatagagtgtacatttgttttggttccttttgtatccattatgaaacatcgttgttgggcaggaaaaaaaaaaaaaaaaaaaaaaaaaaaaaaaaaaaaaaaattttaaaaaaaaaaaaaaaaaaaaaaaaaaagtcctctgcgttgttaccactgct

SEQ ID NO: 79465 - DNA, 1601 bp, Zea mays
  Clone ID: MRT4577_1724C.1
cattgggtacctcgaggccggccggggaactttccatcgaccttttccccctaaaaaaaaaaaagagaaaaaaaatcagactgccttccggttccccatctcccctccctcagcgcagactcagccatggcttccgccgaaaccctagcccgctccccctcgcgcgagccttcctccgacccgccccgcgccggctcttccgagccccaccacaacggcgccggtgactcgtctcgccgccgccgccgcagccgctgggagcagtctaacgacgactccgccaacaactccggcggcgagggcggggccgtgggccggaagcgcaaaacgcggtgggccgaggaggagccgcgcccagccatcgcgctgccggacttcatgaaggacttcgccgccgagatggaccccgaggtgcacgctctcaacgcgcgcctcctcgacatctcgcgcttgctgcagtcgggcctcccgctcgacgaccggcccgagggcgcgcgctctccgtcccccgagcccgtctacgacaacttcggcatccgcataaacacccgcgaataccgcgccagggagcgcctcaaccgcgagaggcaggatattatctcgcagctcatccgccgcaaccccgccttcaagcccccctccgactaccgcccacccaagctccagaagaaactctacatccccatgaaggagtacccaggctacaactttatcggcctcatcattggccctcgtggcaacacgcagaagcgcatggagaaggagactggtgccaagattgtcattagggggaagggtagtgtcaaggaagggaagtttctccagaagagggacctcaagccggatcccagtgagaacgaagatctccacgtgcttgttgaggcagagacacaggaggcactcgatgcggctgctggtatggtggagaagctgctcaccccggtggatgaggtgctcaatgagcacaagcggcagcagctccgggagcttgccgcgcttaatggaacaattagggacgatgagttttgtagaacatgtggtgaggctggtcacaggcagtatgcttgccctaacaagatgaacacgtttaagagtgatgtgcagtgcaagatctgtggggatggtgggcacccgactattgattgtccagtcaagggcacttctggtaagaagatggatgatgaataccagaacttcgggggtgagcttggtggcggcagtgcacctgagtccatgaacaaatctggtggtccaatgttggctcttacaggaagtggtggtagcggtggtgcttctgctggaacggggagtaacccgccttggtcagccggtggtggtgctgctggcattgggctcaatggtatcaagaaagactatgacgagacaaatctgtatatcggctacctgccacctacaatggatgatgatggattagtcagtctgttttcacaatttggggatattgttatggctaaggtgatcaaggatcgaaacaccggacagagcaaaggatatggatttgtcaagtattcagacgtgtcagaagccaatgcagcgattgctgcaatgaacggtcaccatcttgaaggtagagttattgc

SEQ ID NO: 79466 - DNA, 1797 bp, Zea mays
  Clone ID: MRT4577_172500C.1
atggtcgtggccgggtatggcatggacaaggctctgcgggccagcgtcagcttcgacacgccatgcggcgcgctgctgcgcgagcttgagcaaatatggacagagattggggagcgtgaacaagataaagatcgcatgttccttgaactggaaacagagtgcatgcgtgtgtaccgtagaaaggttgatagtgccaatgctgagagagcccagctccgtcagtcactgatggccaaagaagcagagcttaaagctctagttgcttctatcggggaaaatggcccacgatttacggtggatgaaaagcacacatcgttgaaagatcaacttgctgcagtggcacctcttttggaagatcttagagtaaagaaacaagacagagtcaaacaaatctcaaatgtgcaatgtcaaatcgagaagataaaagcacaaatttctgatcacaattatcaggacagtgatggttccatcaaacaacttaacgatgaccatgacttatcgaccagaagaatttctgatcttcaaatgcaactgcgtaatctacagaaggagaagtccgatcgtcttcagaaggtttttatatatgtggatgaagtgcacagcctatgtgcagtgcttgggatggattttccaaagactgtaaaagaggtccacccgagtttgcatggatccaactctgaaaattcaacaaatattagtgatagcactcttgaaggtcttactcagactatcctgaagctcaaagcagaaaagaagacaagagttttaaagttgcaagagactgtagaaaaacttcacaagttatggaatctgatggagtcaactgagaaagagaggatacacttctctgaagtagctgctattcttggatctactgaggaagagatcaattctccaggcattctgtcattggagacaattcagaagactgaagaggaagtcgaaaagctaactgtacaaaaaactagtagaatgaaggagcttgttctcaagaaaaggttagaactagaaggcatctgtagaaatgcacacatggagcctgatatgagcacagcaccagagaagatcaccgcgctgattgattccgcatttgaagtgcaaataacaaaagcaaatgaagagtccttaacgaggaaagatatcatggagagagtggataaatggctatcagcttgtgatgaagagacttggcttgaggaatataaccaagatgataataggtatagtgctggcaggggtgcccacttgaatcttaagcgtgcagagaaggcaaggataactgtccaaaagattccaactatgattgacagcttgatagccaaaacttttgcatgggaggatgaaagaaatgtgccatttttatatgatgggattcgtttggttgccattttggaagagcaaaaactcagaagggcacaaagggaggaagagaagagacgcagccgggatcagaggaagctgcacagtttattgcttaaggagaaggagttgattttcgggtccaaacctagtcctagaaagacaagcagcttcaataggaggaccagcaaccaccatccaaacgcaaatggcgctggattcatgactccggtgccacgccgagtttcagctggcagtgccaccccagagcttctgaccccacgctcgtattctggccggtacaacaactacttcaaggagaacaggcgcctgacagctgcaccactgaacttctcagttggttccaaggaggatagcatgtcatccttcgcatccatcagtggctcggaacctgattcgccattgtttttgcactaa

SEQ ID NO: 79467 - DNA, 262 bp, Zea mays
  unsure (1)..(262): unsure at all n locations
  Clone ID: MRT4577_172501C.1
gtgtgtgggggggtttttttaattttttttgggggttttttttttttttttccataaagcagcagagggcacaagtcccattaccaggggaaagtacattcactcagggaaaacagcagctgatttctagatattaggaaatgccaaccataaggggtatgaaggggggtccccaacattnccaccaacccaccccnaanataaattattaacttcttccaataccccaaccccatccccatccccccttttttcataccca

SEQ ID NO: 79468 - DNA, 310 bp, Zea mays
  Clone ID: MRT4577_172502C.1
ccacgcgtccgcacatcgcctgctcaccggtctacgacgcatctccagctacgccagcagagttagatctagggactgggtgtcatcgccagccattctcgccctgttcgacacggccgtatcgatcttcctctatctgacgctggtgctagactcactcgcagtcgcagtcggctatgcgactgtcggacgggcacacaacttatgcacggtgtgcagccatcaatcgcgtcgacgaggctacagcagcgttagcgaggacaccagtggacatcgtgcaagagccacttgcgattacacctgtcatgct

SEQ ID NO: 79469 - DNA, 2616 bp, Zea mays
  unsure (1)..(2616): unsure at all n locations
  Clone ID: MRT4577_172503C.1
attctgcctctctcttcccctccctctctggaaccagggtggttgtcaagcggtgttggagttgggagtccttgccattggtacaagagcaagaagcaaggacagggaggggcgagaggaggaagaaagcgagggacactagaaaggtgcttgctttgtttccagttgcttcttctctctccctgggcgggagagaaagaagcaggagaggatatgggcgagatggtcgtggccgggtatggcatggacaaggctctgcgggccagcgtcagcttcgacacgccatgcggcgcgctgctgcgcgagcttgagcaaatatggacagagattggggagcgtgaacaagataaagatcgcatgttccttgaactggaaacagagtgcatgcgtgtgtaccgtagaaaggttgatagtgccaatgctgagagagcccagctccgtcagtcactgatggccaaagaagcagagcttaaagctctagttgcttctatcggggaaaatggcccacgatttacggtggatgaaaagcacacatcgttgaaagatcaacttgctgcagtggcacctcttttggaagatcttagagtaaagaaacaagacagagtcaaacaaatctcaaatgtgcaatgtcaaatcgagaagataaaagcacaaatttctgatcacaattatcaggacagtgatggttccatcaaacaacttaacgatgaccatgacttatcgaccagaagaatttctgatcttcaaatgcaactgcgtaatctacagaaggagaagtccgatcgtcttcagaaggtttttatatatgtggatgaagtgcacagcctatgtgcagtgcttgggatggattttccaaagactgtaaaagaggtccacccgagtttgcatggatccaactctgaaaattcaacaaatattagtgatagcactcttgaaggtcttactcagactatcctgaagctcaaagcagaaaagaagacaagagttttaaagttgcaagagactgtagaaaaacttcacaagttatggaatctgatggagtcaactgagaaagagaggatacacttctctgaagtagctgctattcttggatctactgaggaagagatcaattctccaggcattctgtcattggagacaattcagaagactgaagaggaagtcgaaaagctaactgtacaaaaaactagtagaatgaaggagcttgttctcaagaaaaggttagaactagaaggcatctgtagaaatgcacacatggagcctgatatgagcacagcaccagagaagatcaccgcgctgattgattccggtttagtggatccttgcgaactcctttccagcattgaagtgcaaataacaaaagcaaatgaagagtccttaacgaggaaagatatcatggagagagtggataaatggctatcagcttgtgatgaagagacttggcttgaggaatataaccaagatgataataggtatagtgctggcaggggtgcccacttgaatcttaagcgtgcagagaaggcaaggataactgtccaaaagattccaactatgattgacagcttgatagccaaaacttttgcatgggaggatgaaagaaatgtgccatttttatatgatgggattcgtttggttgccattttggaagagcaaaaactcagaagggcacaaagggaggaagagaagagacgcagccgggatcagaggaagctgcacagtttattgcttaaggagaaggagttgattttcgggtccaaacctagtcctagaaagacaagcagcttcaataggaggaccagcaaccaccatccaaacgcaaatggcgctggattcatgactccggtgccacgccgagtttcagctggcagtgccaccccagagcttctgaccccacgctcgtattctggccggtacaacaactacttcaaggagaacaggcgcctgacagctgcaccactgaacttctcagttggttccaaggaggatagcatgtcatccttcgcatccatcagtggctcggaacctgattcgccattgtttttgcactaagtgttggttagggaggagacttcttggtgagaagggtggatagcctcaagatcggaccattgtgtgtgtgtgtgtgtggcagctgttaacattgctgattggtaacaacaggttgtgacaagtttagatgcgattgcttgtagatataatatctaacattcatggttctgctgtacttccaaatttaagttgtaagtcgtttggttaggaaggatgcaatgcccaagtgtgcaatgtatttgtttcgtgttaagtctgtatgttttgcatgtgaagaaagggtgatttttttttgtcaatgacgtagcagttcagccttcaaggttacagctacagcatcttgtcttgtactggtcgtttggatcacagctggcgtgtgctatatgggaatctaacacccatctttttgtcagaacaaagagtgtcttgcatgttggatctcagttcacacatgctgtcaatagaggtactttgaaagaaaaaaaaaaaaaaaaaaaaaaaaaaaaaaaaaaaaaaaaaaaaaaaaaaaaaaaaaaaaaaaaaaaanaaaaaaaaaaaaaataaaaa

SEQ ID NO: 79470 - DNA, 204 bp, Zea mays
  unsure (1)..(204): unsure at all n locations
  Clone ID: MRT4577_172504C.1
gaaacggaattaccgggtggaacccagcgttcgtcctagcgttcgcccacgcgtccggttgcttgtaaactatgngatactatatgcccaggggaggcaattacaattgaggatgaagaacgtgaagatggaagttagatgaaccacaagatatgattattgagatgtactaaatgcattgtactgtgggtttttgttaagagg

SEQ ID NO: 79471 - DNA, 435 bp, Zea mays
  Clone ID: MRT4577_172505C.1
caaaaacattggtttacatcaaaaataaattctataggacccacattaattaacaaggcccaccactgttatcaaaaaggaaaaaggagcctttttcgttgacgagctattccaaaggctaaaaaaaacatgcccagctcaatttgaaatgaaaaactcctgttccattttactaggaaaaaacatactcatccgaaaaaaaaagaagaaacatcatccgccatacaaaaactgacccaaaaggcttcatagttgctgcttcccccagggttgtcaaagaaagatggttcctcccttttgaattactggcccaccgaccgaccaacacccgcctcacggttggggcaccattttggcggttgatgcacccggtgcctaacgcctccccacaggaggaaacttattttggagacgcattatcgtctttattacccc

SEQ ID NO: 79472 - DNA, 271 bp, Zea mays
  Clone ID: MRT4577_172506C.1
cgcatgcgtggggtctcgctatggatagcattggtattccccgtccgttcgttcgggcagtgatctcaaatccaggaccttacgaactccacgactaccctttggccagatcacgctcgcaggaaaccctagagaccccgtccaaatcgctggggtcaagagcatctgcgcagcgcgcgacatggagacactcccgctgaactctctccccgagcagatccacgtgggtgccagtcaagaccaagcagcaggagctcctgctccgaaggtc

SEQ ID NO: 79473 - DNA, 1064 bp, Zea mays
  Clone ID: MRT4577_172507C.1
ctcgaggggccggccgggccgggagactctagtactctacccggacacatcccccttcccttcccttccccgcaactaccctctactctctactgcacgcttctactatctaagaaacaacgcacacgggccgaaactaaatttctccaagcgcgcaatcctgtcgccaaccccggccacggatcggggatgtcgtctgctgcgggccgcgcgccggcgccgacgccgatgggctccgccgatcgctgtaagatcgacgggatcgtggcggcggagaaagccaccaggagctgcgtcgaatgccgcgccaccaccacgcccatgtggcgcagcggcccgaccgggcccaggtcactttgcaacgcctgtgggatccggtaccgaaaaaagaggaggcaagagcttggcctagaccgcaagctgcagcaacaacaaaataatggcgaggcgaagacggatgaagcaaaagacagctctagcaacagcagcagcgggagcagcaacttgcaggtggtgcagaaacggaggctgctaatgggagtggaggaggctgctctgctgctgatgaccctatcttcttcgcccacatccacgttgcttcatggataaggaccctcctccaacgccagatcagcagtgtacatacaacgtaccccctgcacagtgactgccgaacgattgcaggcctatctcagggttgtgtgatcttgtgattggggcggattattagtgccaagctaatcactccgttgatcgtcttgtcttcctctgttttcgccgcacccgtagatcttgatgccagccagccatatatcttctacgtgatttgtggtaggctccataatcagaggtctgttgatcccattccccccgcacatcttttttctcttgtcttttctctttttggttttttgtatgtactttgatgttgccccatttgtgagggatgggtgatcaaagaggagacgccatcccttctcgttctggaataatggtccaaataataaaggatttgagctgttttgttttgaaaaaaaaaaaaaaaaagcggccaaaaaggtgac

SEQ ID NO: 79474 - DNA, 228 bp, Zea mays
  Clone ID: MRT4577_172508C.1
atcccatggtttggccaagtaacacttgcctacttccatgttgtggcgtcccaatggacgagggttgcactcaacccctttcaagtgatctgatgatcaactttaataccacagtcttttcctttagagtatgtttcccgtttgcgaggaatctccacaatttggagtctctcgcccttacaattgagatcacagagaaagcacagagtaaggttggggagagcaaca

SEQ ID NO: 79475 - DNA, 1043 bp, Zea mays
  Clone ID: MRT4577_172509C.1
aattcggcacgaggcgcttctactatctaagaaacaacgcacacgggccgaaactaaatttctccaagcgcgcaatcctgtcgccaaccccggccacggatcggggatgtcgtctgctgcgggccgcgcgccggcgccgacgccgatgggctccgccgatcgctgtaaggtacatccatcggctctcgtcttcgctctctcttcctctcctttgctccgagctctgtcatcccggtctgcttcctgcgacccgccgttgcagatcgacgggatcgtggcggcggagaaagccaccaggagctgcgtcgaatgccgcgccaccaccacgcccatgtggcgcagcggcccgaccgggcccaggtcactttgcaacgcctgtgggatccggtaccgaaaaaagaggaggcaagagcttggcctagaccgcaagctgcagcaacaacaaaataatggcgaggcgaagacggaggaagcaaaagacagctctagcaacagtagcagcgggagcagcaacttgcaggtggtgcagaaacggaggctgctaatgggagtggaggaggctgctctgctgctgatgaccctatcttcttcgcccacatccacgttgcttcatggataaggaccctccaacgccagatcagcagtgtacatacaacgtaccccctgcacagtgactgccgaacgattgcaggcctatctcagggttgtgtgatcttgtgattggggcggattattagtgccaagctaatcactccgttgatcgtcttgtcctcctctgttttcgccgcacccgtagatcttgatgccagccagccatatatcttctacgtgatttgtggtaggctccattatcagagggctgttgatcccattcgccccgcacattttttttttctcttgtctttttttctctttttggttttttgtatgtactttgatgttaccccttttgtgagggatgggtgatcaaaaaggagacgccatcccttctcgttctggaataatggtccaaataataaaggatttgagttgttttgttttga

SEQ ID NO: 79476 - DNA, 294 bp, Zea mays
  Clone ID: MRT4577_17250C.1
ccacgcgttctctccaatccatagcgtctggctattcaccccgaccaacatacggaccccacatggctgccacccgcaagctccgccactccccgtgcgtcggcgacggcagcggggaccacctccgcttcctacgtcccggggctgtcgcccgcctacgcgacgacaggctccgccgcgccactcgcctgcccccgccctcatcgcctgcgcatgcgcctgcgcctgcgcctgcgcctgcccggcttccttctcatcgcctcttcctgcttctggagacggcgaggggcgtcg

SEQ ID NO: 79477 - DNA, 463 bp, Zea mays
  Clone ID: MRT4577_172510C.1
aacccccaaataaaggtttttaaccccaaaaatggggggcccccccccgaccaacctggtttaaggatccccattgggggcacccaaaaacccgggggggccaagccttttttaaaccaaaaaaccgagggctaaaaaaatttgggggggcaaatggggggggttaaggctaaacccggggccccataaaccggtttttttccccccgggaaaagggccctaagggggggggggggccggcctttcccttttttcccctgggacaaaattggggaaaaaccctcctttcctaaaaaaaacctatttgggcccaccccccaacccttaggttattccaaaaaatatattgggaacagttccccccttggccaaaggcccccaaactaaatcggccccccagtttgtcctattggacccgaaaaaaaaatttccaggggggttaaaaggcctttcccagggcaaa

SEQ ID NO: 79478 - DNA, 394 bp, Zea mays
  Clone ID: MRT4577_172511C.1
attcggctcgagggttgcttatctcaatttttcaggagggctgacaattcaccctcggcttgataaactgacggccgtctccgttctccacaacatgttatccctatgggcactatctgtagacgccactgcagtatcacacggattgcttctccatggttacgaggcgtggaatgagctaacggctggatgtatctacttgccgaggcgtgtgcccgtcttggttgacaaggaaacgacccgacaggactgccagccatatctggtgtgtggtcgatacaacgtttagttggcagttgaacaagatcagacctacacaaacaatgttcatgctataggtgagctgaggtgatatccaagtctgctgctgcactcatagctcaagataaggagc

SEQ ID NO: 79479 - DNA, 781 bp, Zea mays
  Clone ID: MRT4577_172512C.1
aaataaaagatatttaaatatgaatagaaagtaagaatggagagatttgggaggaggaacggtgcgagatagccttagcagaagcgtgccctcgatcggcgctgtgctggatgccaacctggtcgctgtatggcagcaccccctactctggcgtatttttttagataatggaaaaatcatccgaccttggcctcaaatgaggttacggccatttattacaagggacggaagcatattgccaaaactcctcctatgaccacttcagagaaccccaactagccaaattaaagaacttcagctatcgaaccacagctactacatatttaaacgcaacgcagacccccatccaaaattgctaaagagctgtagtagcaccctctccacattacgacatgaagactttattaactcttggtcctcccttctaggctgaagctgagaccagaagcggcaccaatatgttgccctgaaggtcacctgaagagcgggatctggagcatgatgaggaggaagtagactcgggaggcgtagatggagatccgacggctcgtccaaccgctgcccgcccgtcggcgctgcacctcgaccgcccccggtttcgccggtgttagccccgacgagctcggccgcgcctcccccgccaacctctctctcctcgtctgtggagccatgggtcgcctacaccgccggcttcctgctgctttctttaccaaatcatggtcgtgactcgtgacgagccaaggcgcggcttaaacaaaggtcctgttggggacacccggag

SEQ ID NO: 79480 - DNA, 354 bp, Zea mays
  Clone ID: MRT4577_172513C.1
tattgcgggctcgacgagctttttatgtggacggcggccttaactatgatgggggagagtttttgataacatgtgcgcagggtgactagacacaaaacaaacatatgaatgtttgcactagtctaggacaccgtcagccaatcatgaggtagattgaaaacgttaaaagtggagcgaataacaaacaaagggatgactctacattaaacgacagtggctaataacacatgcaacctttggtgtggcataccgtggactcgctacattgataatgtagcccatgacgagcaaaccgaattacatcactctcccaaaatatagatggaaatggataaggcatacgcactctgcaca

SEQ ID NO: 79481 - DNA, 930 bp, Zea mays
  Clone ID: MRT4577_172514C.1
actcgctcgatccccaatcgctgcgtgcctgcctgcttcctccacccgaccctaaccctagccgcgccgccaccatcgatccccaaatccctcccccctccgccctccacccaaccctaatccctacctaccttagctagctagccgccatgggccgttccatggctctgctccaccgcgagatttacttctccgacgacgaggcgttatccggccgagtgtcgtcaatccgctgcccgtgggaaggacgagatggtccaccaagccgccaagagatcagtgacgcagtcaccggttacctgcggaccttcaaggcgcacgcagtcgtcgccgatccgccggcgctctccttcctccacatactgcggccgccggtatccgtcgggctcccggtgcagctccacagcctcaccatggccactctctccagcgcggacaagaacctggtcgccatgtacgccggagcgtaccgccctggcaaccgtttccctggaggctacctcatctacgacgccaggaacgactccatctctgggatccccgagctcccctccgaccactcacatagagccatcgggtgcgagtcggccgtcgtcatgtgcgaagccgccgccgccgggaacgactactttcttgccgagctcgtcagggtctggccagatggctcccaagctgcgctctggctgtggaagtcgtccgtccaaaaatgggacttgcatcccagtcgcgtgccccttccatccagcaccaccggccacttctcccctgacttgtgcttctcttgttggggctctgtcctctgctgggtggatctgctcaaaggcatggtgctctgtgatctgaaacaaaactgcaagttcagctttattcagttgcccaaagattgtccaacctatgatgccgacagcgacgactttacatactcctctg

SEQ ID NO: 79482 - DNA, 241 bp, Zea mays
  unsure (1)..(241): unsure at all n locations
  Clone ID: MRT4577_172515C.1
gcgggacactnctagtagcgagaggcaagggacgtaagaagtcctctctttccattgccttcacttantaacgttcctcccttttctcactttctcnnntntnactggaaatcaacttccatggcctccattcctacgacnaccttcnccgtcatcttatccgtcctcttctgtggcgcgcgtggcaccgccgtctacaactacctccccgactacgtcatccacgggcgcctctattgcg

SEQ ID NO: 79483 - DNA, 350 bp, Zea mays
  Clone ID: MRT4577_172516C.1
gccgacgagcactataagatcccttctgtttcttttttggagaaagccgtgttcggcgcgcacggacggttaatcgtggacgtaattctgttgatgaccaacttcagtctgtggggcagatacctgtcccacataattctaaccagagtggccaaaattctgctcctcgacggggatggatgattctgcgtgctgctatggtgatactacgtcaaacaattcactcaattgtgcaccatgtacttgctcaacatcatcaagactctgacgctgcttgcgccgctcagcatcttcgccaaacaagaccatccaacaagcatgggcgatggtatctataatggaggaaacaa

SEQ ID NO: 79484 - DNA, 474 bp, Zea mays
  Clone ID: MRT4577_172517C.1
tttgattttcgattcgagagaaagttaatcaacaaatcggggaatggagaataaattaaagagaaacgagtgaagccccgtggataaatcgtcaagcaaactccatgggttccattgaatctaatatatgcaaagaggcagcaataacggcgacgtgcatgcagctggagtggagagaaacgaaaagtcatagcttcagagacaaatccagcgactcgccgccgtgctccagagagctgctcctgccgcgcagcaaggcggcagagtgcacagcaggcacctgacgcgcttccaccagcctggacctcatcatctcatgatgcccggaggcggcgtcggcgtcgtcctgccgggcgccgtgcgcgcgcatggcggcggcgatctcccggcggcgcttggcgagggtgcgctcgtacttgtgcgcgttctggtgcccgccgagcgcctgcgagctgtagaacttgcggtcgcagt

SEQ ID NO: 79485 - DNA, 204 bp, Zea mays
  Clone ID: MRT4577_172518C.1
tcgctattacgcgcggtggtgctcgcctgcgagggaaactgagaggcatacggcggttgagatctgcgaggggaaagagaggaaacgctataagccgcgcgaggaaggaacgttctgcgtgacgcggcctcacggtcggctggggctggctggcatccgagtccgcgagttattacgctttacgcgctactagttatcgatcgc

SEQ ID NO: 79486 - DNA, 549 bp, Zea mays
  Clone ID: MRT4577_172519C.1
caactccgagccctcagcagggggcaggaataccgaataccggcctgtgcggaggatgtccgaacaacaagcggtaagaggaggcacaaaaccgtgaagcgaggtaaagaacgaggctgacgacgacaagcgcgagctcgtcttgaaggaagacggccaggagtacgctcaggtgacccggatgcttcggaaccgccggagcgaggccatctgcgttgatggcacgcgccgtctgtgccatatatcgggaaagatgcacaagaaggtctggatcgaagctggggacattgaacgcgtagaactgcgcgactaccatgactacgaggtgcgacacttatgctcaaggacatgatacgacgaagggcccgtgctcaaggaatacggggagctgcctgacacgctgaaactgaacgagggcgtaaacgtcgatgggcccaagaaaagcgaggaggccagacactacatccaagacgaggacgaggacatcgacaagatctaataaatctgtccctgcttacggctacctgtatagatacgtgacgtgcgctt

SEQ ID NO: 79487 - DNA, 1448 bp, Zea mays
  unsure (1)..(1448): unsure at all n locations
  Clone ID: MRT4577_17251C.1
gccggcccgggtgcgagccccatatgcatcctctctctctccgcccaccatgtgtgtgcccagattcccctaaataggtgtctcgcctctggcatcagtcccctcttccccttccttctcctcggtccctatccgctgctgcgaacagcagaagctgcggcacggaggtgcgctctccccggcggtggagttgcagctgcagggggaagaagcgagctagagctgcagggatgataagcgccaagtccaacgccgccgtgtacccgtgcccggagtatgcggaggtcgaccccaccggccggtacggacgggtatggaatcgccgctaccactggagctcctcctatggcgccgtcttttgacccgtctgctcaacaatcccctgatccgtttccctgcacctttcctctttctttatcgcagttcagcgacgttcttggcaagggcgcgtccaagattgtgtacaaggcgttcgacgagtaccaggggatggaagtggcgtggaaccaggtgaagctgcacgacttcctgcagagccccgaggacctggagcggctctactgcgagatccacctcctcaagacgctcaagcaccgcaacatcatgaagttctacacctcctgggtcgacgtctcccgccgcaacatcaacttcatcactgagatgttcacctccggcaccctccggcagtacaggcagaaacatcggagcttggccatgtgggcggagagagcggagaggagtgaggcggtggtgcggatggggcgtgtgggccggatgggagaggtggcccaacagagcactatgtcaaaggcaaggagtccactcatgtgaatggccttctacagatgggtagaagagatctttctaatcagctttgcttcagttcattccaagagcaatcatgttcatctaaccattatgagaacgaaactaaccatcacacaaatgggttcgacatgaagcatgaggtaaagattgccaagtacaaagcacggaaaatggcacagttaaagagggctatccatccatctcttgacttcgacaatgcaaatggagtaaataggatgaagccttcactgaacaagctgcaatctttccatattggaaagaaccacagtttccgggtaccgaccggtgaccgaagcccgggtaaagtaagtacggattaccattctaatttgaacagccaattatcgcatagcaggcaccccgatccaggagcccaaagggcctggcatntgtgaggtcaatgcagctgggagctctgattgtatgtttacagcaaggcgctgctatgccggagctcagttgccaccaaatctcccgcgaacaaaatctgtacccctacatgctgtncgacgtctgaaatgctcttgccctgtaaagtttatagtgtacatctggtnttggttctttctgtacccattatgaaaacgtagttgctg

SEQ ID NO: 79488 - DNA, 514 bp, Zea mays
  unsure (1)..(514): unsure at all n locations
  Clone ID: MRT4577_172521C.1
gtggggggggggtttttttttttttttttttttttttttttacttcaaacttccctctccatttgttcatctgaaacaagcctaccttaacaaccattttgctgatagccatttacattatacaattttcaactgtactttttggcaagcggggggggaattttttttttttcccctnnnttccaaagcatggacatatggtccgctcccttcaaccccctcacctccctgccggggttccacaaccccatcccccccttaaaaccttcccgcacttacccctcttcctcggggacaacccacacccgcctcacgccgccgtaccgttcccccctcatgataccccccttcatcgtcgcgtcgtctcggaacccctttgaccgcctcaccatccccattgccaaggtcaaatcctcttggggactgaactaatacaatctcttcttcaagtactgtggccccaacccaaatgtctccacggaaccctgggggtccccccttgtttccaattccc

SEQ ID NO: 79489 - DNA, 760 bp, Zea mays
  Clone ID: MRT4577_172522C.1
gggtacctcgaggccggccgggatggtgagataatcaatggtcgttatgcaatgttgggtgcagttggtgcaatagcacctgaaattctaggcaaggctggtctgatccctcaggagacagcactcccatggttcagaaccggtgtgttcccacctgcaggaacctacaactactgggcagactcctacacactgttcgtgtttgagatggcactgatgggatttgcagagcacagaagattccaagactgggccaaaccaggctctatgggcaaacaatacttcctaggactagagaagggtcttggaggttctggtgagccagcttacccaggaggacctttcttcaacccacttggctttggtaaggatgagaagtccttgaaggatttgaagctcaaggaagtgaagaatggaaggttggctatgttggcaatcttgggttactttgttcaagctcttgtcacaggtgttggcccataccaaaacctcctagatcatttggctgaccccgtgcacaacaacatcttgaccagtctcaagttccactaaatgtattatatcatattctttaccctcttggtcttggttcttgttcgcttcgcagttaccaaagctcaaccacctttctatatcctctctttgctctttgggactctaccatcatctggacattttgttccttggtgtgccgctgtaagaattgacatgtaaaacaactagaaacattcgacatctttatctttttgctcgttagatt

SEQ ID NO: 79490 - DNA, 312 bp, Zea mays
  unsure (1)..(312): unsure at all n locations
  Clone ID: MRT4577_172523C.1
aattaatcgatcaatcacgcgcacaagggccggggataaatagcgggatttccaacgccccacctttaccgccgggctctccaatgcaaaacaaaccaaccccagtccggcgacggttcctggcagcagcgcgatcagatcatcgcgggttctgcttcttgtcgaacggcgcggatttctgcccccgatcggaggggggcgtctgctgcggctcctcggcttatgatctgcgtgcggcttcttctttttagagaaatgggatggacggcgaagcaatccatcctggtggtggnaacttattgcccgcctacc

SEQ ID NO: 79491 - DNA, 283 bp, Zea mays
  Clone ID: MRT4577_172524C.1
gccagagaaaaaaatcgtattgaatggcctttccctacttataagatgtctcaatctgaatttatttggctacactaaagaatgcagtatatttagttttccatttgcatgatgtttgtgtgctatagatgatattttaaattgaaaagtttgttttaaattatttttacagtgaagactgttttcagctctttttatattgtacatagtcttttatgtaatttactggcatatgttttgtagactgtttaatgactggatatcttccttcacttttgaaata

SEQ ID NO: 79492 - DNA, 194 bp, Zea mays
  Clone ID: MRT4577_172525C.1
aatctaattaaacccaggagggggcaaaatttttccctttgtgacagaccttccgatttcacaaagatcttgcatctcagcgggtatcaaaaggaagggcctggtaaattccataacttcacaacaacaatctccgtgggggtcataaacccccttacaaccattggcctatagttgcacgtccccatatatgt

SEQ ID NO: 79493 - DNA, 243 bp, Zea mays
  Clone ID: MRT4577_172526C.1
ttttaaaggacccaatttaacgtaccgcgggcatccaaccaaaaacctttattttagggtaaccaaaaccaaatcaactgttcttttgtttaaaaccgcccgaatgggaaaatccctgtggttacccacttaaatggctttgagaacaatcccccttctcccatttgggaaaaaaaaaaaaaggccccccccaagccccttccccaacagcgacccactctaaaggccaaagggacccccccc

SEQ ID NO: 79494 - DNA, 370 bp, Zea mays
  unsure (1)..(370): unsure at all n locations
  Clone ID: MRT4577_172527C.1
gcggaanaatcggccaaaatagtttctttaatgaaaaacacacaaagggaagtgcggtagcaacttgctaacaacaaaagtgccgaagatattagcccttcttgagctcgtttacctttcagtgtaggctacatctttacccagtacctctcaacaacggcgtgttccgaatgccattattccacagttcctcccatcaggtacatcaatgggcatcgaacaccctattgtgcaagcctataggctacaacaagcgcttgcggagagcgttttacaacaaccgtttgcccaattacaacaacaatgcttggcacatgtaaccatacaaaccatcgtagcacaactagcgcaacagtttgtgcccgcattg

SEQ ID NO: 79495 - DNA, 1163 bp, Zea mays
  Clone ID: MRT4577_172528C.1
cacgactgaggatgaagatggaggggatgtcaaagggcatgcgcgagcggatggcggagtacagccggcgcctggaagccgtcgcctccggcgacaacactggctgcgagtcagggaaatgcggcaaccggcacagccgaaaggcgagcgcgagcagccagagaagctggagcggcggcagcacggcgagcaacggcaacgcgccgtcgaccctcgacgccggcccgcacggccgcagccgccagaacgtggcggccgagaagcgccagcagcagcagacgattatggctggagagtgcaaactggtgggctcggcaagttgctgcgactgcagggaaatcgtgtggaaggtaatggagcaagtaaaggcagaatctgatcaatggactgagatgcaagatatgttgaagcaggtgaggttggagatgcaagagctgcaggcttcgagagatgcatggcagccacgcgtccgggcttcagacattagtctacgctccttgaattcccaagtactggagtggaaaaaccgggcacaagcgtctgaacaacgtgtggaagagctacatagaaagatttcagagcttgaaagcaagctacacactttcaaagcccacttaccagccccagctgctattcctaaccaaaagcaatggtcagatgcgtgcaagatggagtacccgagagcaaagcctcaacacccgcggtcccaggaatccggcaaggaggagatcaagaagcacgtcctcatctgccgcgtgaagcgctcacccagcagcgtgctctcgaagcggtcgccgttccaggagataggcaacatcagcttgccacggcatcggtgaggaccgaggagcatgggtggcgatgttgctctgtgacctgtgtgagtgatggggctactgcagcggaactacgaagggttcagctgtaagcgggagagagagtagcatcgtgatcgatctgatcagcatctacgtaataaataatttatgtatgacccactgatgagtaacgaggcctgacttctcgtcagatcggtagtaataatcataagtagtcagtgagtgagctgagagactgagatggagtacagtaccggtgaataggtcagatatgtatgtaacgataacgcctccttttgctaatatatatgtgtaattttgttc

SEQ ID NO: 79496 - DNA, 149 bp, Zea mays
  Clone ID: MRT4577_172529C.1
cgccctgatctccgaattcatcgctacgctgctgtccgtgtatattaccgtggccacagtgatccgctagaagcacgagactgacgcgtccgcgtccggtatcgacgcggcttgcggcagtcttcgggtccttgggatcccctgggcca

SEQ ID NO: 79497 - DNA, 155 bp, Zea mays
  Clone ID: MRT4577_17252C.1
gtcgacgatcatggttgccacctcccgcttcgacgcgctacactaatccccgggacggaccggagtcaggcagtcgaaagaagaagaagatgcggatttggaagttgggatccatggcgtccacctcgtgcttcctccactagtcctccgaccgg

SEQ ID NO: 79498 - DNA, 835 bp, Zea mays
  unsure (1)..(835): unsure at all n locations
  Clone ID: MRT4577_172530C.1
cattgggtacctcgattctaaaatttacaatttacaatttacagctgtgcggaggcgggagcagggggcagcgagcacctagcagcgcgcggccggcgactccaccgagacacctcagccggccgcgcggtcgcggttgcctccggctggctcctcgcctcgatggtggggatgtaccagcaccaactccgcgacgaccccttcgacaccctaagcggcggccactgcgaggtacatggcggcggacagccgcggcagcgggtcgaggcgcttgccgacggaagaagcatgttgcgcggcgggggaagcggtatagttggcgccgcgggtggagatctaggggtgctagtgcggtggatgcgggaactcgcagcggatcccgtgggtccacttccggcgccatcagagcacagggtgaggaagcggcacgtgctggcctggcggcgcgctcgctacctcagattggaggacgtggcggacgcagaagagcttcccagcttctccaagaaaaggaagctctactgggatcaaaaaaagaaaggctgcttgaacatgccaacaaggaaatctgagaggcttgctaagagaatgaaactcatggcatcattgctcctcacgcaacggaaaaagattggagtaggtgagcactttcaggcagaggtacctggttggactgggcagccttcagggaaagagctttcatgttacaggaatgacccagagacatcanagatgtagagggactagaatgtggcctccctgagggtgaaagttataaaaccgacattgtagctgtttgggcagggaaggcctggatcatgtaattgcctctacc

SEQ ID NO: 79499 - DNA, 673 bp, Zea mays
  unsure (1)..(673): unsure at all n locations
  Clone ID: MRT4577_172531C.1
atcctatagatgatattttatactggcncaacgctatccgcatggagttacatgatatnnnnnnngaancaagnnnnnnnnnnnnnnnnnnnnnnnnnnnnnnnnnnnnnnnnttcaatgagaggcttcagttcattgcagatgtatgcatctaccacagtatcgctgaggatcaggttgnnnnncctgcagtcgatagtgagctgtcctttgtgcaggagcatgctgaagaagaacacaggtttaacaatttcaggtgtttaattcagcaattccaaatagcaggagccaaatcaactgcactggacttctacaatacccgagttatcaagactgacactgcagattgctccacaccaaattagctggagggaacatttgtgnnnnnnnnnnnnnnnnnnnnnnnnnnnnnnnnnnnntcttctagcgggaaggaaaaagagatgtcctgtagcatagttataccataatttcattcgtagcgatttcagttttgtaagtgtagcagtttacaatttactaggtnctagtgcgttgtactgccaaaatggacggttcntgctggaaggacataatccgaggaaattggcttgttagaagtactcgtgagcatgttctgcaatttggcggccacttagactatcttcaattatatcttctatattccttctct

SEQ ID NO: 79500 - DNA, 1245 bp, Zea mays
  Clone ID: MRT4577_172532C.1
ggccgggaaaaaattacaaaaagaacattcgattctaaaatttacaatttacaatttacagctgtgcggaggcgggagcagggggcagcgagcacctagcagcgcgcggccggcgactccaccgagacacctcagccggccgcgcggtcgcggttgcctccggctggctcctcgcctcgatggtggggatgtaccagcaccaactccgcgacgaccccttcgacaccctaagcggcggccactgcggtgagcagccacgcgttgccggcggcggcgcctcctcctcctcaccctcggctgttcatgacccgctgtctgcagaggtacatggcggcggacagccgcggcagcgggtcgaggcgcttgccgacggaagaagcatgttgcgcggcgggggaagcggtatagttggcgccgcgggtggagatctaggggtgctagtgcggtggatgcgggaactcgcagcggatcccgtgggtccacttccggcgccatcagagcacagggtgaggaagcggcacgtgctggcctggcggcgcgctcgctacctcagattggaggacgtggcggacgcagaagagcttcccagcttctccaagccagagaggtggcgtgctagggacaaggcagggaaggagaaggacatgccaccggtgtcagctactgtgtgagcacgagagaacggaagacggaggcattgaggcatagagcagatgcaaacttagctagcagagatggatggagactggggagaagagatggagggtgcccgcgactgcgtgtgctgtgggaaagagacgatgtcgacagggtttagaaagtttactcagtgatgtagccatcgtgggctgaccgggcctaaatggctgattaaaaaacgaagtgggccaaaatcccaaaatagttcgcttgagcgcaaaactcgcgtattttgttgaactgttttctgttgccaattcttaggaaacgtgtttttcggtagcctgttgctgctttgctctgctgtgggactgattggtattgattggacaagggacatctaagatttgtcacatccggttgttctacgccgtactatttgattcggcttccggagattagcaactgcagctcggaggataccaggatggtagtgccaggtgtcgcgagtgggtgggattactgtcgctgcatatgaatcatgtagttttgacaacccagtgctggagcagacggttccaatctgggagcccggccggcctcgag

SEQ ID NO: 79501 - DNA, 445 bp, Zea mays
  Clone ID: MRT4577_172533C.1
ggccgacgccaagggccatggtgaagccttgaaagagaacgagcagggggcgccagaaagttgagatccgccgcatcgacaacaaggagagccgtcaagtcacccagtgcaagcgcaagggcgggctcctaaagaaggcctcggagctccatctcctctgtggtgcccaagtcgccatcatcgtcttcaagagaagggaccccgaaagaaaggaggtgcccgttccgccccgcggccaacgcgacgacggcggccttgccttcgcgatgggcaccctctccgtcgaccacgtgctccaccgctgtggcctgctccacgccgacgagggcctcaccgcgatccaggatgtgggcgccatcgtcgcatagcgtgccgctatggacgcgagagcggggcagaccgagcagaccatggcgctcgtggaggcggagaatgcgctgaatga

SEQ ID NO: 79502 - DNA, 439 bp, Zea mays
  Clone ID: MRT4577_172534C.1
cctttctttcttttttttttttttttttttttttttttttttttttttttttttttttgttttttttttttaaaaaagggaaggggccccttttggttttgcacaataatcaggggagcctcaccccttggctttttgcagaatttcccttacccaaacactaagagcccaattccctttttgccccaccccttaaagaatcaaaacttggggggccccctaaaaagggtgaacttttgtttccccccaatttgcccaaaaattccttgcccaaggatttttaatctttaaccccccctgattaatgaaatagcaaaacgtcccctaaccctttatttttagcgccaactgctttcacattagtggttccaaggggcaaagtccctgaaggggaaatcaacgttttgggaccttttctttttctggggctatgcccccc

SEQ ID NO: 79503 - DNA, 669 bp, Zea mays
  Clone ID: MRT4577_172535C.1
agaaaaaaggaagggaaaaatctcccggggcgcaagcaaacgtgacgccacgcctcactccgtccctcgtcctcgtcctcttcctcctctccccactttccccgttaataattcggcaatcgatcgctgccgccgccgcgactgcgactgaagcctctgctccgctccgctctgctctgctcgccgctggaagatggagcctgaccagagtggcaccgggcagacttctccccgcgggaacgactgggaggtcgtgcagctcaccgcttcaaactacgcttctgcacctggtccggcgagaactgaaccttccgacgaggaggctgaaggccaggtgtatgacgcagaggggggtgattccgcagccgcgtcgctgctcatgtctggccatttctcggtgccgcagagtgaggctgagaaactcctcatggaagctgatactagcatatatcagcaggaggcgcgcggcagccagtatgcagtttctgacaagggtggagatggtatgtacgaagaccagcaggagaaactgaaggacgacggtcttgacaggatcccgtccttcgacaaagggaaaagcctttcccctgttgatatggagcctgacgatgggaacgcattgcacagcgttagtcaggctggggaagacccagttacattctcatcatc

SEQ ID NO: 79504 - DNA, 581 bp, Zea mays
  unsure (1)..(581): unsure at all n locations
  Clone ID: MRT4577_172536C.1
atataagttcacaaaattcacataagtcaaatacataagttcacaaattcacacaagtttacatccatagttcacatttttagttcacaagttcaaacacacaagttcaaacattaactccatcgctctcgatcaggacatcggattgttgttcgtagctccaccactaaaattgagacatctgtccgcaaagtcaacatgagggggaggagtcacttgatgagagccgaaatccagttgcttacaaagtttttggaagccacacaacttgaccaaaccctcttaacagctgagcatcatattgagaacaccatggtaaacggctcgctcaaccaggccttcctcctcgctttcactgcctctgtgcttggaccttgaccgactcttcttttccttccttgttctctttgatctcgactgtgatctggacttccttgaacccctaccctcatcgtcgctgcttgaagattctgaagatgagctggaacttgactctgatgaacttttgtgctttctcctcgttttacttcttttctttgcgtccttatccttcctctnttttgttaatccgatgggagtga

SEQ ID NO: 79505 - DNA, 425 bp, Zea mays
  unsure (1)..(425): unsure at all n locations
  Clone ID: MRT4577_172537C.1
gggggggggggggggtttttttataattttttggggttttttttttttttttttttttttcggtcgtttgggttgtcttgggatttttggcccgggggcggcgggcgatacagtgttgtttttttggtgccaccttaaacccaaaggggaggaggaggggatgccctcccttcgcnaaaccnnaaccccctcaaattnccacaaaacctagcnnccccacccccccaccnnacanccnnnnntggctattgggggagcacccgcacattaatgggggggcccccactgcccgctgtcctatcggaaagcccggcgcgcggggggcggcagtggggggccccgcccccggggggggggggcctccgcccggggggccggggggggtctgctggtccccggcgggccggccctgggggggttgccct

SEQ ID NO: 79506 - DNA, 1943 bp, Zea mays
  Clone ID: MRT4577_172538C.1
cctcgaggccggccgggccgggcttcgctgttgagacagcgcgcgtgcgcctgaacgaagctacccgcaacctcgccgcgcgcgcccgccgccacaacctcgccggcgccgcgcgcgccccgcctccaccccgcgcggcgccggcaaatttctagggttcgtgtccaaacagccagttcacccgttccttatcttccgtcgttcagctggcgtcctctctctctcttgtggcgacgactgggtgacctccccgcccccgccgctctacgccaggtgcccaggtcttcctcgggcccttcgccgaagagcagccaacaggtaagcatggctcagaaaatggcaactgttgagcgagtagaagagcttctcgagaagctgcgtgctgcttcctgggatcatgctgtcaaaggtttgaacttagaagatggccatgcacactgcctcgacgtcatcttcaccagagcagactactgatgttgatggaagtaccactggtgatgtcaccttctaagtataacttgggattccggctctcatcaagtgactcctcccccttacgttgactttgcggacagatgtctcaattctagtggtggagctactaacaacaatccgatgtcctgatcgagagcgatggagctaatgtttgaacttgtgtgtttgaacttgtgaactatggatgtgaacctgtgtgaatttgtgaacttatgtatttggacttatgtgaatttgcgaacttatatatttggacttatgtgaatttgtgatatgaacatatatcaatgtgtttgaaatctgtattgtatgtgatatattgtgttgcatgtgatattatgtgtgtctaatttttcatttttgtattttttattttttttctggaaaagggttaagaacgtgggtacccacgttcttaaggttaagaacgtgggtacccacgttcttaaccctttttcagaaaaaataaaaaaatacaaaaatggaaaaatagacacacaaaatatcacatgcaacacaatatatcacatacaatacagatttcaaacacattgatatatgttcatatcacaaattcacacaaatccaaatatataagttcacaaaattcacataagtctaaatacataagttcacaaattcacacaagttcacatccatagttcacatttttagttcacaagttcaaacacacaagttcaaacattaactccatcgctctcgatcaggacatcggattgttgttcgtagctccaccactaaaattgagacatctgtccgcaaagtcaacatgagggggaggagtcacttgatgagagccgaaatccagttgcttacaaagtttttggaagccacacaacttgaccaaaccctcttaacagctgagcatcatattgagaacaccatggtaaacggctcgctcaaccttcagaagtaatcaggccttcctcctcgctttcactgcctctgtgcttggaccttgaccgactcttcttttccttccttgttctctttgatctcgactgtgatctggacttccttgaacccctaccctcatcgtcgctgcttgaagattctgaagatgagctggaacttgactctgatgaacttttgtgctttctcctcgttttacttcttttctttgcgtccttatccttcctcttttttgttaatccgatgggagtgaagagccactctcttcccaaggtagcaaaagtgaatccaagacaagaagtctagcaccaaaatgtttagcaagtgcctttaccaatgtttcctgataaatctcagaacctgctggaccggataacaaaattcgttggtttattgatgaaatctcagcaaactgcttgatgaactccttcttttacatatttttgtgaataaaaaagcttaccaccaaacacgagcatcactgaacagccccttcctcataaactatatcccgt

SEQ ID NO: 79507 - DNA, 343 bp, Zea mays
  Clone ID: MRT4577_172539C.1
accgctcgtgcgttatcacataacaccaattctgagaggtcgattgtatgctacacgaagcgatacatggacttgtcggtactgatcctctcagacgctgacgctctatcacgctcaagagctgaaactttactagcatttctagcgattctctatctgccatgggaaagagcctacgttcgaagctggagaacgttctattctgcttaatgaacgctaatttattgatgacctgatgacactgacttatgccgggccctaactaactgtagaagcagctattgattcgtcagggaaaaagcatgatactccaattcagattgatcataccacatgctaatct

SEQ ID NO: 79508 - DNA, 321 bp, Zea mays
  Clone ID: MRT4577_17253C.1
gagacgcaagaaaatcatccgccggctcggttttactggtgacaaaagatgaacaaggggggaaatggaaagcatttccgggatgaagcaacaacgtaaacaggcataatttttctcaataacccgggagcaatgggggggaattaacaacttttacaacatcggggggtggaaaccacacaattctttagaacaggcccccataacccggtggggggggcaactttcgggagatcacgggataagggcagcacactggcctgatgctgggtataaggaaacttttttaatactcgggaccctggtgggcattcttggcct

SEQ ID NO: 79509 - DNA, 2835 bp, Zea mays
  Clone ID: MRT4577_172540C.1
gattattgcacgttctattacaattttcctatactgaacatgagacttctcataggcaacccagttatgagcttgcttttgtaattgtattgactatcctgtgaaatcagatattctttccccatatcacattttttgtagcaccatattagtccaatacatatatttgtttatataaattgcttgattgatctctaggggaccaagttatggttatcgaggcagagtgatgcactagatctaaggtgtgtttgaatgcactagatctaatatgtagttggctaaaaaatactagtagagttagctagctaacaaatagatatctaactattagctaatttgctaaaagtagctaatagttgaattattagttatgctgtttggatgtctttagctatttttaacagctaactattagttatagtgcattcaaacacccctccctaaatgcatttcatcttacatttgcatacttctctcaggtcaacagacttgacacgaaggagcagtgtgtatgttcataggagctgttgttctggacatggttttggagtctgcagcagctttagaacattcgcacacctgattgcgatgaattcgtagaaatgcttttaaaacttgattactggtctaaactggctaggccccgtccgaatgtcatcacataacaacagtatggtggccaaatcacaagcttttacacgtatagtatagtgtgtttcatctttacaagatcctttcccttttccttttcacccctatcaccccaacccacctacgctacattacatttcctgctataccaccaatctgtatacaattgaaaaactacaggctactacaacccaatgcttcctgagaatctagacaaatttggacagtgcgagtttcaagtcctgatggtattgtggcatattggttcctgcatgcattttgcaaatgaacaaggctaagagttattttataccttgcattgctgtaatttttacttctccccaccagggacatgggttcttgttgagatatcttgttaaccctttatttttgatcagttatttctcttcaagtttatctgttggggcctaatcctcttagcgacgcgtcatattagaacccgggtgttgtgttaaagcttggacaaccaatcatttattatccgagaatttaatttggttttattaatcaatttaaacctttctataggaagagagtggctcttcactcccatcggattaacaaaaagtgagtctcatgttttcttatttgtttgactcatgttggtgtgatattttgctaaacagattttgcatatcatagcgacgtttgtcattttgtatctatacatttatgctaatttttaactctcgtggcaacgcatgggtacgtacctagtaaatatctgtaatgttagaatcttagtatttccatcacttgccattcctcaaatataaatatattgcatctattatatggctcttctgacaaaagaagtttgaaaatagagaggaaggataaggacgcaaagaaaagaagtaaaacgaggagaaagcacaaaagttcatcagagtcaagttccagctcatcttcagaatcttcaagcagcgacgatgagggtaggggttcaaggaagtccagatcacagtcgagatcaaagagaacaaggaaggaaaagaagagtcggtcaaggtccaagcacagaggcagtgaaagcgaggaggaaggcctggtacgcctctctaaattcttcgggaagtaaggagtagacgctgttgtacccaagacgcccttttcattttgaaacgtagattggtgggtttggatgtatcattcaacacagattacttctgaaggttgagcgagccgtttaccatggtgttctcaatatgatgctcagctgttaagagggtttggtcaagttgtgtggcttccaaaaactttgtaagcaactggtaagtcattattaaatcgctgtaccttggaggatttgatgccatatatttgagacattgaactgctatatttatgttaagactttacatacgcagtcagttgtttcagttatatgctcttttgctatatttatgttaagactttacatgcctagtcagtcgtttccaatatgtaaatcttctagcgcctgacatggtgaggaaggttgttagaccctactgaaacttccctctctttgttacatcactttgcatcttccagcgcctaacatggtttagtgaatctggaatttagtgttgtgagagctgttttgttgtgacgtgctttggactgttaggtggctgaattctgaattttcagatttggagtagcgtctaagtctgaatttccaaagtagtttttttggacagttaacatcgcggatcctttgcacgatgcatcattttaaataacacggtgctgcgtcttgaaatgaagtctgttttcactctcatgttcatgttcatgcacaaatatggaagccacattttgtgtttatcatgctttcctatatctttgtgtacatgtgatttaatgccagttgtgtatttatgagaattttggtttattttgtaggatttcggctctcatcaagtgactcctccccctcatgttgactttgcggacagatgtctcaattttagtggtggagctacgaacaacaatccgatgtcctgatcgagagcgatggagttaatgtttgaacttgtgtgtttgaacttgtgaactaaaaatgtgaactatggatgtaaacttgtgtgaatttgtgaacttatgtatttggacttatgtgaatttgtgaacttatatatttggacttgtgtgaaaaaatgataaaaaaaaaaa

SEQ ID NO: 79510 - DNA, 215 bp, Zea mays
  Clone ID: MRT4577_172541C.1
ccgtgcctgaggtagggcgggaggggcggccgacctaggcccccatctctcaggggccccaccgtacacaaagtctaataggaatataggatagaaacggatattatttactataccaatatatttttgagtttgttaggagaatggattgctatcacaatatatttgttgtttatcggatattatttactaaaaaaaaaaaaaaaaaaaaaaaa

SEQ ID NO: 79511 - DNA, 346 bp, Zea mays
  Clone ID: MRT4577_172542C.1
ggccaaagtataagcgtgggtggagtgatcaagttaggtatgccggaggacgcctaaagacgccggtagaaatggcgggtcagttggccgtggcgtttctcgctttgttgacctcctctggcttcttgggcgtgcctggacagaagtctcacagccatcttcaccttccgtgactccatgtccgacaccggcaacctgagggagaacggtccccccgccggcctgacgctcacccagccgccctacggagagaccttcttgggccgggccgcctgccgatgctccggtgggcgcctcgccggcgacttcctgcccgataaactcggggtggcgctgctgaagccgt

SEQ ID NO: 79512 - DNA, 421 bp, Zea mays
  Clone ID: MRT4577_172543C.1
cgtaagctcggaattcggctcgtgcacgttcagggagatcgtactggacctggagggggagcgcgctaccaggtgttagttttaagcaaacagcccccccgttaccgccagccgatccagggatctatgatttcgactatggcactgcccaagatgtccacaagagcaggaccttctatatgctatggagcacatcctgcgccaaggtgaatagcaagatgctctatgcgcgctgaaaccaaagatgcaagagtgggctcaatggcatacaggtggaactgcatgctactgatgcaagtgacagcagccttgatgagatcaaggatcgggctcgctaggcatcatcatcatcatgcatcatgggcttggcctactactgcggagaagatgccacactggactcgatgctgcgaaaaactgc

SEQ ID NO: 79513 - DNA, 377 bp, Zea mays
  Clone ID: MRT4577_172544C.1
acggggggttaatctatagaagcggcagattaagcacacaagcatacaacaacaataataagatgtaaacgagcattagtcccagctccaaaggctatatcatacacatcaattttcttaactctaataaatcacatttctgatccaacatacaccggttcccccattaaggccctgcgccatgtccgggatctagtgccaggagccattctccaaatcaaactcctcagcacagctaaggacctcgttgggcctctcagctttcccaccaatgacatagaacttgtcgtccatgaagaaaccagagcacatctgccgcgccctgctcatgctcggtagggtagtccatgtctgcatctcagaatcataaaatgctc

SEQ ID NO: 79514 - DNA, 835 bp, Zea mays
  Clone ID: MRT4577_172545C.1
acagtacaccacgcgacgcaaacaacagagctgccagcctgccactgagtgaggaaccctaagcggcgcactgtgcaggcgacggccgacgggggatacggcgacatcgtccccctcgacccctcctccatccccgacgcggcggcgccagcctgcagccctgcaggtgttgaatgctgatttgttgtggcctgttacgtcttcaccagttcatatattaaacttgaagaaccacgtggttgaagaaaagcccactgaaaatgagtaatacatcatcttcgtcaagtgggatgtgatatatgctgatattccaaagctcactccatttattgatctgccttgccaatttgccagttgggctgttccctccctaaaccccagcgtcgcctccgacaagtcaccgctccgtcggctgcttgctgcagtccaggccacgcgctacgccgtcacggtcgctcctcccgtgacgcagccgtcgctaggcgccgcctatttctcggacaaagtcgctcgccaccatggtggcagcgtccgctgccgcagaagccagcggcgagagtaaaaacgaattcctcatacgcgacgacgcgccggggctactcgccgctctcaaggagatgaaggatggactggacctcgtcaggggcaaggttgaggccatcacgcggaaggtcaaggcgaaccagttgccggcggccaacgggatcgggtacctagaagcgaagaaccacctgctccttggctattgccaggacatcgtctactacctgctccgcaaggccaagggggctctcggtggatggccaccccgtcgtacggagccttgtcgagatta

SEQ ID NO: 79515 - DNA, 636 bp, Zea mays
  Clone ID: MRT4577_172546C.1
ccggccgggcacttcatgaaccccgtccctgtgcaaaagggcgtcgagatcatcagtggtctacagaccagccaggacacgcttgatactgctattgagttctgtaagcgcatgggcaagattacttccgtgtccgcagactcccctggcttcctcgccaaccgaatccttatgccttacattaacgaagccattatctgcctcgagaccaatgttggagatcgcgactctatcgatgccatcatgaagaacggcacaaacgttcccatgggtcctctccagctcgctgactttatcggtctcgacacatgtctttccatcatgaaggttctgtacgaagagactgccgattccaagtacaggccgagtgttttgctcaagaacatggtcagcgctggatggtatggaaagaagagcggcaagggcttctacgactattaagctagaatatgatgtgttatctctgagtagtggtaatcagattggtagtaactaacactgatatcttaccctacactaaggttgacggaagaaaccaaaagtaaaaaacaattaaacgactcgatcacttaatttagtctaaattaaaatttatcaataacaaaaaaaaaaaaaaaaaaacccgcggccctcgag

SEQ ID NO: 79516 - DNA, 735 bp, Zea mays
  Clone ID: MRT4577_172547C.1
tcggacgcgtgggcggacgcgtggggagaggagacctacactgccttcgaaaacatctatcctgtactgtcagagtttagaaaaattcagcaatgatgacatgtgatgtgaaggtcacgttcttcaaattacaagcttcctcgaggattctcgtgtgaccatgaattctaaatgtacataaaagtctggcggaacttatagcatcctgtaatctctgtgagccgcggtctgtcagtattgggtgggcttgctgtggtaactggtggacatgtcgagttcatccatttgggtaggccttggtgaacacggacgccccacatcatgtctcagtttgagtagtttgtgtgaactgaagggtacgtgcttctcccatgtggttgcagcgttaacttgagtcaagtgctaacaagagtagataaaattttgccccagttcgtctttgtgacagtcttttaaagtcttttttctgagtatctttcaaagtgttttcagagtatcttccagtgtgctgtgcgatgatgagaaggctggcactgtatgtaacgggggcaacgtgaccggttgtaagttatgtattgtagttgagatgctgtagcgcctagggcactgggattgaacttgtggaggaaccagtcagtcgaccgttctatttgtgtggccctctgctactgactaatgtggcctgttccaaatgtcgctgcgattttcgtttcaaaaaaaaaaaaaaaagaaaaa

SEQ ID NO: 79517 - DNA, 857 bp, Zea mays
  Clone ID: MRT4577_172548C.1
gcgacgcaacacagagctgccagcctgccactgagtgaggaaccctaagcggcgcactgtgcaggcgacggccgacgggggatacggcgacatcgtccccctcgacccctcctccatccccgacgcggcggcgccagcctgcagccctgcaggtgctggactagagtcgaatgctaggcggatgctagctgctaggtgttgaatgctgatttgttgtggcctgttacgtcttcaccagttcatatattaaacttgaagaaccacgtggttgaagaaaagcccactgaaaatgagtaatacatcatcttcgtcaagtgggatgtgatatatgctgatattccaaagctcattccatttattgatctgccttgccaatttgccagttgggctgttccctccctaaaccccagcgtcgcctccgacaagtcaccgctccgtcggctgcttgctgcagtccaggccacgcgctacgccgtcacggtcgctcctcccgtgacgcagccgtcgctaggcgccgcctatttctcggacaaagtcgctcgccaccatggtggcagcgtccgctgccgcagaagccagcggcgagagtaaaaacgaattcctcatacgcgacgacgcgccggggctactcgccgctctcaaggagatgaaggatggactggacctcgtcaggggcaaggttgaggccatcacgcggaaggtcaaggcgaaccagttgccggcggccaacgggatcgggtacctagaagcgaagaaccacctgctccttggctattgccaggacatcgtctactacctgctccgcaaggccaaggggctctcggtggatggccaccccgtcgtacggagccttgtcg

SEQ ID NO: 79518 - DNA, 1821 bp, Zea mays
  Clone ID: MRT4577_172549C.1
cattgggtacctcgaggccggccggggctccccctcccgtccaccgatacacaacccaactcccgcacgcatctacccccaccaccagacgacctcccccctcccccgcattctctcacgccgcctgcgctctccccctcgcgagatagacaaccctagctcccgtctccttgcttaccctcctctccaacccctctccgatctctataaaagacccgaatttcgaattccccctcgaacccgcgatccgcgctttccttcccgcccatttcggtctctgattcggcgcggattcgctgcgcgggagcccccgaggttgcgtgcgtgattcggatggcggagccggggctcgagggcagccagccggtggatctgtccaagcacccctctggcatcgtccccacgctccagaatatcgtatcaacagttaatttggattgtaaacttgacctcaaagcaatagctttgcaagcacgaaatgcggagtataacccaaagcgttttgctgcagtcatcatgagaataagagaacccaaaaccacggcactgatatttgcatcgggtaaaatggtatgtactggagcgaagagtgaacagcaatccaagcttgcagcaaggaagtatgcccgcattattcagaaacttggttttccagctaagtttaaggtaactttttcatacttgtgtacattgacctgttctttgaacaatatgtacatcagttgctaagttgctgttctaagccagggttttaagatccagaatattgttggctcttgtgatgtcaagtttccaattaggcttgagggccttgcatattctcatggtgccttctcaagtgtatgtccaaggatggtttattttatcaccacagtaattcttttaccctttttgtctgcattcttggataatgacatttttcatttgttttatagtacgaaccagaactctttcctggccttatctatcggatgaaacaaccaaagattgttcttttaatttttgtttcaggcaagattgttttgactggagcaaaggtgagagaggagacctacactgccttcgaaaacatctatcctgtgctggcagagtttcgaaaagttcagcaatgatgacctgttgtgaaggtcacatccttctaattacaagcttccttgatgattttcgtgtgaccataaattctaactgtgtacataaaaagtctggcggaatttatagcatcttgtaatttctgtgagctgctgtctggcatgattgggtgggcttgtcgtggtagctggtggaattgtcaagatgatccgtttgggtagaggccctggtgaacacggacaccacattatgtcgcagtgtgagtagtttgtgtgagctgcagggtacatgcttgtcccatgtggttgcagcgttaacttgagtgctaacaagagtagataaattttggcctgcttcgtctttgatacacgagtccttcaaagtctcttctgagtatgtttcagtgtgatgtgcgatgatgaaaaggctggcgctgtatgtaacgtgggacaagggcaagggcaatgtactgacgactggttgtaagttatctgttgtattttagtttgagatgctgtagcgtttgacattggggtaaatcttgctggttatgaccgtatggaggaaccggtcgattgaccatgctattggtgtgactctttgttagagacaataatgtgcacttaaaccgtgcaatcaaacgatctgatgtatgcaagctattttagatgaaagatttcaaatataaaattgctataggttaaataaagcagggattaaatataaaatagt

SEQ ID NO: 79519 - DNA, 175 bp, Zea mays
  Clone ID: MRT4577_17254C.1
atatattcaacctatatattttatgacaaaattggaagaaacaacttggggacaaagggactcgggggactaccccttattttgtttctatgtagaagcccattttgcaacaaccactccactccatggtgaggcgaagacaatgtgccttaccttaagtggccggcacccatcg

SEQ ID NO: 79520 - DNA, 1010 bp, Zea mays
  Clone ID: MRT4577_172550C.1
ccggccgggaccaatcctggtaggtgcctgccatttatgatggctgggctggctctcggagcaactctctccaatgagggctttccgtcattgatgccggtgcagaccgtttttcttcgccttgctctcaggcagcagctagctctttgatccctgttggattggatggaggtccgtggcagtgcacccagcatgaagccaaaggtggagccgccgttggaggcttcacacgactgggaggtgaccccgctgtccggcgacaaccccttcttcaccagcgtcatgcgcaagagccaagtccagaaaccctttcagctggtcatcccggttcgcttccaccgccacctcccagaggcgcgcgcgcccgcggtgctcctctgccgcgaccagtcgtggacggtgagctacgcgggcgtcggcaagtggaagaggcttcagggggcgtggagggacttcgcccgcgacaacgggctccgcctcggggacgcctgcgtcttcgagctccttgtgcccagtactgatgcaacccaaggagacggaggcggcagcaaggatcagggggaggtggtgttccgtgtgcaggtgctccgcggcggcctgccggctgagatcacctcccggggcgccacctccgacgatccactcgtcattgtggactagatccaactgcggggagagtagtacgtagtagactagtagtggtgcagtgcagtctgtagaggagacgagacgctcaggagctaggtagcatcgtcgttgtattttgttgttgcccctgctctagctagctcgctggtcctcgtggatcttgtagccagtttctttctttcagctgcagaccttcctcttcctgtggacacggttgctccatcaccaagtgtgctgatgctaccagctttctgctgtgacagtacacagtagacgctatcaccaagtgtgctgatgctaccagattccagtagacgcggcatgcttcaagagatgtgttcaatgagcatcatctttgtgtc

SEQ ID NO: 79521 - DNA, 440 bp, Zea mays
  Clone ID: MRT4577_172551C.1
caactccaatggtccatgtggctcaacacgtgcgcactcgcacaccccagggccgatgtgcaggcgaacctgtagtgattgctggaccctgatcctgtgacatagcttgctggccatgaggtatactaccacacatacggcgacgacctactgataccctcagtgccagtcgttggggatggagtgttgctagtgaatgcagcacatggagccagatgctgggcccagtggaccttcaacttgcccctacactgctgctttgagagtagtcctaaaggatgcactgcgagacgatgccggagatccactatagaccagtaactgacgtccatctgcgtgctgtagtagccaaattgatgcccctacgcttgtgcactgaggcgagcagcactgaagaaactatgtgcctgaacttatgccttagatacttagctcactga

SEQ ID NO: 79522 - DNA, 353 bp, Zea mays
  Clone ID: MRT4577_172552C.1
ggggttggttttttttttttggtgtttttttttttttttttttttttgggagccccaaaagcatggggaaaccttattatccatcccggaaccatattttttaaggagggacaaaacgattttccattaataaaaggggggaccgaaaacaaatatcgggggggcctcggggttcaacaagggcggaatattggcaaaacctggggggacaaaaaggttcatgaaacaatccgggggtcatttgggagaccatccaagggctccaacaccaaaaggggggagggttttttttggaacataaaaatccgggggtcagcccccacttcctacctttttggttaggcataaacccg

SEQ ID NO: 79523 - DNA, 325 bp, Zea mays
  Clone ID: MRT4577_172553C.1
gggagcatcagttgcgcacaatgagcctgctgatggcacacccattgtaagtggctctgtccacgaaccttaatctcttaagaacagactataaacgctgtctggtacctctgagccgctgcagaacgaacttgagagtgctgttactactatgtgtaagaaaatactgtcggacctttacaacaaaagtagcattccataactggtccaggtggtctgcgttgctctaggtgctagacaacaaccaccgccttccactgttggcagatctaccatttacttgattatcaaattcgacaacaagctcttatttttacatactgtc

SEQ ID NO: 79524 - DNA, 403 bp, Zea mays
  Clone ID: MRT4577_172554C.1
aaccccgggtcgaccacgcttcttccaccgcctccgccacctaacacagggtggtgtagtgtagttccacgcaagggttggggggggtactagtgatccgcaatgtcgacggaggaggctgttgtggctgaggtcccggagacctgagtgccagcggaggtcccggcttttacgtggccgcagcgcccaaggcgaagagggcggggagggagaacaaggcgcctaatgagaagaagccattcgcggagaagaagcccacggcccacccttcctacgctaagatcattgtagaggagatcgatgccctcaaagagaggaaggggttaatctcagtgggcataaacaaatacatagaggggaagcacggcggcaagctaatcaccaactttcacaagcatctcac

SEQ ID NO: 79525 - DNA, 352 bp, Zea mays
  Clone ID: MRT4577_172555C.1
ggaaacaaaccaacaaaggggggaaattttgggccagatcaggggggggggggggggggaccaccccccggggaataagtttccacccccttacaagaccaaatttcccaactgttttataagcggggggttaaaaaaaacgggggggatgaaaaacccgctggaaattgcttaacagtttttaaaatagagcattaaactgtccccacaggagcccacactggttttacgggaaaaccaattgccaattgacccggcagttgtaacagggttccccacccccccaaatttaaagcttggcctcaaactcaaaaggggggataatttgttccttgaaacccttcctttgggg

SEQ ID NO: 79526 - DNA, 382 bp, Zea mays
  Clone ID: MRT4577_172556C.1
gggggacaacaaaccatttttttaaaacaaaagcccccaccacggggctaaagggaacacaacgtcattggaaggggccgaaaccatgggcccaacacgcatttagaaaaacgccgttaccaaaccaaaccaccatttttggggggcccccggattaacgcttccttattttaagtccagggggggggggggcccaaaaccagagtcccccccggaaaaaacgagttggggcgcgcccaaaaaaaaaataagggccctttgccagggggttggcctccggggccaaaaaaaaaaccttggcaaagccttcgggggggatggggggggggaacttggcccccgggaagccgggctccgttgggggttgaaccggacccgtggg

SEQ ID NO: 79527 - DNA, 296 bp, Zea mays
  Clone ID: MRT4577_172557C.1
tcggtctgcgtgaaactgaggaggaactgaggagactaaaagagaagctggggttgctgactgtggaactgaaaaaaaataaagttgtatggggacctgattggaaggttcgttttgcaaaaatttagcacccaaggatggtcaagggaccaaaaaaggcccagaagaattgaaagggggtctttgatgttgaacaaaggcaagaaaaagtgtggggtgcataaacccgcgtggtggttttaaaaaaggaaagggtcagcggtttagggacttggtttaaagacaaaatacacttt

SEQ ID NO: 79528 - DNA, 287 bp, Zea mays
  Clone ID: MRT4577_172558C.1
gataatatgtgcggtgttttttttgcttgcagacaacggaatcgggctgaggtgtgaatcaaagtcccatcgactgtccttggggggttaacaacagagttcgaggacggccatattcaaaaacaaaagatgtccacgcttggtacaaggatcggtttttaccgattgatgccatgaataacacgagctcccaaagcggttcacagcctgtgaatcacggttttgaccttggcaggggtgtaaaggtggaacttgggagcaaccttgggaatatcgactgtgtttgg

SEQ ID NO: 79529 - DNA, 783 bp, Zea mays
  Clone ID: MRT4577_172559C.1
atggcgggagagaagaacgtgttcacttcctacgtcaagaccaaggattctcatgacacgatcatctttggagatgggaatcaagacaaggataaatctgaaacccaagaaactctaaggcgcttcctaagacgagctcaaaatgagtttgagctaaaagtaaggaagataatgaggaataatagatctgagttcaagaatcttcaagtagaggaatatcttgaggaggaaggcatcaagcatgaattctccgctccctacatgccacaacaaaatggtgtattggagagtaagaacatgatgcttatcgacctggatcacaattaccccgaccatgtgtacaagctctctaaggcgctctatggacttaagcaagccccaagagcatggtataaatgccttagagatttccttatttctaatgctttcatggtcaggaatgttgatcctactattttcactaagacttgcaatggtgatttgtttatatgccaattatatgttgatggcataatatttggttctactaatcaaaagtcatgtgaagagtttagcagggtgatgacacaaaaatttaaaatgtccatgatgggtgagttgacttacttcctcggattccaagtaaatcaactcaaggaagggacattcctctctcaaacgaaggacatccaagatatacttaagaagtttgggatgaagaacgcaaagcctgccaagtcgccaatgagaactgacgggcatttggacctcaacgtgagagatgtgaataaaagagaaaggtag

SEQ ID NO: 79530 - DNA, 609 bp, Zea mays
  Clone ID: MRT4577_17255C.1
ccttcaacaaaaatgggcaatgtttaaacaaccccccttgaactttaatttttaacccaaaaggggggaaaaggtttaaacaaacgggttaaaaaaaaatcccctaagttgggttaaaaaaaactggggggttccctaaacattttttcccggtgggaaaggggtccccccccaaattttggccaaaaggggaattttggcccaaccctttaaaaattttttaaggggtttccccccattccttccccttttttgccccaaaggccctccggggggggcgtttttctttggggaaaaacaaaaaaggctttgggggaccccggaagaggctaagggccttggcaaaaatttccccccttaaaacccccttaatttggctgggtttttgggggaaacaacttttaaaaaaaaatttaaagggggggggttggggggcccccattttgtcggcccttttcctttttaacccaaaaaggaaagggcccccaaaccccacgggggggaaaaaattggaaccccccccggaggggggaaaacggggaaaaacccttccccggccaaaattttttttcccccccgggggggggcccccctttttttttggggggg

SEQ ID NO: 79531 - DNA, 285 bp, Zea mays
  Clone ID: MRT4577_172560C.1
caacaaccgtagcctggacctggacagcatcatcgctgacgtcaaggcccagtatgacgacattgccaaccgcagccgagcagacgctgagtcctggtaccagatgaagtaccgaggagctgcagcagacagccgaccggcacggagatgacctccgcaacaccaagcatgagatctcagagatgaaccggatgatccataggctgagatccgagatcgacaatgtcaagacgcaatgtgccaacctccagaatgccatcgccgaggctgagcagcgtggggagc

SEQ ID NO: 79532 - DNA, 267 bp, Zea mays
  unsure (1)..(267): unsure at all n locations
  Clone ID: MRT4577_172561C.1
cttcctcttccattgattccagtcaagatcactgactgttaccagccagccagncgttcgttaagaagatagctatcgagcaatatatatatagatggagaagggggaagatcagaacgaatagatggatatgaggggtcaaacgcagacagcttccgctgggggccggtggcgatgcgacggcgctgcggcgaggtttttgtggtggtttgccgtggtcctcctgctgtggcatttaccgagctcacgcgcgcttggcttcttgag

SEQ ID NO: 79533 - DNA, 463 bp, Zea mays
  Clone ID: MRT4577_172562C.1
aaaaaggcggggggggaaatagccgctccggggggggctaagggcccaggcaacaggcccgccgatttacatttgcccctcccaaaacagggggggggccaaaagccctagttttttcctagaggggggaggggggggggcccccccccccggccaggggagacgggggcagtcagggtaacagtctacaaaacccaaggggccgggaacaagccaggggtcctaccaaacccgggaaacaaaacccccccggggggggatgccctccctcccggccattctgggtgggccaagccgggggggagggaacaaatgaccaacccttacccgtcccaaggggcaggggccctgcactggccccccagggccaaaaaaaaaaaaagggccggccggcctagcgcccataaatccttatcaacagcaacgggagccctggtggcggagtccccctggggcccctcaa

SEQ ID NO: 79534 - DNA, 556 bp, Zea mays
  unsure (1)..(556): unsure at all n locations
  Clone ID: MRT4577_172563C.1
gcgactccctcgcggacgatacgatcctccctttgaccggcgagtttgatgaaccagcgagtcatggctctcatccagtgatgtcacctccatttatcctcgtccttcgaggaggccgacattcgttaaggtacgcacgacttcgatgtagtcagcaagaacttagtgatatgtttgttccttttgtttatattgttgtgaaatttaaattctacgcaacattagttttttacggttttgtttaattttgtcacgcggttttcttgacccgatatgaattctcatcttgcatcctctaatggtcgtgctccatccgctttggagtgtttaacaattaaacactactagtagtaaaaaaaacaagtagcaattagggcattaattcacaggaagcaaatctttgggcaaatctgaggaggtagaaggtgggtggtggaaggtgggtaggaaaggagtagtattttggtgttcggtttttctttttggncgccggttgtgatttctctttggaacggaacggaacggaacggtattggtcaaagaaaggggcgggctc

SEQ ID NO: 79535 - DNA, 556 bp, Zea mays
  Clone ID: MRT4577_172564C.1
ccggccgggacggtacctgacacgaatcatgccatcactctccaacacggaatatgagagttcatcagcaatgtacgagtgaaggaggcagaggcacgcaccccctgtggctggtcctaccggcgtaggcagcagcgcacgaggcaccctatggcggtggaaccaagcgtgcgccacgccacacccggggtcgcgatcgacatcgtccacttgggcatctacctcgacggcgaggccgacctacaaccgactataccgaccctccggaaaaaaccaccactagatccccgggaacatacgagactcatcccagaaggtaaataccagtttaccaagcactggcggtagggacgctgttacagctccaaactcataaggcccgacatggaccatattcgaatctgtcgaccatcaagacttgcccactggaccggacaactattgacatgggaacctgcggtaaaccttgctatatggaaccgacaacggtcatggaattcaagaatcctggaataacctttgatgggcttatttcaatttgcaaatgcgcctccac

SEQ ID NO: 79536 - DNA, 765 bp, Zea mays
  unsure (1)..(765): unsure at all n locations
  Clone ID: MRT4577_172565C.1
ccggctccctctcgacgacaacaacgggtggtgtccgcctttttcggttgccgggcanaacgcanccctatccggagctgggatggcggacgcgaagcagcagcagcagcagcagcagcagccacccacgcgtgcgcccacgcgtccccgacgcgtccgcccacgcgtccgcccacgcgtccggacggtcaagcccttcgttaacggcggggcctcagggatgctcgcgacctgcgtcatccaaggtatcgacatggtcaaggtgaggatccagttgggtgcgggctctgctgtgaggtcacaaggaacatgcttgcaaatgagggtgtccgttctttctacaagggtttgtccgccggattgctgaggcaagcgacgtacacgactgctcgtgttggatcctttagggttctaactaacccacgcgtccgcccacgcgtccgcccacgcgtccgcccacgcgtccgtccacgcgtttggtcacgcgtccgatgaagggaagccattgcctctaattcagaaagcttttattggtctgactgctggagcaattggtgcttgttttggtagtcctgctgatctggcactcattagaatgcaagccgactcgaccctgccagctgcacaacgacgcaactataagaatgctttccatgcactctaccgtatcagtgctgatgagggagtccttgcgctttggaagggtgcaggtccaactgtggtgagagctatggcactcaatatgggtatgcttgctttctatga

SEQ ID NO: 79537 - DNA, 831 bp, Zea mays
  unsure (1)..(831): unsure at all n locations
  Clone ID: MRT4577_172566C.1
cccgctcgagcttccatcgagccttacgagtgatcgagccttgcaggtggagaagatggccaaccgatcctagtggtcgcacgagatagtgcacccacgcgacgagtgccctatcgctgatatacgacggcggacacgccgacgccgtggggctcgctagcgcgccgctggcatcccgctggcctgcatcggcgctccggtgcattgttctgcccccgactcaaccgacgctttctcttggctgctcaatctcgcgaacccattcggtaaattacttcccactttttcccctgacgaagatacctcccgacttctttcgctcttccgtagcaattttgacgcatcgttttcaaatcgatgatctaggattccgtttgttagcatcattagttgaaattgtttgttgttagctctacatcaatttgtgcgttatattagaacctggttgttagtttagtaactttcgataattttgcttctctgtggccgagacccttaggtagcttttccctatagataatacagtagattcacctatctgaataggtcagctgatcttgcatcaatctggatagttttgcttgttggactcctggcggtcatcttttcttcttcagtgtcatgttggtgttttgtatgtaattaggtgatgggaaaggatcacctaatcataacgcaatggttggtggatttggagagagttccatcttggttagacaattcaaaagggagttgtaaacttgtaataggctcgtgacactgaacacgtncaatgttcggtgaacagacaacccatgtcaaagataagtatgaagtagctgattggaagct

SEQ ID NO: 79538 - DNA, 1931 bp, Zea mays
  Clone ID: MRT4577_172567C.1
gcgatctaagccgtcgactctactactgcatctacctcgctctcgccgtctcgatcgctgggtcttcgccccgtaccgtcccgagcagagcgcagtcctacggcccgggcgactcggatgtcatcggcgcgaaaaaaaaaaaaaaaaaaaaaaaaaaaaaaaaaaaaaaaaaaaaaaaaaaaaaaaaaaaaaaaaaaaacgagttgggtcccctcggggcgggccgggctttcttcttcctttttctatatcgcgttacgtccctacccagcgatctaggccgccgcctctcctactgcatctccctcgctctcgtcgcctcgttcgcttcgcctccgccccgccccgccccgagcagagcgcagccctatccggagctgggatggcggacgcgaagcagcagcagcagcagcagcagcagccacagcaggcggcagcggcagccaccggcgtgtggaagacggtcaagcccttcgttaacggcggggcctctgggatgctcgcgacctgcgtcatccagcctatcgacatggtcaaggtgaggatccagttgggtgagggctctgctggtcaggtcacaaggaacatgcttgcaaatgagggtgtccgttctttctacaagggtttgtccgccggattgctgaggcaagcgacgtacacgactgctcgtcttggatcctttagggttctaactaacaaagcagttgaaaagaatgaagggaagccattgcctctatttcagaaagcttttattggtctgactgctggtgcaattggtgcttgtgttggtagtcctgctgatctggcactcattagaatgcaagccgattcgaccctgccagttgcacaacgacgcaactataagaatgctttccatgcactctaccgtatcagtggtgatgagggagtccttgcgctttggaagggtgcaggtccaactgtggtgagagctatggcactcaatatgggtatgcttgcttcctatgaccagagtgtcgagctatttagggacaaatttggcgcaggagaaatttctactgttgttggagccagcgctgtttctggattctttgcctcagcatgcagtttgccctttgactatgtgaagacacagattcagaagatgcaacctgatgcgaatggcaagtacccatacacagggtctttggactgtgctgtgaagaccttcaagagcggtggcccattcaagttctacactggtttcccggtgtactgcgtcaggattgcaccccatgtcatgatgacctggatattcttgaatcagatccagaagtttgagaagaagatcggcatataggattcccatcggacggatacagggttgacagttctatgctattactgcttgactctgtaataacattccagctgctttcgcaccatggtagttggttttggtagagacaagtctgttacaattttttaccttagctttccaattattgtgttgcaataatcgaattaattgttgctgggggattttttttgggggttgggagggtggcatgcttttgttggctgggatgtagccataaggagagggggatactgcctagttatgtcattgaatggaattggaccatattttatacagatttttaccttcagttcttttgaacttattacatttgggacattttttttgtaatggaaacgatgggaattgatctactgtgagattatgttctcggcctgctcgagattgtacctgataaaaaaaaaaaaaaaaaaaaaaaaaaaaaaaaaaaaaaaaaaaaaaagcggccgatccaattgggggaggctccgctcaggtcacaaggaattgatgagtcgttctttctacaagggtttgtctgccggattcgaggaaagacgacctcgggatcctttagggttctaactcaaagcagccttctaccaggggttgg

SEQ ID NO: 79539 - DNA, 1413 bp, Zea mays
  Clone ID: MRT4577_172568C.1
cattgggtacctcgaggccggccgcctcgaaggcggctgggacttggcaatcctctccacctagctcagcatccgacgacgggacttgcacgatggatgctgctcttatgcctctgctcgtcgtctccctcgtcctctgcctgctggcggctgccccagcggcgtccgcggcgcgggccttcttcgtcttcggcgactccctcgtcgacaacggcaacaacaactacctgctgaccacggcgcgcgccgacgcgcccccctacggcatcgacttccccacgcaccaagccacgggccgcttctccaacgggcttaacatccccgacatcatcagcgagcacctcggggccgaacctgcgctgccgtacctgagccccgagctccgaggggagaagctgctcgtcggcgccaacttcgcgtcggccggcgtcgggatcctcaacgacacaggaatacaatttgtgaacatcatcaggatcggcgaccagctgcagtacttccgggagtaccagcggaagctgcgagccctcgtcggcgagccgcaggcgacgcagctcgtgaaccaggccctcgtgctcatcacgctcggcggcaacgacttcgtgaacaactactacctggtgcccatgtccgtgcggtcgcgccagtacgcactcccggactacgtccgcttcatcgtctccgagtacaggaagatcctctcgaggctgtacgagctgggcgcgcggcgcgtgatcgtgacggggacggggccgctggggtgcgtcccggccgagctggcgctgcacagccagaacggcgagtgcgcggcggagctgacgcgcgccgtgaacctcttcaacccgcagatggtggacatggtgcgcggcctcaaccgcgccatcggcgccgacgtcttcgtcaccgccaacacctaccgcatgaacttcgactacctcgcaaacccgcaggacttcgggttcacgaacgtgcaggtggcgtgctgcggccagggcccgtacaacgggatcgggctgtgcacggcggcgtcgaacgtgtgcgacaaccgcgacgtgttcgcgttctgggacgcgttccaccccacggagagggcaaaccgcatcatcgtcgcccagttcatgcacggcgacacggactacatgcaccccatgaacctcagcaccatcctcgccatggaccaggagggcctctagactatagcttgatcagccggacacgattatacgtacatgcgtgatgtgtctcacgtgcctagcacgttagccatgtgttggatgatggcagcccaatttgccaataatattcgtgcctcgatccaagtttcaataaaaaatcactcacgccttaaaaagaattagtgactggctatggttaatcgaaaaaaaaaaaaaactctgcgttgttcccactgct

SEQ ID NO: 79540 - DNA, 318 bp, Zea mays
  Clone ID: MRT4577_172569C.1
gcctataaggcagcgtggtcgcggcatgcagcagcaaagacatgggcggagtatgcagccaacttatgctccatggactatatgcaagtgtggataccggacgcattcacccacagtgctaacaagctccaatagcttccattgttccgccatacctctcaccagcggtgtcttcagtgtgtgaaaacccaattgttcaaccctacaggatccaacaggcaatcgcaacaggcatcttaccattatcacccttgttcctccaacaaccgtcagccctattacaagagttacctttggtccatttggtggcacaaaaca

SEQ ID NO: 79541 - DNA, 271 bp, Zea mays
  unsure (1)..(271): unsure at all n locations
  Clone ID: MRT4577_17256C.1
tgcacttagcttcactcggttctgcttctacacatgggtgtgtcgttagtttggcaaagaaaggggcaacgacgatggctgctgcggcggcgatgatggtctccggaggacgggcggcgctggcggtggcgggcgtgctctgcgcggtggcggtcttggcggcggcgcancattcttggtggtttgtnggggcgtaccacctntacaacccggcgcttatcgggtggggccgtgaccgtgtgagcgcgtgctgcgccacgtgggacgcctt

SEQ ID NO: 79542 - DNA, 1516 bp, Zea mays
  Clone ID: MRT4577_172570C.1
cattgggaccctcgaggccggccgggcgaccgactctcggcaacggatatctcggctctcgcatcgatgaagaacgtagcaaaatgcgatacctggtgtgaattgcagaatcccgcgaaccatcgagtttttgaacgcaagttgcgcccgaagccttctggcggagggcacgtctgcctgggcgtcacgcgtacttggcaatcctctccacctagctcagcatccgacgacgggacttgcacgatggatgctgctcttatgcctctgctcgtcgtctccctcgtcctctgcctgctggcggctgccccagcggcgcccgcggcgcgggccttcttcgtcttcggcgactccctcgtcgacaacggcaacaacaactacctgctgaccacggcgcgcgccgacgcgcccccctacggcatcgacttccccacgcaccaagccacgggccgcttctccaacgggcttcgcatccccgacatcatcagcgacgcacgaccccaccgctaccccgctccatgccgtgcatgcaccgccgcacactcaaactcagtcggcgactcttggcatgaatgtctaataacaacgagcacatggacatgggagccgtatggttcgctcctgggacggcggcaacatgtgtagctgcaactgacctagctgtactgcacgcgttggtgtgcagaggctgtacgagctgggcgcgcggcgcgtgatcgtgacggggacggggccgctggggtgcgtcccggccgagctggcgctgcacagccagaacggcgagtgcgcggcggagctgacgcgcgccgtgaacctcttcaacccgcagatggtggacatggtgcgcggcctcaaccgcgccatcggcgccgacgtcttcgtcaccgccaacacctaccgcatgaacttcgactacctcgcaaacccgcaggacttcggtgagagacgcagacgcggcgccgagcccaaacccaaaggcgatcgtcttttccatgcatgcatgcatggggaacccaaacggggcgatcggtgacacgattgttggtttctttttgcagggttcacgaacgtgcaggtggcgtgctgcggccagggcccgtacaacgggatcgggctgtgcacggcggcgtcgaacgtgtgcgacaaccgcgacgtgttcgcgttctgggacgcgttccaccccacggagagggcaaaccgcatcatcgtcgcccagttcatgcacggcgacacggactacatgcaccccatgaacctcagcaccatcctcgccatggaccaggagggcctctagactatagcttgatcagccggacacgattatacgtacatgcgtgatgtgtctcacgtgcctagcacgttagccatgtgttggatgatggcagcccaacttgccaataatattcgtgcctcgatcctagttaaaaaaaaaaaaaaaaaaaaaaaaaaaaaaaaaatctgcaaaaaaaaaaaaaaaaaaaaaaaaaaaagtactctgcgttgttaccactgctaagga

SEQ ID NO: 79543 - DNA, 538 bp, Zea mays
  Clone ID: MRT4577_172571C.1
gtttggggggtttttttttttttttttttttttttttttttttttttttttttttttttttttttttttttttttttttttttttttttttggcgggggccccccttggcgaaaaaaccgggtttttatatccccctaaagggaccgggggggggggttattttataaggggggcccccgggctttatttgaaattcgggccacacaaattatgttccccccagccccaccaattttggggggggaacggggattcctaactaaacttccactggcagggccggaactttgaagggggttatgggtttggttccccccgaactaaaaaaccccccgggggattcgcaaaaaccccccctaaaataagaacgcgggttttccaactccccaaagaaactgacaaaggggggggggattttcttgccttcaggggggaagaagccctcccggagggaccgggccccccggagggggttggacctcttggggggagcccccctggagaggccctttttaggccatgggggggcccccaaaa

SEQ ID NO: 79544 - DNA, 778 bp, Zea mays
  unsure (1)..(778): unsure at all n locations
  Clone ID: MRT4577_172572C.1
atcactcccctgctcgcttcgcttcgcatcatcaaagacatctcgcaacggcaaacaaacattagcgcattgccagaaacagcacgcgcatccacggatcgcattgcgatgtgccactgctccgagccgacacaatgccaccaccaggtcctgctcccgccaaccaaagcctgccccgcgctgggtgaccgcccgtggccggcgcggcgcggcgacggcggcgtggccatcgaggtcatcgcttccatcctgcgcctcgccgtgccgatggtcggcgcgggcctgctcatgtacatgcgctccctcatctccatgctcttcctcggcaggctcggccgcctgcccctagccggaggctccctcgccctcggcttcgctaatatcaccggctactctgtgctctccggcctcgccgctggcatggaccccgtgtgcggccaggcgttcggcgccggtcgcacgtccgtcctcaccgccgcgctccgccgcaccgtcgtcctgctcctggccgcgtccgtgcccatcagcttgctctggctcgccatgcaccgcgtgctcgtcgccaccggccaggaccccgacattgccgccgccgcgtacgacttcatcatgtgctccctccccgacctcgtcgtgcagtccttcctccacccgctgcgcgtgtacctccgcgcgcagtccgtcacactcccgctcacgtacgccgccgccgcggnactcctgctccacgtcccagtcaactggctcctcgtgcagagcctccggctagggatacgcg

SEQ ID NO: 79545 - DNA, 373 bp, Zea mays
  Clone ID: MRT4577_172573C.1
ttttcttattatctttttacccccttttttttttttcggttcgttttaacacagggaacaaaacaaaccccatatcgaattactttaacctatcaaaaaactaaacttccatttccttttttgaaaagggggaaaatttcttttttacccatttaccggccttaacaaaatatgggtgtatatacaccctacccccttaacaaccaaaaaatttacattttaaattggaaacacaacacctttacttctcgcggtctctattggatgtggtaatcttaaatacaaaaagtttttcctcatccaagggggaggttaccccctcaatcttcaatattccctacatggaacattccatttttatccaatgccttct

SEQ ID NO: 79546 - DNA, 344 bp, Zea mays
  Clone ID: MRT4577_172574C.1
ttaccaaaccatcacatgggcgcatccattcacggtactgttggtaattatcaacactcgaacagtggtgtgcaggtgcagcagcaagtaacatgggctgacgcaccggtgcccgtacacattgttgggcgaagacgtgacatttggcgtcttcaaccaacgcgcccgggactacggcagtgtgcatgacttgtctgtgtttcgagtgctaagtgacgatctgtggcaggtgctgaacttctactgggctaccacacaaaagcacggcattttattatctgagcacgtgagcactccacggtactttaaggcaaggaacggctgctcaggagttgatactgctg

SEQ ID NO: 79547 - DNA, 302 bp, Zea mays
  Clone ID: MRT4577_172575C.1
cccacgcgtccgactagatctctaactgttactccacaaactccaactttgcgtgaaagggaccattacaaggacaatgcgctagtgcgtcaccccctccctcttcactaccctctgaactacaaacttgtaattgcactgaccctaccggggcacctccttggctgcttgcatcacaactgcaccaaaatcccatgagaatacacaacaacgacaacgatcgatcaaccaaccacacactacacgaaacacatgaccaagcacacgcatactcacgcacttgagatgccgcactatcccct

SEQ ID NO: 79548 - DNA, 387 bp, Zea mays
  unsure (1)..(387): unsure at all n locations
  Clone ID: MRT4577_172576C.1
gcacatattattcganaccaactangcaacatattatagcacaatagcgtaccaacaatggcagccaaaatattttgcctccttatgctccttggcctttctggaagtgctgatacggcgaccattttcccgcactgctcgcaagctcctatagcttcccttgttcccccgaacatctaaccagcggggtttttaaaatgtgaaaacccaacccttcaaccctacaagatccaaccagggatgacagcctggatgttaaccttataacccttaccgctgcaacatgcattagaccctattataatttggagccttgatgcgtccattgccacagaaaactaaggcacaacaaatactaaaacgccggccctgccatcctcgtgccta

SEQ ID NO: 79549 - DNA, 497 bp, Zea mays
  Clone ID: MRT4577_172577C.1
aaacaaaaggttataacaagatattttatttgatgaatcaaaattcaaaacatacggtatagatagcattcaaacacacttctctccatttcttgtaatcaagagttgtgagatttcgccaaagaagaatcaaactcttgacactgtgttcttgagatgagtagtgtttcaagacatgaacagagccttgcattttgccactgtgtcatctggactcgtaactgaatggccaattgtttttggtgattcatagatttcatagtcatttccaccctcataggtcttgtcaccgaagaaatggatttcactgaagtcctcgaggtattgcaagcagtaagtcttatcccaacctttagggaagacatcgaagcttatctgtcccccaattgagaaagtaaggttaagatgtgcaaaccgctcacgaaattcagctaccatctttggtcggatgttttgaaccttatcataactctcaaatcatctctttcttcttggct

SEQ ID NO: 79550 - DNA, 258 bp, Zea mays
  Clone ID: MRT4577_172578C.1
ccaagtttcctacccctggcatgcgaggcgttatcttttttatgggggggcctaaatcaaatcaacgggccgccgtttaacaactcctggtctggtaaaacccggccatttcctatcttatttgcttggcagcacaactcttcttttttcagttgggtttttttctaaaagttttgtcccgattttcttttccctacaaaaatcttattttgtaagcgaaatggttcccccccttttttcttcccaataatctttttt

SEQ ID NO: 79551 - DNA, 326 bp, Zea mays
  Clone ID: MRT4577_172579C.1
ataaaatattttgaccgggaaaattcggttggtttccgataggacgggctaaagttgaagaggggataaaggcagtaatgtacagggctagcagctttctggtatttacatctcttgggtccaagcaaggagcgaagctaagggggggtttggtttcaagagactaatgtttagtccctttattttattccattttagtatataaattggcaaatatagaaattaaaatagagttttaggcttcacattgggaaattttggaactaaaatgggataaaatggggggactaaaaatcggtgctcggaaaccaaccacccccataggg

SEQ ID NO: 79552 - DNA, 250 bp, Zea mays
  Clone ID: MRT4577_17257C.1
gaaaaatcaaggttgagattttgaaaatcctttcgaattttgctgaaaatccagatatgttgaagaaacttctcagtacccaagtgccagcatcatttagttccctctataattcttacgtggaatcagaaatccttattaatgcccttactctatttgagattatctatgacaatctcagagcagaagtgtttaactatagagaattcaataaaggttcccttttttacttatgcactacatctggagt

SEQ ID NO: 79553 - DNA, 2217 bp, Zea mays
  Clone ID: MRT4577_172580C.1
gaaggcacagtcagttgtattttttaacccattagagcagacaagggatgagattgttatggttgttgtaagtagtccagatgtttctgttattaattcaaatgggtcctgtttgccaagtcaactttcccctgagtggcagtttgtcagcgatgaaaagatttcgactggtcggcaccgcctttattggagagcttctgttcctccactaggtttggagacctactatgtggttactgggcaggattgtgaaaaggctattcctgctgtagtgaaaacatacacagctgcacaggaatttccttgccctgaaccatatgaatgttcaaagctggaaggcaaaacagtggagatgaagaactccaattacactctttcttttgatacatgtcatggtctcctccagacagtaactcgtcacaagtatggggaacaaactgtggtaggtgaagaaattggcatgtatagaagccatggaagcggggcatacttgttcaaaccacttggggaagctcgctcaattgttgaggaaggaggatatttcatccttactgaagggccattggttcaagaagcccattctcttccaaagacagagtggcctaagtcacctctctcacatagtacacgcatctacaattgtggggacgctatacaggacatgctgatagagaaggaataccatgttgagcttgttggccatgcttttaatgatagggaattgattgtcagatacaagacagatattgacaaccaaaggatcttctattctgatctaaatggctttcagacgagtaggaggcagacatatgataagattcctctacagggaaattattacccaatgccatcacttgccttcttgcaggattcacatggtaatcgattttctgtacactctaaacagtcattgggcgcagcaagcttgaaaaatggatggctagagattatgttggatcgtaggttggttcaggatgatggccgtggtctggggcagggagtaatggacaacaagcccatgaatgttatatttcatctcctcatggagtccaatgtctcagctttgccccaaacccatagcttgcttactcttcaaccttctctcctctcgcaccgtgttggggcgcacctgaactacccaatgcatgcttttatgagcaaaaaacctcatgaaaaatccttcaagctggttcaacagtcatttgctccattaactgcttctttgccctgtgatgtacatattgtgaacctgaaggtcccacagcccctaagattttctcacacagaagcagcagagccaagatttgctgttctgttgcacaggagaggctgggacgcatcatactgcaaaaggggtggactggagtgtacaacagttggggaagagccagtaaatctgttctacatgttcaaagatttgtcagctgtgaatgtgaaggcgacttcgctgaacctcttatatgatgaccctgaaatgctaggttaccttcagcagatcggtgatgttggtcaggagggaaacgttcttatctcaccaatggagattcaggcgtacaagttagacttacagccaccatcatcgcaggaagagtagtttgtggaatcagtacatgcatattgaacagttctacaagacagtgaagatggatcttcccgaaatactttaatagtggcagctagtaccggaacagcagtgttgcatgtatatatgtcattttcatggcatacagttagtgattggacctatggaagttgctggaagttgtcgttgaggcatttggttgcagccttgttatccacgaaggtgcatgcccttgttcttggtatcatgctcaacagattggaaagatctggagcacattgaagcagagctaatttgatttgggtagacctatgtgttcacacgaccagtgttgattcgtccaatgctaacacgacaataacttgtatcagagcaagttttgtaattctgtcttgtttgcatcctttttgtaggtgccatcatcccgctgaccaaaaaaaactcggtttatactgtgtgtacaaaattttgcttgtaagcatgcgaggattgcaggaaatgctttctttttcgaggcattttcatgggtcctggctacaaagctcaccagctttaacgttgtttgatcctgtattgtttgctgcaatatattgccaaaccagagcacctaaaaaaaaaaaaaaaaaaggccccta

SEQ ID NO: 79554 - DNA, 1702 bp, Zea mays
  Clone ID: MRT4577_172581C.1
attgggtacctcgaggccggccgggaccaccagtccaccaccctccaccgccctccctcgcaggcaggcaggcaggcagccagagccagagccagccgggcaagcactgcagcagccattgtactcatcacctccttcccacgcagcgagaggatgacaccacgaggcaaataaacccagacgtagttcagctagccgcttctacctccctctccccccccgcctgcgcgctgccgcgagagctcgttcctgatggggaactgcgccggcgtggaggggaacgccgagatcaacccttccttcagtgcccccaattcctcagggaccgccggttctaagagcgtcagcaagaacgcggccgacaccagcaccttcggcaccaagacgtccggctcgtcgtcgtcggtgccgccaacccctcgtacggaggcggagatcctggagtcgtcgaatgtccgcaagttcagcttcggcgagctcaaaggctccacgaggaacttcaggccggacagcctgctcggggaggggggcttcgggtccgtgttcaaggggtggatggatgagcgcacgctcgcgcccgtcaggccgggcgccgggatcatcgtcgccgtcaagaagctcaagctcgacagcttccaagggcaccgggaatggctggcggaggtcaattacctggggcagttatcccaccctaatctcgtgaaactcatcggctactgcttggaggacgagcagcggcttcttgtgtacgagtatatgccgagagggagcctggagcatcatctcttcaggaggggctcgaacttccagccgctcccatggaacttacgcatgaaggttgctctcgaggctgccagaggtcttgctttcctgcacggcgaccaggccaaagttatctaccgcgatttcaagacctccaatatccttctcgactcggagtacaacgcaaaactgtctgatttcggtttggcaaaggacggtccaagcggtgataagagccatgtttctactagggtcatggggacacaaggatacgctgcccctgaatatcttgcgacaggccatttgacagcgaagagcgatgtgtacagctacggtgtggttcttctggagctgctgtctgggcagcgcgctctggacaagaaccgcccgcccggtcagcacaatctggtggagtgggctagaccttacatcaccaacaagaggagggtcattcatgtcctggactcacggctgggttcccagtattcccttcccgcggctcagaaggtggcaacactggcgctgcaatgcttatcgatggacgcacgatgcaggcctggcatggatcaggttgtgactgcattagaacaacttcaaaggccaagggctcactgaaaaagatgtccatctacatctgtggagtctggagcatcctcctgtaatactttaggggagtaaaaaaacagagaacggacgagggtttgaagggctaagtggcttgtgaagagaatataatattgccttgctttgtgtacagctagttgcttcgtcgttgtaacttgggtctctacttatatattttattagtcttcgatgtaaaaaaaaaaaaaaaaaaaaaaaacttgtaccagcggttcagcaagaaattccagtatccaggtttacgggtgtgtcagtgatgcttcttaaaagacccgccgcggcaaaaaaaaaaaaaaaa

SEQ ID NO: 79555 - DNA, 558 bp, Zea mays
  Clone ID: MRT4577_172582C.1
cacccttaagacctaacggaccccaggcgcgcgcccaccaccagtccaccaccctccaccgccctccctcgcaggcaggcaggcaggcagccagagccagagccagccgggcaagcactgcagcagccattgtactcatcacctccttcccacgcagcgagaggatgacaccacgaggcaaataaacccagacgtagttcagctagccgcttctacctccctctccccccccgcctgcgcgctgccgcgagagctcgttcctgatggggaactgcgccggcgtggaggggaacgccgagatcaacccttccttcagtgcccccaattcctcagaactatttactactccatttcgcgattgttgggagtcaaagaggtggtgagcggggatggcaccgagctcccgttacaatgcccagggaccgccggttctaagagcgtcagcaagaacgcggccgacaccagcaccttcggcaccaagacgtccggctcgtcgtcgtcggtgccgccaacccctcgtacggaggcggagatcctggagtcgtcgaatgtccgcaa

SEQ ID NO: 79556 - DNA, 472 bp, Zea mays
  Clone ID: MRT4577_172583C.1
gtgacagggagcgaggcagcgagttcccagatgcagccggccgcgcccccatctcatctcgggggtcgggacctgattactccaaccccgtttcctcaccaaatacgccacggcggcgcggcgcgctgcctacccacaatggcgctcaccaccgcctccacggtctcctctccctcccgaatcatccgccgcttctcttcttctcaagactctcgccccccttcctcgccccttcctcgggcaggcgatggttgacttctcagggatggtggatgacgagttccttgacagattgggcatagagaagggcacgagaaaggtcataaatcatgaggagaggggacgggtcttgcgtgccatggatggatgcagctacaaggctgcagctggagggtccctgtccaactcgctcgttgcgctggcaagggttggtagtaaacagactgctgggtacactgagcttaatattgtg

SEQ ID NO: 79557 - DNA, 403 bp, Zea mays
  unsure (1)..(403): unsure at all n locations
  Clone ID: MRT4577_172584C.1
attcacggggccatgcacttggcataattctgacgataaganaccatctgtatgtgaacaacgtgatccttgtgcaaacagggtgtcgtctactgaccagacagtgcaacagaatgactcttggtcaaacatcatgatttctggtggagctgacgataccaatggtggctgggacaccagagtgaaatactcatcctgcactgatgggggtgtctgactacattgtgatacatggacacacaagattggttctaatgaaggtgtataacaagaaactgatccttgagccagctacatgtcttctactgtgtgtgccagatacaataaaggtagctggaacactacaccacaagtcattccatccatggaaaaggctgatgatccatcgaagagtaacgcgggt

SEQ ID NO: 79558 - DNA, 634 bp, Zea mays
  Clone ID: MRT4577_172585C.1
atacgctgcccctgaatatcttgcgacaggccatttgacagcgaagagcgatgtgtacagctacggtgtggttcttctggagctgctgtctgggcagcgcgctctggacaagaaccgcccgcccggtcagcacaatctggtggagtgggctagaccttacatcaccaacaagaggagggtcattcatgtcctggactcacggctgggttcccagtattcccttcccgcggctcagaaggtggcaaccctggcgctgcaatgcttatcgatggacgcacgatgcaggcctgccatggatcaggttgtgactgcattagaacaacttcaaaggccaagggctcactgaaaaagatgtccatctacctctgtggagtctggagcatcctcctgtaatactttaggggagtaaaaaacagagaacggatgagggtttgaagggctaagtggcttgtgaagagaatataatattgccttgctttgtgtacagctagttgcttcgtcgttgtaacttgggtctctacttatatattttatgtaccagcggttcaaagggtaagttcttttgttccagtttgaatgttcttgagattgtaaaaaatgcttcttaaaagaccgccgctgcaaattgcttgcc

SEQ ID NO: 79559 - DNA, 1922 bp, Zea mays
  unsure (1)..(1922): unsure at all n locations
  Clone ID: MRT4577_172586C.1
aatggcagcgaggcagtagctgcagccggccgcgcccccatctcatctcgggggtcgggacctgcggcccggaatccgtttcctcaccaaatacgccacggcggcgcggcgcgctcgctacccacaatggcgctcaccaccgcctccacggtctcctctccctcccgaatcatccgccgcttctcttcttctcaagactctcgccccccttcctcgctcctacatctcgccccgcgccgaggacccgggaattccccgcgcgcctgtagctggcaccggctcgttgtgcgccggatgggctgggcggcgcgagcgctcctcggcggattatcggacgccggcgccagtgagagcgacgaggaggaggagcacgtcctacgagtggggcagcgggagggcgagatcgacgacgccgtggagctctccgcggcggccgttgggccagagagatgggacgtgctgggcctcggccaggcgatggttgacttctcagggatggtggatgacgagttccttgacagattgggcatagagaagggcacgagaaaggtcataaaccatgaggagaggggacgggtcttgcgtgccatggatggatgcagctacaaggctgcagctggaggctccctgtccaactcgctcgttgcgctggcaaggcttggtagtagccagtctgctggctaccctgagcttaatattgtgatgggcggcagtgtgggcagtgacccactaggtagtttctacagggcaaagttgcgccgtgctaatgtgcacttcctgtctaagccggtcaaagatggaacaactggaactgtcattgttctaacaacgccggatgcacagcgtactatgcttgcgtatcagggtacttcgtcaactctgagttacgattcagacttggccagtttagtgtctaaatcgaatgtactaattgtggaaggttatctatttgagctgcctcacacaattgaagctatcaagcaagcgtgtgaagatgctcacaagaatggtgcaatcattgctgttactgcatcagatgtatcttgcatcaagcgttgctacaatgactttcgggacattgtaagaaactatgcagatatactgttcgccaatgccaatgaagcaagggcgttgtgcgagctaccctcaacagacagtcccatgtcagccacaagatacttaagccactccgttcccctagtatctgtgactgatggcatgcatggctcctacattggggtgaaaggtgaagcaatatacatccctccaccacaatgcgtggccgtggacacttgtggtgctggcgacgcatacgcttctgggattctgtacggcgtcctccggggtgcttccgacctgaaaggcataggacttttggcgtcacgggtagctgctgtcgtcgtcgggcagcaaggcacgcgactgcgggtccaggatgcggacagactggctggatcgtttgagcaccatctggatagcttggagttctgctcagatgtttgaatagatcattctgcaaacgtctggtctgattgtatctgttttttttcccaagccttagaaatctatatgtacatacatcacttccctaggtctagtacatttcatcagggcatttagccgagctgggtaaatcttgtgcgcccatttgatattactttccatctttgagcattgccatgattggaattacgtagatttcattgggcatggaaaatacaacggtatagttcatttcctgttcccattgaaaatggatggatgctatgttggtctggcctttctttatgtgtagtatgtaaaaggaactttgcggtccactgaaaccgcagtgagactgaaattacggtaatgcaatccggctttgttgagactgaaattacggtaatgcaatccggcnnnnnnnnnnnnnnnnaaaaaaa

SEQ ID NO: 79560 - DNA, 347 bp, Zea mays
  Clone ID: MRT4577_172587C.1
ggggacacccgccaaatactttcatttttcggggacaccattgcccctcagaagaaatgcttttttttttttaatatgatgcggaattaaaatggggggtggggaaatccttccatttttttttcaacgggccttcaatcctggggattcaaagccacgttcacattccattcaaaaaaacagatgctaatttaatttttctttccaggatacccgacttcttcccgatcgaagacaacattattctattcctacaaaacaagggggggggcggatcatttttgcgggaagcagtctcaattgtcgtcgtcgtcgacactggccttgggggaggcagcctttttggg

SEQ ID NO: 79561 - DNA, 634 bp, Zea mays
  Clone ID: MRT4577_172588C.1
gctaccctcaccagacagtcccatgtcagccacaagatacttaagccactctgttcccctagtatctgtgactgacggcatgcatggctcctacattggggtgaaaggtgaagcaatatacatccctccaccacaatgcgtggctgtggacacttgtggcgctggcgacgcatacgcttctgggattctgtacggcgtcctccggggtgcttctgacctgaaaggcataggactcctggcgtcgcgggtagctgctgttgtcgtcgggcagcaaggcacgcgactgcgggtccaggacgcagacagactggctggatcgtttgagcaccatctggatagcttggagttctgctcggatgtttgaatagatcactctgcaaacgtctggtctgattgtatctgtttttttccccgagccttagaaatctatatgtacatgtacatacatcactaaccttggttagtaggtctagtacatttcctcagggcatttagccgagctgggtaaatcttgtgcgcccatttgatattactttccatctttgagtattgccatgattggaattacgtagatttcattgggcatggaaaatacaacggttaagttccaaaaaaaaaaaaaaaaaaagcgccc

SEQ ID NO: 79562 - DNA, 613 bp, Zea mays
  Clone ID: MRT4577_172589C.1
ggcgttgcgtgttgggggagagagagaagtgggagacccacgagaggctgtcgagtatggactagagaccgtatagtaagcgacagggacggagggagaggccgatggacggaatcggtccgatcagacaggactggcatctggtgcttgtgcggaagaatgcacctaccgctgctgccaagaaggatgagaaggccgttaacgtcgcgcgccgctcctgcgcgacagatcgagatcatgaacacgtacatcgcttgtatgaacaatgcggcgtccaccgtcacatacgtcaacaccaagcgccttgacgacgacacagataaccttggccatgagcgacttccaagtgacttgaagaaaaatctaatgcaagcaagggtcgataggaagttcacctacgcgacacttgttgagatgatcaatgagaaggcacatgtgcagcatgagtatgagtcaggcaatgaaattgccaaccatgagatcattgacagagctcgagagggccctgggaactaagctgcatgacaagaaataaccagcagcagtatagggcatacacggcaaactgtatgcttattatttgctatgtttgacatctcaagttatgcggact

SEQ ID NO: 79563 - DNA, 655 bp, Zea mays
  Clone ID: MRT4577_17258C.1
tcggtttttttttttttttttttttttttttttttttttttttttttttttttttttttttttttttttttttttttttttttttttttttgggggaacaaaacatttcatacaaatccccggggggttttgttagttccaaatttccaaattccagtcccttcccccccaggaggggggaaaaaaaagttttttccccgacttatttaacaaaacagggggggaagcctatccccaaaagcccatgggcgggggaaaaaaccttacccttggagggctaccccaagggccaaaacaaaatgacccccaaagctggcaaaacctgggtagcaccaccagcaggggttttaggcgttatcgggggcaaggcccccaggtaaagttttgccttccaaaagttccaagctccccccccccccggtaaaaatggggcttattttgggggccaacccaacctttttaacagaaaaaaaaaaatccccccccccaataatggaagggacccccttcgggggtgaaagccaaactagctttttggaaatcccctaagggccagttgaaaacttttaaaactaaaacactcccatggggccgttccaaataacagtcttgggggggcccaatgcttcgttaaatgttttgggggcataagggc

SEQ ID NO: 79564 - DNA, 532 bp, Zea mays
  unsure (1)..(532): unsure at all n locations
  Clone ID: MRT4577_172590C.1
gcgctccccttctcgtgttttcaaactcccaccacgagacgagcgaaccttccacttgtaatccagccgaccgtacccgctgccgtcgcgcgccggcatttgcccctgcccggcgccagctcgatagctctgctgcttcctcgccatctccgactccgcggcgagccgcgcgcccgtcggctagcggaggcgggagggcggcggtaccggtgaagggtcgcccggaggaggaggaggaggaggagcgggatggggntctgggtagggctggtgttgggggttgcggcgggcctcgccctcatcgtcggcttcgtccgctgcgagaattctcgctccgcccgtcggcgacaactggctgctaccgttgctagcttctcaagaatgacgattgaagattcacgaaagttactccctgctgacctatacccttcttgggttgntttctcatcgcagcaaaagttaaaatggcttaatcaggagctgacaaagattcggccatttgtaaatgatgcggcgtcagaactgatcaaaa

SEQ ID NO: 79565 - DNA, 325 bp, Zea mays
  Clone ID: MRT4577_172591C.1
gctatgatggcgcatgcacgcctgcggaagctcggaatgcggttcgagcttcagtgctgatgggaccatcgggccaggtgcttaccctcttgcggtcccggggcctatagatactgggtcgggactcaaagcttacacagatgatacttcattgagagatgaagctgacctggatgttcttgccggacccaacactacacatgcacgcgacttgattgaacaccatgaagcgatcgacaagatgaaaaaggctcatgatacctttgcgccaactaatggtaatagcacccaagataccctaattgtcaggccaaatatacaacca

SEQ ID NO: 79566 - DNA, 233 bp, Zea mays
  Clone ID: MRT4577_172592C.1
ttctcgacgcgtgggccgacgcttgggtgcagggcctgccgttctattccagggtcgctatcgcacggaataactggacatgccagatgaaatggcagacatcatggtcaagggggacgaacatggcttcaacgaccggcaccaaagaccacagtggtctctgttacaagcgcctaaggcaagctgtagtggttgacctgcactaaccttgggggaaaaggcgtagttgactc

SEQ ID NO: 79567 - DNA, 322 bp, Zea mays
  Clone ID: MRT4577_172593C.1
ccgaatcaatactacaagaggggatgataagatacgaaaatagacacaacatctggcatcaaatactaggactgactgacagaccgaccagagcgtacacgagctttaatagtatagagtactacagacttgagacagacacacactatatacatcaagttctaaataaaatgggagagagaaaacgaccacaagctttatgcctcttcgtacgcgtaggttgactccagaatggccgactacgtcttctgaacctactattttgtcttatacccagttttggacttagttttcacactcatgaacgtgcctaccgccctgt

SEQ ID NO: 79568 - DNA, 857 bp, Zea mays
  Clone ID: MRT4577_172594C.1
gtgctcaagacagttctatcctctacaaagaccgactcgccaaaacaggccgcttcacagttggcattgacccggacaaattcaacgagacactcaagcaagatgaagtccaagcacgcatcaaagaattgaacgaacgatacaaagatatgaaagtgattgttggcgttgatcgattggactacatcaaaggcctgacacagaaattgcatgggttcgagcagtttttgacggatcatccgaaatggcagggaaaggttgttttgattcaggttgcggtgccgagccgggaggatgtcaagcagtatcaagatctagaaacggaaattagctgtcaggttgggaaaatcaacgggaagtttagtaaaccggaatactcacccatcatctatctgcaccgctccatcccgttcaccgagctcacggccctgtactcaattgcggatatgtgtctattgacatctagccgcgatggcatgaatctggtcgctttcgagtacatcgcctgccaagaacagcgacacggcgtcttggcactgtccgagtttgcgggtgcatctgtctttatggctgatggcgcggtccaattccatccggcgaatatcaaggagatggtgcagggtatatacaaggggctgaccatgtcgaaggaggagaggaaggagagatatgacaaacttgagaagtttgtgcatacgaataccagtgcgaaatggggtcaggactttgtgacggagctgtcaaaacttcatgcatagatgtggctgaatatggggattaatccgtggattagatgtgttcttgatcagtggaagtctgttttgcgcattagctagttcaatacacaagattgattg

SEQ ID NO: 79569 - DNA, 564 bp, Zea mays
  Clone ID: MRT4577_172595C.1
gctgcgctttcctcccccacggttccagttcaggttctggttcgtgggcgaggagggaagaatggcggggttcgacgtcgagtacgcgctgcttctttggcggcctcgtctgggccaccgacataccacttcttcatacaacgtcttcagcacctactgcgaggtcctccagtccaaggatcatcctggatcgggagacgcacaggttccgcgggttccgcttcgtcaccttcttcacggacgacgcgatgcccaccgccatcaagggcatgaacggcaaggagctcgacggccgcaacatcaccggtaacgaggcccaatcaccgctgcggccgtggaggcagcggtggcagcatacggcggcgggcgccgtgatggaggcggctacggcggcggcggtggaggctacggcggtggttgaggaggctacggcagcggcgggggatacggtggtgcaaacctggggggcaggtaccagaacgacgacggcaactggaggaactgaacggtggtgtccgttgaggcctacatatcttgctcgattgtgttaccgtgttcactcta

SEQ ID NO: 79570 - DNA, 527 bp, Zea mays
  Clone ID: MRT4577_172596C.1
ttttgcacttgatcaaatgtgcttttactatgatgtatgggtgacaggatatgtatattctgcacatttcaatgtgtctgtaaagtaatgttgatttcaaaattagtttagttagattttatagaacaaatctccactgctctatttcctggttgacaaccccctcactggatgaagataaaaacacgaaatgttttactgatctggacaggagcatcccaagatctttcgatcctatgtttagaggggcaatagataactgagacatccttgcagtaacttgtggatccttgcattaactataacccctctcgtttacttttgcagaggaattttgccagcaattgatcttattagcgtgaatgctttggttgggatattctactttgttggatttggactgttctgtctggaatcattgctcagcatctgggtcatccagcaagtgtacatgtacttccgtggaagtggaaaggctgcagagatgaagcgtgatgcgacgaggggtgcaatgagagccgcaattt

SEQ ID NO: 79571 - DNA, 132 bp, Zea mays
  Clone ID: MRT4577_172597C.1
ctcaaaccgcgcgatgaggagcggaagaagcagagggtactcacccgccgctgaccgccacaggcgagcccgaaaccactgcaagggcgcagcaatatctgcagcacaattcctctcctagaagcagcgcaa

SEQ ID NO: 79572 - DNA, 300 bp, Zea mays
  unsure (1)..(300): unsure at all n locations
  Clone ID: MRT4577_172598C.1
cgggaccggagaaggggaaaggcgagtcgtcgactcgtcgtccgggcagcttccctccctctcctntncgcnnncgcttnacctaggccggccccgcctacgcccccctcccgcngccgcacgatgagcacttctcccgccgccgccgaattttcnactttgccgcntactgctgccgccgacgaagccgcggggcaaanaaanacggtggtggtnnaaaanaggggcncnnnaanaggggnaccgnttcctcgtggggngttanaaaaaacctcgnaancgttaanngnttaaaggaag

SEQ ID NO: 79573 - DNA, 278 bp, Zea mays
  Clone ID: MRT4577_172599C.1
ggcaggtgtcccacagcagcagaaggcgtagtagtccccactctttccatcagccctaccctgccctcattccccgacaccctctggcttgaaccatggctgagcagtgccggcatacgctttgctggcatgcttcgaatgcccagctgtgtccagaggggcctgggaccgccagttgcacgcctgccacctcagccagcccccgcccagctcatcagtctgaatggagttgccttaaattggcaggtggtaccgtactcactgcccttggagctgtg

SEQ ID NO: 79574 - DNA, 410 bp, Zea mays
  Clone ID: MRT4577_17259C.1
aaaccggcaaacaaaacatattatacaaatccccggggggttttgttagttccaaatttccaaattccagtcccttcccccccaggggggaggaagtaaaagctttttccaccactcatttaacaaaacacgggggcaagcctttccccaaaagtccatgggcggaggagaaaaccttacccttgcagggctaccccaagggccaaaacaagatgacccccaaagctggcaaaacctgagtagcaccaccagcagcggatctaggcgtcatcgagggcaaggaccccaggtaaagtcttgccttccaaaaattccaagctccccccccccccggtaaaaatggggcttattttgtgggccaacccaacctttttaaaagaaaaaaaaaaatcccccccccccattatggt

SEQ ID NO: 79575 - DNA, 356 bp, Zea mays
  Clone ID: MRT4577_1725C.1
cacgcgttcgcggacgcgtgttcatcgtcggtttcggtgtctgcgcgccgagaaggaacaaaggaagactgtagctgtgcagagatagtgagccctctgggcgggtggccgccatacaacccgcacagcttcagccagttggtttgtttttattctacgcaacaacttcgaatgtcacaccattcacgtatgtttcgacccacacgacagatccgtcacccaattcagtgataacgaccgatgccatcaacattctgtttaggctcttgttctataaatttccggagaatttgatgccaaagagagctgcgcctgacaacctatctcctgagaacaacaacaacatgaagcaaccc

SEQ ID NO: 79576 - DNA, 293 bp, Zea mays
  Clone ID: MRT4577_172600C.1
ttgttcgggctaactctacttctacttcggaaccgccgccgctcccggcgcctgggattatcaactaccgcaggaggtcgcggcggcaggatcggtggtccagcgtgcgatggcggcggcgcctaccgtgcggggctacgggccagcgtcgacgtcgttgtcgtaagtggcgctgcctcggccgggaccgtaggtgcccgcgccgttcgtgcccgtgacgacacggcggagggcgcttcttgtgctcctgcgcgcggcgggcgcggacacgcctactcgtggcggtctgcagc

SEQ ID NO: 79577 - DNA, 248 bp, Zea mays
  unsure (1)..(248): unsure at all n locations
  Clone ID: MRT4577_172601C.1
cactccgtcaccttcaggcgcatttacattacttgtgccagggcgaacagggcccctttttttcatggggaccctttaaaagtgtgtggccccggaaaaagttaacttaaaaaaaagggcccaagagccntaagatgttgtgtntagccaagggtgagtaaagcccccccccccccccttgtatttctcttgggtgaacagccgctacccaaacttctaacccgtcccgccaaatgaattaatgaatc

SEQ ID NO: 79578 - DNA, 138 bp, Zea mays
  Clone ID: MRT4577_172602C.1
acccacctacgacacaaaagacctttgtatcattttacatcgtgctcaaaaggttatccaaattgatcttataaatgggattttttatacattctataccttgtgatatatttttaaagttgttgaataaatatttta

SEQ ID NO: 79579 - DNA, 251 bp, Zea mays
  Clone ID: MRT4577_172603C.1
cggcgcgccgcgggggggggggggttttttttttttttttttttttttttttttttttttttttttttttttttttttttttttggggcccagggggccaccccttttccccccaaaccttttaaaggagggggccctaacgggtttccccccccttaaatgggggccccgccacccttgggaaatttcgaacctttcctgggaaatccgggtctgcaaacccgaatcccgcccaagcccccggacagggg

SEQ ID NO: 79580 - DNA, 378 bp, Zea mays
  Clone ID: MRT4577_172604C.1
aactagaattcttattaagggtttaacttattttaagatgggctcaaacataaacatttaattaaataagtttttttagagtttttcaattataaagagccatacccaattcctgctttgatttgttgaaatcctttgacaagtttaagaggtagctcatagtttaaattaattaaaacttcataagaaagccaaggaatgcgactatttttttttaagtgaaatcgcaattgatcgctctcacaattattcacattttcataataatgctttaactcttccctccatttcccttgcttttgagctttcaaagtttcgagaaaaggataagaaaaattcctttcaaaatacattatttgagcaatcccattttttttt

SEQ ID NO: 79581 - DNA, 1362 bp, Zea mays
  Clone ID: MRT4577_172605C.1
gcgcgcgcgtccgcgctatgacggcgtggccggttgcggccccatcaggcaatcccctctccccctccgccccccagccgaagcagacccaatgtcctgcggtagaggcagcaccggcgaagtcgaaggaggcaaatcggtcgccgcgatgacgccgtggcacgacagcttggcgccgccgcctcgcgtcctcatttcccaccgcccttctgatgccagcggtcaagggattgttctgtcacttcaacatccaagatcaggagatgaagtagggtatctatttattgatggccaactacaagagatcaactggtttaaggagcgttatggtgcttggttcttgggagattatgtttgtgaagatacgataaggatccaggaaaattcagacaattggatgaaatattgtatgttgagggatatcctggttatcagcagctaatgaatgtagctaaccaccatatggaattggtttgtgaagtaaaagaagtatctaacatgaagttctttaggctggacaactccaaggtcttatcttggttgtgctgcaaggtatacgacctaaaggaggtcttccccaagttgggtaaaaattatgccgcccaaacagaaaaagaaaaattgaaggaggctgtccaaatgatccgtgaatatctgaaggacgaaccatggttagcattactatgcaagaagctgcagctggatatcaatgcgatcactgttgatgcgaccaccaaaactgctgaagcttcggtttatgcggacagttgtccggcacctgccctcccctctgagagtaagactgcgaatggtggtgccaagtcaagcaaagggaggccagcgaagaaagcaaagacagaggtaggatccaagaacatcaaagatatgttccgaagggtcacgaggagtggatcaggatcatgatgccttcctggaactttcgtgtgactgacgcctgttttgatgcatttggtccagcattcccttgttgaaaatctatgtatctgagttgctgtgtctaacaacagattgggattatattgtagcgttaattgttgattcaggcagtgaactctgctagtgtacaaccctccctcccgtcccggatgtatttgtaccacagttgcttgtagtgccgttgtctgcagtagtctatccaaagtttattgcggcttgtattgcttgagttgagaccaaatgcgagagcatctttgagaaaattctcttttcctatattcagtgataaaagggatttgggagaaaaaaaaagctcaagcatatccgctttctaagtcttattttgtttttaattttcccttgaaaccccttgattacgtgggacctaaacatgttatgataata

SEQ ID NO: 79582 - DNA, 266 bp, Zea mays
  Clone ID: MRT4577_172606C.1
ggaaaaaagtacttatatacacaagaaagatttgtcttattaaatgcggtccatcaatgaaacaaacttatggcgataaataatttcacatgtacaacatccgcccctaaataaaaatctttggagtcccaaaacacacaaacattaaaacggaggaacggtgcattaacgtacatgtccatgaataatgcgtgccaatgcaagtgtttatgtttgtctgactgaatcactttttactatgatgaaactccttatggagaggcatg

SEQ ID NO: 79583 - DNA, 902 bp, Zea mays
  Clone ID: MRT4577_172607C.1
ggccggccggactcgcccactacttcccgcgcgcgcgctcccgctgccgggcgcccccggtttcagccccatcaggccatcccctctccccctccgccccccagccgaagcagacccaatgtcctgcggtagaggcagcaccggcgaagtcgaaggaggcaaatcggtcgccgcgatgacgccgtggcacgacagcttggcgccgccgcctcgcgtcctcatttcccaccgcccttctgatgccagcggtcaagggattgttctgtcacttcaacatccaagatcaggagatgaagtagggtatctatttattgatggccaactacaagagatcaactggtttaaggagcgttatggtgcttggttcttgggagattatgtttgtgaagatggtggcctttattattgcacccctgttgatcccatcttcattttcctaccaacttttgaagctgcacgtatgtcgaacgataaggatccaggaaaattcagacaattggatgaaatattgtatgttgagggatatcctggttatcagcagctaatgaatgtagctaaccaccatatggaattggtttgtgaagtaaaagaagtatctaacatgaagttctttaggctggacaactccaaggtcttatcttggttgtgctgcaaggtatacgacctaaaggaggtcttccccaagttgggtaaaaattatgccgcccaaacagaaaaagaaaaattgaaggaggctgtccaaatgatccgtgaatatctgaaggacgaaccatggttagcattactatgcaagaagctgcagctggatatcaatgcgatcactgttgatgcgaccaccaaaactgctgaagcttcgtatgcggacagttgtccgtgccctcccctctgtcttactttggttt

SEQ ID NO: 79584 - DNA, 251 bp, Zea mays
  unsure (1)..(251): unsure at all n locations
  Clone ID: MRT4577_172608C.1
cngggaaaaacgccccgaaaagggggcaccagccccaggaaccccaagccgggaagagggcaccagaacccacaaccccgcaaagggagcccaaaaaagggcccccccaacgaggggaaccggccaagccagggcaggggcacaccaaaaaaaaccggctgaaagcaaccacagaggcccggccgaggaaacggcccaaaccaaaaacctcgcccaccgccccgtggcgccaagccggccacccggggggc

SEQ ID NO: 79585 - DNA, 777 bp, Zea mays
  unsure (1)..(777): unsure at all n locations
  Clone ID: MRT4577_172609C.1
nnnnnnnnntttcnnnnnaaaaaaaaaaaaaaaaaaaaaaaaaaaagtggccgggtggtcttaccagtctactctttcgtgtcccctctctctgtgccacagagatcctcttcgtttctgcagaagtgcaggactcttgttggctccaagcttatacaacaggcactcgcgcagtggcttgtgctctatgtcatgtgaagccgtcgttcccctctgcatggtagtctgacaacctgcaatgcagtgcttgagctgatctggattcataactctaatgtggactctgggactaccagccacgctgtagcgttgggcgtgaccttaggtgacagggaggtggataaagctttatttgaccatatctgacaccttattggtatctgctcgtagcacatgcttaaaccttgttaaaatcaaactttttagcaaagtagcaaacagctagcagtggtactagataaaaaagctactttgtctgtttaaactcttgagtacttgtcgaggattaatgagttttcaacttttcatggtagtgcttctgactttgttcaaatgttaaacaatctatggtttatggtaaaaggatgttaaaaaggtttcttgtaattatggaactggaacctataagtaagatctgcaggatgccgtgcaaagtctcaactatggtctgcaactgtagccataagttatctgtgctcctggctttatgggattggaagctgctngttctgccttttttttaatcttgggatgctagaatttcagaattgagaaaaa

SEQ ID NO: 79586 - DNA, 724 bp, Zea mays
  Clone ID: MRT4577_17260C.1
gccggccggtccggaatagaatgacgctcttgatggaactgactgtgtcatgctcagcggtgagatcgctgctggagcctacccctgaggtggatgcgaagatcatggatcgtatttgcatcgaggcacgaatcttccgtgctaccgatatgtatgtttcttggtcatgatcaaggccgcgcctcttccaaagagccctctggagaccattgtctcatattggtgtgtaggactgaacaactaaggcacaaaggctggcacctgagttgtcagtcactgtatctctctgcacgctcactcacgagcctactactgaggcaggcaaagataccagccaccaggaatccctcatctctcctccgtgtgatcctatgccgtgccttacgacctgactctttcgactggaccatcatatcctacgtccggctaggtacagcctgatctacagaggcctcattcccctactcgtcgaggggtccgcaaatgctactgattcagagtcgacggaggtgatccttgaggccgcgttcaatccagacgtgcagaatcacctctgctagcctgatgatgccatcgtgtctcttcatcggattggcgtcacctccgtcatcaagatctgcatcgcgaagtgatcaccacgacctgggtctcactggtgcgattccatgaaacagcttttctgcctcctttctactgcatttttttccggagaccgatatttatg

SEQ ID NO: 79587 - DNA, 653 bp, Zea mays
  Clone ID: MRT4577_172610C.1
gatatcctctccgtcggctgtcccggtcacagctccagctccgcttcttgtatccgacacctcgacgcgttccacagaacttccggccacctccctatcacacgtgcgatgttacccgatggcacgctcgagatccactcggaggataccactgccggtgtgactcatcatacaaaaacactcattcgtgcaatgagtgcaagatacccttcactaggtcatcccatgccaagggaattgccctggaaaagataggtattgaggccacatagaccaactccactatacgctagtgtgatcatgctccgcttgctaagaatgtgaacaggatcgctgtcttctggacgaatgacagccgcttgaactacattgaagaaaatgatcatgtcttgactgctggatttgaaccaaaagttcactgtgtggcatatatacctcgacggccgcggtcaaagaacctcgagctgacatcgtgtctctgcttgccctcttcaacgataataaagagaagacgcggtcttatattgctcttgctaccagaatcatgaacgcggagatgacacgtgacggcgttagatgattaagaagagtgcctgcttgctatgatcgcagtgtattcgtgccattggtaacctaagattgtgctgttgaaa

SEQ ID NO: 79588 - DNA, 209 bp, Zea mays
  Clone ID: MRT4577_172611C.1
tctgactcgtgggctgtgttcccggccaattcttgcaatgaccttgtcgtcaagttctcgaaggctctttccaagactgcggctccaatgaacttgctcacgcctgaaaaccctgatccattcatttctgttcaccacgctatgtacgtatgtgtagcatatggtttacatctacctgttataaccccgagagctggagaaactagcta

SEQ ID NO: 79589 - DNA, 307 bp, Zea mays
  Clone ID: MRT4577_172612C.1
acccgttatacaggtagggctgctgagccatggagaaggcggtgcaacaacgccaggttatcggctttttttgtttgaacgcgcccaaactgtgactgcattaaacgatcttgacattggcggacattaaatgggtacggggggggagcaccatgccatggacaagacaagggggggtacaggtctgcacctgttgttgattgatctcaacgccgtttgacgggatcgaagttagagacaggtacaacggctcccacgatggcgacgagcactactcctccggagacgatgttgtggaggaagtttt

SEQ ID NO: 79590 - DNA, 715 bp, Zea mays
  Clone ID: MRT4577_172613C.1
gtcgtctccctcccatctctctcatctccataactctcgcacgcacgcacacccgtctggctccccctcgccaacacccaatcccatcccatcgcgcaggcaggaaggcaggccgccgaccgccatcgcgcgcgaaatcggacgcctccaccacgaccccccggctccgcagccggaggcggcggccggtgcgtgtttggcaggtaggctcgcctgggcgatatgagcgggcacgactccaagtacttctccaccaccaaaaagggggagatccccgagctcaaggaggagctcaactcccagtacaaggacaagagaaaagatgctgtcaagaaagtgattgcagcgatgaccgttggaagagatgtctcatcattgtttacagatgtcgtgaactgtatgcagactgagaacttggagctgaaaaaactagtatatttatatctcatcaactatgctaaaagtcaaccagatctagcgatacttgccgtgaacacatttgttaaggattcacaagatccaaatccactgattcgtgctttggctgtgaggacaatgggttgcatccgtgtagacaaaatcacagagtatctgtgcgaccctcttcgaagatgcctcaaggacgatgatccatatgtgcggaagacagcagctatttgtgttgctaagctttatgatataaatgctgagctagtggaggacagaggatttctag

SEQ ID NO: 79591 - DNA, 227 bp, Zea mays
  Clone ID: MRT4577_172614C.1
aagttgggctggcccaacctgaccaataaggactgcgtaagcttcctgcttaattgccggaaggcaattcctccacggaaggacggggggaaagttataatcggtgatataataattaaccactctggcctaatgctgaaaactcacctcctgatggacatcgccttgataaccataacaaaaggacggcggaaagataaaaaaaaatgaagcaacctcttaaccaa

SEQ ID NO: 79592 - DNA, 416 bp, Zea mays
  Clone ID: MRT4577_172615C.1
cccagtcacgcctgcggccctctcccctcctctgaaattccccagtgggcatctcctcggtgccactaaaatccaccagcccagtaaccaaggggctggtgttaatccagaccccctccccaagtgcttccgagattaaaaccgcttcatcgggaggtagtgtgtgttcttttccagaactgggctccacagtggtgatggtggaggtggtggtagcagacccagtgaagacagtttcttgcaagctccagcaactcaacagtttctcatctgctgggaacatgggttcccatgtagcaagtcgtacgtcgtgccctgttctccttagctagttaaactcacgagctgtgttttacaactaatccttaataactatggtaattaactgtgactgtgggttttttaaaatctgtcat

SEQ ID NO: 79593 - DNA, 715 bp, Zea mays
  Clone ID: MRT4577_172616C.1
actccatagggcgattgggatcctcgaggccggccgggacagacacatacacacatccgtcaaagaaacaagtgcacacaaataaatacctggctcgctagattgccaagagcaatggcctttaggtcatccatcttgcttgccacggtggcgctagcaacgctattcgcggtcggttcgtgcaccaccccgctcaccttccagatcggcaagggctccaagcctggccacttggtcctcacccccaacgttgccaccatctctgacgtggagatcaaggagcacggtggcgacgacttctcctttacgctcaaggagggtccgactggcacctggacgcttgacaccaagaccccgctcaagtaccccctctgcatccgctttgctgtcaagtccggtggctaccgcatcgccgacgacgtcatccccgccaatttcaaggccggcaccacctacaagaccaccctcaacatctgattagcctcttatgacaaataatattttgagagagctcatctggaccaagtgccagcgagctaatatttaatttttttctttggttatattgaggcaccacacgagccaagaaaaaagttatgctacatgtcccttcttgcgccttattgcgttaggttgatatgcatgattacatagattaaaatacacttttattcaagattttttggggagaaatagaaaaaaaaaaaaaaagcgg

SEQ ID NO: 79594 - DNA, 694 bp, Zea mays
  Clone ID: MRT4577_172617C.1
ccggccgggacacagacacacacacatccgtcaaagaaacaagtgcacacaaataaatacatcgctcactagattgccaagagcaatggcctctaggtcatccatcctgctcgtcatggtggcgctggctacgctattcgtggttggttcgtgcaccaccccgctcaccttccaggtcggcaagggctccaagcccggccacttggtcctcacccccaacgttgccaccatctctgacgtggagatcaaggagcacggtggcgacgacttctcctttacgctcaaggagggtccgactggcacttggacacttgacaccaagaccccgctcaagtaccccctctgcatccgcttcgctgtcaagtccggtggctaccgcatcgccgacgacgtcatccccgccaatttcaaggccggcaccacctacaagaccaccctcagcatctgattagcctcttatgacgaataatatttcaagagagctcatccggcccatgtgccagcgagctaatatttaattttttttctttggatatattgaggcaccacacgagccaagaaaaaagttatgctacatgtcccgtctcacgccttgttgcgttaggttgatatgcatgattacatagattaaactacacttttatttaagattttttggggagaaatatattgatctggtccaccttcattatcc

SEQ ID NO: 79595 - DNA, 1420 bp, Zea mays
  Clone ID: MRT4577_172618C.1
aaaaaaaaaaaaaacacagacacatacacaaatccgtcaacaaaacaagtgcacacaaataaatacctggctcgctagattgccaagagcaatggcctttaggtcatccatcctgctcgccatggtggcgctggctacgctattcgcggtcggttcatgcaccaccccgctcaccttccaggtcggcaagggctccaagcctggccacttggtcctcacccccaacgttgccaccatctctgacgtggagatcaaggagcacggtggtgacgacttctcctttacgctcaaggagggtccgactggcacttggacgcttgacaccaagaccccgctcaagtatcccctctgcatccgcttcgctgtcaagtctggtggctaccgcatcgccgacgacgtcatcccctccaatttcaaggccggcaccacctacaagaccaccctcagcatctgattagcctcttatgacgaataatattttgagagagctcatctggaccatgtgccagcgagctaatatttaatttttttctttggttatattgaggcaccacacgagccaagaaaaaagttatgctacatgtcccttctcgcgccttattgcgttaggttgatatgcatgattacatagattaaaatacacttttatttaagattttttggggagaaatatattgatctggtccaccttcattatccagccaagtccccttccctcgcctcgcgttaggtagcctgcttccgacccgcacatctccctccggttctcgccatgggcgccggcgccaacaaccacgaggagtcgagccccctcatcccagctgcggttgccgcccccgcggacgagaagcccccgcaggctccggcgccggaggccgccaattactatgccgacggggtcccggtcgtgatgggcgagcccgtgtcggcccacgccttcggcggcgtcccgcgggagagctggaactccgggatcctctcctgcctcggccgcaacgacgagttctgcagcagcgacgtcgaagtgtgtcttcttggaacggtagcaccatgtgtgctctatggtagcaattttgagaggcttgctgctggacaaggcacatttgcaaacagctgtttgccttacactgggctgtatttgcttgggaactctctctttgggtggaactgccttgccccatggttctctcatcccactcgtactgctattcgacaacgctacaatcttgaggcaagtgttctgtgcacccagctttttgtacggttttcattcgtcagtatgtgggtatccatctctgtttgaaatttgtacatggtagtaattgaattgagactagcatatttgcatcagtttgtattgatttttgagtttatatcgattttcatcctctatctatgtttgcttctaagacttgctcta

SEQ ID NO: 79596 - DNA, 325 bp, Zea mays
  Clone ID: MRT4577_172619C.1
caattaaatggttgcattcaaaaaaaaaaaaaaaaaaaaaaaaaaaacttaaagcgagggtacaaaaaaaaaaaaaaaaaaacaaataaaaaacataaacaaaaaaaaaggccgaccaatcacgcggatccaatccttccttatcgcttagtgcatacgtcctagctctcatttgttaccgcctactttctgtgaactacaggtactttctcatcaagggcactgttaatcccctggagtatcccaccttacttgctttcacgctaatccccttcattccatctgttttaatatctaataggcccctcccttttatcattcctaa

SEQ ID NO: 79597 - DNA, 444 bp, Zea mays
  Clone ID: MRT4577_17261C.1
gcctcaggggttggtggccgcaaacgggggattcaagaaaaataacaagcccccctgtttggcggggcccgagaccgggggaggattgtttaaaaaacccaaaaagggcccctaaaaacttttttggggagaaaaaccagcccggggccctcaaaccccccaaaagggccttaaaaaaaccacattggtacaaaaacccccccaacccaattttttgggaaaaacccttggggcaaaacccaacccccccgggggggggaaaaacaacccccaaaatttatgttttataaggggaccgccccccccatgctggggggtcgagggccccccgggcccattcaatatccaaagaaggggatcccctgggcccacagggacgggcccaaaaaaaaaacaattgggtccgcccccaaaaagcctgcagctttggtaaaaacccccctg

SEQ ID NO: 79598 - DNA, 308 bp, Zea mays
  Clone ID: MRT4577_172620C.1
agcccacaaccggttaaacaaggggtggggtttatttcaaaagggggggggttgcttaccaaaacaggggcttaaaaaacatcattggaccaaacaaggcccaaagcaagcacccgccaaacaatgcatgcttgttcgcccaacacaaacaacaggccacaaagcagaacaaggggtggacagaacaaagcggggggggcccccaaaaccgccagaggaggccaaggggcccccaacggcccccgggggggagcccccacccctgggggccgggggggccaaaccaaagcccaatttatgccccggcc

SEQ ID NO: 79599 - DNA, 353 bp, Zea mays
  Clone ID: MRT4577_172621C.1
gtcagactaacaattagctcatcgactccagattggacaactcgacaccatggaggtgctgatcgctgtccttgctctgctggcgctcgctagcagcgcctcctgcacaacaagcggctgctgttgctaccaaacaccaccgtatcatctaccgcctccgtattatatgccgcctccgtattatctgccgccgcagcagcagccgcaatcatggtaataccctaatcaaccaccgctaataagcccctaccagcagttatgatcctgcggcgtcagcagcgtcagcagcccgttcctgcaccactgcgtgtagttgctgaagcaccactgcaccccggcggcgacgtactact

SEQ ID NO: 79600 - DNA, 443 bp, Zea mays
  Clone ID: MRT4577_172622C.1
actagacactagcatgaccttgactgcacgcgcacgcatgctcggaattcggctcgaggattgcactgctaggacaagtctagatatgctttctaagcactactatcaagctactggcagctgggtcgtattttttgtcccagaaaatgatgcggacatgacagcttataatgatttcatgagttatctaggtgataagcagcgtgcagcagtctgtaagcttggagagagcagcaccttgtttcttgttccaccttcagatttctcagagcaagtactgagagtgcctggaaatgtcagcatatctggagtcattctgaggtttcagcagtcaaatccagattacagctcaccaaatcgcaaaccattggatagagctcacccatcttctgcaagtaattttaacactgatgtaagaaattgtgaagatctgcatgcactga

SEQ ID NO: 79601 - DNA, 383 bp, Zea mays
  Clone ID: MRT4577_172623C.1
gagggggcagacaggcggacagccagcaagcgacaacacttacgatttcctgacaagaagcaagcggcccggaccggggggagacaaacagcaaaagaaccccaggaacgacgtcctcaacgaacaaacagtaccacacctgacggacagcgcgctgagagatgggaagacacctgccggacccaaacttgacagacgggaccaaagaacacagggacccatgaccgggcacgagcaaagcgaaatcacaaaacgacaacatgagcccctggcccgagcagcacagggagagaacgcaaggccacccccgcagtacaaaaaggcccaacaggaacgtaagcaataataaagcggcgccgcggaaaaaagctccgggccgaaca

SEQ ID NO: 79602 - DNA, 246 bp, Zea mays
  Clone ID: MRT4577_172624C.1
ctgactcgaggatgtgctcgtcacatatttgactttgtaaagaagatttagtgtaacgggagacaagaagtattggagatgattgaatatgttaattgatttgctagttagcagaggtgcaatcatccaattatgaatgatgttttgtaatagcctagtatataggatgattaagataaacatatgttatgacacatagtatggatcgactgccatatgttatatgatatagagcggttcatatta

SEQ ID NO: 79603 - DNA, 313 bp, Zea mays
  unsure (1)..(313): unsure at all n locations
  Clone ID: MRT4577_172625C.1
gggtagaagcaatacaaaatttgaacattttgttacagcccattttacgtttagggacacttccagcctaagttttcatgaaatcgatgtttttgtgtaatttcctatcagcccttcgagaagttgatgacagctgaatttttttccacttttcattcagggacaggggttttgggggcaaaatgaatggcagaaactttgggaaggaaatttttgaaggcagggtgccccaagtagggggggccactactggaaattggtttctaaccttctttaccgaaataggcttgagccttttnggattttccacttt

SEQ ID NO: 79604 - DNA, 144 bp, Zea mays
  unsure (1)..(144): unsure at all n locations
  Clone ID: MRT4577_172626C.1
gcgtccgcttaaaaccgtcggggcattgtaagtggcagnatggccttgctgccaccatccatgagtaccagccccgcgtcgcacggtttccactgtcaaaggatcagcgcgccgcccgttgggaagggagctttgtggcgggcc

SEQ ID NO: 79605 - DNA, 692 bp, Zea mays
  Clone ID: MRT4577_172627C.1
ttgggaccctcgaggccggccagaaataactggccatcttcgtctcgtagcccatagtgctcaaagctacacaatatacttgacaatgtcagctaaaatgtggggtgtgggtgcggagcaaggcggtatcctacagacatctactgggaaacttgaactgaaggagccatactacaggttgtctcagccacaatcctgcacgttgccacaagatcagcaacagcagcaattgccatctttgcaggcacagggatcggagcagcagatgcaggaagggctcagcccagccttcacgatagaccaagattgcctcaactagacagcctggagtcgcgtatgctaggattccagcaacgagctgaggtctgtacaagcacaagagtttagagtagccgatattgtcaggcgttagctgccaaaggctaatatcacgatcgaggtgtaccgtgtacgagaccattcctgagttgcgcagctggcagctaaactgcggtcgcgccttctccgagggaatcgagaaaaaggaaattataaagtgtatttggtttcaggtaaagtgaagagcgaagggcacccctaacaaggacgggtgtatgttgtttgatatattatattcttgctaggaattaattattttcatgttaagtatgtttaattcaatttgctttaaaaaaaaaaaaaaaaaagcggcc

SEQ ID NO: 79606 - DNA, 181 bp, Zea mays
  Clone ID: MRT4577_172628C.1
aactggaacatgatgcgagcacgagcaatagcctcaagggataaccgacagaggcactgtggggggataaatatctctcgacatagggatgctacggataggagtgctacaaaaggtagcatggtacacactggagggcttatgacgatttagctcattggcacaagctacgcttaaggac

SEQ ID NO: 79607 - DNA, 821 bp, Zea mays
  Clone ID: MRT4577_172629C.1
attcggctcgagctgttgtccagccctttcatggcccctagaattgcacaggtgttgcgcggcgcctcgcccctcatgctcccctcccgccgccagccccgttggggagaggaaaaggaggattaggaaattcttgtctgacgagtagcagaatttctctaggtcgttggttgcagcgaggtccgggccttcgtgggatttttgatactctaaagtcgtatgatcgattctacatattgaagaaaaaacaggccttcgctatgggagagagacggacggagaagagaaaaaagttatctacccttacctctgtgctatcgtagctgtcgccaagctgccccactgggagtctctctccgactgtcaccgttgcctagcccccttcacacgctgatcgtgtattgaaatatagtcttgtgcttaccaaaataagtgcgcaaaaaagaaaaaaaaaaggagggaggtttccatctttgccatcagtggcggcgcctcctgcttcttcgttaatgaccacggtctccactgccattgtgaaggttatctatgacaaattgacaggaagaaactgtgaattcgggttgtgatcgtgtcttcgatcgaagaagttgaggcggttgctgagcaatttaatggctatgtgagttcacttcagctcttctagagctatgcacattcttttgctgtcatagtggaccattctcctgtttacttacaattgtaaactttgcaatactctatgaattctgtgatgttcaccactcatggcttcctaccagatcacacattgcataaatgaagttcaacgttaatggttactc

SEQ ID NO: 79608 - DNA, 641 bp, Zea mays
  Clone ID: MRT4577_17262C.1
cattgggtacctcgaggccggccggggaatttccgtcacccatctccgcaccgcacccgcaccgcgtctctcttcctctcctggtcctcctgccactccgcctcaacttgctcggctattcccggattgcggctcggggttggtcattggccgtgagggcctttcaagaacgggcggcggcgctttacctgacgcaaattgcgccggtctcctgccttgctgcgcgcttgggggttgggctcaggaatgggggtagagcaggggctgcgtcgcctggctcgattcccatctctctgaacttagatggatgcatctgtaaacaccaagaagaaggttagtttctgtgggaacactggccacagccgctgcggtgaagttcatttagctgctgtgtgctcaggtcgtatgcgaagcaaccccttctcgcttcaggtttggtttgcatttccgttcaagtataaaggaagcagtatttgccattttggcatagcaattgaatagcataggaacctagaaaacagtgttccagcagtactacgttacactggtgttatactcttatagaaaacatggtggatgtggaactgttttataaggacactagtgatcacaacattagctcttaggaagaagatatgctt

SEQ ID NO: 79609 - DNA, 382 bp, Zea mays
  Clone ID: MRT4577_172630C.1
gaacaagccgtttttataaatagccacattacagctagctgcaaaaatcgttcatgaatttttagccttaaggcgacctaaaaacctgggagggctaggaccatggtcatatttcttggcagagcaactagaaaaaactttaccccaccacattcaagggtttaatgcgtggccagaagcctggccggggcattccgcttccactgtgctttataagacgctcagttggatccccttgcccttgggcaggctcacccacggcttattacccttgccgatggtgaacacgttgcccatactggtggcgaactggttgcccagggagtcctccacgtgaatgggctcaaagctgcccttgtgctccttcctgttcttgataaca

SEQ ID NO: 79610 - DNA, 485 bp, Zea mays
  Clone ID: MRT4577_172631C.1
atagccaacacacgggccaacactcttgcatctcgtccacaacagcccagcggagggcgctcatacccaggcacccacacagcaaacagcaccgccgatgactaccaagacaccgcagcgcgggaccacgcctacatacatatacacagggactcttttaaactaccaaaaggatactcacgattctggaaacgaaactaggaaaactaatgttcacatactactttaagaggactaaaaaccgctgatatgaatgacaggatctaacctatccctggtcaataatgctctacacatggaaatcagatcctgaaaaacaatgatcaaccatgagaagcacaggactatatagcccatacaaaaaaaatcctgcgaggagcaaaggagatgggggatgcattgaaagaagtgaacagaacagcacgctattcaaagagaccatgcaaattaccaaaaccggtatgagaaatgcggaccatgaacat

SEQ ID NO: 79611 - DNA, 306 bp, Zea mays
  Clone ID: MRT4577_172632C.1
attcgggtagggggcccccaccaaaatggcagttttcgtattccaggatcctggcccaatcaaccacatcaaactcagtctactgtacccttagcagagtggcctatgcatactgtccagtaaacaccggagacacctctacaaacccgaggaaagacaacccagaaacctgtaaatagggatggaccatcatttcttctcaaagactggattgtatagcaacaaatacagtgcctcatgagtgtgtaagctggaaaactcagggcatggacagtttcttacatacagcccaggctggataaccca

SEQ ID NO: 79612 - DNA, 127 bp, Zea mays
  unsure (1)..(127): unsure at all n locations
  Clone ID: MRT4577_172633C.1
tcccgctgcgccaatggaggaggggctttctgaantaatatctcagtgtgacttgtgttnttatgagatatgagtgtgtaggtatacgttgtgatggtgtgtgctgtgtgttgaagcctcntggcaa

SEQ ID NO: 79613 - DNA, 163 bp, Zea mays
  Clone ID: MRT4577_172634C.1
atatgaaatagaacctgtaatatatactgaaatggagaatcgacaacagctgttttacctcggtttatcaacagtcacagcatctcagatggggcacgtacagcacatgatgggaatatctgcatacagaaggctggctagaagaatgagctgattctggaca

SEQ ID NO: 79614 - DNA, 943 bp, Zea mays
  Clone ID: MRT4577_172635C.1
caagccgaagacaacgcacgatgagtagctcctgcccggccatcgtcttccccatgctatgctccacgcgctgttgtcccccagctccacgccgatgctcgcccagaacactctctgtcctcgtcatctacagtactcgggttctatcgacgtcttcgatctcttgctctggtctcccttcctcaacgcttgcgaggaattcggtaaaatgggcgaaccaatgagcgtcgttaatttttttggtttccgagtcaaattactagttgtgctgatggatgtttttgcgtgtgagattggagaagggagatccccaaaattttatggatgaagaagaaaatgaagtcgaagagtgacgcttgcaagatgcttgacgaaaggcgtgaaccgtagattgatcactgttcctcaattgccgagttaaattttattgaggtgagtgattcgctgctcctgcataatagatcgaagcatggaatggtttagtatattaggtgtgataattttattgctatggttaggatgtgttgtgactgtattagatgtttgctgatgtatcatatatgcaatgtatgtttgaggaaagactcgaactagaacccactatcgatgtcgcagtttcgagtgaatttagtattagtgcgctgttgggggccttcgtcttccgaaggtcctcaaaaacatgattaacaatgtttcccaagtatgatatatgtacagaaactttcggactcggaatgaagctgtacacaatatgaaaagcatggtcgggacgaaggttgaaccagttctgaagctacgcgcaaggaagcttcggctcagcagcagaaaaaggaacattaatgtccttaagtcaatagtaaacataaaggacattaatgtaattttacataggctgcgccctgtgcctataaatagatgaacagtacccccgtactgttcacgc

SEQ ID NO: 79615 - DNA, 257 bp, Zea mays
  Clone ID: MRT4577_172636C.1
actcctactcattcactacattgccaaacatgtttcttcattcatatgattctttacctcaaaagctcctgttataaatcacgtgagacttgacatgcacactagtactaatcaacccatcatctcaaaccatcgcatctttttactacatttcaaaactttcacacatctgttataccaacatcttatccccgaacaattcttctacatcatacatctccatctcatctaataaactaaaaaaaatatacaacata

SEQ ID NO: 79616 - DNA, 152 bp, Zea mays
  Clone ID: MRT4577_172637C.1
ccgacgggaacatcgccggttgacatcggctgcacatctgtgctgcttcacggcgccggaaatcacgacgacaatcggcaacttgcgaagaaatgggaggagggaaagacaagcatgacaagagcgacaaggggatacttatcaaacatgat

SEQ ID NO: 79617 - DNA, 583 bp, Zea mays
  unsure (1)..(583): unsure at all n locations
  Clone ID: MRT4577_172638C.1
atgcttcttcagccccgtctaaatctcctattcatcgcgcaggtgccgccggcgtcgccgtcgccgccgccccagcccctagctgccggcgaacatgtctgagcaggcaccaccttacgctcccttctccctggtctcttcccttgccccagagcctagctctaccccgtcaccgaaccccacccttgtcctccccagtcctgccttccccaacaagcgcaagcgcaccggattccgccgcaaagtaccctccggggcccctgccgctcccgccccctccctcggggccccctcccngccccctctccccgcctccgctgccgncgctatcntagtgttttttttgtgagccccccgccgcggccgncnccgcgcttcccgccggctccccggcggcnncgctcacatgacgaggagatcgaggagggcgntgaatccgacgtgggtgggatcgagcaggtcaattaaatccccatcgagaaccacctcctctgccggtggcgcgagacctacggttcctggctcgccaaggagtccttgggaatgctcatccctccccactgcgagtgcctccttaccgacg

SEQ ID NO: 79618 - DNA, 404 bp, Zea mays
  Clone ID: MRT4577_172639C.1
tctctgccggacagtggaacgtatcccatttgcgtgcttgaagccgtcgttgtgccctgccgccgcaccggagtggaggacgacgcgcgtgcgccggggagcagtacagcgcgcgtagtcgccggtgaggaggagagctgctgcgaccgccgacgacaagcacgagcgcgcacaggcaccggtgagtaggagctgaccgaccaacctgcagagacaagcacgagcgccggcacttgacccgttccagacggtgccatgggatcctagatgcctgacctgaagtatctggagactgcatgaaaacgtccatgctgctagtgctgcaaccaaggcgtgaggtgcttcaagctacagatttggtgccaggttctaggatgcctgcggcaagaggtttattttcatgc

SEQ ID NO: 79619 - DNA, 1256 bp, Zea mays
  unsure (1)..(1256): unsure at all n locations
  Clone ID: MRT4577_17263C.1
cttacaatttcaggtcaaaaaaactttcatattattgttacatagtgttccatagacattaaatatactatacgtataaacttgaaggttggaaaataaattaattaagggataataattaaggataggccctgtgtatatactcgacgtacggtggttttcctttgttctatccatatgaagatcatcataattcataaactggtggaagccagctgcttgaagttgatgggcgctgtgtatcggcccgggcggctgtcgtagaacgcgtgggcggtgagcatcgccccgcgctggcaagggtgcaccctgtcccagaacgcgtgctggtcgcggttgctgcacaccgtggcgttgggcaggcagtccgcctcggcgccgaacctcccgcccccgcagcacgcgtcggcgacgtccgtgtaccccgacgcccccgggtcgtcgaaggtggccatcgacaggccgtagtagtcggcgagcgagtaggtgaagcccggcaggcgggaggcgaggctggcgagcaggaccgcgagggcgtcgtccaggcccgacgcgagctcgttcaggccgtccaagcacgcgcccgtcttcgtcccgccggacagccgcgccacggggacgcagccgagcagccccacgttgatgatggcgaacttcctcgcgcnccatggtgtgcagctcagtgatggttgctgagtagttggagatgaggcttgcgtagagcgtggcgacgtcacgctgctggtcggcagctgacttgttgtgcgcagacgcccgcgcggtggcgaagacgaacaggtcgttgctgccgacgctgaagaggaagacggacctggaaagcaggaggtgggtcgcacgggagcccagcttcgtgaccaaccgtgccttggtggacttgaagtactgcacctgcttcgacaatgggatgttgttgcccgcgttagtggagtcgaggatcccagctcctccggaagcatagctgacaccgctgccacgagctgtgaggaccagacggccggtgctaggtgccaacgacaggtatggcggaggactagacgcgaaccccatgctctttgcgaggtagtcagcgatgttgtagccattgctgaatcgtccagtgggaacggagcccgggaagtcgataccgtagtagggcttgttggcccggggcgcgcccggccccgccaagtagttgttgttgcccacatccagcgtggagtccccgaacagaaacatcgccggcggccggcctcgag

SEQ ID NO: 79620 - DNA, 892 bp, Zea mays
  Clone ID: MRT4577_172640C.1
attcctcgaggcgggcacatattcgcaaccctccaggaagccctccatttctactctgcttcgtcgtcccaacaacccagccgtcatcagggcctctcttcccctcctctgcctcgaccgcccatagcctgctgcctggtagccatggaccgatccaagtcgtacgcgggcgggcgcatgcagatcgagccgtactacgacggaggcggcgcgcggccggacttccggtcctactcctacagcgccggcggcagcgggatggggacgtcgtcctacgcgtaccagtacgagtacggcggggcgggggcgggggcgggggaagagatgaagcggagcaagtcgaagcggcggtggctggcgctggcggacccggacatggagcgcaagcgccgggtggcggcgtacaaggcgtacggcgtggagggcaagatgaagggctccttccgcaagagcttcaagtggatcaaggaccgctacctaaacctcgtctacgggtggtcctgatcctcaaagtatatagatatatactccatggttttggctctgcctactctctgttcttgatgcttgtttgatatatcatatcatcatcctggattcatggtgagtacatgcatacagtatatatatcagagagagtgtgtgtgtttccatttttcttcttggttggctttgctagatgttgttgttggtgatctgatagcaccaatcagtcatgtgtattgatgagatgtaacccaaggggttgtttcagaccaaaatggtaaaggcaaatccatcgttcaagtgaaaaaaaaaaaaaaaactagttctagcgactgggcgtgcgtggttgctgttgtcggtttattcgccgcggtgctgctttaatccggctatgcatatgactttt

SEQ ID NO: 79621 - DNA, 765 bp, Zea mays
  unsure (1)..(765): unsure at all n locations
  Clone ID: MRT4577_172641C.1
gggaccctcgacgccggccgggaaccnnttccaactgccgccatcaggtgcagagaccgttccacatcacttctcaggtgaaaaacccccaatcgcccacgagatgcacgtgtgagattttctgcgaggggagatggcgggngtctttgcgcaacacctcagatccgagggagggacttaaaaagcttgatgagtaccttctcactcgcaggtacatcactggctaccaatattccaaggatgacttgactgtctacactgcgatttcgacagctccctcgatcaagaatatcaacgtaacaaagtggtataatcacattgatgcgctctggacgctgagctaaattactgccaagatccaaggtgtgaagggtgaatcctcagcagctccttcacccccaactccatatgttgctgaagcacaggtcccatgtgctgaggaggacgacgacgatgatgttgacctttttgctgaggagaccgaagatgagaaaaaggctgctgaagagcgtgctgcagctgccaaggcttctgactaagaagaaagaatctgggaagtcatcattgttacttgatgagaagccatgcgactacgatactgacatggccaacctcgacgaagatgttaccagtgcccagatggaacgattgctctggaccgcatacaagattgtcccagttggatatggtatcaagcaactgcaaatcatgatgaccatcgtcgaccaccttgtctctgtcgacactctcattgaggactatctg

SEQ ID NO: 79622 - DNA, 262 bp, Zea mays
  Clone ID: MRT4577_172642C.1
gggggaagaaaaggaaggaagaagcgcctgctgtctgctctcacttactcagccctcggccggctctgctgcctcgtttgtctacctaggctcgctagcccgccttcctgtagcgcggcagagatggctgcccctgcgtccaccacggcggcggcgggggtggcgctgctgattatgcttgtgtcgctcgccgcggcggccgacatgttgatcgcgtgctacggggagcgccccgcccaggcggcgcggcgtgatgtacgcg

SEQ ID NO: 79623 - DNA, 963 bp, Zea mays
  Clone ID: MRT4577_172643C.1
ccggccgggctagatgatgtgggtctgccgatccaaccatgatgcggactgaattttatttgaggtcaaatgtaatggattctgatggtaaaaaaaaacatcgaccccatccataactgacccatccttgatccttcctctccccttcccggcgcggcggcgcggcgccgaaaccgaccgacgccgcttatccacttcgcccgctcccatcgcggcttgctattctcatcacgtccatcggcggtccctctccccgggacgcgaactcctccgcaccgccttccaccgaagcgaagcactctacccaccttcctgctgccgccctcttgtgcacgggcgtggaacgtagatctgtctgtgctggcacttgttttttgctttcattggtcagtattttgcagctaaaaggataattcacatttgttgctatcaaggtttttgaaagttttatatgattcagagaaatatatattcttcggctagtgggtctgctcattgatggaaggcaaccagattttggtccagtcagagcagagccttataccaggtgtgcaaactcttgtcatcggtcaagagtttgcagatgttgacacttgtcggagggctgtcaaggacatggccattgctttgcactatgagctccgtgtggtgaaatctgatcgtagccgtttcatcgcaaagtgctcaaaagaaggttgcccttggcgtgtgcacatcgctaagtgccctggtgttccaactttcactgtcaggactttgcatggggaccacaaatgtgagggtgttctgaacctgcatcatcagcaggctactgttggttgggttgctaggtctgtcgaggcaaggctcagggataaccctcagattaagccaaaggagatactgcaggatattcgggagcagcaatggtgtcgcctgtttcttatatgcaggcatggcgtggaaagagagagcatggctgca

SEQ ID NO: 79624 - DNA, 232 bp, Zea mays
  Clone ID: MRT4577_172644C.1
ccacctatacctcacaaaaacattttattaataagaaaccaaatttacctggaatccacagagtgggcactaccagagagtggggcaacaagaggccattggtgatcgacggcccatacataaaagtagcagcacaaacatgaaaagccccatgaaccaccacaaaaagggaccctaaaatcggctaagacaacaaccagcaaaggatctggatcgagaaccaatccagccc

SEQ ID NO: 79625 - DNA, 153 bp, Zea mays
  Clone ID: MRT4577_172645C.1
cgaaactagctctgatcacaaacaaccacactgatattattatggatgtcagcacttcacattaacgtatattaagctaaaccccgacacaatagcatttataccaatttctaattggaatggtgacaacatgctagtgccacgtactaacat

SEQ ID NO: 79626 - DNA, 525 bp, Zea mays
  Clone ID: MRT4577_172646C.1
attctcccaccttcctcgtttcgccgtctccgccgacaccgattgcctacttcagatgccgtcagccatagcgacagaatgcgctcgctagatgctatcgctagatcgagaacaaggcgtatcctaagtccaggtactgccgctggtgtcgcctgaccccaagatcatgatctacgatgtcgggatgaagaggaagggtgttgatgagtttccctactgtgagcaccttgtctcttgccagaaggagaatgactccaggggggggctcgtcgatgatggcattggctgcatctagtacctgacctacttggcactctaggatgacttcctccttagggtacgattgcgcgcgctccatgggctccgcatcatttacatgttttcctgtgccgcatgctgataaggtccagattggaatgaggggaggctttggctagactcagggcatctgtgctatggtggatgtggtgaaggttctcctgtccgtgtgctgttaggacttcatagctgaccctgccgtggaat

SEQ ID NO: 79627 - DNA, 1243 bp, Zea mays
  Clone ID: MRT4577_172647C.1
ccggccgggattaccgcggtccttggatttctcgacctcggctatggaggcggcggcgttatgagcgccgaggtgccgcacttccaccccggcgtgcttcttgaccagggcggcttcaggttcggcctcggcaacgcggcggtcggcggcggatctggacgcgcactacgcggcgaacaacatcgtgttggcctccttcgccagccagctcctcgctaacgcccccgcaccgtcgcgggatgatcgtgctggcgggaggacgccgtcgaacgagatggacgatgagctgtacgacatcaccggctgcgacagccacgtcgcagcgagcttgcggtgccccagccaatccggggccatggcggtctggtcgtcgtccaagaagtcgtacgatatctgtaccagcgccggcggaccagtaaccgtgccggcccatgacacataccacctcgccggggccaggctctccgacacgggaggcctccactacccgctggccgcctgcagtggcgccaacgcgtccgcggcggcggtcggcggcgagggagttgtcgctgacgctgcgctccaactccatcgcttcctcgaacagcacgctgaacgcgacggagcagtgctcctcgggagcgagccggtccgccctgaccgagctgccgcgggcgcggtcccggatggcgctgaacttcaccgtggtggtggcgcgctcgcggtacatggctgtggtccaggatttgctcaacgacgttgtcggccacatgttggacggcgtcgtcgacgtgaccgacgactcgtgcagtggcgtcggctcggttagcgcgccatctgcggtgagctccaacaggttcatggcctcgaccgaagatgccggcgcgcgctaaggctaggcccagagagtctggagcaacctcctcaggacacttcagttggtgaccactatgaaggtgggttttagacttaacataggcagatgagaccaaggctctaaatccttatcagggcctctaggctatcaaggctcgagtaactgcacttaatttatgatttattgtatttgtcttttgttggtaaaatcttgtgatgtcctgtgaagctcctctattttatttacctttgtagccagttttgggatgttgcttactgctcactgtagttgtttgttagcattgtcaataatgtaatgcaagatcactgactgaaattattatgcacatttctgcagggtactgatcaacctcaaacttctggg

SEQ ID NO: 79628 - DNA, 481 bp, Zea mays
  Clone ID: MRT4577_172648C.1
cattgtaccctgctccgccaccgtacgggtacaatgctgcttccaagcaagacgtggtggctactactactcccaatagtgagctgtattacgatcgtatagtgcctgtacctgtacctgattctgcctatggctactacgcgctgcgctccggcgcatcattgtagcacagcccatctgcgactatgcgacccacccatcataagatgacagcctcccacatccttttgcttctccaacctatgctcgcatgaaccgaacttctgtcattaccttctcaacctgtcctacataagatacattaacagacccaacgccctccgcacgctcacctcctgcaacatccccgtcccaatctgctagagccctagctcccgcctcgtgctgtgcttgaataaaaatatgcatgacgatcctctgcttactgttatcaaatctgtaatacctctacgtatatcaacaatatgtattatttaccaat

SEQ ID NO: 79629 - DNA, 119 bp, Zea mays
  Clone ID: MRT4577_172649C.1
acccacgcatccaaccacacttccgatcaataatccccgacagtaaaaaagccccgccgtgtccgctttcaggtcccacatgacgactccatgggtcagcaagtcaaataacaactcac

SEQ ID NO: 79630 - DNA, 335 bp, Zea mays
  Clone ID: MRT4577_17264C.1
gatagaagagcagattaaagcactgctgcatataatgattattgaacaaattgacaagatcaccggataaccgttggagacaaaaaacatctactatctcagagaaattagatacgaccatattgaactttgataggcgcaaacattcactgggcatgcatgttacatccatccatacatggttctaggtccaacactgaatgtatatatgtagaagtttcgccgccagagaggcacccacaacaggtgtcgaagaagcccgattgcttgctagctgcgcacctatcctgatgtccgacgacaccagatgtcgcagcatggacgcatgagtagta

SEQ ID NO: 79631 - DNA, 3051 bp, Zea mays
  Clone ID: MRT4577_172650C.1
gggctccgtgcccctctccacttcgatcgccttcctcgacagttcattgccatcggcagcgcgttgccgccgctcgactcgacttgactccactctgctcgagggttttgctggagtcgagttcggtcggcattgttggattgagctttcggcttgggggaactattgtaaggggtactgacataatcatgaagcttttcatatttcgatgacaggattgttggatctcatatacgtgttttagaaagagatgaaagtcggcggtctcctgacctctgctggaatcaacatcggtctctgtgtactttttctgtcactgtactccattctaaggaagcagccacagaatgttaaggtctattttggaagaaggattgctgaggagcacaaccggctccgtgatgcttttatcttggagagatttgtcccttcccctagctggattgtgaaaagtctgcggtgcacagaggaagaaatcttggctactgctgggttggatgctgttgttttcaatagaattctagtattcagcatacgcatcttctccttagctgccattctttgtgtatttggtgtccttccgctgaattattttggacaagatatgcatcatgtccggattccttcagcatcattagagacatttacaatagggaaatgtggaagaaagatcaagatggctcttggtccattgcgtcgtactgtacatcatctctgctgtagcttgcattcttctatacttggagtacaagcacattgccaggctgaggttatatcacatttctagagcaacaagcaatcctagccattttactatccttgtccgaggaattccaaaatcaagtacagagtcattcagcaggacagttgaaagtttctttaccaagtaccatgcatcaagttacctatctcatcaagtcgtttacaaagttgggaaagttcagaagatagtgagtggtgcaaagaaggtttacaggaagttcagacatttcaagggtgcgacagttgatcggagatgcagacccattagatttcaatgctgtttttgtggagcttcttctaattcattccagttgttgcctagtgattacgagcaagagagtgaaaagtctgatgtgaatgaatcaagctcgagcttacctgatgaggaatgtggtgctgcttttgtgtttttcaaaactcggtatgcagcgctagttgtagccaaaattctgcagacatcgaaccctatgagatgggtcactactttggctcctgagcctgatgacatatattggtctaatctttggttaccctacaagcaactctggattcggcacatagtcacacttatgtgttctatcgttttcatggttgtattccttataccagtgacatttatacaaggtttaactcagctggagcaactgcagcaaaggctcccttttctgagaggaatattgaaaaagaaatacatgacccagctgataactggatatctccccagtgtcatcttgcaaatatttttatatactgttcccccgaccatgatgtttttttctactttggaggggcctatctctcacagtgaaagaaagaaaagtgcctgctgtaaagtattatacttcaccatttggaatgtcttctttgtcaatgtcttatcgggttcagcaattagccaactgaatgctttatcaagcccaaaggacattcctatgcagcttgctaaagcagtacctgtgcaggctacattctttactacctatgttcttacttcaggatgggctagtctatcatcagaacttatgcaactctttggtcttacatggaactttttaagaagatatcttctgagaattaaggaggatagtgattttctttactcatttccctatcacactgaaatgccaaaagttctgctgtttggactgctgggtttcacatgctctgtactagcacctctaatcttgccctttttactgctgtacttttttcttggctacgtcgtctaccgcaaccagttcctcaatgtttactgcacaaaatacgacacaggcggtcaatattggccaattgcgcacaatactacaatattctctctaatcctcactcagatcatctgtcttggtgtgtttggccttaaagaatcccctgtagctgctggcttcactgtcccgcttatcatctttactcttctattcaatcagtattgcagaaagcgtcatctcccattgttcaagactttccctgcacaggttggtgcgatctctttaaatctttaatagcttctagtttgcaaatgtaaacagttgaaggattcagaagaataaattttaggagtgtttggttctcttggctgcacttcctagtcttgcaagggtaagaaatccgtactagcgttggagagccagtttggtggcacttacaggagggaaccactgccaaaatcaagtcctcttggtaataatggctagttataagttggcaaaggaaccaagcatcatacccttatatcttgttgctaccttacatttttatttatgctctcgactgtgagttggttgaaattacttgtctagatatgaatcactctgactcgaatattggctgttggtcacgcacagaatttgattgacatggacaaggaagatcagcaatcagacacaacggaggaccttcatgaacgacttcattctgcctactttcagttccctgataccgacgaggtacctttggaaagagttcgcgttagtgtcggcagagacgaagacgggagcggcagttcaggtgaatcaagccgcaaggaaagcgccgaagacgaacacaagagtggcctctcccacccgacgctggatgggctcccggttagtcggttacgcaacgcggtgagatcacttgggtccgttttgagaccgcagaggagacagttaccattatagcacatttcctttaaccgcccatgtaaattcaaggtcgacagaccccacacacagatcattgatagcgcgtacagggagaggaagatacacagacagaaatggaagagagtataccacccgtttgcaagggtag

SEQ ID NO: 79632 - DNA, 743 bp, Zea mays
  Clone ID: MRT4577_172651C.1
atacaccaccaactcttcgagtacacccgacagatagaaatcaccaatcatgtcggacggagaagacgataccaagtcccaagtcagcgcggccgccgaggtcgaggtctctgccgatgcttccggcggtaagggccagatgagcgtcctcgaggctctcaagggtgtcctgaagctctccctcatccacgacggacttgcccgtggtctgcgcgaggcctccaaggcccttgaccgtcgtgaggcgcacatgtgcgttctcaacgaggcttgcgaggaggaggcatacaagaagctcgtcgttgctctgtgctccgagcacaagatcccccttatcaaggttcccgatggcaagcagctcggcgagtgggccggtctctgccagatcgaccgcgaaggcaacccccgtaaggtcgtcaactgctcttgcgtcgtcgtcaaggactggggtgaggagtcccaggagcgcagcatcctcctcaactacttccagaccgagcagtaaacgtgcctcacccgcgagcgcgatgcccatcaacatacaaatttttcgcacaaccaaccctcggctgcatcagtttagtcgcacctcggcatgacacggagcttgggacggatggcagggcgaatttagggttatgatgtgatgggttgcatggatttagacaggtcttttggaccatgataccaaatgagaaaagactgaacgaacgcttaaaaaaaaaaaaaaaaagcccctaggg

SEQ ID NO: 79633 - DNA, 240 bp, Zea mays
  Clone ID: MRT4577_172652C.1
gcgtctgagggccagtcgacctctctgctcgccatcaatggtcgccgtagcggcaggtttggctgcctacatggcggtgctgcgggcagcgccgcggacattcgagggcgaccagctgatgctgaacgactctgcggtggagatctggctccgctttgatgaccaacgatggtctaacgccatgctccaaccatgcaccgcctgcactcgccgacgcccgctaagtagcacacttcatca

SEQ ID NO: 79634 - DNA, 278 bp, Zea mays
  Clone ID: MRT4577_172653C.1
cggacgcgtgggctgaatttcgacaaggacgcgaggaaaagacgaggaacttgccggcggcgcgagtacgaactgataaagggtggcttgccaagaacatgcagcggtcggttgaagcagggcggcgagcgtctttaggcttgtttatgtgtgtgagaaggacttcttctttttcgtgggtttaggcgtggggaaagagctccttttattaggctcctttaaccacctttttttttgggtgttcagtttttctatcttttcagttcgacgctttttgt

SEQ ID NO: 79635 - DNA, 317 bp, Zea mays
  Clone ID: MRT4577_172654C.1
tttctcttttagagactagagattcgcgtctctcggggtggcttttttctcaaatgggtatatctagttgcatgcatcgctacttgggcggaggctggatccacgtgtagccaaggacgtactgtgagccgactaatggcacagcctgcacctctgtgaggtacaaagcccaccccaccctctttttctaaattggagtcagggccacagccaaagcacttgaactcaaccaagtgcatgccaaagctctccggcttggagagctgccagccgatccatcccacggggaacacctaataaaaaatacaaacgtacaa

SEQ ID NO: 79636 - DNA, 595 bp, Zea mays
  Clone ID: MRT4577_172655C.1
actcctatgggcgattgggaccctcgaggccggccgggaacagcctcactcgaaccgcgcgcacgcttttctcgactcgctagacctctcctactccctacgcgaacccgataccaacttcatcacaatggcccccaagcgcatctccgtcgagcctcgatctcgccgtgctcccaagggttttgtcggctccacctatgacgctcttacctctcccgagaacgccgctgtcgtccgcagcatcgctctctttggtgctgtcgtgacattcctgtccagctcttggggcgagatccttctgcctccccagtaaatgacgccgtaacgatatgcgaccaaagaatctgcgtgggaatggaaaaaatcagtttaggagctagggatgcgccatcatccgtctcccatctgtgcattatataatcgaatcacttgtacattagttggagtcagtgtacgttttagacaggaagggatttcaaggctagcctgtgcctgtccaagggcattatgatacgggctgcatagaaatcgacatgatcaatacctacgggttggatatgttaccaaaaaaaaaaaaaaaaaacccgcggccaaa

SEQ ID NO: 79637 - DNA, 877 bp, Zea mays
  unsure (1)..(877): unsure at all n locations
  Clone ID: MRT4577_172656C.1
ggggtaccctccgggtcggccgggacgtcgtcgcctcctctccactcgcacactcgcaccctgcgtccgcctgccgcctaccccaggcggccccctcccatcgccatgcctccgtccgccgccgccaccgccgccgccttcctcttcccggccgtcgcgatcccctgccgcgtgttccctcaacggcgggcgaggagcctcgccgtccgtgccgtcgcctcccctccagccttcgcggtcaagcccgccccgctgccctccaaggtagcggaataagcccagattcgttgcgcttggttggaatgcgaactgcttcgatgtgctttgagatcccatattgcagggcacatggggttgcgattccgaacttcttatggttaattaataattagtaacataatggctatttccgttatcttcgagtctatactatacactagccctattctcattcgctgaaaatgggggtgggtggtgcaggtcctgaagaaattgccatgtccacaaaatgaaaatgcaatagctctttagctcttatcttgtagggaatacattatatgctttaatgttagttttaggtttgaaacactaccggctggcaacatgcatcatacatggttaaccttagtcggggtttgtgattgtaatatatcttctcttcttcacattttgggaaatcattggaaaaagggtgagtgttgaaatatgaagtgaacaaatataaagtgaactgccaccttccccatcaaaaaaaaagcttattggtttgaattaatcatgtatgtaacttaatagtaataataaatgattgttaaccagatatctctttgattccttagaagactgagcacttnagggcaggggagctcagccaaat

SEQ ID NO: 79638 - DNA, 743 bp, Zea mays
  Clone ID: MRT4577_172657C.1
actgctattcacctcaattatctatcaaactattattgttgtttcaactccatgagaatctttatgttctaaattttcctacagaattaacttcaacctaacattcagtgtgatgcatgagtacacactacacaactattttcctacaaaacattcgactttactgataggcacgcttgcttagatgctgatccagatggctactgttattcagtgtcatctgccatgttcaagtagtgttaactgtatacttattctgttgttgctgtcttgttcttggtttcacattaggttgtaacacttgctactccaatttcacagccttactaaataaccatcagtcaggattgagccaatattccctgtcccgacaaaacagaaaagaactaatggggactacacttcttcaatagttcttaactgattctttgcttgtcagtggtgttgtttagtcttttctttgcctccaatataaactgcagcgttgtgtctgcggctacaccttaatatctaacatgagcacatttcttttcacaggcttcttcatcttgctctgctggctttcaatgctgcaatgttggcgatcttgtcacgtcttgaacagaaaggggagtcagtctttgcaaagaaagagtacgcacgagcagtcattttggtggccagtcaggcgaagagatcaatggaaaggatctaatggattccgatcataaagatgatgccaacctcgcaaatgccatgctccc

SEQ ID NO: 79639 - DNA, 826 bp, Zea mays
  Clone ID: MRT4577_172658C.1
ttgggtacctcgaggccggccgggataatcgccggcagctagccgcgtcgtccatggttcccgagccaactatagctgctaatagctgtagctgtacttgtgtacgtagttgtgtagccgagagactccattatattatattgctcgatctctccatctgaacgtacacacagtccaacacagatggccgccgccaccgccctggtgagcagcagcagcctccgcgccccggcggccttctccgtcgtcgtccgcgcggcctcccggccggcgcctgtcgtcgcagtagtgacgccgctgcccgcggccaaggcagctgccgcccgcggcgccaggctgcgtgcgcaggccacccacaacgtcaagctcatcacgccggacggggaggtacaggtacagctcaagatgcccggcgacgtctacatcctggactatgccgaggaacaagggttggacctgccctactcctgccgcgccggcgcctgctcctcctgcgtcggcaagatcgtctccggctccgtcaaccagttcgaccagagcttcctcgacgacgaccaggtcgccgggggctttgtgctcacctgcatcgcctaccccacctcggacctcgtcatccagacgcacaaggaggatgcactcgtcgagtcgtactagtatagtcagcaattaatgcaccacgtatgcacgctctccttgcattgcatgcatgtaataataataataacgacgccgccatgtaataataactaactatacatggtcctcatgcgtatgcataccagatgtatgagagcagtataacaaaaaaaaaaaaaaaaaagcggcc

SEQ ID NO: 79640 - DNA, 438 bp, Zea mays
  unsure (1)..(438): unsure at all n locations
  Clone ID: MRT4577_172659C.1
ccatatcctactctcagtagagacgcatccacaacctgcctctctcgtactctgctggtgtccgcggcaagatggcggaatctacggagaggacggagaaggatgtcaacacgcggcagcgagttcagtcgagagcctactccgcccacctcaagagctccgggaaatatagcgagactccgctgattgcggtgactattgtgaagactgcgaggttcaaggagcttcctccttatgatactgactgacactacatcaggtctgcatccattgcaaggaagatctacctaaggcaaggcatcggtgtgggtggctttccgaagatctacggtggccgtcagaggaatggtttccgtccaccacacttctgcaagagcaatggggctgntgcacgtaacattctggaagacgtgcaaaatatgggcatcatcgatgtcc

SEQ ID NO: 79641 - DNA, 307 bp, Zea mays
  Clone ID: MRT4577_17265C.1
ccccccaaattcagggggttacagggggccatctaatttttttaggtggaaaaccctccacagaaggggggaaggaaactttttgttccagaaaaaaagaaatttgatctaaacaaaatttgttttgataaaccccaaaaatgggaagggttggtacttttttttaccagcccaaaatgctaaaaagaacaagggtgaatctgaatggaatcaatatacatgtcaatttttgtagccaacccccaagggaaacctccttggttgcctatcattgaaggcgtactcaagccgcaaaggtcccagaggg

SEQ ID NO: 79642 - DNA, 970 bp, Zea mays
  unsure (1)..(970): unsure at all n locations
  Clone ID: MRT4577_172660C.1
ggccgcttttttttttttttttttcgtgcattccaagggtttctccattgagttggttgctgtagatttgttcgagttgactatcgatacatgtacataatcaaggattcgtcgtcaaggcattgcgaccttgcatcttccaatgcatacccctcccctcataccactattgtacactctgttctccgccctcttgcgccaacgctgcctcatactcctccagactcttaacctccaactcactaaccttcagcactgtaaagtgcaatttgctctttacatgcttgacatgtctccgccgcctcttggtcttttcctcaacccgcaatggctcgctctcgacgccgacaacgcgcgctctgcaagtgaataaccgttcatccaaatagtacacttttttcccgtggtccgaggtccccttgacggcctctggcgcttttaatgtgtagtctcgtgaaccaatgtgtgtggcgcggttaagacgcaggatatcaccagggcggacgttcggcatttggaaaggaagacgaagggtgtcgccacgagttaggagatagggtcttccgtggagatgtgcggttatatagtgtgctggttgcatttgcaggagcgggaggagtgttcggatggagggtgtgagtgtcgttgagacaatgtctgatcgagcatgtggcgacgctttgatattttcagaggtagcaggtttagaggcatttgctggcagaggttgaggggttttcgagcgctccttggcttcctgtgatatgcggtggccggattggataagcggctctggtgtatttgatgtgtcgaggttgtgcgatattgttgttactcctgcgcggaaaatcgtgggctgtattatcgacctcgactcgaggagagcattgcgagcggtgcgagcgagcagcgccattgttgcgttttgtgcgagtcgcaatggctggcagacnggcggggggtttcccgc

SEQ ID NO: 79643 - DNA, 498 bp, Zea mays
  Clone ID: MRT4577_172661C.1
tttttattaaagctaaatatcattaaacacctttcaaagtcttaagacataactgtcctagctctgtgaatcagaactcaaattattggcaaggtctttatcataccaagactaatgttccaactatcaacttatatatcacaccaaaaaccgcgcatccaaatctcaatgctcaaactcgtgtggatctccaggttttttccacttgaaaactttagtagggttcaacgggggtacggaagttagctccggcgtacactgcttcagcaccaagctcctcctcaattctcaagagctggttatatttagcaagacgctcagacctgcatggagctccagtcttaatttgacccgtagccaaaccaacagaaaggtcagcaatgaaggtatcctcagtctctccacttctgtgactggccatgacaccccatccagcttttttggacatcctgacagcttcaatactctcagtcacagaaccaatttggttgaccttga

SEQ ID NO: 79644 - DNA, 802 bp, Zea mays
  unsure (1)..(802): unsure at all n locations
  Clone ID: MRT4577_172662C.1
gggggggtttttttttaagtaaacacaaatcggacaccaataatttgaagcggaatttttattacaaaactttaccagtttacaacaagtttacattgtacatgattggagtggttacaaaagtgaattagaaggattacatttntgggggggggtggagggggcattttttttttatacatgctagcttaagtgacaatcctcatacataagataaagacgggatatactaatatagaaggctgagcccatcggcacttagcaccatccacaacagaacaaaactataacatggaaaacaacagggaataaaaccctgagtacggaattactcagcaagacttaccgtactaaagaaaagactctcaaggatatgctggcttaatgggattcaaggtaaagctcatcaaatttcaaatactcatttttgcagaaaagcttactagtagtggatccttatgccaaaattttacttcacaatttaaatactttttctgaatctagatttgcctaatctagagcattcacttgtgtacactagattcattttagcatctttagtttcacttgttatctaagatgcaaggcagtgatccagtctttatatccgaaaagtaacgccgctccccaatcgattaatactcagctggggatctccaaccacacgacatatgtagcacttaacccttacatatgtctaccattcccatgggtcctccattacgtgaaccagtctgcgccacccgagagtacggtactccaccatccagtcacagtcagggggacacgccaccccgccaac

SEQ ID NO: 79645 - DNA, 218 bp, Zea mays
  unsure (1)..(218): unsure at all n locations
  Clone ID: MRT4577_172663C.1
aataccggggccgaccacacccttccgccttaaatatccagggaaataagcctttatgtcttcttcggcaaacccagccaccggcggcgggacttcntggccgaaggtggccggcctgaccttcaaggaacccaaaaaggtgattttggcggccaagccgaaccccaccatcgtggggctgccaaccaccacccaggcggggacctccgattttgggt

SEQ ID NO: 79646 - DNA, 274 bp, Zea mays
  unsure (1)..(274): unsure at all n locations
  Clone ID: MRT4577_172664C.1
gttggntnacgaatgctcaaactggaactgacagagtaaaacatctctcctgtnctacgctacgacatttttttttttttttttttgcactngcacaccncctgttttgaggggggcggaatttttttcactnggtnnattttttggtgggtggaggagacggttgcnacctccatctgctgcgtctcgcccgncctccggggcttgccccggcttgttgcngcngcngcngnggcngncgnggcngccctcgcaggtctcgttgcngcggggg

SEQ ID NO: 79647 - DNA, 238 bp, Zea mays
  Clone ID: MRT4577_172665C.1
gaacagtgcaagagacacatattgtgcgtggctaatgtgggtaagacttcaccggctacaggggacatgagtcggaatgcatgaagaagctgaatatatattctttcacacgcgtcagccgtgacttgaatacaacgtttatagatggtatacactgccggaccaaacactgtactaccaacaagaagctatcaactgacttaactataatatactggccaccacatttgacacaaac

SEQ ID NO: 79648 - DNA, 469 bp, Zea mays
  Clone ID: MRT4577_172666C.1
gacacgaaatcaattcccatggagcaaatggcagcaggcccacaccgaggatagattcctgtgctggtcccaagggcgggcgggccggcacgcgctgtagacccccaccacacgcgagaacatgctccccggcggggggtgggagacgctcaggcgatacgtgcggagtagggtaggcggttaagcgtcgggacgcaggaaaggctggccaggagcacgcgactcaaggccggcggggctgacgagcagcctggcgtggacgccaccaggaacagggatgccctcgctcttgcacgtgagggagtcagcggggctgagctgggtgaagccccactcactggcctgaatgacctgtaggcggccagggcacttggccttagcgcgacgcacagaccgggtggcatgggcagcattgctggccttgcatgccacgggaaggaggacctgaccaaggtccaccctagcacag

SEQ ID NO: 79649 - DNA, 653 bp, Zea mays
  Clone ID: MRT4577_172667C.1
gcacgagggtgcaccagggtggagtgcgtctgggttcataacacgcgtggcgggcggcgttctcagcgacatcaagctagagcaccgccacctcgcctcgaagaaacgatgtcgcgcggtcgcctccaatcgcgggaggcggatccttgactgccgtcgagggcgtcgcggccagggctcactaggcgtgttctcagcggaaggtaggtgacgaggcctggatcgttggatcctgtttggacgatcgggattagagttggccggcgagcggatttctttgaatcgggaccgtccgttgggaacaaacggttggatccggtcgtgcgatccaacccgcggatcggccgtgaaccgtaatatccagatctaagggcgcgtatagaataacggttcggatttaattgaagataatctaacgcgtctattagggatcggacggatggggattctccataccccttcggctagcacatttgctaaagaggccccgcgcaaaacgggaaccaacccgcagtccagggattctattcactgagtcttagatgttttgcatcctagaccctgtattctctgatatttgaggcgcggtctagggaaatggaaaatcagagaaattgatttataaaatgaatttcttctataaaaacgattcc

SEQ ID NO: 79650 - DNA, 1120 bp, Zea mays
  unsure (1)..(1120): unsure at all n locations
  Clone ID: MRT4577_172668C.1
ccgggnnnnnnnnnnnnnnnnnnnnnnnnnnnnnnnnnnaacagaattggcattacctagccactgaacaagtatagaacaagagttctcataacctagccactaactacagttcaattgtnnnnnnnnnncagccatagtttcatccatataaatgcaacataaaagagtactagctaatgtgagaccctgacatagcttccatgaataatccatgcatacttccagttaaactcacacagtccaagcctcgatcacgtttctgaaatgaccatactactgacacaaggatggtagtcacgatgcatttgttgcggcttggcaccagctttgctcctatatagctaacaaatcacagggcggggttagctttcctgctaagaccatggaagaagcggtgttttcttcttcttgagtgtttccgatgtactctggacatgacgtgcggcgagaaacagaccttagagttattccgaacgccataagaagaaagcgttgaattgtcctctatcaacttctcattgtgatgtgtcaagcagtagttatcccagacatgcttccatgagatatgacgatgccccatcttctcttgttctatctcatttatcttcttcctgatagccagcttcagatccttgacagtggcggaattcaacaccgccacatcgaaggaagtgttatccaacttgacaacggtcagcctcatggcgctgccgagctctaggtttatcagagtgtcgacgtcggcgagggagggcttcctggggacgtcggcaagtatggggtcgtcgaggagcgcggcgagcatggactgaagcctcgcctgcttggcctctttgctctggtaagccgccacctcctcaggcttcccggaactcggatccatcgctcccaccgccgttgagaacgattccctttaggtcacacagcggagttcggcggcggaagtcgacccccacgagtccacaacggcggcgacggtgagctcggcagggacgcagagatttaagagaccgacatgtgggccctagtttcagtgtcccaaccgctcgcgtagttgacagccgcccgattggaatgagtcccggtttggacgggggggcgaggcatcttcttctac

SEQ ID NO: 79651 - DNA, 1575 bp, Zea mays
  Clone ID: MRT4577_172669C.1
gagatgacgatgccatggatgtttcagaaaatggccatggcaattcttcattctgcaagaagccgaaggaaggtgatgttcatgtctcttccagttcaactgaagtggcaggaaccattccagagatgaatggaggcgatcatcatatacctggaagctccttttcatgtctagtgaagatctatgacatgcctgatagtcaagtgaaattaaatgatgttattgagtttattggcgtatatacatttgacccagaacttgctgctcctagtgacaacccagatgatataatgttagacctcatcgaagatgtaacagttcagttgcctccgagcaaggtgccacgtcttcactgtttggtatggagaaaattatcattccatgattttatttcaaggcctgttgttgagccttcacccagcctgttaagaggcattcggcaatctttgctctcacacctcacccttgtattaggcaatgacgagcttgcagcccagtgcttgctgttgcatcttctatccagacttcgtaatagggtggatgtggtcaccgttggcagactctccttgaatttcactggcttcaacagggaaagtgcttccatatttgggaatcagctgtattctttgatccagaaattggtgccgtattcacaagccatacctctgtcaattgagtatctcaacacagctacacttcaacctagaaaggacaacaagtcaggaaggttggtcacaggagttctgcagctacctcaaggcactcatctgatctttgatgagactcttctgcagacaggatcattgacatccaaaggtgtggagaataccatgctgctcaagaacctgatggagtcgcagaaggttgactacgattttgagtactacaagctggaaatggcagctgatgtgcagctactcactctctctgaggggaaatcaaacatccttccttcagatttggtagtgcctttccggccatcctctgttcccacagttaatgcaggtgctgaggaaactgagagctggaggtggtttttgaccacagtaaggtctcttcctcagtccactgaacctgaaacttaccagatgattcaggatgaaatggtcagtgccatgcgtgatgataggagcttgggttgttctgaacttagcagatggctaacaatggcacaaataatggcctccagctttggcgagaagagtctttctttggagcactggcagatggtgaaggagcttgagaggcttagaaagcagaggatgcaatgagaatgactcatcattagcatgtgtttttgcactctaattgtttatgttggtatgctgttatgtgtatagtactagacgtttgaatcaagacatggatctaaggcatttctgtaacaactgacaacttttatgatcctatgcatgtcagcatgtgtatctgctgctcattttctttgctcaaatttgagatttactctgggaactatggaatgccaatgtcagacctgtgatttcaggattgtaatgctaaattgctctgcgactacgtaatggatgttttgaaataaaaaaaaaaaaaaaaaaa

SEQ ID NO: 79652 - DNA, 195 bp, Zea mays
  Clone ID: MRT4577_17266C.1
ccatatcgtgcacaattttttattttgatgcgttaacatatactgggtaggtatgcacatatatgggcgggcacaataacaaacacatgaggttaaggatgattatgccatcaaagaattatctgaaaaagataaattatcaaatattttctcaactatgcaaatatcaaactcattcttagtacctaattttat

SEQ ID NO: 79653 - DNA, 263 bp, Zea mays
  Clone ID: MRT4577_172670C.1
aaagaaaaagggttttgggaaaaaaacggggcccccttaaaaataaacccggcccaagggggttataatggcctcagctccgaacaacgtttttggtattaacttgagggggtaaacgggggtcccaacccaaacttggcggggtggcccgttgccgttgccccaacccagaaactgaactttagattttggtgaaagccccaatggcgagaactttgggccccctcatgggggggccctcgcgaaaggggggccctaatttg

SEQ ID NO: 79654 - DNA, 967 bp, Zea mays
  Clone ID: MRT4577_172671C.1
ttttttttttttttttatatagaacagaattgtcattacctagccactgaacaagtatagaacaagagttctcataacctagccactaactacagttcaattgtaaaaaaaaaacagccatagtttcatccatataaatgcaacataaaaaagagtactagttaatgtgagaccctgacatagcttccatgaatatgaataatccatgcatacttccagttaaactcacacagtccaagcctcgatcacgtttctgaaatgaccatactactgacaaggatgatagtcacgatgcatttgttgcggcttggcaccagctttgctcctatatagctaacaaatcacagggcggggttagctttcctgctaagaccatggaagaagcggtgttttcttcttcttgagtgtttccgatgtactctggacatgacgtgcggcgagaaacagaccttagagttattccgaacgccataagaagaaagcgttgaattgtcctctatcaacttctcattgtgatgtgtcaagcagtagttatcccagacatgcttccttacaggacatacatgtgcagtagtctcagattgctcaaagagttcagtgtatgatatggaataataaaggtccacatgagatatgacgatgccccatcttctcttgttctatctcatttatcttcttccggatagccagcttcagatccttgacagtggcggaattcaacaccgccacatcgaaggaagtgttatccaacttgacaacggtcagcctcatggcgctgccgagctctaggtttatcagagtgtcgacgtcggcgagggagggcttcctggggacgtcggcaagtatggggtcgtcgaggagcgcggcgagcatggactgaagcctcgcctgcttggcctctttgcactggtaagccgccacctcctcaggcttcccggaactcggatccatccccggcacggccggc

SEQ ID NO: 79655 - DNA, 267 bp, Zea mays
  Clone ID: MRT4577_172672C.1
aaaaaaaacaagccctgcccttgttttagttttaaaaagccaaaacaaaaaaaaaaagggcccaacgggggttttaagttcacaagttaaagatccctgggtgcctaaaaaaaactaaaacatggcctggggttggcttaccccccggtttaatccatttaattctaatcctaattttaaaaaaacttttttttttgggactaaaactttttttaattgggctttttcacccttgaacttttacgcagtttttggtggtttttttgt

SEQ ID NO: 79656 - DNA, 137 bp, Zea mays
  unsure (1)..(137): unsure at all n locations
  Clone ID: MRT4577_172673C.1
cgagccggccgggaactgttgtgcccccgacggcctccccctccccacccccacgcgcgatgcccttatggccccacactcgtcggcatcgcgatgactattgtatncccgccactaacgcagagccttcttcaggg

SEQ ID NO: 79657 - DNA, 241 bp, Zea mays
  Clone ID: MRT4577_172674C.1
cccacgcgtccgcgaaacggtcgacatggctcgcacgcaatctgccgtagcggtcgccgtggtggccgcggtgctgctgctggcagcggcggcgacgacctcggaagcccgcatcaacttgcggcaagttaacctccgcattgcgcccttgcttttctaacccccgggcaccgggtcccgccccttccggttctgcttgaaccgcctcaaggaacctaaaaagcgccgccagaaccgccgc

SEQ ID NO: 79658 - DNA, 296 bp, Zea mays
  Clone ID: MRT4577_172675C.1
acaaattacataaaccgtttttttttcatttgctcgcgtcaaagaccaccaaacaacacctttctctaaagttacattatccccaacaatacatacctcggcctataccaggattttctatcccaccgcgctcctaccaagcgagaaaagaaatataacatgaatcgggccgccccttccagggaaacaaggcccccatggtatgaaacggaataaattttttttaaagccatgccaaaaatgcctggctgtaaccaaactaaaaaaaaggatgattaagcaaacacaaaacgact

SEQ ID NO: 79659 - DNA, 309 bp, Zea mays
  Clone ID: MRT4577_172676C.1
gcctaactaactgcatcaccggatccgttggaagctatttaacaccggaatttagacttccatgtttatgcaacagcacttctctacaagcacagtaaagcaaactgggactacacagagactttaaataacataattaatacaaggcaggatccctacatgaccataagcgaacaatatgacattgatgaggtagtaatcatatcgtctcggataaggcaaagagacctgacttgcttctatgatgccatcaaaagacattacagaaacatgctatctgacgtgttcatgtctcacttgaaggtaact

SEQ ID NO: 79660 - DNA, 623 bp, Zea mays
  unsure (1)..(623): unsure at all n locations
  Clone ID: MRT4577_172677C.1
attcggctcgagagtggaaatgcataataaatgttgtatctatgagcagagaaagatgtgttccataggagtcaaaatgaagcagttggtcatatttaggtcgctgaactgctagctatccacttgacacatctaacagtaaaaatcctgcagggctgtttgttttgctgctgcagcaatactcattgcattgattgcatctagcccaacaaaaggctggagtggtcgcagtttgagtctgctggatccaacctatgcaagcaagtacatccctataattgctagtgtgagcgaacaccaaccaccaacctggccttcttattttatggatatcaatgtgcttgcctttttagttcctgctgggatcgtagtaagtatttcatttctttagatgaaaagctcatttttggtcctgtacttggtaacctcagtgtatttctctggagtaatggtccgacttatgctggtccttgctcctgctgcatgcattttgtctgggattgctctgtctgaagcttttggtgtccttacaagatcaatgaaatttcagcgtccaacactggatgatggctcttttacagccggngatgggagttctgatactcctacgaactctgaaatgg

SEQ ID NO: 79661 - DNA, 213 bp, Zea mays
  Clone ID: MRT4577_172678C.1
tgcacctgttcaaaatcctgtcacctatctgtacagtctgcgtgaccctttaccgcagaggggacgcagaagggagccggcccctcctgaccgatgtctacctgataatctgccccgaggggactacgtgccgcgagccagttgtgctccgtttataggcgctggtcgcggagctgacggacgacatcctgccggtggacatggacaatcaga

SEQ ID NO: 79662 - DNA, 460 bp, Zea mays
  unsure (1)..(460): unsure at all n locations
  Clone ID: MRT4577_172679C.1
gggtacctcgaggccggccagggacctcgnctgccccagtagtaggcactattcatacgcgtccgctccctgagtccgaggccacgcaagccgagctcaatactgagaggccagagtcaggctgctttgctctccacgcaaaggctgataaggagagccgtaggcagcacaccggcgagcacatctcgcagccggccgcgcgcgcgaccccgtcggccctccgtgttctccaaggtcttccagcttaacctgcggatcctggacactggcggggcggtcttcatcggatcgcacctcgtggacaggctcatggagaacgagaagcacgaggtcattgttgctgataactttttcaccggttcaaaagataacctgaagaagtggatcggacacccaagatttgagctcatccgccatgatgtcactgagccacttcttgtggaggatgaccatatctatc

SEQ ID NO: 79663 - DNA, 268 bp, Zea mays
  Clone ID: MRT4577_17267C.1
gtcgtatctctaccgagactggagtacatctagctgattatgcctgaagctcttcgctcgaatactcagccaccattgttaatcaggcgatctctccggccagacaagttgtccaggcgggtgcaatggagcaaaagagggatatgaaataccagctgggaccgatatatttgtttcggtatacaagctccacagatccccgtatttctgggaccggccaaatgagtttgaacccgagaggcttatccgtccgaagaaggacgagagc

SEQ ID NO: 79664 - DNA, 618 bp, Zea mays
  Clone ID: MRT4577_172680C.1
tttttttttttttgcaaactttcacaatttttagatgccgtttgatcgagatctgtttttttctctctcaaaaaaaaaattctttggctcaaagttgccaaaagaggcttagctaaatttgaaagtaggctaggacagattttctgacttggctggggtgatacagccactgagttgggtgttttttctacaactttgacggtttgtgctattcttcacctgtttagcttcttgtatctttctagtcttctttcaaagtttactaggtacgacgtacctcgtgatgactatgtaattctagcgagagctgaatgaatggtttggattgactgtctaacttctctggttgcctatttgattcttggccaccgaattagacatgtttaaaggtaaaagctagctaatagttaactactaaaattagctgaagatatccaaacagtctagctaataattcagctatttgctagttttaagcagctaataatattagtaattttttagttaactaactattagctctagtgcatttaaataggtctttagactgtgtccagcagttcatttgtatgggcactcaaaacactattttacgctatagaatgtaatgttcgtaga

SEQ ID NO: 79665 - DNA, 494 bp, Zea mays
  Clone ID: MRT4577_172681C.1
agcttgcaaacatgatttgatgatgttgtacaaaatctttcccttattttacaaagaccaagctttagactagctttaccaccagggggtgggttttaaacgaacatgctttatccatgcctgccttatgcctgttcaaacaaatactttttgggcccgtccattttttttacatatgcctacccctgtggatgcctgggttgaattttaggggatgccagaaaccggtcgcgcataccccccccagtagtcccgcgtggcggtggcaagggcctgctgcgtgcccaactggtcctaaaactttttgatgaaatccttggggtccaggtccacctggccacagtccccgttgttgtccccaagcgggaacggggagtcggggatcctcaacttcctggcgtgccccggcgtgcggcccaaacttgcccacagcgccggggacggggtggccacaaaccccaggggagacggctggtcccagctgttgccgtccc

SEQ ID NO: 79666 - DNA, 630 bp, Zea mays
  unsure (1)..(630): unsure at all n locations
  Clone ID: MRT4577_172682C.1
gggtaccgcgtctttccctcgagttttttttttttttttttttttttttttttttttttttttttttttttttttaaggggtaaaacatcattcattcactgggcaaccgggccagtatagcaaaaatgcctggtcaaattaagctaaactttgacggatttctctaaacagggatggctccccagatggccagagacccgagctaccaattcatttactcttgggctcacgggggggggcatcaatcagcttctcggcctccttccaaaacaggccctccacaaaaactccttcctttggaaaccactttgttaccctcttagggaaatgaactggcttgtttgcggagatagactggggacccgcccttgcttttgggagaggggccctggccgagaatctgggggttttagaagaaatgggggggccggggctgctggatgaccccctaggggggggcggggttgggagggcctccttccccttggggtggctgngggtccgcggcccccctttcgggccccctttcgggggggggccggcgggggggaactggggggggtggggggccttggggggggggggcggggcgggggggggggcgtgggtggcggtgggggcggcccccg

SEQ ID NO: 79667 - DNA, 1557 bp, Zea mays
  Clone ID: MRT4577_172683C.1
cgctgggctcccaaaagagccagagccggagccagaacctattcccgcttcgcttccgtcaccaactccgccagaccgtacatcaagggctgtctggataccagaacacgcaatgcaggtgagggctgctccaaccttgcatctgccaagccgggggagtacacctcctgttgcaaatgccgtgcaacaaggcttctcaaacgttgtcagttcgttaccctcacaaccttacgcccctccagtctcggtcttgccggcacagattcaagctaacgcacccccatctcttcctctgctggcggtctctgtaaacccgccagtccaacatgtttcccctgtgaataaccttctgaacagagcttcagtgcatcagcatggacagcagcaatacgctttgttgtctgaccctgttgccacgcccttgcatcaacaagcagcggggagcaaaccagctgtagcacatccgtcgttgcctgagcctaatgcatcatctcacacagcattcccttggcaatctaatgctgctgacatgacccacgctggacggaatgcgacggctgatccatgggccgccgcccgcgcagctaactcgtatagtacagcatcagcaagcacagtgccgtctgctaaccagaatgcttacggcgatcaaggcaagcagggtgcgtacagctcttatggatcttcggcagcctcgtcccgtcctgttgtaccagggcacgggcatgacagaaatggctacagccggtctgccctggtggagtacccatgggacgggcaccaccagcggcactcgaggtcaccagatcctggcgtggtccgggactacgacaccgactatggcggtgcgcagggctacagtcagcagcctctgacgcagtggagtgcagggaaagtgcagcagcagagctacaatcctgagccgtcaaggcagtggagttcttcccaggcgcaccagggcggctacgcacccgccgagccgtcgaggcagtggagttcttcccaggcgcatcagagctacgctcccgagctaccgaggcagtggagctccgaacgccgtggctacgatgatgcggagccctcgaggacatggagctccggccagcagaacccggaggcgtccaggcagtggagccgcgggaagcaggatccttactacagtccgagccatggccgaagatcgtacgatcagcaccggaggagatagcaaaagcttgctgtattactactaccacattagctagatcctggatggaggcggtcggtcggtcggttcttgggagggtttgtttcatttgattcgatgtgaggccgggtattcgttgcatttgggctttgtgattgccaccacaagggccattgagaaaagctataggttattatgtatcgatgtagtttttgtcttgaaattaaaaaaaaatgtatctatctaggtagctggagagggaaaagaagaagaaaaaaaatgaatgaatgaatgatataactcaggaagggtcaagaggcctcccggctcgaattgattgcagtcttgaatgctgagtcgaacggttggcc

SEQ ID NO: 79668 - DNA, 614 bp, Zea mays
  Clone ID: MRT4577_172684C.1
ttttttttttttttttttggaaaaaatcctttgctatttaattttaaaatagtcgccaaatatgatctgaagccctcgaaagggaaacttgaatgcattagcaatatctcaatcaagaacatgcctacgagaacctatcatatgtacaaaggctcacttcgcgcacgtatacacaaattcaattcggacgcttcatctgtaacaaccaacagctaacatgttctacggaaaacatcttccacgctctctttccctgcacccagaccaagtaacgtgtttcacacgagggaagagagccacgaacctcatcgcgggcatacatctgctggagctggatcctgccccttgcgcagcagttgctgctgctgctgctgcttgccaccaccgccaccaatcaggaagacgcagaagcagaacgtggcggctgcaactgcaaccccgaacgagcagagcgcgccaccagcaccgttcactctcagtctcaggctccccacgccaaagccagccttgccgacgccctcctcctcctcctcctccggagtgcactgactgagactgacgccgccgccatcaggcgcagcagctccaaccagcagcgcgtcgtcgtcctgatc

SEQ ID NO: 79669 - DNA, 537 bp, Zea mays
  Clone ID: MRT4577_172685C.1
agcagtggtaaccaacgcagagactttttttttttttttttttttttttttttttgttttttttttttttttttttttttttacaaataatatttttttttttttaaaaaaaaaaaaacaaggccctaaataaaaaacaaagcccccccaccctaaaaaaaaaacaaaaaaggaaagcgccaaaaaaaaaaaaaggaaaacaggcccccccaaaaaaaaaagggggcccacccaaaagggaagacaaagggggggggggaaaaaaaagggggagcggaggaaaaaccccccaaccaggaaaaaaatcaacaacccccggcccaaaaaaaaaaaaagaaaaccaaatgggccccccccaaaatcaacgggagcccccccccccaaaacgcaaaggacgcggaaccaaaggggggggccccaagacagtccttaaaacgggccgcccaaaactttttcgccttctggggaaaccaaaaacctgcgccaccctaggcgaaaaaaaaaagccgccaacggagggtccgacacaccgggtgc

SEQ ID NO: 79670 - DNA, 1702 bp, Zea mays
  Clone ID: MRT4577_172686C.1
tccttcggcacgggtggcagaggccgaccccagattcattctcttctcgctgcacgccgcactgcgccagcgtcagcatgggcggctgcggcctcggacgcggccgccgcaccgcctgcctgctgctgctcctcccgccgcttctcctgttcgccgtggccgatgccgccgcctcggggaaggagaagcagggggtgtccggtaagctgcggttccggcgggagagcgggacgttcaaggtggtgcaggtggcggacatgcactacgcggacggccggagcacggcctgcgaggacgtgctcccttcccaggtggccggctgcaccgacctcaacaccaccgccttcctctaccgcgtcttccgcgccgaggaccccgacctcgtcgtcttcacaggtgataacatctatggtgctgattcaactgatgcagccaagtctatggatgcagcaattgctccagccattgacatgaaactgccttgggctgctgtgatcgggaaccatgaccaagagggtacgctatcgcgtgagggtgtgatgcgtcaccttgtgggcatgaaaaacacccttgcaagcttcaatccggaaggaattgaaattgatggttacggaaattacaatttggaagtttccggggttgaagggacatccatggatgaaaaatcagtgctcaacctgtatttcctggacagcggtgactattccactgtgccgtcaatcaatggttatggttggatcaaggcttcacagcaagtctggttccaacaaacatcttcaagtctacaggcaaagtatatgaataagaacccgaaacagaaggaaccagcacctggccttgtatttttccacattccactaccagagttcagcagttttacggcatccaatttcacaggagtaaagcaggagggtatcagctcagcatcaattaactctgggttctttgcctccatggtggaggctggagatgtgagagctgcctttgtgggacatgatcacattaatgacttctgtgggaagctcagtggtattcagctctgctatgctggtggatttggttaccatgcctatgggaaagctgggtggtcaagaagagcgagggtactgtctgtgcaacttgagaaaacagacagcggtgaatggcgaggagtcaagtccatcaagacatggaagaggcttgatgataaacatctgagcacaattgactctgaggttctctggaacagaggctctaatgggaggcgcgggaaaaatcctgatggtagttaacttttgatgcagacaggaatggtgctccataagggatctctacatcggtgtgtattgttggatggccagtttactatagaatcagaaatatgcagaagtgtgtacatgggggagaaggtcaaatacagacacatacacgcaggtttctgctgttgcatttttccatgttattagaaaataagtaatcaaaattcagtgctgctgtcaattattgcaggtggtctcatagactcgtatatagtgtggtcaaaggaaaacgagaatgcaatgtcattgtagtccatctctcgtgtattgttaaactcggtcggaaagggaaaaactgtcctcccggtattatattaaaaaaagaccgaaacatggtttctgccgagaaaaaaaaaaaaaaaaaaaaaaaaaaaaaagggcagccgctcgcgatctagaaccga

SEQ ID NO: 79671 - DNA, 633 bp, Zea mays
  unsure (1)..(633): unsure at all n locations
  Clone ID: MRT4577_172687C.1
ctcggcagaaaccatgtttcagtctttttttaatataataccgggagaacagtttttccctttccgaccgagtttaacaatacacgagagatggactacaatgacattgcattctcgttttcctttgaccacactatatactagtctatgagaccacctgcgtgtatgtgtctgtatagaccttctcccccatgtacacacttctgcatttctgattctatagtaaactggccatccaacaatacacaccgatgtagagatcccttatggagcaccattcctgtcattagagcctctgttccagagaacctcagagtcaattgtgctcagatgtttatcatcaagcctcttccatgtcttgatggacttgacacctcgccattcaccgctgtctgttttctcaagttgcacagacagtaccctcgctcttcttgaccacccagctttcccataggcatggtaaccaaatccaccagcatagcagagctgaataccactgagcttcccacagaagtcattaatgtgatcatgtcccacaaaggcagctctcacatctncagcctccaccatggaggcaaagaacccagagttaattgatgctgagctgataccctnctgctttactcctgtgaa

SEQ ID NO: 79672 - DNA, 318 bp, Zea mays
  Clone ID: MRT4577_172688C.1
aaaaaacacaggctaatgtagtaacaaatgggcaaaataatacagcatccctttgggtggtatacatgttaatccgaatacaaacttttttttccaacttatgttggaaaaaccacaatctctaaaaaatgccccgaaataatcaccactacacatcttatttaaaaaccaaaaggagctagccacccccaggaataaaaactaaaaacatgacttaaagaaaagaagcccctcaaaaaatgtttttgtatacccttcctcctcctttaacaaattgggggtgtaaaccacaccgctggtcaactagacaaaactaac

SEQ ID NO: 79673 - DNA, 1849 bp, Zea mays
  unsure (1)..(1849): unsure at all n locations
  Clone ID: MRT4577_172689C.1
catgaactgccttgggctgctgtgatcgggaaccatgaccaanaggtacgctatcgcgtgagggtgtgatgcgtcaccttgtgggcatgaaaaacacccttgcaagcttcaatccggaaggaattgaaattgatggttacgngaaattacaatttggaagtttccggggttgaagggacatccatggatgaaaaatcagtgctcaacctgtatttcctggacagcggtgactattccactgtgccgtcaatcaatggttatggttggatcaaggcttcacagcaagtctggttccaacaaacatcttcaagtctacaggttaacaagttactgacattcttttgggaaacgtgttcatcttagcccattgcactatgcttttcctttttgcctgatacaacaagctcaaacaaatcaggattattgtttggagattatttttcttcacttgtgagccatctactaccattatagaaacaatatcatagtgctaaattaaatggtgcattggtttcaacgagcatacttagaaggttcctaaaaccatgggttgatgggattagcaattgtacactaagttatcagctgtaccaagcttaactctgcaaaatgctatatttaacccttctggagtcttaagtcagggnacatgnngcttgctgaaacaaatgtatctattgttggtaatgctatagttcacaaaagtgatcataccaaaaatgccggattaaactaccaagaatgcattgacactcatttgtgtacagaagagcgtcattgttctatgttatcgaccacaattattcttgaaaatgcaggcaaagtatatgaataagaacccgaaacagaaggaaccagcacctggccttgtgttcttccacattccactaccagagttcagcagttttacggcatccaatttcacaggagtaaagcaggagggtatcagctcagcatcaattaactctgggttctttgcctcctggtggaggctggagatgtgagagctgcctttgtgggacatgatcacattaatgacttctgtgggaagctcagtggtattcagctctgctatgctggtggatttggttaccatgcctatgggaaagctgggtggtcaagaagagcgagggtactgtctgtgcaacttgagaaaacagacagcggtgaatggcgaggtgtcaagtccatcaagacatggaagaggcttgatgataaacatctgagcacaattgactctgaggttctctggaacagagggtctaatggtaaaacactctcctatgcctggatatgatacttaactcaagcctgccatagtaactgtagagtaggagactataggtgccttcggtgaatgattctcataaaaggggggaaatatctaggacaagtgatatgatgtttgatatatggtttatttcccaatgacatgaagttattcttttctatgcaacaactaatttatgaattgcctgacagggaggcgcaggaaaaatcctgatggtagttaacttttgatgcagacaggaatggtgctccataagggatctctacatcggtgtgtattgttggatggccagtttactatagaatcagaaatgcagaagtgtgtacatgggggagaaggtctatacagacacatacacgcaggtttctgctgttgcatttttccatgttattagaaaataagtaatcaaaattcagtgccgttgtcaattattgcaggtggtctcatagactagtatatagtgtggtcaaaggaaaacgagaatgcaatgtcattgtagtccatctctcgtgtattgttaaactcggtcggaaagggaaaaactgttctcccggtatt

SEQ ID NO: 79674 - DNA, 308 bp, Zea mays
  Clone ID: MRT4577_17268C.1
aaaaacccgtacacatgcctttattgttgtccaaataaacacaaactcatacacgtcaatacgtactgagtacaccatcattcgatttaattctttataaggccggccggtcttcaaaaacctaaaaccggctaccaaaacccaagttaaagaccccacccttttactttggagagggaaataaaaataataataaactggccacccatcgaacccctgtgtcccgcggtcgttttccccggccccgcttatcggcccggggccccaccccggggtgacaaaaaaatttattccccccccgcaatggc

SEQ ID NO: 79675 - DNA, 649 bp, Zea mays
  Clone ID: MRT4577_172690C.1
ccggccgggggcggtacacgcacttgtggcgagtccatccctcaccatgtctggcgcataaggaggcggagctcgacggcgtgctcgctgtcagcccaacctatgttgacaagatcatgaaaacagaaataccttttactgtgtattattaggaccatgaaggagctgattttgatggacatcaatcctcacacttcatcgacacattctcttatgcccaaagctaacgttgttctatactgttctgctacaagctgaagataggcatcatattaaacacttgtgtatctactatatgctgccaagtgttgtggcgaatcaaggaggacttgaagatggctatcgcgtgtcatcaatgacaggcccaagcgaatcgtcaatctgttgaccacattcacactatctcctctatagcaggcagatgaacatggcccccagactaaaaatatattgacatgtgagcagcgcttatgccaaggcctgctactccatatctctagcataatacctgtaattcacataaaagctagtgcgcaatgcgctgaccttgcactatatctgtggcatgaccctaagcatgctgctgagatctatgactgcacacaagaaactgggaaccgggacttctattatccattgactggcacag

SEQ ID NO: 79676 - DNA, 410 bp, Zea mays
  Clone ID: MRT4577_172691C.1
tttttttttttttttttttttttttttttttttggtttttttttttttttttttttttttttctttaagggagggggcaagcaaaggcacccccctttaacaaaaaaaattatggttccttctccccccaaaaaaaaaggagagggccccaaaaaaacaaacagaccaaaggggaacaggttcctccctggggcccagaaatgagacgcaaaaccccaatttagttcctcctttaacaaaattttaaatctaaagaaaacccgctggtagccataaaagttgggggaaaaaaaactcctcaattgccggaaagggcccccatcttattcaaagggggttcttgtcgggcttcttgcaaaaccccaaaggccaaaaacccccggtttgcccctgaaaagtcgtaccacgat

SEQ ID NO: 79677 - DNA, 1588 bp, Zea mays
  Clone ID: MRT4577_172692C.1
ttgggaccctcgaggccggccaggccggggaaactatagaagtccggccgggccgggaaaagcttgctcccgcacggccgcaccgccgccgacctcgccgccggcaatggcgtggctcgcgcgctccatcgccaactccctcatcgctactgaggaagaacccgaagcaaccgaccggggcccctcggcctccccgggctcgtcctctcccccgcgcggcgtccgcgaggacctctccgagctaaccggcgcgctcgcgaaccgcttccagggcatcgcctccttcctcgcgcccgcggcgcctgggggcggaggcgccctgcgccggccggacccggccgagatcgcgggccggttccgcgccggcctcgcgcggctcccgggccgccaggccgtagcggatctcgccaggatcgcgtcctcgctcctgccccctgagggcgatgcagactgggcggaggaggcagcgggggtcaccgaagaggtggtcgcgttcgcgcgggacgcggcatcgcggcccgagctatggctcgacttccccctcctccccgacgacgcggactcggatgattttgacatgactgatgcgcagcaagatcacgccctggccgtggaaagcttggcgcccgagctggctgatctgaggatcgagctctgccccagccacatgagcgaggactgcttctggaagatatacttcgtactgctgcatcctaagctcaggaaggatgatgccgacattttatccactccacagattctggaagctagggacaagttgtcgcaggaggtgcggtaccggacggagttacaaggcagccacggcgacaccgtacctgtggctctcggcgatgaaggtggcgtttcaggttctcttgtagagggtttgggcgtattgaagggccaagacgactccgccatgctcacgtctttcagcaacacggactacggcaagccacaaccgatcgaacaggacaaggatattgtatcggttcatacgatcggcgagactggagctgtttcttcggataataccggtagcagcggtgtacctgtacagctagtgcccgtgtcgagagacaccaccaccgtggcgccactatctaggacggaagaaagtacgcacgatctctctacggaagacgaagcagcagcagaagaagaagaggagcagggtctgcagatgtctgagatacctttgacggacagctctccccctaaagatggtcaacagaaacaaccactggctgccatcagtgagcgatcaggagctgactatcagaaaagtgataatgttgaggatggcggcgacggcgtcgaagatgacgacggggatgaatggttggaagaggaagcatgggacccgggaaacacgcaaattccgatagcagatgatgaagacgtgtctttcagtgatctggaggaggaagacgatggtgcggcctgacatcgcctgtaggcttggcttgaccgtactgcttacgtagtctgtgcttcctgttccgttatacgattggtacaattgtcttggttgatgtctaatacacgctctcatagtctcaaaaaaaaaaaaagttctagatcgcga

SEQ ID NO: 79678 - DNA, 124 bp, Zea mays
  Clone ID: MRT4577_172693C.1
atatatcaaaactgaatgctactcgtagtattctacatcagtttccagtctaactaatgtcacactacatacatctaacacaggcaactaacagtaattcgagttcagggcacaaaagcacata

SEQ ID NO: 79679 - DNA, 422 bp, Zea mays
  Clone ID: MRT4577_172694C.1
gtcgcttcagataggatggctcctctgctctccggtgccagagtggcatcgtgctcgatctgctgagttgccacttaacatgccttagcggcttacactataggcttgcactgcggcttgattctggtcatctttgtcttcaatcttgtcactcacaaggtcttccccctgtggttttctagattttccggtcggaaatctgccatcgccttagcgcttgcactagcggcatgatatggctttcttggccatgcttgcttggataagctttggcttcaggcttgaacctatctcgcattgcacgatgtattgttgctagaatccgagcgcaagttctgtgagctgaccactatttcgcggatcgcctggggtggcgcgatgacatctatggcagttgaggcagatgggaatctgcaatacct

SEQ ID NO: 79680 - DNA, 438 bp, Zea mays
  Clone ID: MRT4577_172695C.1
aaaacgcaaattttacaccaaaaaattttagcccatcgggggggacaggtggctcggaaaaaaaaaacaaaagggggccccccttccaaagggggagctaaacaatatttttccacaggggacaccaaaagaaaaccgggccccctaaaagccggcgggggcccttgtaaaaacccccccgggggttttggagtccaagggggaaaacaaaactccggggggggttaaaaccccggggggggattgatccccaacatgcacaagagtcctggtatcagggggaggagaagcactttcccaacgaaaggtcctttgaggagactcgatttgacgagggactccccatcgcatttttttttttcgccctggacaggttttgggccggtaggttttttttccgcaagagcctacccaacggcaggcccgaaggggttttca

SEQ ID NO: 79681 - DNA, 590 bp, Zea mays
  Clone ID: MRT4577_172696C.1
acaaccaaagaccagttacattgtcaatatacaccacaaacataatatacaatgactaaaaagcaatgtgatcctttactagtattcgactctagtatatatctatcaatacaaatttctatcttctccaatacttgacatttttatggcatgaataggagggtccatagtagtgggtaaaatttcgtagaatccaattgatcaaattattaaccgtgtaacgtcaacggaagtatttgtcatccctgcaatagtgaattcatctatcgtaacacaggcagattattgatatgatttaacaccccactatgtttatactttatactatgaaacataatcaacttgccaataaagaaaaaaggataatttagggattgtagggacgagaatattgaaggatcacacaaggctaactaatggatggtttctggacagtaaaggtcccaaataaaaaattcttcagtgtaaaagaggattaatgaaatatataaattgcaaaagatgtcaagtgtaagataacagagagaacatctacagaagcatataacaatctcaatatgctcagcaaaaaatgagatcaaactacatgc

SEQ ID NO: 79682 - DNA, 304 bp, Zea mays
  Clone ID: MRT4577_172697C.1
gagctcattagtcggcggccgccctatatttttcatgctttgtttttcttttttaaagaatacggggatgcacatcaaatatctttcaaaatttaaaccatgacaacaaatgggtgctacctaatctcacgacggagtgaggactaattactgtcgactgatcaaataaaacggttggactatgatgatggatacacggagggccacaattgggtttaaaccttgaatgcacggttgttcctactgtcacgagcctttttgagcttactttacttggagcgcacaaactgtttgaggtggttgt

SEQ ID NO: 79683 - DNA, 165 bp, Zea mays
  Clone ID: MRT4577_172698C.1
gcccacaagcagccggcgacgtcgagggggggcttttataaatgtatatcgagtactcccaaaaggcactgacggtacgcaccaaggcaccagccaccaacgcgtggctggtacacggacgggcccacaccggagagcggacgacgcaacaactgacaggacacc

SEQ ID NO: 79684 - DNA, 191 bp, Zea mays
  Clone ID: MRT4577_172699C.1
atgaggaaagctgcgcgcgcacgcaggcaccggatcctgtatagcgggcgcgactccacgcgttcgatcgcgagcagacagcagggcacaacaactacaacaacttgtgctagcgaaccttgctggctactctcagccacagcagtttcttccattcaaccaactagctgcaaagaactctggaaattatt

SEQ ID NO: 79685 - DNA, 249 bp, Zea mays
  Clone ID: MRT4577_17269C.1
agtccatcggatagtttatgaacaagagactgtacacacagggcgtcgagaagattagtacaccgtgcgttttacagagcatgagacaaacgagtcaagttgatatccatcagacaacaaccacccatggcacaacagaacgaacggctatagatttaatacacggaacaattggatacatagcgttcatgtgcaaacactaagcaccaacggcaatcaataatgactatgcgtcccacaattggtgct

SEQ ID NO: 79686 - DNA, 305 bp, Zea mays
  Clone ID: MRT4577_1726C.1
gccggccggtccgggttacacatagatgagccgtagtgtttttgccgagacgtgttttttgtgtgtgtagacatggtttcactggaatgtgtttcttgtaattctgttgtgccatgatcagtgtacaactgtgcattgactggtggtacatgaaactggttccccagtattccgtgaaactgcaagccggatttgctgttcagattgtgttgttacagattgtgtccttattaggtcgttttcatatctctgaggaatggatgattccagaatgattctaaaaaaaaaaaaaaaaaaggccccta

SEQ ID NO: 79687 - DNA, 598 bp, Zea mays
  unsure (1)..(598): unsure at all n locations
  Clone ID: MRT4577_172700C.1
cggcgggcagggccaggtcatcggcgggagcgtggtgggccccctggtcgccgcggggcccgtcgtcctgatggctgcgtcgttcgcgaacgccgtgtacgagcggctcccgctggagggggaggaagaggagacagcagccgcggctgccgctggcgctgagccacaagatcaagtggcgcagtcggctggacccccgggtcagcagccgacggcgtcccagtcatctggtgtgaccggaggcgacgccgccggcggtggcggcatgtcgctctacaacctcgccgggaatgtaggggcctaccagctaccgggagacaacttcggaggctggagtggaggcggtggcggcggantccggncaccgttttgatccatgcctgccttgagatacctgattcgcatccacatcatcacagagattcaaatggtgtgccgacaagctcttgccatcggaaaccgggggttgaagctaggctatggagctgagcctgagacttgtacatgcacgcatgctgcattatcgttcataggagagacctttcatttaggcgctatagtntaatgcatgcgtttacnccgtgaggaggatgcactg

SEQ ID NO: 79688 - DNA, 421 bp, Zea mays
  Clone ID: MRT4577_172701C.1
catgccggcaacgtcgcggtagcgcctgagcgtgaggagcaccaacgccgatccggtccgggcgatggtcaccaggccgagcgtcgccgacgcgtcattcccatcctcgtgttggacggaggaaagtagaggatcaaacgaatgtggcctcagctgaagtgctagacctcggcgataatggtggccatcgcggggggtgaggacgactagatgttgggtaggcgcagctgctgccgacagaggctgatgagctgttcgtggacacaggggtaggaagggaatgtagattctacaaatggccattaactccgaagccgataccaaacgttcaagaagaccagtattataatgtcagtgtgagaattgcgttcttcggaatgccatcttttttaagcccgttgtagccgatgccaacgttgaa

SEQ ID NO: 79689 - DNA, 395 bp, Zea mays
  Clone ID: MRT4577_172702C.1
ggactccagaactagaacccagccactcccaccagggtggatacgatcacccaggcccacccccgtacgtggtacatcagcacttgctatcgcccgtaacgctacacccgcagtcgataatacgcctcgctacagcaggatcgtttcaacccagggcagatgacgaagacgatgatgacgagtataataaatcttctggtctggttggtctaagggaccgtctcagttaaggaagagtagatgcgtgactgggaggttttggtgcaagaggtgtagaagggttgttagtaggttggtcaggtcaacactccttcgactacattcgttactacgttcaaggaggtgcactctaggaacgtgacgactaagaccggaaaggaggccgtcagcagtcc

SEQ ID NO: 79690 - DNA, 145 bp, Zea mays
  Clone ID: MRT4577_172703C.1
actcgtgcgcgccgtgggcaactccgtcccgtcgtctatggggactgaggcctgcagcgcgggtggttgcaggcttagccgccacaggtaatcttgttaatgactcattctcgagcaaagtcaccagtcatcagtcagctgctgg

SEQ ID NO: 79691 - DNA, 193 bp, Zea mays
  Clone ID: MRT4577_172704C.1
ttttggtttttataacagacctaattgggtataacacagacgacccgcgtccatcacaaggccaccgaggctgcatgcactggacggacgcacgcaacgaaggtacttagaagaacatccggacccgcagctcaccatgcatgaaacaactgccttaatacagcaccaggcttaaccagacataagcacatcc

SEQ ID NO: 79692 - DNA, 193 bp, Zea mays
  Clone ID: MRT4577_172705C.1
cccagcgtgcgccgaccattattcagatttttcgtacatcgccataatgttcgataaagtatatattacaacgtgggtaggccatatcaacattcataactattgtgcattttagtactctatatgtgtatcctttatatgaatagatacactgtacttataatagctcatgtaactcatccctttgctcctt

SEQ ID NO: 79693 - DNA, 275 bp, Zea mays
  Clone ID: MRT4577_172706C.1
ttctttttttttttttttttttttttcatttagggaagtgggggtttttttttttctttaataaccaaacccatttttcgtatcacccctatattaagcttggtgtacggacaccaattcattttgacacatcgagagcatcatatgtacccactgaatgggggtgatattatttttgataacaccggcggaaaaaagtttttcacgttacgtgccttggcattagtgggatacacctgagttttcgcttatctgagtggtttatttctaggcac

SEQ ID NO: 79694 - DNA, 461 bp, Zea mays
  Clone ID: MRT4577_172707C.1
gctcccgttttcgaaaaaatattccgctcataattcttcaccggcctgcctcagagagagaaaaagcggagattagcggcggcgatggcactcccggcgtcgagctccggcctcttccgcttcgtctccccgcgcagccgcccccagtccaccgacatcgtggccgccgcctcctggggagtcttcgccggcaccgccggcctctacctcgtccagccatttgactggattaagaaaactttcttcgagaaaccaccccaaccagaggcataaaaggcttgcaagtctgcaactttgatgtaggcaatccccacgagggagacagggaacagagaaactgcttggttcacctgtgtctatataatactcctgtgttatccaacatgcatgttttaaaacctgtggcaaatatatcttgctgattaatattggaccaaaaaaaaaaaaaaaaaaggccccta

SEQ ID NO: 79695 - DNA, 788 bp, Zea mays
  unsure (1)..(788): unsure at all n locations
  Clone ID: MRT4577_172708C.1
ctctccgaccgtttgtccctctcttgaattcagcaagtttcgcgcgttcactcattcacgcccgtactgctgttcagcgtccagtcactcctttcccacccaccaaccactgccctacgctgttgaacgacgttacgaactctcaccctatatcattccaccaaacacacccacacaaccaacatgcgttactcatctgccgtggtgctaagcaccctcgctgttggccaggccgccgccgccaacacccacaaccgtcacgctagcttccacgctcgccgcgaagctgccaagcgcaacgagcagctcgactgggacaagctcacctacgacctcaaggacgtcaagtgggacgagatcaactggagctccgtcttcgcctcgcccgccgcaaagcccaccccggccgccgagaacaagcccgtagccgttgtcactcccacccctgcggcgaagaaggagactcctacttctgccgcgccatcaagcaaggctgcggagacctccaaggccgctgagccctccgcctccaagcccaacaactctgtcggcaacctcgtcgaggatgtctttgctggtgtcgccagcatcgccaacaagctcggcgctcagatcggcaagaacgacaagtcggacaacggcggtatctggatcggaggcgacggcgcatggngtatgggacgtgaccaactctggcagtaacgacgccgtcttctactgctggaaggccaacggcttcagcggcatgtccatcaacaagntcgtccctgatgtctctgtcggcatga

SEQ ID NO: 79696 - DNA, 670 bp, Zea mays
  Clone ID: MRT4577_172709C.1
gcacgagatattccgctcataattcctcaccggcctgcctcagagagagaaaaagcggagattagcggcggcgatggcactcccggcgtcgagctccggcctcttccgcttcgtctccccgcgcagccgcccccagtccaccgacatcgtggctgccgcctcctggggagtcttcgccggcaccgccggcctctacctcgtccagacaaagaagggaaaaagactggtggaacaaggaagccgcagaattcgaaagataacaagtgatatctacagcaaggcccatggttggaagccggttgacaggcgtctccagtgacattttgctgctgataatacatcttttgcttctggatgtattcagtttgtctgcttttggtagataaaaactagcttttagtcatttctggtgatgcgatgttcctggctgcttttgggatctatcctttgtagatattcagtgatgtctgttagactgtcggacttcttctggtttgctgtgttccttcagttgggtttcatacccctgtgtagctgataatgtggtaggcttatcggcttgtgactgttggatttgtcgtgaattctgtaagaactgtgtttggtttctatttcttaatgaaatagggggtatcccattgtcaaaaaaaaaaaaaaaaaacccgcggcc

SEQ ID NO: 79697 - DNA, 1344 bp, Zea mays
  Clone ID: MRT4577_17270C.1
atggccatcacttttcagcacaagatcgctctccgccctggatctgtgttctgcttcagaaccatctcgttcgtggcagacgaagaagggattctgcatcgtatagcggatccaccggagaagaagtcttccttgaaaatctctgaaaaagccggaacaaagcaggaaataatgcaacctccagcgctccgggcaaagaccacctcctgcaagccaggagcagagaattcgtttacccggagaaccccattgtccacctcatccacggaaagatggacactgattacaaggaaaagagaagcgaatgagataaaggcccgtcaagctgctcttctggcacctccgccctcaaaggagaacagaaaaaagcttgtcgtcacgacaacgccattctaccccgacgtcctcttcatcggggggagtggaatcgtcccccatcttcgacgacgaaccaaccccggagaacgagacccggcacagcctgtatcacgagacgagatcttggaggtgggagaaactcctgatgagcgagtcttcagggaaaggaggaactcccgccgacgtgatcgtcggcaagctcaagagcaagccgagcaggaggcgagacaacgccgagagaaccctctcttcggacgaaacctgaacaccgacttcacccgatccatgaacacactgagcaaggccactagggttgagtcagaaacgacctcaactggtggcacaacctggggatggtcgaggcagcacatcggcaactcccctccccaggatcgacaccacaatcgtcgacaggaggacacatgtggagtatccatgctcactccacgtctcagggccattcagtggcccccaaacttcaaagtctccaacgtcgacaaatacgagcctaagcaggacccgggaggctggttagctgtctataccaccgctgctcgggccgctggggcaactgaagatgtgatgactgtgtacttgcccatcgtcctcgggcaagatgcactgcaatggctacgacacctgccccgacactgcatcgacgactggagcaattttagtcgatgttttatcgccaacttccaatccctctctgacaagccggtgcagccatgggaccacaaatccatcaggcgccgaggggatgagactcttcggtcataccacaaaaggtttcagaccatgagaaatcgtattcccgaggttgtagaagcagctgtgatcgaggacttctaccgaggatctaatgactcggccttcatccaagccatactacagaaagcgccgaccacttccgaacagctgttcagggaggcggacctctacatcaccaccgatgagcgtgcctag

SEQ ID NO: 79698 - DNA, 817 bp, Zea mays
  Clone ID: MRT4577_172710C.1
ccggccggaatttccgctataattcctaccggcctgcctcagagagagaaaaagcggagattagcggcggcggtggcactcccggcgtcgagctccggcctcttccgcttcgtctccccgcgcagccgcccccagtccaccgacatcgtggctgccgcctcctggggagtcttcgccggcaccgccggcctctacctcgtccagggatccgtttcccggcctggtaaacgattaagcactctattggggctgcccagtcaaacatttcctctggatctaatgatatggtgggcagaaggggatgcacatcccacgttttcgtgatgacctagccacctggaattgctatgtcaaacgtctctcaagaatccgaagatagctgcaataaacaaagtacttcaaacgttgaagtggagagaaactcgataccagacaaagaagggaaaaagactggtggaacaaggaagccgcagaattcgaaagataacaagtgatatctacagcaaggcccatggttggaagccggttgacaggcgtctccagtgacattttgctgctgataatacatcttttgcttctggatgtattcagtttgtctgcttttggtagataaaaactagcttttagtcatttctggtgatgcgatgttcctggctgcttttgggatctatcctttgtagatattcagtgatgtctgttagactgtcggacttcttctggtttgctgtgttccttcagttgggtttcatacccctgtgtagctgataatgtggtaggcttatcggcttgtgactgttggatttgtcgtgaattctgt

SEQ ID NO: 79699 - DNA, 839 bp, Zea mays
  Clone ID: MRT4577_172711C.1
gtatattccgctcataattcctcaccggcctgcctcggagagagaaaaagcggagagaggcggcggcgatggtactcccggcgtcgagctccggcctcttccgcttcgtctccccgcgcagccgcccccagtccaccgacatcgtggttgccggctcctgaggagtcttcgccgggaccgccggtctctacctcgtccagggcaggatccatcgtcctgctcgcatctcttatccgccgcagctggttcttctggatcgaggttcgtcacatgtgtacaaggctcgtaggctcaacagaagattgttgcgtgtgatctttgatgagtcttctggatctgccgatgttatatctttcttagggatccgtttcccggcctggtaaacgattaagcactctattggggctgcccagtcaaacatttcctctggatctaatgatatggtgggcagaaggggatgcacatcccacgttttcgtgatgacctagccacctggaattgctatgtcaaacgtctctcaagaatccgaagatagctgcaataaacaaagtacttcaaacgttgaagtggagagaaactcgataccaggtcattaataagttactgatcctttttggatgtggtgctgttatttgggctatttggcgtactcgtaatgattgctgcttcaatgctaggctgattgatgatctatctaatgtgattttctcctgctgttattggattgatgcttggtctattcgacagacaaagaagggaaaaagactggtggaacaaggaagccgcagaattcgaaagataacaagtgatatctacagcaaggcccatggttggaagcc

SEQ ID NO: 79700 - DNA, 218 bp, Zea mays
  Clone ID: MRT4577_172712C.1
aagttgattcatattggaccaaaaaactggaaaagacagcgaacaccttatatctgcatagaaaattgaacactggggaaggaacgtatcatcatcctggtacatacatggaccagtcctcgctctcgggcatacgagcacctagataaacctagcggcggccggtgggccgcataaccatacccggctcagttggctggcacaaacctcgtgacata

SEQ ID NO: 79701 - DNA, 578 bp, Zea mays
  Clone ID: MRT4577_172713C.1
cccacgcgtccgcccacgcgtccgcccacgcgtccgcggacgcgtgggcggagattagcggcggcgatggcactcccggcgtcgagctccggcctcttccgcttcatctccccgcgcagccgcctccagtccaccgacatcgtggctgccgcctcctggggagtcttcgccggcaccgccggcctctacctcgtccagccatttgactggattaagaaaactttcttcgagaaaccccaaccagaggcataaaaggcttgcaagtctgcaactttggtacatcacttttgtccgggatggttcctgactgaagagaacttggataactcagcaaataatacgagaccccctcgtgtttccttgtttgttttttattattcagatgtatgtaggcaatccccacgagggagacagggaacagagaaaccgcttggttcacctgtgtttatataatactcctgtattatccaacatgcatgttttaaaacctgtggcaaatatatcttgctgattaatattggactatgatgtcatgttcgaatgttcccatcactaaaaggaggaaaaacaatgatggc

SEQ ID NO: 79702 - DNA, 315 bp, Zea mays
  Clone ID: MRT4577_172714C.1
gccagcccgcgactaagcctggtcgcggtactcctcagccaccgtcctcagcttgcgtctaggacgagtaaccctcctgggctgacgacgacgccacccttagatcatattagagccggcgaagagcgcccgatatccgcgcctgatatggtgtcggagttgtacaccaaggcgtacccgctggctgatgcgcaactgacgattggtatcatgcatatcatccagctggtcgtcatctgcaggcaactcaagaagggagctcacgtagcgactaataccctgctcagggtgctatcggaagccctaatgatggcg

SEQ ID NO: 79703 - DNA, 1407 bp, Zea mays
  Clone ID: MRT4577_172715C.1
cattgggtccctcgaggccggccgcgtccctcttcctccgccaggcgccagccgcccgctctccagcaatggcgtctgcctcgcacgccccgacgccgctgctcaaggacgagctggacatcgtcatcccgacgatccgcaacctcgacttcctggagatgtggaggcccttcttccagccctaccacctcatcatcgtgcaggacggcgaccccagcaagaccatccgcgtccccgagggcttcgactacgagctctacaaccgcaacgacatcaaccgcatgctggggcccaaggcctcctgcatctccttcaaggactccgcctgccgctgcttcggctacatggtctccaagaagaagtacatctacaccatcgacgatgactgcttcgttgccaaggatccatcagggaaggacatcaatgcacttgagcagcacatcaagaacctcctgagcccttccactccatttttcttcaatactctgtatgacccttaccgtgttggcgccgattttgttcgtgggtaccccttcagccttcgtgagggtgtcccaactgctgtttctcacgggctttggctcaacattccagactacgatgcccctacccagcttgttaagccccttgagagaaacaccaggtatgtggatgctattcttacgatcccaaagggcaccctcttccctatgtgtggaatgaaccttgcatttgaccgtgagctcattggtcctgcaatgtactttggtcttatgggtgatggccagcctattggtcgctacgatgatatgtgggcaggatggtgcacaaaggtgattacggacgacgggccgtatattgcgcccggccggcctcaccggcctgcctcagagagagaaaaagcggagattagcggcggcgatggcactcccggcgtcgagctccggcctcttccgcttcatctccccgcgcagccgcctccagtccaccgacatcgtggctgccgcctcctggggagtcttcgccggcaccgccggcctctacctcgtccagccatttgactggattaagaaaactttcttcgagaaaccccaaccagaggcataaaaggcttgcaagtctgcaactttggtacatcacttttgtccgggatggttcctgactgaagagaacttggataactcagcaaataatacgagaccccctcgtgtttccttgtttgttttttattattcagatgtatgtaggcaatccccacgagggagacagggaacagagaaaccgcttggttcacctgtgtttatataatactcctgtattatccaacatgcatgttttaaaacctgtggcaaatatatcttgctgattaatattggactatgatgtcaaaaaaaaaaaaaaaagaggcaaaaaaaaaaaaaagcggcc

SEQ ID NO: 79704 - DNA, 677 bp, Zea mays
  Clone ID: MRT4577_172716C.1
ccggccgggagggcgtgcgttttagggagacggaaccggccgcatattccgctcataattcctcaccggcctgcctcagagagagaaaaagcggagattagcggcggcgatggcactcccggcgtcgagctccggcctcttccgcttcgtctccccgcgcagccgcccccaatccaccgacatcgtggctgccgcctcctggggagtcttcgccggcaccgccggcctctacctcgtccagccatttgactggattaagaaaactttcttcgagaaaccaccccaaccagaggcataaaaggcttgcaagtctgcaactttggtacttcacttttatccggaatggttcctgactgaagagaacttggataactcagcaaataatacgagaccccctcgtgtttccttgtttgttttttattattcagatgtaggcaatccccacgagggagacagggaacagagaaactgcttggttcacctgtgtctatataatactcctgtgttatccaacatgcatgttttaaaacctgtggcaaatatatcttgctgattaatattggacgaaaaaaaaataaaaaaaaggccccatcactaaaaggaggaaaaacaatgatggcaacttggcgatgctttcctttcatcattatcgccaaaaaaaaaaaaaaaaagcggcc

SEQ ID NO: 79705 - DNA, 2306 bp, Zea mays
  Clone ID: MRT4577_172717C.1
atgatgcgtgagcctggcggccgggaggtgggcagtccgtatattccgctcataattcctcaccggcctgcctcagagagagaaaaagcggagattagcggcggcgatggcactcccggcgtcgagctccggcctcttccgcttcgtctccccgcgcagccgcccccagtccaccgacatcgtggctgccgcctcctggggagtcttcgccggcaccgccggcctctacctcgtccagccatttgactggattaagaaaactttcttcgagaaaccccaaccagaggcataaaaggcttgcaagtctgcaactttggtacttcacttttatccgggatggttcctgactgaagagaacttggataactcagcaaataatacgagaccccctcgtgtttccttgtttgtttttttattattcagatgtaggcaatccccacgagggagacagggaacagagaaactgtttggttcacctgtgtctatataatactcctgtattatccaacatgcatgttttaaaacctgtggcaaatatatcttgctgattaatattggactaaaaaaaaaaaaaaaaaagcggcctaaatcagtaagaactctgtttggttgatcaaagatgtggtgtttgctttgaaacacaatagtgcaccgggccccgacttcccttctgaattttttcaggagttttgggatgtgatcaaaagtgatttgtttaatctctttaaagcttttcatgatggttctctcaacattgagagactaaattttggtattgtcactcttatccctaaggtgcctcacacaggtgattacggaccatctgggcctgggtgtgaagactggcctgccttacatctggcacagcaaagcaagcaacccgtttgtgaacctgaagaaggaatacaacggcatcttctggcaagaagagctgatcccgttcttccagtcggtctcccttccaaaggaggccaccaccgtccaaaagtgctacctcgagctggccaagcaggtgagggccaagctcggtaaggtggacggctacttcaacaagcttgccgactccatggtcacgtggattgaggcctgggacgagctgaaccccccaaaaggcggagtccccacagcaaatggccctccaaagaagtaaaacactatgtagtgtaaacttcactcgttcatgtggaccgtcgtactgaaaggaaatactgttttggggttagtgctgatggactgagatcactccgctgtaactcgagattttcacgtcccggaaaccgccctgccggttttagggcgtttacatgttttttttttcatttttcgtgtgatacaacaggtgtaatgtcggattggattagaataaagtttatgatcttcatcttataaaaataaaaaaataagaatgggaattgcctgcaacagagaacatttgtatgctgacatcttcacctgtcctcccagtggcctccctatgaaatatttaggggttcctattgataacaaaaaactgtgcaaatctctatgggaccccatagttggaaagattgagaacaaactgggttcctggcaagaatccatagatcacttattttttcattgccccgtggccagatttatttggagaattatccaaattgctttcaagctgtcttctacccccaaaaacacagctgacctcttcggtccctggatcaatagtttccataaatctgaaaagaaactgatcctttttggatgtggtgctgttatttgggctatatggcgtactcgtaatgattgctgcttcaatgctaggctgattgatgatccatctaatgtgattttctcctgctgttattggattgatgcttggtctattcgacagacaaagaagggaaaaagactggtggaacaaggaagccgcagaattcgaaagataacaagtgatatctacagaaagacccatggttggaagccggttgacaggcgtctccagtgacattttgctgctgataatacatcttttgcttctggatgtattcagtgtgtctgcttttggtagttaaaatactagctttctagtcattcctggtgatgcgatgttcctggctgcttttgggttctatcccttgtagatattcagtggtatctgttagactgtcggtcttcttttggtttgctgtgttccttctggtgggtttcaaacctttgcgtagctgatattgcggtaggcttatcggcttgtgtctgttggagtgtcgtgaatcctgtaagaactatgtttgatgtctatttcttaatgaaataggggatttccctttgtc

SEQ ID NO: 79706 - DNA, 204 bp, Zea mays
  Clone ID: MRT4577_172718C.1
attaattggggatttttttataagtgtttggaatgcacagttgcagattattattactggctggagtgtaccatatatatcccagggacaaaacaacattacataaattgcttgataactgcgaagccaaattatccggtttagcgggacccccttaaatagagcttacacaaaatagccaacatgcaaattatttttaaaact

SEQ ID NO: 79707 - DNA, 244 bp, Zea mays
  Clone ID: MRT4577_172719C.1
gcatggggttatgtagaaaagcaatttattccattttaagcacttacacagttagtcatggagagtaacaggcctgctggtgaaacaggtcacccaaaatggagatggcatcaaactagtggtcaaggactaactcctaaaaaaaaaaaagcaactcttatcaaggattaatttaatttttaaaacaaatacaagttattgattcactcttctcaacttgacagtctacctgtggtataactgt

SEQ ID NO: 79708 - DNA, 366 bp, Zea mays
  unsure (1)..(366): unsure at all n locations
  Clone ID: MRT4577_17271C.1
ccaggatcatgtgggaccagctccgatgaagcttttccatttttcttaggcatgcaactccgatgaagctgctggccatgtcgtcctccgccggcctatttccatggccacgacaaaattgaggatcggttaccacctacctgcgtccatcggatgaacctatgtcgctgctgcttaactgcacattgagattgagattgtgtggttgtcgctgctgcttaactgcacattgagattgagattgtgtggtgttttgtttcaggttcagcctcaccgnctactgtggggaggacaacattgtagttntagactgctgctctacaagtacctactggcctacttcattttcagggtgcccttatttct

SEQ ID NO: 79709 - DNA, 318 bp, Zea mays
  Clone ID: MRT4577_172720C.1
gtacattgactatgtcggggaacaaccgggcgaagagtgggacacttaagtgcttatatacactggccattgggccattcaatacgacaacagggggcgaacagggacaaggaacctatatggggaaaacaggatacggggcctactacaacagggtaagggcggaaacctgggtttttgtaatgtcaagagatatgcgcttccacatgcaagaagttgctgctgttgccagagctgcccacgtggaaggagaggtcacgcccctgtagctttatgtggcgtgagttgaacgaggccgggacttccatgcactcttgg

SEQ ID NO: 79710 - DNA, 367 bp, Zea mays
  Clone ID: MRT4577_172721C.1
acaaagctatctataatctccataatatggccacagactatagatggctccttataatctgcaagtagcatgcgcagggatcctttctactgcacctggagactaacacctcagatatgcccttcagcagttattcccagcctgtggcaatgcagcagactacgaagctatgattcatggactaaacattgccatatcattggacatcaagagactgatggcatatccagatcctctggtggtcataagtcatataaataaagaatgggattgatcgaactatcccatggaaaaatactgcactgctgaccagaaactataagacaaatttagaggtccggaattccaccatgtatagagagatcga

SEQ ID NO: 79711 - DNA, 481 bp, Zea mays
  Clone ID: MRT4577_172722C.1
cctcgaggccggccgggccgggattgctccggatgctgcccgactgcggccacctgttcaccgggagtgcgtcgacccctggctccgccaccacccgacgttccccgtgtgccggacgtcgccggtgccgagccccatgccaacgccactcgccgaggtcacgccgctggcaatgtccaggatgtcgatgtcgtcatgacaacaggcacagaccggctgcttcttctattttccccctttattgccccgtactgctataccactactaatgtaatgtggtggaattggtagattggggctcatggcatttaaaaaaaaatggaatgagcgaaaatgttcaggatactaggaattagaataatattttcttgggtgcaattgtaaatttgggttcagcatcgttttcttttctccttcatgaaaaaggatccgatcgaattaggggctgacaaaaaaaaaaaaaaaaaaggcccctagggcc

SEQ ID NO: 79712 - DNA, 325 bp, Zea mays
  Clone ID: MRT4577_172723C.1
tcatacgcacacccagacagcccgacagtacccagctgtgcgttgactcgcatgacacggcactcactccactgtcggcatcacagaccaaatccctgccagcgcagtcgccatggtcctgaacttccacctgcagggccggcacggaaagaaccgcgtccgcgtctcccgcgtgtggcgccggacggccacggcggcgggcgacgcgatggttgagtggaactgccccgccagcgtcgtctaggactgcctgcgcttctacacctgcagcgacaacttcgccatcgtcggcacagattccattaggaacaccgtgtatgtcaag

SEQ ID NO: 79713 - DNA, 518 bp, Zea mays
  Clone ID: MRT4577_172724C.1
cgttgctgtcggcgtcctggttgctttccatcagcattctgtccaccatggatagctatcaacgcttttaataaagcatgtatgtgagttaagcactctgcaggtccaagtaatgaacttgcacctctgtccctcatatcaactataaaatggaccactaaagatacagttttagatgacgcggagatgtttctgcaaaggttaagcaagatggcctggcgaaccttcacgtcaccttctttatccaccaagctgtacaaaatttcccatgtatgaagtgatgaaactgagaaaaaagttgaaataatgcaaactagatctagcttccattccaaaggtcgtaagaagctacccatacttccactcgcactagctgtgacagaatctacttcactagagtccatcacatcaagatccatatcagcaacactacttttacaggccaaaacaggatttaggtcctctaaattgatactagatgttggtagcattttaccaggactctctgcatcaaaatt

SEQ ID NO: 79714 - DNA, 606 bp, Zea mays
  Clone ID: MRT4577_172725C.1
caggtaaagggccaatttaaacggggccccggggttaaaaaaattgggggcccaaaaaaaaaatttttgggggtcccggagggtttaaggaaaccgggggggcctttccttttcccttggttttcaacgggggggtccgggggcttaaagtttttataaacccccccttaacgggggggggtttaaaaacttgggaattttgccccaaaaacttttttttttaaaaaggggccaattttctttttgggcccaaaaggcaaatttggggtcccaaaaacaaattcttaggttaaaaagtttcccggggttgggttttttgaccaaaaaagggtgggccttaaaaaaggggggggggccgtggaaaacccccaaggattttttttgcccaaaaaaagggccaaaccatttgccttaaaaaatttgggaccttttttttttttgccccaaggtttttaagggggggggaaaaccatgccccaattttttttttttaaattttgtgtaaaaaaaaaaggggaaaattttttcccccccttgaaaaaaaggccttttttcacccggacttctttttaggggcctgaaaaattttttagagtttttaaaccc

SEQ ID NO: 79715 - DNA, 446 bp, Zea mays
  unsure (1)..(446): unsure at all n locations
  Clone ID: MRT4577_172726C.1
aattcggcacgaggctcggattccgacactcgggtggagggaaccccaaatttttgcccccgcgtcgcctccgccttccaccctccgccccgcaaatctccaaatccgtttcggccccgaaccggacaccgccgcgcttgcttaaatcccgacgcgacgctcgcggaggcggcggaaccctataaggcctggatcccgctccgcgcccccgcccccgcccgatttcaggctctagggttacgcatgccctagcctccgctgcccgtggtgccggtgccatgcctgcgacccgcatcccgctcaagcgctgcaccgccgtcgtccccggcgtggaggatcccggccccgctgcaagcatgccgcccgccaagcgccgccgcgagcgcgtcgncccgncgcggntcaggggtncgatgccggcggccgcttcccgcggggaggagggg

SEQ ID NO: 79716 - DNA, 1273 bp, Zea mays
  unsure (1)..(1273): unsure at all n locations
  Clone ID: MRT4577_172727C.1
gcggctcgtgttcgtgcggacgaggacacgggcgcgcccatcgacgacgcggcgcgggtccggcgcgtcgagtccaggctcaggcacgtcctccgcggcggcgcgctcggcgccaggatggtccgggcggacgccgcggccgtcaacatggaccggaggctccaccagctcctcaacgaggacggggaggccgagagccgcgccgaccaggccacagcggtcgccgtgcaggattgggtggagagggggtactcggtggtgacagtgagctgccgtgaccggcccaagctgctcttcgacgtcgtctgcaccttgacagacttggattacgtggtgtaccacggcacgttccacacagacgacgatcacgcccgccaggagttctacatcaggcggttggacgagcggccaattagctcggcgaccgagaggcggcgcgtgatccaatgcttggaagcggccatcgagaggcgcgcatccgagggagtgaggctggagctgcgcatcaccgaccgccgcgggctgctcgcctacgtcacgcgcgtgttcagagagaacagcctctcggtcacgcacgccgagatcaccaccaggggcgacatggccatgaacgtgttccacgtcaccgacgtggccggccggcccgcggatcccaagaccatcgacgaggtgatccagaggatcggcacggagagcctccgggtggacgaggaacggtggccgcgcctgtgcttgacagagggtgacgcgggccgcggcggtgcggggatcttctcgctcggaagccttgtcaagaagaacctggccagccttggcctcataagatcctgctcgtgaggacgcacgcaaccaagtgggcacgtgctcgatggggtccttgtgtaaatatgggatggtgcatgggttagtttgtaaatggagtagggatttaatttgacgtttctaggtttagttgccacgtgtacatagtagcaagtggagatggaaggttttaagagttgctggtcggcaacagcctggagcttaaagggcctctttggtgggtcatgacataccatgtatccatatctagctttttacataaaaatagatggatggaagaattaagtaaaaaaaaaaaaaaaaaaaaaaaaaaaaaaaaaaaaaaaaaaaaaaaaaaaaaaaaaaaaaaanaggggccataaaactaancaaaaagaatgggcttagaacttgtttgaaggtccttgtatttatcgaatnccattttttttaccttaagactgtttccatt

SEQ ID NO: 79717 - DNA, 354 bp, Zea mays
  unsure (1)..(354): unsure at all n locations
  Clone ID: MRT4577_172728C.1
cgtccggttttttggtgaataaaaaataaataaaaaaatttttttttttaaaaaaaaaaaaannnnnaaaaaaagaaaaaaaaatttaaaaaagaaaaaaaaaaaataaaaataaaataataaaaaataaggggcgcggcctgttttaaagaaatcaaagcttaacttacccggtgcattgcaacgtaataattttttttatagggtcactaaaattaaattaattgcccgccgtttaaaaacgtcgaaactgaaaaaaccttggcgtaaccaaattaaatcgctttgaaaaaaatccccttttcgcaagttggcaaaaaaacaaaaaggcccgcacaaatcgcctttccaaaa

SEQ ID NO: 79718 - DNA, 1466 bp, Zea mays
  Clone ID: MRT4577_172729C.1
gacactcccaagtcccaaccaaatctacgacccctcgggctgaacggaggtctccgcctgccctcacggacagccgagaaacgctctcccccccggccacaggtaatcaacaaggactggcggaaagctgaacgggccgaccgaagcaggagaggcgcaggccgggagagggttcaggcggcgtaggaggggctcaccgccagctagcttgacgacctctaggtgctccacgagaacatcccgagggtggcggacgacgacggcgcgttcgccccggggacgctcgattccgtgcgcgaccaggcgccgcgggcggctagccacgacgccgcgtgggtcaggggcgtagagtcagcgcgtaagccaatccttggcggcggccagctcggcgcgagcatgggacgtgcaggaacgccgaatgtctccctgccccgctgcctccgccagctccatgtggacgtagcgccagtggggtgtctcgctgacctgccggctggacttcgtacgacagccgtccccgtgcaggacgggggggtcaggtggtcgtggcgggggaggtgcggctatcttctccctcccgagcctcgccaagaagaacctggtcactcttggcctcttaagatcctgctcgtgagcaggccgtccctcggaggcaaggaccacgtgcgatccgagttctacaataggcggttggacgagcggccaattagctcggcgaccgagaggcggcgcgtgatccaatgcttgcaagcggccatcgagaggcgcgcatccgagggcgtgaggctggagctgcgcatcaccgaccgccgcgggctgctcgcctacgtcacgcgcgtgttcagggagaacagcctctcggtgacgcacgccgagatcaccaccaggggcgacatggccatgaacgtgttccacgtcaccgacgtggccggccgacccgcggatcccaagaccatcgacgaggtgatccagaggatcggcacggagagcctccgggtggacgaggagcggtggccgcgcctgtgctcgacggagggcgacgcgggccgcggcggcggcggtgcggggatcttctcgctcgggagccttgtcaagaagaacctggtcagtcttggcctcataagatcctgctcgtgaggacgcgatcaatggggggcatgtgctcgatgggatccttgtgtaaatatgggatggtgcatgggttagtttgtaaatggagtaggggtttaaatcgccgtttctaggtttaagttgccacgtgtacatagtagcaagtggagatggaaggttttaaaagttgctggtcggcaacagctaggagcttagtaaaggataatggacctctctggtgggtcatgccatgtgtctatctaacttttacgtaagaaaaagtattataccaaaaaaaaaaaaaaaaaaaaaaaaaaaaaaaaaaaaaaaaaaaaaaaaaaaaaggggttttaaaa

SEQ ID NO: 79719 - DNA, 450 bp, Zea mays
  Clone ID: MRT4577_17272C.1
cgcattattcgcggcctggcctcctggtggtcaaggcatcacgctagccataatgcccgtaacgacgtggctgcaacggatgccgactggaactgctgtccgaggccgactgcaactccaccccctagaaatgttcgcaaccgcggagcctgtggcgcgccccgcgcatcaccaatcgcaagccaaagaatgatgccaggaccccctgctcacggatatgaccgtgcacctctatttcacggtggaagtggtggcgccccacctccgtttgcaccttggaaatggtaacctggtggctcctgatgcacacctgtgggatgaccatcatacgctatcggtctgcatctggacctcatgaatgacaaggccctctctcttaatatggtgctcctgggccaatgatcggtatgcgacatggaccacgacctgctctaggccgacatatccatg

SEQ ID NO: 79720 - DNA, 208 bp, Zea mays
  Clone ID: MRT4577_172730C.1
gtcatcatcatcgtcatcaacctttatcacaggaactagatacactgagagagaggtggtatccaatttctgatcctacaccacatcagcataatcgatctataactgaactaaactgatactagtaagatagaatcatctacatcatctagaccttagacaattacttgattctatatatcctaatatataaatatatatatcctaa

SEQ ID NO: 79721 - DNA, 824 bp, Zea mays
  unsure (1)..(824): unsure at all n locations
  Clone ID: MRT4577_172731C.1
gggtacctcgaggccggccggggaactgcccttgaaaatgggccaattatccnttgagatggacacctacagataccacgggcactcaatgtcagatccaggtagcacctaccgcacaagggatgatttgatcgctggcataaggcaggagcgtgatccaattgaaagggttaggaagctcatgttggtccatgagttcgcaacggcccaagagctaaaggacatggagaaggagatcaggaagcaagtcgacgctgccattgctaaagcgaaggagtgtccactgcctgatccatctgagctcttcacaaatgtttatgttaatgactgcggtttggagtcgtttggtgtagacaggaaggaggtgaggaccgttcttccgtaggctggcaaacaaaaaaaaggttctactgatacagtacgaagaagtttgctgcgtatgtatatggacgcatcacaccgcagtagtttcctcacttgtggttatggtcctatggaccccgggttataatttcctctgctcgtcgagctatcacaatgtgcagccgagattttgtcaggtgctcatgtcatgccgatgtttcgtcttctgctctactgcaacacttccacagatcccctttctgagcagtgcccccacgtaaacagtagtagttggctgcattagctagggggcggctaatagctttttattagttacaaaacagtttctttgttaactatagctgtttctgaacagtgcccccacgaaaacaatagtgatcacgnttgtgtcgttgtgacacaccattgtcaagtccaaaaaaaaaaaaaaaaaagcggcc

SEQ ID NO: 79722 - DNA, 300 bp, Zea mays
  Clone ID: MRT4577_172732C.1
cccacgcgtccggtcgcgcgcgtagcatttcattgttcctgcacgtgctgccgcgaaactcctggttcagttctcctccgtcgcgttgtcgtgtgcgcgaaactgctcgcagtcgacatcgagtccgtaacacgcgcgctggacatggtgaaacgctaccgcaacctcgctttgctctccgcgtcgctgtttgccgggtcaagcccgaggttgccgctttcctgtttcagtttgccgtgccgcacgtacgtatctagtcctggccgcggggcagaacctgccattgagtttgccggacgt

SEQ ID NO: 79723 - DNA, 584 bp, Zea mays
  Clone ID: MRT4577_172733C.1
ggagaacaggaagcaagtcgacgctgccattgctaaagcgaaggagtgtccactgcctgatccatctgagctcttcacaaatgtttatgttaatgactgcggtttggagtcgtttggtgtagacaggaaggaggtgaggaccgttcttccgtaggctggcaaacaaaaaaaaaaggttctactgatacaggcgaagcgaagggatcctctcctctgttaccgtgtatttgtttatctggtagtacgaagaagtttgctgcgtatgtatatggacgcatcacaccgcagtagtttcctcacttgtggttatggtcctatgaaccccgggttataatttcctctgctcgtcgagctatcacaatgtgcagccaagatgttgtcaggtgctcatgtcatgccgatgtttcgtcttccacaaatcccctttctgaacagtgcccccacgtaaacagtagtagttggctgcattagctagggggcagctaatagctttttattagttacaaagcagtttctttgttaactttagctgcacccaaacatgaaactaagcgtgtgtttggttagcgggttgaacctgtatc

SEQ ID NO: 79724 - DNA, 202 bp, Zea mays
  Clone ID: MRT4577_172734C.1
attcgtcagcttttcgtcttcgaccactctttgcccaggtggcggtcgcccgcgccgctgtctgcggatcggccgcccggtctgcgaaaccgtagcgagtcaagcgagagagaaactagctgccatgttcgggtacaggaaggctgacccggacctcgaggccggcgggtcctcgctgctgtacccgggaatgacggagagc

SEQ ID NO: 79725 - DNA, 1911 bp, Zea mays
  Clone ID: MRT4577_172735C.1
cccccttccttaacctggaatttcggttcattgccatcctcgaggccggccgggcccgccaggccgccactccgccgaacaccacccagcggctcgctcgacacctacacgtttcacgcacctcgcgtcctcgccccgctctgttcgagttcccgttgtaggcgcacgccatggccgcggccattctccgccgccttgtccccaccgccgccagccagctcgtggcgccgctgccgcttctcgcgcgtggggtctccgactccgcggacgcggtcaccgttgacacctcggtgcccttcaagtcccacatcgtggacccgccaccgcgcgaggccaccacctcggcgcgggagctgctgtccttcttccgcgacatgtcgctcatgcggcgcttcgagatcgcggcggactcgctctacaaggccaagctcatccggggcttctgccacctctacgacggccaggaggccgtcgccgtcggcatggaggccgccgccacccgcgccgacgccatcatcaccgcctaccgcgaccactgcgcgtacctcgcgcgcggcggggaccccgtcgccgccttcgccgagctcatgggccgccgggacggctgctccaggggcaagggcgggtccatgcacttctacaagcgggacgccaacttcttcggcggccacggcatcgtcggcgcgcaggtgccgctcgggtgcggcatcgccttcgcgcagaggtacaggaaggagggcaccgtcacgtttgacctctacggcgacggcgccgccaaccagggacagctcttcgaggcgcttaacatggccgcgctctggaagctgcctgtcatattggtctgcgagaacaaccactatgggatggggacggcagagtggagggcctccaagagcccggcttactacaagcgcggggactatgtgcctggcttaaaggtcgatggaatggatgttcttgctgtaaagcaagcttgcaaatttgccaaagaacatgcccttgaaaatgggccaattatcctcgagatggacacctacagataccacgggcactcgatgtcagatccaggtagcacctaccgcacaagggatgagatcgctggcataaggcaggagcgtgatccaattgaaagggttaggaagctcatgttggtccatgagttcgcaacggcccaagagctaaaggacatggagaaggagatcaggaagcaagtcgacgctgccattgctaaagcgaaggagtgtccactgcctgatccatctgagctcttcacaaatgtttatgttaatgactgcggtttggagtcgtttggtgtagacaggaaggaggtgaggaccgttcttccgtaggctggcaaacaaaaaaaaaaggttctactgatacaggcgaagcgaagggatcctctcctctgttaccgtgtatttgtttatctggtagtacgaagaagtttgctgcgtatgtatatggacgcatcacaccgcagtagtttcctcacttgtggttatggtcctatgaaccccgggttataatttcctctgctcgtcgagctatcacaatgtgcagccaagattttgtcaggtgctcaaaaaaaaaaaaaaaaaaaaaaataacaaaaaaaaaaaaaaaaaaaaaaaaaaaaaaaaaaaaaaaaaaaaaaaaaaagtcgttgtgacccatgtcatgcccatgtttcgtcttctgctctactgcaacacttccacagatcccctttctgagcagtgcccccacgtaaacagtagtagttggctgcattagctagggggcggctaatagctttttattagttacaaaacagtttctttgttaactatagctgtttctgaacagtgcccccacgaaaacaatagtgatcacgttgtggtcttgtgacacaccattgtcaagtccatc

SEQ ID NO: 79726 - DNA, 401 bp, Zea mays
  Clone ID: MRT4577_172736C.1
aaaaaaaaacgggggatataaaaacaatgcaatcagtcccgaacaagcgtaagtttttccttctgcagaggggtcacaattttagcaagggggccctgcaaacaagtcccaacggggatctatgaatacaagggcatgaatcccaaagtagagggatccaatgcgggcaatatggaaaaaacccccgcaaaacaaaaatgctaggggtttactttgacaggggcgacttaagctttccgtttttttccatttaaaaaacgaaatcacatcccccaatcagctcccatttgtaataaacctgggggaaggggggccagttggagaacgttttaaaaccttgcctaacttcctcgtaagaaaaaatgtcgaaggacccaaagctgaccccttcctttttaaag

SEQ ID NO: 79727 - DNA, 1143 bp, Zea mays
  Clone ID: MRT4577_172737C.1
atggtggacggatctgcgtcctccaacacgcctgcgcttcctatggatggaaaagagattgattttctggtgaaagctatgaagagtgagaccttggaggttacaattgatgccatatattattttagtaatatggatgtggcacaaatcaaagtaggggcgttgaacgcgctgtcccgcgaggggtgcagtcactatgaggtcttcgaccgatctgatgaagattttgggcgcgagatttataaagtcgaagaccctgtggtgaaggactccgcgggggccctcttcgaccggatgtggggcccctacagtcgggaggtggtcagggagcggtctgaccgggcgagggatcatatggcgcgtgccgaggacgtggaggacttcggacctctgaaccgcgcgcagcccgaagcggaggccaacccggttgtggccgaggctgtgctcgccgtacgaagtcgttgcccagacatattttgccagggccaccacgacattcagcgtcagctggtggacctggacgtcgagtctacacagaacttctcccacaaatcgatgcacgggcagacgaaggccaacggcgaaaaaagcctcgaagacgaccaactcgccttccggctcggggacctcctctgcccccgggacacgtgccactccgccgccaaaatacccaagctgttgcatgtcttgcacacggaccaaggacatccgcgacacactgaactccactgtgtcgctggtgcgcaactcctccgccgccacattgctcagtgtctcctcggacgacgcgccggccggcggtgtattggcagcagaagaggaagaggacgacatggctacgtacagtcggaggcggcgggcggtctgcttcacacgggccagatcttcgacgagcaagaacaaggagggcagacgagcagcgagcggtttgagaaggaagttagggttttcgtggagcgcggaaagataaagttcaaaacgcgccgccccccgccccccttttatacacagggcgcggcgcttcgggaaacccgcaatccaacagtacggcgtcaatcaacggtcatgtcaaaaacccccgcggaaccacttcgagcgagggcagcgtctccaccatctaacgacgccttcggcaccagatga

SEQ ID NO: 79728 - DNA, 292 bp, Zea mays
  Clone ID: MRT4577_172738C.1
aattcggcacgaggctgcggcgccacctgcccccccaaaaaaaaccaagaaccacactgttagacttagatcacaaattccacccagcaaaccttgaagactcgaaaccagagcgcatggattcacacagcagcgaacccacccaccttggcagggtcgtacttaagcgcggccacgcgcagtccagcccgtcgggtgtgggcagcgcctagcggcctgcggctgctgccgctgctggctaggaagggcgaggtggacatggcggcgaggagtgagggcgccattggagcgg

SEQ ID NO: 79729 - DNA, 196 bp, Zea mays
  unsure (1)..(196): unsure at all n locations
  Clone ID: MRT4577_172739C.1
gcacccctggggacctcaaaggcacgggtatatttttaaacatggttctccatatttcctttcagaacaagtnnggtgcattttagatccacaggacgcttccaagggttcagggcgcctggtggtccagcggtccaatttaaggccctcttaccaggctttaggaaaacattgctgccgtgcgggagcttgcgcg

SEQ ID NO: 79730 - DNA, 582 bp, Zea mays
  Clone ID: MRT4577_17273C.1
gcaaaaaataccaaaccttggaagacaacaaataaggggagctagataccacgcatatctaaacatgccgtcccgcaacaagatcagcgtggccatgctgagcttggccctgatgggtctgctcctttgccacctcgccaccaccgcctccgccgccaccgacagcgaagacggctcggtgagagacggcggcagccccgcccccgactccggcgaaggccgcgtcgtctatgcggatatgaggttggctgattcagaatccagctcatccgatgcgccggcgtcggcgctggcgccgtcgtccagttgaacgaagcgacggtggtggttaaaaacttatcaggtcacgtgtggccggctactattttttccgtaagtaaagataggcaaagcgtggccaaataattttataagcaagtaataagtgtgatgggttaatcgaaatgatcaatgtatgacgtgtgggccaggagttatggcttgcctagccacatgttattctacgtctcctatcttcgttgcacgtctttttttccccttgtgttattatatatatcttgagttcttgatggattccgactt

SEQ ID NO: 79731 - DNA, 166 bp, Zea mays
  Clone ID: MRT4577_172740C.1
gtgaacagtatactatagttcattttcatgaaataaaaaaatatacatgaaggatcattctatttactgtatgagcattccactccacaaactgagctatattattttagctagttcacgggaaattatgaatagcttttgccagatttaactgggattttaatta

SEQ ID NO: 79732 - DNA, 261 bp, Zea mays
  Clone ID: MRT4577_172741C.1
acgctcatggccgtcgccgccttcctccgcgcgaccgatctaccctgcggcaccaccatgtcggtgatcgcgggcgaggacttgcatcatatgctgcgtatgctgaacaccaacttggatgggaagcaaaaaatcatgttcgccatgacctcaatcaaaggtgtccgacgccgattgtcaacatctgatgcaagaaggccgacatcgacatgaacaatatggtccgcaagctgacgcctgatgagctggagcgcctgatga

SEQ ID NO: 79733 - DNA, 429 bp, Zea mays
  Clone ID: MRT4577_172742C.1
aatgtacgaaatgaacgttccatagaaggtctcgacgaaggaaggaaacaatgtacgaaacgagccaacagaagacaaacggggaaacattcaatgcacaaggctggcccgtcccgacccataggggccgatcttgccacacctagttggagagtctagcttatccccgtatcactcgattcggcccacggaccttaccatatcatgcgaagatgcgatccagactctccttggcttagccatgcgtctagaacaaggcgacaacggcaccgatggcaccgacaagcatatcaccggctcctccaatagactgggcataggcagcgttggcggagctggaggtccagccggcagcggtgttagtctgggtaccagagggagagaccgtgctggaagcgggcctggaagtggaagcggcaccagaggcgc

SEQ ID NO: 79734 - DNA, 151 bp, Zea mays
  Clone ID: MRT4577_172743C.1
tccacgcgttctagtaccacttctatttctctccacgcaccgagcttctaccggagggggtccgtacccttactgaggaactactcctgaggccttattttggccctcacatcgtatctcaccatcctcttccactttgaagcaacaaact

SEQ ID NO: 79735 - DNA, 277 bp, Zea mays
  Clone ID: MRT4577_172744C.1
cgcaggcagcatctgcatctctcgcccacctccactccgcctactgctgctggtcgtagagagccgcgacaggaggcccttgtgcccgctcgacggccgcatccacaccgtagcaaccaccactcatggcagacgtgcacgcacctttggtgcgccgtacgacgaagaaggctccagtggtctacttgacgacgttccgatggctccgcgtgatccacgtggtcactgctcattcaactctgatctctatcaacatcttcctgggcgccatgtgcgt

SEQ ID NO: 79736 - DNA, 601 bp, Zea mays
  Clone ID: MRT4577_172745C.1
aattcggcacgaggccccgataggctgtcgggcgagaggctcatcatcagcttgcccgggcgcgcctcggtctcggtggcgtcagtgggaaccggcgaaccggacacgacggcccaccgcctccctctgcttcctcccgtcgaagccctccacctctgacacggcgaccgaccactcctccgactccgactttgccaccatgaacagcaacgaggacactgccatcctcggcatgacgggcgacggggcattcgcaatctccttcgccgatcgcttcaccgccagcgccagcgcagcattgttcgtagagaagaggatggttcatggtagcaaaagtatggcggtaccagaacaagggattccccctaatgttgttgaggatggggaacccttcaggcacaccagtgtgggcacttacagaggagcagatgttctttagaggcatgttgtgttgtactcttccacccactctctgccagtctctacacaggttgtggtggaaaacactcgtgtgggatctagctggctcttgtgcaattggtatgccacagctgctcttctcaccgtgtgaggacgagcacagtaaaagctaagcatttct

SEQ ID NO: 79737 - DNA, 526 bp, Zea mays
  unsure (1)..(526): unsure at all n locations
  Clone ID: MRT4577_172746C.1
gctggggggggtgtggtttttttatatttttttttgggtggtgtttttttttttttttttttttttttttttttttttttttggtttcaaaactgcttaaccttattttattcattgctttttctgggaaataaagggcccccccttaacatggggggtttgaatggggaatttttttttgtccccgcccccaagaggaaaaaaaacagcggggaaaaattttaaggggttggcccacagatttcgggtcggggttttttgttttcagttcaaatttgaaccaaatcccggaacttttggcaaaatttcccncgtccaaatgggcttttcttgggggggcaaatggtaatcaataatggggggctcccaatctgggaaaccggaacaaccggggtttccggggtttttttgccctgtaactgtccggggcagccaaattttctctccttggggcgcggggggcgccccgggaattcccggccgggtcctgcgggcggtcccnctttccctttgggggggcctgtta

SEQ ID NO: 79738 - DNA, 186 bp, Zea mays
  Clone ID: MRT4577_172747C.1
atggcggcttcggatactaaaacccctgctactcagtgctacccgtaccagagattaaggcggattagatgggtgtattattaccgtgagttgtgtcgcgacagctactgcccacgctggggaggggtccgcgtcaagcgcgccacggaaccggcccccaacggccgagcggagattgtgagataa

SEQ ID NO: 79739 - DNA, 548 bp, Zea mays
  Clone ID: MRT4577_172748C.1
cgctgctttcggggactccgatctgctccctctccagaaaccctcctctgccagaccgctccaccacaagtacaccaccgccagtccgccaccgccaatggcgccgaagactgggaagaagaggggcggacgcaagcccaagcccaagcccaaacccaaacccaaaaccccatcttcctctagctcgccgacctcggtcctgccgccaccgccgacggagacgaaggcggccgacgtcctcaccggggacgtgctccgcaacgtcctccgccgcctctccctcgtcgacctcctccgcgccgccctcgcctgccactactggcgccgcgccgcctcccgctgcctcccccgcgcccctcccctcctcggctacttccatcaccccgtcaaaacctgcctcccgccgcccgtcaagcagaagcaccaacccctccaagacgccgtcttcgtccccctcggctcctcctccccgctcagctccctcgatttcgccccgggagcctcccgctacaagatctacgactctctcaagggtctcctgctcctcg

SEQ ID NO: 79740 - DNA, 337 bp, Zea mays
  Clone ID: MRT4577_172749C.1
aactaaactttattttcataacggagggaaacaagaaggccctggcgatatttcgggaataccagactaaaattttttttaaaagcatggcctcggggttgggttggaaataccaacccgggtggtggaaccaaaactgcgctggaacaggtggaaaaactaccctgcggggggggggagagctccggccgacatgggcgaatcccccctatcttaaatgttaaaaaatggggctacaccaaaaacaatgtgcccttggttgggggtacccttggccatcccaacgcgggggagggggaggtcccccagggcccaggggctggtttatcttaaccag

SEQ ID NO: 79741 - DNA, 265 bp, Zea mays
  Clone ID: MRT4577_17274C.1
ctcgagccgatcggagcggccgtccttttttttttttttggcaaaaaaagtttgattcacatccatacagatggtagaatttaagacgccacaatttatggggttacagcatagataggctacttgggatctgaattcgggaaaattttttcccccccaaaaaaaaggggcacaaatttggaacctcccccgggttacaggggaattagggaccaagatcgggtttctggaagggcatgtctatgtctggagcttcgggtctgat

SEQ ID NO: 79742 - DNA, 262 bp, Zea mays
  unsure (1)..(262): unsure at all n locations
  Clone ID: MRT4577_172750C.1
ggataagcaccgctccgcggccgggtcggggctccggtccctcgccagtgccgcctccggatggtgggaccggtggacggtcattggttccggactctccaagctcgaaagggccttcggcgaccagttccccgagggcgagcgctacttcgggctcgagaacttcggcaacancctgctactgcaacagcgtcctccaggcatttgtattattggtgctccattccgggaacagttgctgggatactatagccaaaacaga

SEQ ID NO: 79743 - DNA, 101 bp, Zea mays
  Clone ID: MRT4577_172751C.1
cgactcagcgacgtaactcagaatcgactcgagtcgacaccaaccgcaaggtccttattttagcacgaactagaagcgccgcagtagcaaccatggacgtg

SEQ ID NO: 79744 - DNA, 599 bp, Zea mays
  Clone ID: MRT4577_172752C.1
ttccgtcgcccaccgtcgaagaccacacgagtcgacttacggagttcagaggaaatgaaggatttttgaacttgcaagaacactgcaactggtagtccttgatgcggatactattaatcatccagctcaactcagtaaaacttctttggcccctattatagtatatgtaaagatttcttctcctaaggttttacaaaggttaataaaatctcgagggaaatctcaagctaaacacctcaatgtccagatggtagcagctgataaactggctcagtgtcctccagagctgtttgatgtgatcctggatgcggtggcccaggccgtggtggaccgggtaaagcgtatccacagtgacacctttgccagtggcggcgaacgtgccaagttctgcccgaggcacgaggacatgaccctgctggtgaggaactttggctaccctctgggagagatgagtcagcccacaccatccccagcaccaggaggacgtgtgtaccccgtatccgtgccgtactccagcgcccagagcaccaggcgcataggggattacaaggtcaagtatggctacacagacatcgacctactgagcgccgccaagtcga

SEQ ID NO: 79745 - DNA, 1171 bp, Zea mays
  Clone ID: MRT4577_172753C.1
tcgaggccggccggttttccgcacagcaaacaagtacgaggagtcgaggactgcagctgcgccagcaaacgccgacctgccgggacatggcagctgcggcgccggccgcgggcaagggaaaacgaaagcgccacctctccgaggacgacgtctgcctcctccaaaggtacaatccggggacgatcctgacggcgctgcaggaggtggcgcagcatgcggagggccggatcatcgactggagggcggtggtggcgaagtcggccacggggatcacctccgcccgcgagtaccagatgctctggcgctacttagcatatcaccacgacctaaacgagagcatcgaagccggtgacctgcctctgggcgatgacagtgacctggaattggagcttgaacccaatcccagcgagaccaaggaagctttatctgaggcctctgcattggccaaggcgctaatatccagatcttcacgtgagcaagcctcgggtcatcgcattaatttggatgttcctgcgctgaacactcaaaatgaaaagatagtgcgggttccatctaagcagcttgctcagagtcatcgtgtaacaaatgttacatgtcctgtttccaatccaaaacagttatctcatatagtaccctctcctactcatttggatccaaatggagcttctaaaaagaggaaaaaggcaaaagcttggtctaaagaggaggatgcagacctagcagctggtgtgcagaagtatggtgaaggaaattgggaggtcattttgcataaatgtaactttgataaatacagagaacgccccaatcatcagttatctcagagatgggcgctgaagcgtccaggaggatcaaccaagcctgctagcactaaacacgcctctgttggcttagaggaaagatcagcagccctcaaggcactttcattggctgtcggtcctatgcgtggatcatctgcactgagatcaggagcttatccacaaagcattcagcataagtctacagtgtttgctcctaagatgccagaactaagatctgcagtaaccccttcaccggcaccagcagtgccagtcccagttgctatgcctctgcgtgtggcagctcaagtacaggcttcggctcatcaagggcattaagcttctgcccatgcttcaccacccaaatttgtaaatgc

SEQ ID NO: 79746 - DNA, 210 bp, Zea mays
  Clone ID: MRT4577_172754C.1
ccacgcgtacggggccactcaccttatttacccgactcttttcaacaccacccctttcatgcactcggccgacatctacacagcctgggcgagcacaaacacgaccaacccgatttaatcaacccaagaatccgccaaaaccgacgactacggagtaccaacacgtcgtctcacccaacactcccacttatagaaggacagcacccttaa

SEQ ID NO: 79747 - DNA, 370 bp, Zea mays
  Clone ID: MRT4577_172755C.1
gttaattaagaaaatcaaatgaataatcgacgcaaccacattttgttcccatccagcgcaaaaaatgggtgattcgaacagagcggtggaacatctatttttttagatctgcttagagaagggattggctaatggggcaacactcacggacaaaggggctgccccttcggaatcgcacggacccgatgccccagcgggcatgaaaaacaattatccgggttatagggctaggctcccagtccccaccttgagccataaaataaccttaacgaggcagatgtactgcggagcgaatctccaggcgagcgacaggctcggattggcggtccatatgcaccggacgagttggaggatactgatgggcccccgg

SEQ ID NO: 79748 - DNA, 1022 bp, Zea mays
  unsure (1)..(1022): unsure at all n locations
  Clone ID: MRT4577_172756C.1
tcatgtacccgtgcgcggatttgggaagcancttcccctgcgcgggcgcggcggctgccatcgccggcgggtgctgcgggcgcggggaggagnaagcgggcggatcgtgcggcgtatgcagggaggctgcgggatgcgcggctggggcagctgcggcatgcgggcttggcagaacgtgcgccatgcaagtggttggacgcctacactactaacataattagtagtagagattactaattgtttggtttgtgcaaactcacggagtcagtgaggtcattgtggccggatgaagtaccaagtcaatcgagcacttgtatctccatatttcttgcattgatgacggtaagataccagtgcgttcctcggatgtttatcggaataaacatctacaaaacaattataaagcagaactaatatagaacccttttgtttattctttttagcctaatgctgaaaaccgacaacttggaactcccaataagaaacatgatacatgacacctatgcacttttcttatagtttgtgtcctgtccctataataagtcagatagtatgacacctcttgcattgatgaagtaccattcttttgcctttagttccacttcttctctttgcaggaaatgcccctctcagaaagctgcctagttctggcagtataaatagtctagaagaaagccatttccttcgtgcttcattggatttatctgacaatgcttcattagagaggcgaatgtcttcagaaagtaatatgtcatattatctgaggaccatgactccaagtgcttttgagtcagcacttcgtcaaaaggatggagagcttgcttcttacatgtctcgcttggtatgtataagcatccttctgatatttctcctcaaacggtttatttagtaccccatcaagttttatcacctttgtcttgctggtaaacaatagtagtaaacttttagaagtagtagctgatcattaggacagttattacaattttgcaaatttattgatgatttttcttgtaactgagttc

SEQ ID NO: 79749 - DNA, 328 bp, Zea mays
  Clone ID: MRT4577_172757C.1
ccccaaacctggtgggattgaactgaaacaaccattttaatatggacaaacaggtctacacaactaagagtcattttctggcaactagcccctggatattacataactatgctgggacttggcataccttttattcatggcctatgaaggatggataaacaaggggtattgctcacaagttgggacatcaaaagctggacaaaaagaatctagttgacccacgggatgctgcctttgaccaatctaaaatatcctggttaaataagctcgggcaggcactcttggctctgggaaggatcacttgaacttacctcattttttgcaaacg

SEQ ID NO: 79750 - DNA, 319 bp, Zea mays
  Clone ID: MRT4577_172758C.1
ttagccacccggttcttcctagttccagagctcccttttgagccggactgggacccctcaacagatcgggagagggctggtcatgatgccccatctggacaggaagcaccaacccgatttcttgccgagccatgggacttgatgactgcacggcacctggtgatgaaaacgaactgcgctgatgatggacttgacacgggcctctgagaggatgccaaggtgcattgacaagcatgctgctcagctcagcgctcttgctgaagactgtgaccagccaaatcattgcaagtcagtgaaggcgctatgtgctggacacaat

SEQ ID NO: 79751 - DNA, 517 bp, Zea mays
  unsure (1)..(517): unsure at all n locations
  Clone ID: MRT4577_172759C.1
ttttttttttttttttaattaacttatagattgaatttaaaattggtggatagttgaagactccaatcgaccggactaatttacaattagtagctagttgaagactccaaacgaccggtcgccccgcagccagttgcaggcctaggattttagtgctgggtattccaaatgcagggttccaaaaagcggcagtaagtgctggagtccggagaggactggggtcacagctactgccgccaccggctgcggacgagcgagcagagccgcctccctcacaatccgtcgccgccacgaccacgcgagcgtgcgggaaccgccatagccacacgagcgcactggcgtcgctcggggcctctgagccgcgactccttttgcacggggccgtgtcccttaagcagggttgccgccggtgccacgcctcgagcgaacgtagacgggccaccaagtccgtcacgggcccgatgggcggcatanccggcggaggggcggcacagatccgggccgccgactttggtgg

SEQ ID NO: 79752 - DNA, 2182 bp, Zea mays
  Clone ID: MRT4577_17275C.1
cggacgcgtgggcggacgcgtgggcggacgcgtgggcaaaaactcttaatccgtgttggagtgcctacaatattgcagacaggagagctcctccagtctatgttaatctttttactggtcaagcaacaacacaatttccaagtatgactgagactgtaagaggagggatactagcagacgcaatgggtcttggcaaaactgtgatgaccattgctctgatactttccaatcctaggggggagttctctaactgtataaaaggagacacaaggtatctaggagatcgtgcgaccagaggatacacttcaacatcctctgttagaggaggtacccttgttgtttgccctatgtcattattgggccaatggaaggatgagttggaggcacattcggcacaaggagctctttctgtgtttgtgcattatgctggtgataaaactagtagcctcatgctgatggctcaacatgatgtcgttttaacaacctatggtgtcctctcagctgcatgcaaaacggaatgcaacagcatttttcacaggatggattggtataggattgtgcttgatgaagctcacacaatcaaatctcctaaaactaaaagtgcccaagcagcttatagattaaagtcggaatgcagatggtgccttacaggcacaccattgcaaaataatttggaggacctctacagtcttctctgcttcctacatgttgagccatggtgcaatgcaaaatggtggcagaggcttattcagaaaccttatgagaatggtgatgatagagggttgaaacttgttagagctattcttaggccactaatgctaaggaggaccaaggaaacaaaagacaagattggaaatcccatactggttctacctccagctcgtattgaagttgtagaatgcgaacaaactgaccatgaacgtgatttctatgaagcacttttcaggagatcaaaggttcaatttgacaaatttgtagcacaaggcagtgttctgaacaattacgctaatattctcgagctacttctccggctaagacaatgctgcgatcacccttttctggttatcagccgagctgaccctaaaaagtatgctgacctcaaccagcttgcacagcaattccttgaaggggtgcagcagagttcgtctggaagacagaacgtagtgccttcactggcttatgtagaaggggtcgtcgaggaaattcgccagggtgccactatggagtgccctatctgtctcgagtcagcttcagatgatccagtgcacgaggcttgcgcacaccggatgtgtggcgaatgccttgtttctagctggaggactccagaaggagggccatgcccactctgtagacgtcacatcagcaagtctgacctgatcatactgcctgctcagagtcgtttccaggtggatgccaagaacaactggaaggactcgtgcaaagtgaaaacgctcgtaacgatgctggagagccttcagaggaagcaggagaagagcatcgtgttcagccagtttacttccttcttcgatcttctggagatccgcttcacccagaagggtatcaagttcttgaggtttgatggcaagctgagccagaagcacaaagagaaagttctgaaggagttcagtgagagccaggacaagctggtgctaatgatgtcgctcaaggctggaggtgtagggctaaatctaactgctgcctccaacgtttttatgatggatccgtggtggaatccggctgtggaagagcaggctatcatgagaattcaccgcattgggcagaaaagagaggtccgagtccgacgcttcatcgtcaagggtactgtcgaggagcggatgcagcaggtccagatgcgcaagcagaggatggtttctggggcgctcaccgacgaggagattcgtggcgctcgcattgagcatctcaagatgttgtttaaataaatgatcattgccgatgtgtatagctgacgctacgccgttgatactttggtagtgtcaagtaggttgttgagggcatgtttggtaggagtaagatctgggtttagaccattgtagatggggatggccggatgggagtgggtggaaccttgcccttccgatatgacggtcttcctttctaacgtgaatcatactgagaatgagcattttggaaaacatgactacgataaatcacttttctcttg

SEQ ID NO: 79753 - DNA, 304 bp, Zea mays
  Clone ID: MRT4577_172760C.1
gtaagctcggaattcggctcgagctcactcacaccacatatcattttatttagccacgagccgaatgacatgggtggcgggagcttctctagcccccgccacccgctcgaagacaaccacgccgacgccaccaggaacctcctatggaagaccccgaaaagcaagcacaacaccggccagaagcccaaaccggctgcgaccccgacgcaatggaaccgacccgacccgtctccagacccggccccgattagcgcttcgtcgaccaagtaccgcaccagtaaagatgcatgcgactacagatggc

SEQ ID NO: 79754 - DNA, 317 bp, Zea mays
  Clone ID: MRT4577_172761C.1
cggctgagctagagatactaatggactggcagaggtcccatggttccatcatgcgtatcactcatcacttgatctgcatgaaactacatccgacttagaccaacttcctggtgtgggaagagttgcctatcctgtcattctatgtatagaccacagatctgtccatgaagcacttcactggtctccaaaagaccgtgttgccgtctactaccacctcacgctcctgcaccccaatctggactagatggagatgctcaccgggactatcttgaacgtatgcggaactcgatcagagctcatgtatgctcatatcatct

SEQ ID NO: 79755 - DNA, 242 bp, Zea mays
  Clone ID: MRT4577_172762C.1
ggttcgggatgcttgaagctgatgtgtcctgatccgtcctgagctgttgctgttggacaagatatgataaattcactggctgatgtgtgaggatacgtgaaaagaaatgggcgacaatcttctacatatcttacaaatgaagataatagaaagacaaaaaggtggactgaacctgaatgacaacatatcagcgaaatttaatatgttcaatgtcagtttagacgttaattgctactatacat

SEQ ID NO: 79756 - DNA, 477 bp, Zea mays
  Clone ID: MRT4577_172763C.1
ggggcgaactttggcctaaatttggggtcaaacaaagcacaaaacacaaggaaaaacaaggaccgaagaggggcattacaacaagacacttaacaagaagggggcccacaacaaacaaggacaaaaacagccaggggcccggccagggggatccgaagggaaaaagggtctttaaaaaatcccccaccaaaaagggcaccccaaaaggttcccaaaaaagggggggggaaggaacaaaaacgggggagcagcccaggtccagattaaaaaaaaaaaaggggacccccttgaacaaaggcccgacaagccagggcccctggggcaccctgaaaaaattgggggaaaaaacccggaaaaaacaaaccccggggggaacaagaggggggaaaaagggccctgggggagactggaaaaacatccttccaaccgggccactttggggggaccccccatccacgaacgagggattggccaccc

SEQ ID NO: 79757 - DNA, 1405 bp, Zea mays
  Clone ID: MRT4577_172764C.1
aaaaaaaaaaaaaaaaaaaagaaccctcgaggccggccgggaaaaaaaaaaaaacgcgcgcccaaaggcccccaaccccaaccttgcaggaaaagagagagagagagacgaccccccaaatcggaatccgcacacccccatccatggccgccgccctgctccgccgctcgccggcggtgcgcgcgctcctctcgccggcactctcgtcccgcctcgtcgcgtccaagccccactcctcgtcccccgcgccgccgccacctgccaaggccgcctccagcacgaagaccttctcgatctaccggtgggacccggactcgccgtcgacgaagccgcacctcaaggactaccaggtggacctgtccgactgcgggccgatggtgctggacgcgctgctcaagatcaagaacgagcaggacccgtcgctcaccttccgccgcagctgccgcgagggcatctgcgggagctgcgccatgaacatcgacggcgacaacggcctcgcctgcctcaccaagatctccggcgcctcctccgcgtccacggtctcgccgctgccccacatgttcgtcgtcaaggacctggtggtggacatgaccaacttctacagccagtacaagagcgtcgagccatggctcaagcgcaaggaccagcccccgcagcagggcaaggagatcccgcagaccaaggccgaccgggccaagctcgacggcatgtacgagtgcatcctctgcgcctgctgctccacctcctgcccgtcctactggtggaacccggaggagtacctcggcccggccgcgctgctccacgccaacaggtggatacaggacagccgtgaccagttcaccaaggagcgcctggacgccatcaacgacgagttcaagctgtaccgctgccacaccatcaagaactgcacgcacgcctgccccaaaggcctgaacccggcaaagcagatcgacacgatcaagaagctccagttgggtgccccaagtgcctgaaaccgagcgtgtcttcccttgaaaacggtcgtggaacagacctgtggaaaaaattgggatgaacttgccacttatttcgttgttgttgttgttctttggtcttcgcgcggtggtttctacctgccaaagacgaataattcccggctggggcccctccagtccactccacccatgcttttgtgtcaggcggagcggaggtagagcatagggagtgaataaccgctaccttatttcatttctatgatgtatctatctaatttggtcctcccctgataatgcacgacccgtagtgttaacaggcgtatttggaccttcaagaagtatttggacatggcaaatgtattttggaatgctcttaccaaaaaaaaaaaaaaaaaagcggcccataaaaattaaaaaagggggggcccctt

SEQ ID NO: 79758 - DNA, 240 bp, Zea mays
  Clone ID: MRT4577_172765C.1
cacgcgcgcgggcagcctagcaattagcgtcatcgtctgcagactggagaactcttctccatgaaggtgcagatcgaggcccttgctctgctggcgctcgctgcgagcggcgactccagtacaagcggaagcggtggatgtcagacaccaccgggttatctaccgcctgcgttatgtatgctccctacggtctatctgccgtcgctccagcaggcgtagccatggcaataccccacttaa

SEQ ID NO: 79759 - DNA, 344 bp, Zea mays
  unsure (1)..(344): unsure at all n locations
  Clone ID: MRT4577_172766C.1
gggcggtttttattgttgggacgagtgtaatttaggcggcggccgcccnnnnnntgtgttttttttttacannatcgcgcatcctcccctcacccggcataaactatagcatgttataatacatacgcgtatcctcccttgtacaaaaacgaggtacaggaaggccaacaaacaccagaaatgaaaaaagaccggaggttcagccgctacagttgcgactcaaaaccagacgcagtgctctctttcaccagggtgaagttataagaaaatggaagtacctttcaaccatatcattctgtaggggatataatgaagtaccaacatgcatgaggttgcagcagcca

SEQ ID NO: 79760 - DNA, 1322 bp, Zea mays
  unsure (1)..(1322): unsure at all n locations
  Clone ID: MRT4577_172767C.1
tccggccggggggggcgctcgccccggggcgggacgcgcccccccccccccaaggccccaaccttccaggaaaaaaaacccggaatccgcacccatccatggccgccgccgccctgctgcgccgctcgccggcggcgcgcgcgctcctctctccggcgctctcgtcccgcctcgtcgcgtccaagccccactcctcctcccccacgcagccgccccccgaggcaaagggcgcctccagcacgaagaccttctcgatctaccggtgggacccggactcgccgtcgaccaagccgcacctcagggactaccaggtggacctgtccgactgcgggccgatggtgctggacgcgctgctcaagatcaagaacgagcaggacccgtcgctcaccttccgccgcagctgccgcgagggcatctgcgggagctgcgccatgaacatcgacggggacaacggcctcgcctgcctcaccaagatctcctccgcctcctcggcgtccaccgtctcgccgctgccccacatgttcgtcatcaaggacctggtggtcgacatgaccaacttctacaaccagtacaagagcgtcgagccgtggctcaagcgcaaggacccgccgccgcagctaggcaaggaggtcccgcagaccaaggccgaccgcgccaagctcgacggcatgtacgagtgcatcctctgcgcctgctgctccacctcctgcccatcctactggtggaaccccgaggagtacctcggcccagccgcgctgctccacgccaataggtggatacaggacagccgtgaccagttcaccaaggagcgcctggacgccatcaacgacgagttcaagctgtaccgctgccacaccatcaagaactgcacgcatgcctgccccaagggcctgaacccggcgaagcagatcgacacgatcaagaagctccagttggacgcctgaaagcggtcatgccttcccttcaagacgaacatggaacaaaacctgtgaaaaattgcccttcttttgcgccgtggttttctacctgacaaataattcccgatttgggggcctcctggaggtagtgtagggagtgaataactgctacagcatttcatttttatgccgtatctaatttggtcatctgcaatgcattgtatggatcaccatcacttgtggatgattgccgttgcactttaaatttgcttcacataaatgaaaaaaaaaaaaaaaacacgcgtccgctagttctagatcgcgaatgcacgaccnnnnnnnnnnnnnnnnnnnnnnnnnnnnnnnnnnnnnnnnnnnnnnnnnnnnnnnnnnaaaaaaaaaaaa

SEQ ID NO: 79761 - DNA, 277 bp, Zea mays
  unsure (1)..(277): unsure at all n locations
  Clone ID: MRT4577_172768C.1
gacctgcctccaggctccaccacatgttcaactgagctcaaaaaagtcacaacacttggatgaatttcgacgattacatggtgcgctcacgagaactatttaaatatgcccccgttgctattgtgattgggataggagggatgctcttctgggtgaagaacaagatatggtgactggtgccatcttgcgatttcacagctatcatgctggaaccagctgagttgtcttgtcttcccctcgtgcaaccctatgtttgctcgtggtcccnaaatgaaaa

SEQ ID NO: 79762 - DNA, 794 bp, Zea mays
  Clone ID: MRT4577_172769C.1
cattgggtacctcgaggccggccggattttgtttcctttgtggctctacgtcgactccgttccctaccccttccttgatgcgagatagactcatggcgctgatgcctcgggctctgcggcctcctcgcaatcggactctgcggctgcggcttcgcggccgaggcgaccttcggctgaccgcaccagaaatttcgctctcccgccccaatcgggacgtggagcgcgcccgctactccctcacacctctacaaccacccatccgcgactgcctatgatgtgtccattactgtctgctcttggcccaccgacacgattgaacttgtcatctgcagataatgccccgactttgtctgggcttgaccctgtagcctctgcttcgcgcacatatgtcctgcagaccccatcacaggacacgttccacggggtcaccatctatcattacataccgctgttccctcaactacagctcttcgtgaggcatactcaactcccatcttcccactggagattctcgctgacagacctccatgagaataagcttgtatggactaatagggttgtgatgacatacgcctgacttgcgtatgctgtctcttttgttggactgtgtatctaccttgtcgcgagccccgtgaacatcatctcatatgcaagcgagaatagacgctgatctacttatacgtctgaatagactgtgtatatggtgcttctgcctggatgaactgctgctacattgagctgtgacgaatgctttgagcttacatttactcaccactccatgaacggccacgaag

SEQ ID NO: 79763 - DNA, 500 bp, Zea mays
  Clone ID: MRT4577_17276C.1
gcttatacctatagcctacccggctcgaccccccctcccatcttctccttcgccaagaacaccaccgcagccaccacgatcgatctcgtgcgcgtgcgcggtgcgctggagcggcggctggggtgggcggtggccgccatgatcccgtgaaggaggaggggaggggatagataggtggctgtgtgacaaaggggccggatcgatgtacaagaaccagctgcaggagctggcgcagaggagctgcttcagcctgccgtcgtacgtgtgcacgcgggaggggcccgaccatgcgccccgcttcaaggccaccgtcaccttcaacggcgagaccttccacgggcccacctgctgcaccacgctccgccaggccgagcacgccgccgccgaggtcgcgctcgcccgcctctccacccgcgggccatccacctacctcaccgccagagtcctcgacgagaccggcgcgtacaacaacctgctgcttgagacagcgtacccggtcg

SEQ ID NO: 79764 - DNA, 327 bp, Zea mays
  Clone ID: MRT4577_172770C.1
caaaatcctatgagaggacatgactttattattgtgtataataaaaaggacggacgacggctgcttttatccacacctttctagcctgcagattgggacccacccttgaaagaattatttcgcgggcaaaaagaatacggtgctgtcgaaagacccatcaaaataagtttttgtgatcgcacccttttctgggatgaaagaaggggtcagatttgctggagtcaccatttaagctggctcccggactgaatacctgttccccaccttgcttttccggacgggaggagagttcagcactcctttggcgatctttcttctatgactatg

SEQ ID NO: 79765 - DNA, 207 bp, Zea mays
  Clone ID: MRT4577_172771C.1
ggaattcccggctcgacccactcgtccgaaaaaaaaaaaaaaaaaaaaaaaaaaaataaaaaaaaaaaaaaaaaaaaaaaaaaaaaaagtaaatctttatacatactaccaaacttactaacacatacatacaacttcataactatttatataacatcacctaacttcatttcactctccaaactctttacaacttacctaacttaa

SEQ ID NO: 79766 - DNA, 456 bp, Zea mays
  Clone ID: MRT4577_172772C.1
aaaaaaaaggaaagagcggggaaaaggaaaaaagaggggaaaaaaaaaggcacccgggagccggggggggcgaaggaccggggggggggggagggcccccccgaaggcgggggggggcgggcccggacagcaggcaccgcccgcccaccccacacaggagacggaacagaccccccgaaccacccaggggctaccaactaccaactggtgggtagaccgccggccccaggacgacccccggccaaacgacaaccggcgaaaaactggggccgaccgcacactggggtaaaccgacaagtgccggaccggttcctcctagagaaaatagtgttacggtttggaggtgggatagagcttggcctaagctgggtcaaaattggatccggggaaaaattggcaccccccacaaacccccaacaaaaaacaacccgcctccagcccgcaaaaaacaagggg

SEQ ID NO: 79767 - DNA, 421 bp, Zea mays
  Clone ID: MRT4577_172774C.1
ttttttttttttttttttcgattttttgttttaccgaggttcggttcttgcaaacctactccccgttgaggtggtacaaagaccgggtctctttcaaccctttccctctctcaaacggtcacctagaccgagtgagcttttctcctcaattaattgggacacttagtccccgcaaggaccaccacataattggtgtctcttgctttgattacaaagaacttgagaacaagaaatggaaaggaagaaaagcgatccaagcgcaagagctcaaaagaacacgacaaaactctctcttctagtcactattgctttgactggaattgagacttggagacattttgattcactctatttgcgtcttgcattgaatgcactaactcttgtattgaatgtgttggctgaaaacttggatgccttgaag

SEQ ID NO: 79768 - DNA, 899 bp, Zea mays
  Clone ID: MRT4577_172775C.1
agtttctccctttcgggtttggtttgggaaacaaaaacaagtccccacgggcagaccgaaccctagcttcgccttttcgaccttcacccttgccattctctctttaagacctattctgatgtcgtcgtccggcgggggtggggctgggcagcagttccggtacacgcaaacgccgtcgaaggtgctgcacctgcggaacctaccctgggagtgcacggaggaggagctcgttgagctctgcaagcccttcggccgcatcgtcaacaccaaatccggcgtcggcgccaaccgcaaccaggccttcgtcgagtttaccgatgttaatcaagccatttcaatggtttcttattttgcatcatcttcagaaccagcacaaattcgaggcaaaactgtttacattcagtattcaaatagacaagaaataattaacaacaagagccctggtgagactgttggaaatgtgttgcttgttaccatagagggtgttcaagctagtgatgtcaccatcgatgtaatccatttggttttctctgcttttggatttgttcacaaaatagccacttttgagaaggctgcaggttttcaggcactgatccagtatactgatgcacccactgcatcagcagcaagagaagccttagatggaagaagcatcccaagatacttgcttccggatcatgtagtatcctgccacttgcggatttctttctctgcgcataaggatttgaacatcaagttccaatcacaccgcagcagggattacactaacccttaccttccagtcaactcctctgctatagatagtacattgcagcctgctgttggtgctgatgggaaggagggtggagagctgagggtaatatgttcttcgcgcatcaatgagagatgtgcagtatgct

SEQ ID NO: 79769 - DNA, 802 bp, Zea mays
  unsure (1)..(802): unsure at all n locations
  Clone ID: MRT4577_172776C.1
ccggccgggatcatcaacagatctcaattaattcttccactatggcttccgctcttcttcgatcaactcccgccctccgcgctggcctgcgcgcccgctctactcccctcgcggctatggctaccaccagcttcgtccgcggcaaggccactctccccgatcttccctacgactatggcgctcttgagccctacatctctggccagatcatggagcttcaccactccaagcaccaccagacctacgttaccggcttcaacaacgctaccgacgccatcgccgaggccaaccacaagggcgacgccaaggctgctgccgctcaggctcctctcctcaacttccacggcggtggtcacgtcaaccactccctcttctgggagaaccttgctcccaacggtaagggcggtggtggtgagcccgagggcaagcttctgacttccatcaacgaggactttggctccttcgaggccttcaagaagcagaccaacgctaccctcgccggtatccagggctccggctgggcctggctcgtcaaggacaagaacgctggcactctgtccatcgttacccgacccaaccaggaccccgtcaccggtaaccttgagcccctcctcggcattgacgcctgggagcacgcctactaccttcagtaccagaaccgcaaggccgagtacttcagcgccatctgggacgtcatcaactggggcactgtcgccaagcgatttgagaagtaatcaatccatattagtaaagtgaagagcttgagtggagataatgtcnaaatagcgattggacttgcgcg

SEQ ID NO: 79770 - DNA, 562 bp, Zea mays
  Clone ID: MRT4577_172777C.1
ctcctcactcctccacatcctcgcttcccatctcttttttgtctctgtctccctcacccaaattattcctgaaaggtcacctagagggggggtgaataggcaaatcttaaatttataatctttaagcacaactacaagccggggttagcgttagaaacaaagtcaagtccgaaagagagggcgaaaacaaatcacaagaaactgaagagtgtgacacggtgatttgttttaccgaggttcggttcttgcaaacctactccccgttgaggtggtcacaaagaccgggtctctttcaaccctttccctctctcaaacggtcacttagaccgagtgagcttctcttctcaatcaattgggacacttaatccccacaaggaccaccacacaattggtgtctcttgccttgattacaaatgacttgggaacaagaaatggggaagaagaaaagcgacccaagcgcaagagctcaaaagaacacggcaaaactctctcttatagtcactaattgctttgagtggaattgggacttggagagattttgattcaatctatatgtgtcttg

SEQ ID NO: 79771 - DNA, 243 bp, Zea mays
  Clone ID: MRT4577_172778C.1
agcctaacacgataaaataggcatcggaccatataatacatcgctcagcacgtctttctccagtcaacgtggaatggaagggacaggcattctggtctcggaaaccgcactgtctactgactgtggttgcagcaatggagggcatggaggctctggtgttagcggcggctaaagtatccaggagcgatggcttgctttgggcactctaaattgttgaaagtaacggcgccagaggcacaaccc

SEQ ID NO: 79772 - DNA, 171 bp, Zea mays
  Clone ID: MRT4577_172779C.1
ctcatctcttcaactagcagatgcgctcattctaaagccaaggatgaccgcatgtcttgcgcgcactcctgcggtcactggcccatccatcgccatgtcccctaccattactcttacgcacttgagcgttcccactggagtcattcctgttcagcaatgacacatgcagct

SEQ ID NO: 79773 - DNA, 444 bp, Zea mays
  Clone ID: MRT4577_17277C.1
aattcggcacgaggcaggcctctgcccctgttagcggatcgcgcgtgccggtgtacctctggctgggatggactcctgcttttgcctgtgccgccgccgctgggggcgagcccgagcgagatccgcgcgcctgggccgggggccctgcatatgcacgctggccccgggctggtggccggctccgtgtccggcacgtgctggcggggatccgccgccagcgggagtcggtacccgcgggcggcggcgcggcgcgccgggcggctgcgccctgtccggatgtgcgcgcccgacgtgggggggggcttcgacggggtgccctccgggcgcgtgatcggggtgcgccttccccgtgtgccgcgcctgctccgagtgcgaccgccgctggggctcgctggcgtgcccccctggcgagacccggtgcaagctcctctaggtctggccccg

SEQ ID NO: 79774 - DNA, 563 bp, Zea mays
  Clone ID: MRT4577_172780C.1
gaacacaatacttacttaatctaacattacttaaacatgaaattatgaacaatgtctgccggtggtgacaacattggaaacagcgatctacgtgcaggcaggcgcctgtgttggctggaacgggtgaccaaccacaaactcaccactagcaacagcggaaccacccgacagaggccccaactgggcagcgctatacgctatacgacgccaaaagtaacacctatgacatagggatgagatgagaaactgaatcatgatagctcatggcgtatcgggctcccattgttgagatcgtcacgggcccttgggaagtcgctccattgtcggatgaagtacgacccattgactcgaggagctccataactcagcatgatcttcatccttctcactaccctcttcatgatcctcgtcattgatctccgacttggacttggcagactcctcttcatcttcctcctcttcctccttggcaggagccttcttaactgcagtgctctcacccttgctgtaggcagggatggccttggtgtactagagcttgagcttgttagccttggatacat

SEQ ID NO: 79775 - DNA, 1191 bp, Zea mays
  Clone ID: MRT4577_172781C.1
gggcgcgcaggcgctggacgtcgtggaggccgtggtgcgcgagctggagacggaccccttcttcaactcggggcgcgggtccgcgctcacccgcgccggcaccgtggagatggaggccagcatcatggacggccgcggccgccgctgcggcgccgtgtccggcgtctccaccgtcaagaaccccgtgtccctggcgcgccgcgtcatggacaactcgccccactcgtacctcgccttcgacggcgccgaggagttcgcccgtgcgcagggcctggagaccgtggacaacagctacttcatcacggaggacaacgtcggcatgctcaagctcgccaaggaggccggcagcatcctgttcgactaccggatcccgctggcagggacggacacgtgcagcgcgctggcgggcgcggcggacagcaacggcggcggcgtgcacaaggcggggatggtcatgaacgggctgcccatcagcgtgtacgcgccggagacggtggggtgcgcggtggtggacgcgacgggggcctgcgcggcggccacgtccacgggcgggctcatgaacaagatggccggccgcatcggggactcgccgctcatcggctccggcacctacgcgtgcggcgcctgcgccgtgtcgtgcacgggcgagggcgaggccatcatccgctgcacgctcgcgcgcgacgtggccgccgtcatggagtacaagggcctgcccctgcaggaggccgtcgactactgcgtcaaggagcgcctcgaccagggattcgccggcctcatcgccgtctccggcaccggcgaggtggcgtacggattcaactgcaccggcatgttccggggctgcgccaccgaggacgggttcatggaggtcggcatctgggagtgaccagcgcagcgcagcgcggccggggtggagcggagctggaggcccgccatctaaaaagacaaatcaaaatcagtgtgcgtgcagctgcatgtggccatcctgcgattgccatgtgtttaatctccgggtcacaggtgttgtcgatgatccaccactagtagtagggattgcatggagattggtgctcgggtcaataatgatggtgattgtgacggagtgccctgcaaaataattaataattcgtgtgaaaaagttgattatatggttcctgacactatcatgttcggcctttggcgatctagcac

SEQ ID NO: 79776 - DNA, 1528 bp, Zea mays
  Clone ID: MRT4577_172782C.1
ctcgaggccggccgggccgggcatcctcacatcgtccacagaatttcacgcatcgcacggggaacagaacaccgatcgatcgatccctcgagaagcagagacaagtagcccgcccgtccgcccgcacacatagagacagagagaatcaagccgccgccgaccagtgacatggcgccctgggccattgccatccacggcggcgcgggcgtggacccgaacctcccggagcaccggcaggaggaggcgaagcgcgtgctggcgcggtgcctgcaggtgggcgtggacctgctgcgcgcgggcgcgcaggcgctggacgtcgtggaggccgtggtgcgcgagctggagacggaccccttcttcaactcggggcgcgggtccgcgctcacccgcgccggcaccgtggagatggaggccagcatcatggacggccgcggccgccgctgcggcgccgtgtccggcgtctccaccgtcaagaaccccgtgtccctggcgcgccgcgtcatggacaactcgccccactcgtacctcgccttcgacggcgccgaggagttcgcccgtgcgcagggcctggagaccgtggacaacagctacttcatcacggaggacaacgtcggcatgctcaagctcgccaaggaggccggcagcatcctgttcgactaccggatcccgctggcagggacggacacgtgcagcgcgctggcgggcgcggcggacagcaacggcggcggcgtgcacaaggcggggatggtcatgaacgggctgcccatcagcgtgtacgcgccggagacggtggggtgcgcggtggtggacgcgacgggggcctgcgcggcggccacgtccacgggcgggctcatgaacaagatggccggccgcatcggggactcgccgctcatcggctccggcacctacgcgtgcggcgcctgcgccgtgtcgtgcacgggcgagggcgaggccatcatccgctgcacgctcgcgcgcgacgtggccgccgtcatggagtacaagggactgcccctgcagcaggccgtcgactactgcgtcaaggagcgcctcgaccagggattcgccggcctcatcgccgtctccggcaccggcgaggtggcgtacggattcaactgcaccggcatgttccggggctgcgccaccgaggacgggttcatggaggtcggcatctgggagtgagctggaggccccgccatctaaacacaaatcaaaatcagtgtgcgtgcagctgcatgtggccatcctgcgattgccatgtgtttaatctccgggtcacaggtgttgtcgatgatccaccactagtagtagcgattgcatggagattggtgctcgggtcaataatgatggtgattgtgacggagtgccctgcaaaataattaataattcgtgtgaaaaagttgattatatggttcctgacactatcatgttcggcctttgtttgtgccttcatctgtctttcattcgattattaaacatgtccttcattgggttgatagaaatctggggctgataggtggcccaagcc

SEQ ID NO: 79777 - DNA, 1457 bp, Zea mays
  Clone ID: MRT4577_172783C.1
cctcgaggccggccgggccgggtcggtcgaggccgaaccctagaagttctctgttctctccctcgtccggtcgtcctcgtccctcactccctctccctagttgcctacccccgccgccgctcaactcaatagttgctcggtgcctcggcctcggttgctcttgcagtcttactcgccaagtcgccaggtgacgaggtcctagacccacgccgccgctgcatccagattccggacccacgccactgccgcctgcatccagtctccatggcggttaccagtgacaccacaaatgacgacggacggtgatgcttcttcttgaacctcgttcctcttcgtcatattaaccttgtagctccgcacatgaccgcatcttcatctcgccctttgctgacacctcgccgtcccaaaggaagtcgctaccacttcaactgagcatcgcccctggattcgaaggacaagagcaacgacggcgacagagacccaaaaggatctgcttccccttcatctcttgcacttcctactccgaacagaggacaaggctcatgtgggcagggccggcaggccaaacgtcgtcacgttcgctcccggcggtcgacacatcgtgaaggctggtggtagccggcctccccggtcttcaaatacaaccgtcgctgctcgatcaggtcacaaactcctgctacctctcaggttgaggaaaatgtctacagctagtgagagtgatggaactcatggaagcaaccagagccagtgtgtagtgtctcaagagtcaccacctgccactgagtcaaacaacgatgcagagtcaattgacatagaagatgaagatgaagaggaagatgttgtagctgggtccaagaggaaacgaacttttgctgtttggaaagagttcaccgaagtgcggattggaggcaatgtacatgcaaaatgcaactattgctccaagaagctttcaggatcatccaagaatggaactaaccatcttcgtctccatttgaagtcttgtgtgcaaaagaggatcaaggtgaatggaaagaccatggcacatgcttctttgaggtttggtaaaacagatgctgggacagttttagttgagaactacatctttgatcaagacatagctagacaagaacttagtgcaatgatagtacttcatgagtacccattaagcatggttgatcatgtaggcttcagaaggtttgttggtgcacttcaaccacttttcaagattgggacaaggaatactataaggtataatagatgtgacttctagttttacttctagttcttttgatagcctggagtcatgtggagttcttttgaatcaaaggctctggacgcatgctagtgggtaatgtaatgttgctgctggtgatcatgtagtgtccacgtgtggtactggttaaccaccaataattataattttctggtgatcatgtaaaaaaaaaccccaacaagcc

SEQ ID NO: 79778 - DNA, 645 bp, Zea mays
  Clone ID: MRT4577_172784C.1
aaagtttgaacatgatatgaattgctggtaggaatgcgggatcttaccagggatctcccctagcctataaagttcattttttttgtcctcgactacttaagattcatacttttcgaatgttgggtccaccacttggtcttaacatctgtacaaaatagaggtgcgactttgtgggtgttagtgtattgtgccttggccatgaactatatagcaatacatcccctactcattagggttaggggttttcattctcctaacagctagtacagcaacccctggtaatgctaaccaggttctctaataatctgttagtttctttaactgtataatattacagatatctacctatctctctaatctttcatatttattttttcaggttgatggaaactacatatccaacttggtcttgagtgtttttcatgacccatctgtcatggaccaggagcatggactgcacatcaaagatgtcatagatcgtctcaaactaccagatgatgtagtcagtgcggccatccaaggtcatgttgatgtgggcaacatttacaacacaattgatgacttccactacaaatctgtccggaatggatgaccacgttgcaagtccagcgttcaggctccgtgtaggtatggagccgtttcaag

SEQ ID NO: 79779 - DNA, 260 bp, Zea mays
  Clone ID: MRT4577_172785C.1
acccctaccaagccatcgccggaccgtcgggcaatgccaagctccctctcctcctatctctcctcaccggagctgcccctacggggtcagcatcccgggacggaggccgggaactgctgacaggtacacctcgcatggttctacgtgctcaggaaatggcaacaacaaggcgatgcacgcaactggggagtgtgggcgaccacaacaaggtgaacccctacaaccctggcttcgtggacgcgagatgcgtggggcccggg

SEQ ID NO: 79780 - DNA, 312 bp, Zea mays
  unsure (1)..(312): unsure at all n locations
  Clone ID: MRT4577_172786C.1
gcgaatgggatcatgaggcgggcgggacacactncnattagcgagagcaacggacgtaagatgtcgtctatttcnattggatcgaattatatgtcttcttcntccctctcttctttgtcnctctctccttctttttttctgcttgntcttggttnggacttgcttcccttgtgtacggtttggtaagcctcttggacgtcactgtgggccacttttcccacattgtcttccgaaagacaatagacagcgacccttgtgctctcctgccgcttagccatagccccctgacaaccctgccccagccccctccct

SEQ ID NO: 79781 - DNA, 557 bp, Zea mays
  Clone ID: MRT4577_172787C.1
ccggaaacttatagttgggaacctataggtagattcatagtagttaaccagtttgcttaaacaaattgacgtggttgtttgatctacgcaaaagatggcactggttgttggttttaatagtgaaatgtcatcctaaccatttaactagccatatccaacatattatatatttatttctctaaatattgacagttgctctccaatacaaattacgtggttgcctcactatctgtttttttaaaacttttttggggtaaaatcaaactgaaattcggcgatggctcgtccccttgcaatcggtcttctacctttcagtttctcctccttagcgtggctttgcatcaatctgtgcagagaattaaagcagatgatgtctcctccgatcttgagaatttttttttggatgacctaatatgttatgagctaaactttgccagcattttatcctttcctcagttcctctacatgtaattttagctcgtcccgaaatgaaagaggccaggaaccacttacacacgccggggcttctcgcgcgggggggggcggtaccggttcca

SEQ ID NO: 79782 - DNA, 187 bp, Zea mays
  Clone ID: MRT4577_172788C.1
ctcgagaagctaccggctggtccgatcggacggaccccttcgcgcgccccaaagatttcaagtaaggtgctgtaacaaaaaatgcaagggggcaaaggtgggaagcaaggcttattctgtttccgggacccttctggggggtccgggggcttttgacaaccagggagccttatgcctggtttttttg

SEQ ID NO: 79783 - DNA, 591 bp, Zea mays
  Clone ID: MRT4577_172789C.1
ggggggggggggggttttttttttttttttttttttttttttttttttttttttttttttttttttttatcaaaccttctccggtgggttttttgggtgggtaaataaaatggaaaaataaaccatggcaacctacacactacatttggggggggggggggcacattttcgttcaagagaaaggggacaacaaaaacacaagggcgggcggggacagccaccacactttttggggtcggtacgccccagcaaatcccaattttgaaagcttcaggggggccccggggtagtcagcaaaaaaaggggccccgcccggtggggttttggcaacaagggggcggaagggtggatcaaagaggggggctttgtcacttgggagctgcagaagggcttccttttttccggtcaaaagctccttgaaggaagaggtggcaaagaacaaaggggggggcggccaggctcccttaaatccagacctggccttgggggatcttcccagggggggaccaccagaaagggcaacaatggcctgggcggtcaaacccatttgtggggagaaaacctgcccgaggggatcagaaccttgggggg

SEQ ID NO: 79784 - DNA, 226 bp, Zea mays
  Clone ID: MRT4577_17278C.1
aaaataaaaacatacaattgtttttgttataaaaacaaacccttcaagagggggtattcttgttggacagggggtcaataccccaacctatatctactgtcaagctaccttaaaaatgtggaaatactcaccaaggtgtaaacacttttaaattaaaaatttcgcttaagtaccaaaaaaattacttgttaccaaaataaaacaatcttcaactacttccttcctc

SEQ ID NO: 79785 - DNA, 603 bp, Zea mays
  Clone ID: MRT4577_172790C.1
ttccttactgttaagccgccgttttcttcctcctcccttcctcttgcctccgtacaccacctccatcttcaaggcatccacctatgcccatccatgcttctccttccttgggttgatggtcagtggtggtcgcgacagtgtggtaaccattggagttgatggatctggtggttcgatggttcgatttgtgtgtttgatggatcaaattgtagttgctttaaatcaattcatgggtgttatcgcaacattgaatgcttggatgcgagattgtgggctccctgtggctggcatctatggcgacaccacattatcggtagggaaaaatgcccccaaaggctagtaacaatgttgtacaccatgacgacttgcaagtatgtaagttacacctaaatacttcctattttgatgtatttggttttaactttttgtaggataaagcatatatacaaattttttccactagaaatttgtagtgaggatcgacataggcaaaattattctattcgaattctacattttccatgcccctctatgttctttatattgtaatcaataggtaaagatctatgatttttaatatgtagtttccttttagttgatcgc

SEQ ID NO: 79786 - DNA, 1500 bp, Zea mays
  Clone ID: MRT4577_172791C.1
tgtcagtgctcgccgcgcggatctagggggaggggggccgtgcccggcgcggacgccgggatgccgatctgcgcgccgtcgtccgactcctcggcctcggcctcgtcgggcttgggcgcccgcgtctgggtgctccacgggctagcgctcggcgcggcggccgcggccgctgccgttgcgtacctgtaccggcggccgaccgggttccgcagccgcgcggtggggatcatacccgcgcgcttcgcctccacgcgcttcgagggcaagccgctcgttcccatcctcggcaagcccatgatccagagaacatgggaaagagttatgctagcttcttcgttggaccatgttgttgtggcaacggatgatgagagaattgcagaatgctgtcgaggatttggagctgatgttataatgacatcagcatcttgcaaaaacggatctgaacgctgctgtgaggcactaaagaagcttgataagcactatgatattgttgtcaatattcaaggagatgagcctctcattgaaccagagataatagatggtgtagttatgtcactgcagcgagctcctgatgcagtcttcagcacagctgttacttcactgaaaccagaagatgcattcgatacaaacagggtgaagtgtgttgtggataatctgggctacgcaatatacttttcaagagggctgattccattcaataaatcagggaacgccaatccaaaatatccatatcttcttcatcttggaatcgcgggctttgattcaaaatttttgatgaaatatccagaacttcttcaaacaccattacaaatgatccagaacttccaccaacaccattacaaatggaagaggacctagagcaactaaaagtttttgaaaatggctataggatgaaggtgatcaaagtggcccatgatgcccatggtgtggatgcacctgaggacgttgagaaaatcgaagcactgatgcgaacgagaaacattcagtagaaaacgaagagaaagcaagtgctttgcattgctatcggcgttggcttggtgggatacttttggttgtgctttcccatcttctgaatagcatgataccaagtgaagttgctgcatcacttcttgaagttttgtgcttgctaaaacgttcagtgattggatatgtcacttgcattagtcctcaatcagcagttcagcgcgcaggtggattgtatctgtacttcagtagttagtagcattactttcagtcttctttacattgaaaaacaaatcgtttctggagatgaagcaattggacagtgtaaaacaaaaggctaaagacccatccatgccgcgaggcgtgattgatataaggccagactcatcggaactttcattagacttccatttacatgtaataagttttcatatatacaatgttgatgatgtatacaattttaatgacgtgacggtgtttttttttaaaaagtgaaaattggtataaaacaaggaggcggttcccgtttcaaaaact

SEQ ID NO: 79787 - DNA, 207 bp, Zea mays
  Clone ID: MRT4577_172792C.1
tgcaatgaggataggccgaccgacacaaaggacggactcaacacatacgtttgtacgaaacaccaacaccttgttagactcgcgaggaatgcactcgaaaacttgcaaaagctgcttataactggatacagcgacgtaggcacatgttgcctgccgcttgtcttggcgggcaacaatttcaatgaattctttattattcccactggt

SEQ ID NO: 79788 - DNA, 793 bp, Zea mays
  Clone ID: MRT4577_172793C.1
ctctcacctcggtccccggccggcgtcgccattgcctagactcgactctctctttcgccggattcaactcgactcaaaagcctcgacgctttccatacctccctctgtttcgtttcttgcctttttggctccggtaagatttttccggcattcacatgtgagcctcgcccccctatccctttctcccccatctgttggtgtcaccaggatcaggatcagataggaaagcccaggctcagagaaaccgcgtttcgtttccgtgcgcaatccgtcattgccgtttcttgcagctctcgcagtccgtcccccgatttatactctgcgcacttccttcgccgcccgggccgacattgctccgggtgtcccctcttcggctgaatctcgattcgattcgattcgcgcctccgttcggatcgggaaatcttgagccttcccctggtcggattcccatagcgtcgcgtccagagatcttctcccttctttcgtcagttcgccggagcgcagagaggcctgaacaatggcggcggtgaatcttggagcgtggctctgcgcgctgctggcggcggtggcggccgtcctcccggcggcggacgcgctggggatgaactggggcacacaggccacgcacccgctctcgcccaggatcgtcgtgcagatgctcaaggacaacggcatcaagaaggtcaagctcttcgacgccgaccagggcaccctcaacgcgctcgccggcaccgacatagaggtcatggtcgccatccccaacaacctgctcgacatcatgaacgacaagaac

SEQ ID NO: 79789 - DNA, 380 bp, Zea mays
  Clone ID: MRT4577_172794C.1
tttctctttgtgtcttaagatataaagaaaatggggggattttttaaataaggaacgcacgtttcacagccgttactttaccgattatcaaagggcgaaagatcccaacacgtttacagttcctgactaaaagggggcgcaagccctataccaaatatcctaagtgcccagcccagggggaggtttcttttggtaggcctctcatgcggaggttcatgttccaagggattttcaaatttaccagtttgcaatggcatgaattccaataccattacgggaggcttggacattaaaaaagccaatgtttgccatgagaggcggactaacgcgagagttttcgggggggatcaaaacctgaatctctccctgaaactgttttg

SEQ ID NO: 79790 - DNA, 740 bp, Zea mays
  Clone ID: MRT4577_172795C.1
ccgggaggcacatcgaccgctgaacgcgacccaaagtatggccggattgtgatactgctcttaattaagtagcaattattgatgaattatttaaccgctcagtctacctacttgaaaagaaaacactacttgtcatcatttttgttgcactaattttgttccttgtttatggaccatgctgtaatgaacacgcctgcagacgctgagaaggctggcccagaacagggaggctgcaaggaaaagcaggctaaggaagaaggtgagcgagtctcgatactgatgacctacatcaagattggaacaaaagaacgagagaaaaatataatggcaaagaattaacatcgttttctttgttttttttaaaagtttgacatggttcaaattcttgtctccgccatccaatgacagtgtagatttatattgttttacttctcttttgctgcatgcaacaggcttacatccagcaactcgagtccagcaggatcaggctagctcagctcgaacaagaactgcacactgcaagagctcaggtatatgattagtatgcaacaaatttaataataaccacaaaggaaaaatgaaaaaaaaagaaacgtagtgcttgtatatcttgcctctcgacccttgttggtttcgtaaaggttgaatttttttaactgatctctggataaatatgtattctttctgcaaggagttttcttccccagcagtggcatcctcgctgacccaagtgtccccgg

SEQ ID NO: 79791 - DNA, 390 bp, Zea mays
  Clone ID: MRT4577_172796C.1
cgattgtcccctagctgggatggtattgtgctgatactgtcatcttgtcatttcttgtttggctgacctacactgaatattttggtttcatgtttctatcaaagttgtttagcatggaaacgaatctggagattacttgtcggttcattgggtattaattcatcataattatatgacatggattcctagaccaaaatttgggtaattgtttattacggaagcttggttgttaaagtttacaactgtcgaacagctttagcacaagatgacaagaggcaatgtggaaagataatgcctggatagataatagtttctggagcatctattggacttggcattgtttccatgggttttggaagtaatgaatgacatgcatccataagacgtatt

SEQ ID NO: 79792 - DNA, 503 bp, Zea mays
  Clone ID: MRT4577_172797C.1
tgctcccatctctccaaccccctacactcccgctttgcggcgcaggagcagaagcgcgggaggatggggaagatcctggactgaactctgggcacattccatcagcccacattgagggaagagtgccaaaggaagaaaattagaagttaacttggactgaggaacttcacattgatcgggaggaatgatgatgcacaaacagacaagcgctgcaagggggggggggaagttagacccatatcgcctcatgaccaggatgaaagtgtgcgatgcttagtgatgcccagcatggggtggagaccgaaaagatgagacatgactacatgaatggtgaggctatagacaagctgaacaagaacatgaagatggtgatgaggcttgccgtgaagcaccatgctatgttagcatcatgtgccataatcatgcaaattgcccgactaccccgccctggttttaacacgtcacggaagggatccgaccctggagtctcaacatgacaacct

SEQ ID NO: 79793 - DNA, 105 bp, Zea mays
  Clone ID: MRT4577_172798C.1
cggtttggttgttccatgggagtttaccggttttcacctttccccttcgggctacagagctcaaccgccgggagacagagtccaccaagggccaaagctgaaagg

SEQ ID NO: 79794 - DNA, 493 bp, Zea mays
  Clone ID: MRT4577_172799C.1
cccggggcgatcccagttttcataattgaaccaaaacatgttggttagccccatccacccattccatgacccaaggggcaaggagagggcacttccgaaacccggcaccaacagaaaaaatggggtcccccacctttcagttaaccgaaggccaaaaatccaaagaggctttcagagggcaagaaaaacacccccaagtttttgttctctacagccaatatgggccctaccccaacagggatcaaggacgggggttcatctttttccccctttcggctaaacaaaaggacgggtacgggaaaaaaactaatttctggaaactggaagggggaaaaaattgacgtctcaccaaactcgggaaacttccgggactttttgggttaatggacccagggctatgccctgaaagctgtctgaaaaaagttgggttgcacaacttaattgcctcgttgggctgagtggtttgaatccaaacattctcactgggcattcc

SEQ ID NO: 79795 - DNA, 1291 bp, Zea mays
  Clone ID: MRT4577_17279C.1
ctccagggaccagaactagggtttgcgaaatcgtgacgcgagcacttgaagattcgcgaaagacagcgcgaccgacccacggcgatggccaccgtccaccctcaatccccggcgggtcccacccatctcccgcaggaggagcgacacggggacgccccggtaccgcccgccgtctccggcgaacccgccgccgcagcggaggcgggcggcgagatcgccgcgctcgacaagcagctcgccgtcgtcggcggcggcgaggagaggaggccggccggggccggggccggggccccagcgcaggcgggggagggaagctggtggcggaggccatgcgcaagtacgctgccccgcggtcgtcgcgcttccacggcgtcaccaggctcaagtggagcggcaagtacgaggcgcacctttgggacaacaccagccaggtcgaaggccggaagcgcatgtggtcgcacgtgtacttaggcagctatgtcgatgaagagcaggctgcaaaggcacatgatttggctgcccttaaatattggggcacagggccaaacaccaaactgaacttcaatatttctgattatgagaaagaaattgaggttatgaagaccatgtcccaagatgaatttgtggcctacataaggagacaaagcagttgtttctcaagaggtacttcatcataccggggtgtaaccagacggaaggatggtaaatggcaagcaagaattggtaggatcggtgagagtagagacaccaaagacatttaccttgggacctttgaaactgaagaagaggcagcagaagcttatgacatcgcagcgatcgagcttcggggtgttcatgcagtcaccaactttgacattagtaattactgtgaagatggtttgagaaaattagaaggcccatcagaggtggctaagcttggaagtccgtcggaggttgtgaagctcgctgggcaatagatactagattagcaacgtgtaaattagtttctatttcgtttcttttgtcttcatattctctcccttttgtattcctggttttttttgccgttttgtgatttcctccttgccttattggcaagccagtatttacccgattcgaaaggacaatgtgatgttgtattttagcctcacagaaaggtattactaacctttgatgtcactgcagaagtcgacaccatgttagaaatttagttcattcgtcgatgagcatgtctagtgttattatataattgtaagctactgtttctaatgggggaggaatgaaaacagaacatgaacataagttgcattgt

SEQ ID NO: 79796 - DNA, 575 bp, Zea mays
  unsure (1)..(575): unsure at all n locations
  Clone ID: MRT4577_1727C.1
agggcgattgggactctcgaggccggccgggacgccgcctcccctcccgccctcttgctccgccggcgcggccaccgccaccgacaccgcaacagctagtcataagatcgtaaccatgaaagctgtcgaaggccgctgcgcgggcgacgatccgcacgcgcgagttgatgaccaaccgccttctcgcccacaagaaggtcatgctcgaggtcatccgccccggacggcccaacgtctcctaggcggagatatgggaaagcgtgtagaagatctactacgagaaagacacagactgcatcctcgggtgcgagtgacaaaccttgttccgatgagattagaccgaccgacttctgaccctacaaggactaccttgaggtcgccaagaagatcgagancctgtaccggctcgtcaggaacggtcttgctaccgggtagagaaggcgcgaaagcagatgaaggaacgcgagaacagggcgaacaaaatccggggcgcgaaaaagacaaaggctggagatgccaggaagaacaaggggcaggaagtgactcgcctggctctttctctcatcataggcttt

SEQ ID NO: 79797 - DNA, 770 bp, Zea mays
  Clone ID: MRT4577_172800C.1
ccggccgcgctccgcgtatatccgcagtatgcttcgactcctgttctagggggattatggtcccgcagctggatcccatcccgccagcgcccatcttctttccccactccgatggaattgatcgcgcggcgagggggggaagaatatgataaccctccgaagctccgactgccgaggagatctgggcgaaataggcgccggcgatgccgtcataaagcatccggcacctgatctattgtgactgcggcgacaagggcatcgctcgtcgtaccgtccactcctggattctatgcacgggaatccataactgctataaggacgcacttgccgccgcaagcggaagcgccgcctccacaaggcggtccgacaaccggagaggcgcctccggcaacagcaccgccgcctccggaagtgacctcaagaactggagatgcggacttccatcagggcgaacaggacacgcctttccacctcttcttggttgcactttatgtgaacatcacggccctgctcgaactgacctgacagactgtcgttgactttgatctacggaatatcgcaaaatagatgctgaagaccttcagcattgataatgacttcacccctgaggaggaagaggagatccgttacggagaaccagtgttatctttaagtgaggaggtgctggatctattgatgcctaagtttcgtggtgtctactactatgtctactttatgtgtgtcctaatggtggtaagtatttggggagtcgctttgcttgcgaatgtctc

SEQ ID NO: 79798 - DNA, 727 bp, Zea mays
  Clone ID: MRT4577_172801C.1
tgggtacctcgaggccggccggggtgctccttctttcctggcggatacgccggaatcctagttccaccgctccccgtccgcctctcggtctctcaccttagatccgttaccccggcttcctactccctgaaccaccgtcccccccgccccgcggtcgcccgtgcggcttcccgcggcaacggcaacggcgggccaccggtggagggggagaaggagcggcgacgctcgtcgctcccggcgctgtcggagatccggttgggagagcttctgtccccggaccccgccaatgccgtggctgtggtgctcacgggcgcgctcgtatgggctggcgcctcactgctgctgcagctcacgctcatctccgcagcaatcttcgccgccgccgtcaagtactcgtttgtcgccgcgcccctgctaatcgtccttatcgccctgctgtgatcgacccggccaagaaaaaagctgtaagttcgcacgaagcattccgattgaagatcacgtagagggcaaagcagcggatttcaaatgtttccatttttgtatggagcagtactgcagtagaaaatatttgcctgccagtgccaggtgcgtttattattattattggtttttttttttgcacactgagataattggattccaaagtagtctcagcaaacaggggatatctgagaaaaacaccagaatacagtgctgttcaattcaaaaaaaaaaaaaaaaagcggcc

SEQ ID NO: 79799 - DNA, 114 bp, Zea mays
  Clone ID: MRT4577_172802C.1
cttctagtatgtttaacaagaacacagcacgtccggcgtggcggtcagcatccacctccattgtttaaagagaacagcggagacgtccatcaatcacaattcagtccagacaac

SEQ ID NO: 79800 - DNA, 744 bp, Zea mays
  Clone ID: MRT4577_172803C.1
ggtgagttctctggcttgcctctgcactcgcccatggccgtcgaactttcccagcccaatcccaagaggcagcacgcgtccatggttgcgttcgccgagctccggtgcttagcgtcgaggtcgctgcgcgttgtcgctctgacttccttgtccttgcgcggtgtgtggcggtcatgttcacatccgcggcatcagcgtccccatcgccgttgaactcctagacatgttcctctttgttcgcttgttctcggttctggccaggtctgcgtgcgtgattttgaagctcttttgcgttcgtcgtgtcgcgttgtgtgtcgatattctctcccgatagacctcgctgtcgaccatgttcaagtgattgctcggctccttgcctcccttgcatcctcctcgatagaccgttcgctctacttcagctcgcgtccagggatgtcgtgccgcgctatcatcacctcctatcgtaaactagatccccgttgtcgtcgcttcaccgtactcgttggtcgtacgcccttggagccccctgttcagtaaaataaatgaactggagatcatcatcgtctctcatctgccaagccgatttggttatggtaagccgatttgtttttacggttaattagattggttagttatattgtggcgatgctctgggaagaatacctttttcatttcttttgtgggttatatgttgccataaggtattgcagaaatatttcctatgcagtagtcgtgtcatgtgct

SEQ ID NO: 79801 - DNA, 984 bp, Zea mays
  unsure (1)..(984): unsure at all n locations
  Clone ID: MRT4577_172804C.1
gctgggggggtgtttttttgactaaacagattagggtgattccactgataaagctagctttaattttttgtgcgcaccgtggtcgtaatagtgtggtacactagtagtagaccacagcgttgaccggggcagcaccaattaatccgcactcaacatgggggggggggcgccggcgcaaggcgtcaagtcaaccgccaccggcagcaccagccacccgctgccgctgccgctgccttccggtgcgcagcgaaagcgatcggtgctgcagcaggccagcagccagcaggggcagaaggtaatgcgggcgtgagcgtgacgcgacgggacgccacgccgccgcccgccggccggcctttcttgtcagctgccatgccacccccgacgctagctagctggcccgccagggtcgtcagcgcgaccgggccccgccgaagtactgggtgcacagctcgtatctgttggagtcggaggcgccgccgcccctgcatctggccgtggccgccgggaggagccgccagcggcggggggcccgtgctggtgcgcgccgtcgtagacgatgcggaggtcgccgccggggtcgcgcgggtgccactccaccttcttcttggcgccgcacagcctgtgccggcaccggaagtagctcctcattttctggatgttcttgatgaacttctggccgtacttcttccactcgtacccgtcctcgggcatcaccagctgtctgccgttgccggcctccaccgccgccgctgccgcctcgtcgtcgtcctcctcctcccttttgtttgtctctcctctcncgaaaaaatatccccccccccacaatgatgcaaaaaatcagtcttgctactgtatatatcccagctggctgatcgtagtgctaggccacacagatatcatgaacttgaacatccgttatggtacccccatgttgatcgcggcgggttgtgagcttgaacccccgcgccccccccggcctccgta

SEQ ID NO: 79802 - DNA, 643 bp, Zea mays
  unsure (1)..(643): unsure at all n locations
  Clone ID: MRT4577_172805C.1
ggccgcttttttttttttttttttacaacctcatcttgactcgatgctgccatttcatatatccaagtactcataataggataactgtttgtttgagttgtgtgtttccaaccaaaataaatgctgtaagcaaacattttcggaccatttaagcagattacaaacgccagttctctcacaaagactaatagcgctgctgatgagtctcacatatataggccctccggcacgccttctttcttcttgaacataaccttttctttggccttcttgaagtctgcatgcgttaccttcatccgccgctctctcaaagcaagcaagccagcttcagtacaaatggccttgatgtcggcacctgaaaactcatcttttgacataataaactcttctaggtttacatcatcagccagtgtcattttcgatgtgtgtatctggaagatgcgccgcctagtcttgacatcaggtaaagggaattcaatctttctgtcaattcgacctgngcgaagcaaggctggatcaagactttcaatacgatttgttgctagaataactttaacatctccttttgaattaaaaccatccagctgatttaacaacttcaacatggtttctctggatctcacgctcaccaccagaatgagca

SEQ ID NO: 79803 - DNA, 419 bp, Zea mays
  Clone ID: MRT4577_172806C.1
tgcccgtgcgactgactagtccgagagcgggagggtccctagcgggctcgccggtgtatccggttctcatccgcctccgccgtcgggtggcccccgctctcgcggcgacgtcgcaccaggccgctggtacgttgaactgtgccggattgccagatgccgccccgctcaattgacgacgacagctccgcccgatgctcctcctccccgccacagtgatcccggcgtcgtcgaagggcgccaggaagcacgctccacgacggaccgccgaagccgcaggggacgtcgagacagtgggatccctggagaactacccgggccagggcactggcttcttcttctacaagagggagttcctacacgtcatattgaacatcctcaacaaaaagacctacgagtacttcaccgatccatactttgag

SEQ ID NO: 79804 - DNA, 159 bp, Zea mays
  Clone ID: MRT4577_172807C.1
tccacgcatgcgagggtacgcaccaattacgcgatggagctcaacaaggaatggtaacttgttcgtcaagccacaccaagacccagtggattggatcgctattctgctagtattgcctgtaatgacaatccacataaacacccggcgtttatcgcaaag

SEQ ID NO: 79805 - DNA, 413 bp, Zea mays
  Clone ID: MRT4577_172808C.1
gttccggacccggggcagtcccatttcttgaatggagcttgcaagttttaacctattatgtggggtgggccttggttgtggaggatcccaaacctcctaaactacgcatggccaaactccagaagcggcatgactgttcagcgagaacaagcgggagtacaaccgctcaggacgggagatcgtggagcagagctggacagccgactagtgcataacgatgctcgtcgtgcccgatctgggcacaatatgaaagcgtgaaatgaagacctcacccactccttgagtttctgggtcgccaggcttgtcgaagcattgaagaaccacagtgattgcattgtagtctgacggcaccaatgtgaccccattgagagcacccgctgctcatgggagcagctggcgaaatggaacgggtg

SEQ ID NO: 79806 - DNA, 214 bp, Zea mays
  Clone ID: MRT4577_172809C.1
cggctcgagggggaagtgaaactgtgtgagaagatggcccagtttgattgcagagacccaacctaaaaaggacacaccacggaaagagaagggttcacgggaagagaagcagaagccccaggctgagcggaaggaggagaaaaaggcggctgcccctgctcctgaggaggagatggatgaatgtgagcaggcgctggctgctgagcccaaggcc

SEQ ID NO: 79807 - DNA, 526 bp, Zea mays
  Clone ID: MRT4577_17280C.1
tgccagattccgaaggcttaactttgccggatcctctttctataggagatacctggaagagccttgtctttggctgggtaaacacaaataatactacgctgagcctcctcagttcaaatgctgaaagcgccttgggttttcttcactgttctcgtggcgcggtagcataattcagacattcatgtactgggagctgagggattagtacgaggccatttatgctgttttgctgcatgcgttgaagccgatgtatcatgctgctcccgtgacatccagacgccccgttcctccttccagacgcccatttctgggatccaaatatggtggctctggtagggtggtttaagatcatgtatctgctgctgaatagctgagctgcccgggttgtctgcacagaacttagcacagccgctgtgttcttatgtaatgctgcagcagtgcgcgggataagttttctgcagaaaaatagcattcattgtatttgtctggaacgtatgatcccaatttgataactgtagcttctgct

SEQ ID NO: 79808 - DNA, 2728 bp, Zea mays
  Clone ID: MRT4577_172810C.1
ctgctgacaaagaagctaatggacattgtgtcttgagttctatgtttcactttgtgggcgaattgctatctcgtgtttgtcgtcgtgggtctactggtgttttagttgctgaattgattcctaaggttcgcaatcacctacatagatgtgtgccaccagatcatagggccagaattcctgagatggtccagcatgtttgccagtctcaattttggttcaatatggttgaagcaatgagagatcagcattctattgaaaggttgacagaagagctgttgcgtcaacttgcgtcacaacatataagcgatgaagaggcttattggattctgtggaccctctttaatcagagcttcaagcgtttaactgtcatgaggacgatgtttgttgacaaatttttgctctggaaaacatttcctttatgctgcctgagatggattcttcactatgctgtctttgaatgtccaccaaattcaaccacagaaattctgatgcaaaggacaccaaacttttttggtatattgcaaagtttggttagtatttggtccaagaaagagtttattcagtcatattcagtggagcaacaagcttattagatggatatcactgcagcaattggattatgtttggaaaagctaacaaaaaaagaattagaaacaactaaagatgtattgaattctattcttcaaggagtaagctgcaggttagagagcccaattgatttattacggaagatggctagtgctgttgcattgacattctctaaagttgttgatccgaaaaatcctctgtaccttgatgacaactgttgtgaatatgttgattgggactttggggttctatctccaaaggagtttaaagctcctttagatgctgtagaaactaaaactaaaccaaaaacacgtgagaacaagaaaaaagcaggtgagaagaagacaaaagcaataaaacgtgatattccagacgtcagagcgaaaatcgtagagatcaattctatagatcatgatcaaatgcctgatactgctacgaatgggcagtttgaggaggaagaatgtgatgaagaagacatgaacatggatgcatacagtgattcatccctcgagccatatgatctatcagacgatgacacagatttgcaaaaaaaatttagccacctgagtgatcttgcagcagcactaagaaaacctgatgatccagatggtgtcgaaaatgctcttaattatgcggaaaagcttgtgagagcatcacctgatgaattacgctacaactctggtgaccttgttagagcactggtgcatgttcgttgttctgacgtggcaatggaaggagaggaagattctgctgaagaaaagagacagaaggcattggtttccttgctggtaacctgcccatttgaatctctagatgttctgacaaaattgctatattcatctagtgtggatattggtcagcgcattttgattattgatgttatgactgaggcggcacaggagcttgctgaaactaaaactgtgaagacagaacagcgacgtggtaacttgataactgacacttctccttcttggctggttccgagtaatataggacctcctggggcaggcccttggagagaggtatctgaaccaggcacgcttctaagttggtcacaccgttatgaaagagaggttccatctaaatcgggtcaattgaaatcaggaaaatctcgtaaatggggtcttggaaaagcgaaagacttgcaggttgagtggtctaaaaatagatttcctttgtatgccgctgcttttatgctccctgtgatgcaaggatatgataaaaggtcacatggtgttgacttgcttaatcgggactttgttgtcctcggtaaattgatatacatgctcggtgtctgtatgaagtctatggccatgcacccagaagcatcagctctagctcctgctctccttgacatgataagatctagagatatttcacgacatgctgaagcatatgtcagaaggtccgtattgtttgcagcgtcttgcatattgatatctttgcatccgtcatatgtggcgtcatctcttattgaaggcaaccaggacatttctactggattagagtggatacgcacatgggctcttcaaattgctgaagctgatcctgatacagaatgctcatcgatggccatgacctgcctgcggctccattctgagatggctcttcagacatcgcgcgcactggaatctgcaaatcactccaagactggcagagccataccttctaagctcgacagcattattctaccattcggcaacatgatgtgataggtaaactatatataagttgtgcagggatgtgtcctgctgttgtacagaacttacgtagcaaattctggttatttagaaggtggaccgtcaagttgtaccagctggtttacgcctgtggttgtctgaaaggtgagagtgagagatcggaactctttttttctttggcgtacatttttacggtgttattttgtttccagtccagtttaaatgagcagccccaccgtaaaaatgttagtatgttaaagagggatctaaatctgttctccccctcccgctgtttggttgaaaccccccactttttttgcattacaaattgtgtggaaaaacccaaatgatgtcatgaagatttaaaaaaaaaaaaaaaaagaaaaaaaaaaaaagaaaaaaacaaaaaaaaaaaaaaaaaaaaaaaaaaaacaccacac

SEQ ID NO: 79809 - DNA, 448 bp, Zea mays
  unsure (1)..(448): unsure at all n locations
  Clone ID: MRT4577_172811C.1
cttcactatgctgtctttgaatgttcaccaaattcaaccacagaaattctgatgcaaaggacaccaaacttttttggtatattgcaaagtttggttagtatttggtccaagaaagagtttattcagtcatattcagtggagcaacaagcttgtatcctttgagccactgaaaattacattgcttcattttttatacaagtattatttggcatcattctccttaataaatgcagatatcactgcagcaattggattatgtttggaaaagctaacagaaaaagaattagaaacaactaaagatgtattgaattctattcttcaaggagtaagctgtgagttcacccttgtacattagcttaccagaatttgatatgagtaacgataacatcttcttgctgatttgttnttgtcactctaggcaggttagagagcccaattgatttattac

SEQ ID NO: 79810 - DNA, 185 bp, Zea mays
  Clone ID: MRT4577_172812C.1
aaaagggaacctggggcccaacaattttttaattttgcaaatggttaaacacgtttaaatattaacgggtgtaacatgcatgttgtcctgctttatgcatgattatttaaagggggtaccactggaccctactacttattatattatatatattggcaacattaaacgtgccggccggtgtattt

SEQ ID NO: 79811 - DNA, 507 bp, Zea mays
  Clone ID: MRT4577_172813C.1
catgggagtctaaactacgaatgtagctaatcacacctgcaccattgatgtctaccgataagcgggagatacggattggcgaaagttactactagccattcagctacttaagcagctggcccaatgcatgtcgatgtgctgaataatccttatcagccttcgattgtgattgacctatagcagctgctctagctaggaacatcataacaccatattgctaccatttttcgctggcctgcgaaactgtgctgcacaagcaatggcacaccatctgttctagcgctcctgactgcagcgtatacagcatagcctacgggaaaacaagtgacctggggtgtgctgaatgacatggatgctggggcactcctataaatcccatggaacgtcctgctagactcactgacagatgacatggtctgttgcatctggcaaatggcgacccctgaattcgccaatggcatgcacattatcagggcaagataggatatgactttcatagctggatca

SEQ ID NO: 79812 - DNA, 214 bp, Zea mays
  Clone ID: MRT4577_172814C.1
attctttcttcatagctatcctaattcatttttcaatcttcccaaccataactggcgctggctcaaatacaaaacatatcctatacccaaaatataccaaatctacccttaactcaattcagcttttttctcatcacccactacctccacctactccagagcatcaccatccactgacaacaggccttaacaacatcctattttaataacctca

SEQ ID NO: 79813 - DNA, 1131 bp, Zea mays
  Clone ID: MRT4577_172815C.1
ccttggatcagaaacgccatccgggacaccgtgaccaggtccggcggcgaagcgagatggtgtcatccaagaaagtgtgcgtggtcggcgctggcgtgtcggggctggcgtgtgcccgcgagctgctccgcgagggccacgacgtgacggtcatggagcagagcggcggcgtcggcgggcagtggctgtacgacccgagggcggacggcggcgacccactcggcgctgccggcgcgcacagcagcatgtacgcctccgtccggctcatcagcccgagggagctcacgggcttctccgacttccccttcttccccagagacgacggcaccggcgactcccggcggtacccggggcacgctgagttcctgaggtacatcagggacttctgcgacgcgttcgggctcatggacgtcgtcaggctcaacaccaaggtcctgcgcgtcggcctggcggcgccgcgtgccgctgatgacggtgacggcatcaagcggtggacggtgagttggtctagacatcgtggctgcgatggcgaggtggtcaccacggaggaggaggtgtttgacgccgtcgtcgtcgccgtcggccagtacacccagccacggctcccaaccatcagaggcatggacaagtggagcacgaggcagctgcactcccactcgtatagggtccccgacctgcacctgcacctcctggtggtgatcgtgggcgaggatcatagggtcatggacatcgcgctggagcgctccaaggtggcgagggaggtgcacgtcagcgtcaagtccatggaggcgctcactcccgccgtgtccaaggccgtcgccaggcacagcgacctgcacctgcacctccagatcgagtgcttgcgcgaggatgggcaggtaacgttcgccgacggctcgcgtgtcgccgccgactccatcatctactgcaccgggtacgactgctcgttcccgttcctggacacgggaggcctggtgaccgtcgacgacagccgcgtcggcccgctgtacgagcacacgttcccgccggcgctggcgccgtcgctgtccttcgtggggttgccgaggatggtgctggtgccgcggttctacgaggcgcaggcgaggtgggtggcgcaggcgctgtcgggct

SEQ ID NO: 79814 - DNA, 526 bp, Zea mays
  Clone ID: MRT4577_172816C.1
agcccgacagcgcctgcgccacccacctcgcctgcgcctcgtagaaccgcggcaccagcaccatcctcggcaaccccacgaaggacagcgacggcgccagcgccggcgggaacgtgtgctcgtacagcgggccgacgcggctgtcgtcgacggtcaccaggcctcccgtgtccaggaacgggaacgagcagtcgtacccggtgcagtagatgatggagtcggcggcgacacgcgagccgtcggcgaacgttacctgcccatcctcgcgcaagcactcgatctgcgatatgcaagccacatttaatttgtcaggtcaccgtccgtacctggattgctggatcagattctgaaccagcgaatattggagcatagatttgtagctgcacggtttcctttcctggaggtgcaggtgcaggtcgctgtgcctggcgacggccttggacacggcgggagtgagcgcctccatggacttgacgctgacgtgcaccttcctcgccaactttggatagctccagtgcgtagtcca

SEQ ID NO: 79815 - DNA, 522 bp, Zea mays
  Clone ID: MRT4577_172817C.1
acacccagtcagtcacccgtaacagtgccccgtttcttcagctcacacgccaagaccagacgccaccaccaccatcaccaccttttacaagcctctctcgccacacagcagcgaagccagcccacgacgatccagctatggcatgcgttaacatgtacaacccggacggcggcgcggtggcgttcggcggcgggcagccgggcccgcgcatctccttctccagcgacttctccatggagccgccgccgccggtgcagaaccgggccatgggcctgcggtgccaggaggaggaccagaacttcgagttctccgtgggcagccaccccatgatggccgccgaccagctcttctccaagggccggatcctccccttcaaggtcgagggcggccgcccgccctccacgctccgcgacgagctccgtggtggcgccgccgacgaggagagggcgtccacgacgcccaaggggtccagccggtggagggagatgctcggcctccggaagtcgctctgcgtcggcggcg

SEQ ID NO: 79816 - DNA, 192 bp, Zea mays
  Clone ID: MRT4577_172818C.1
cacataatctctggctcatccttctccacgagctgagctcgcccttccctgcttgccgccatctcccaggacgcgctcgcctcggccaccgtcgtcggccgccgttcccagcagctcccaccttcgacggaccactgacttcggccgtgcacgcgctcagcttttacatgctgcccaagcataaacgctctg

SEQ ID NO: 79817 - DNA, 216 bp, Zea mays
  unsure (1)..(216): unsure at all n locations
  Clone ID: MRT4577_172819C.1
gggccggacagcccgggncgacccagcgnccggccccatcgagaaccncnncgaccagggcgccgaccccgncgccaacaacgccngggcatacgccacgaacnncgnccccggcaaccaacngacngagcaacgccgnacangngnacnaccancaganccanccanncgnncgnccgnccgncgagggaacagngnggncngcgggccgaagag

SEQ ID NO: 79818 - DNA, 255 bp, Zea mays
  unsure (1)..(255): unsure at all n locations
  Clone ID: MRT4577_17281C.1
tcgcccgcaggagcggcggcggcggcggcgaggtcgtaccccacatcgtcaagcggcagcgacaccnccggaggcaaaggcgaggaggatggggctgtggcgccgaanaagagcgacaacaccangtnctacgagatcctcnnnnnncccgagtcgtggtgccaggacgatctcagagaatgcctaccgcaaggctgcgatcaagaaccaccccgacaagggcggtgaccccaagaagttcaaggagctcgcaca

SEQ ID NO: 79819 - DNA, 518 bp, Zea mays
  Clone ID: MRT4577_172820C.1
tctttactttacttacaaacaacccagcgaagatctcggctgcgtgacgaagagaacacactatgtccagccaagagcattctcattactttggaaaatgatggataggcgaatccacaatcgaccatgtgcttcaagtcggacgtagcttggtaccacatagcttttatcgaacgatcaccactaacattcctctatttgcatcgtaaactggaattacctaatggatccaatatggatggaaacatgaatagccatagctcttgattactatatcaaacctgctatctatggaaaaacgtggctactacgaaatacagattcatcgcggaacactgtgctagatacaagttattgaaacccatattgtataatacgaatgacacatacaccctaaaggaggaatatagtagtttacttaacactgatttatcattattacttgaatttccattgtcaacagagcacttatgatgattaatcctgaaatgagaaggatgcactctttcccaacaaat

SEQ ID NO: 79820 - DNA, 397 bp, Zea mays
  unsure (1)..(397): unsure at all n locations
  Clone ID: MRT4577_172821C.1
cgcccagcgngcggggagggggagancgcgagggccgcccnnnnggggnnnnnnaananaganagcancaaaanagggaaggaagagnagcacggannannggnacaggacgaagggggagcanccagggaggcnnagananagacagacacccngagggggggggggggggcgcaagaagcgcangcanngggaanccnaagccggagagggcgcnggngnngnagacgaggagggcgccgccgccgaggancccagcgagggngacggcccagancagaagcccaggggnnccaccgacgnagacgncgccggggggagaccaggcanccncgnngnagaaggggcnnganccgncgaacggcgcgccgnacngggcgacgaacgggnacacgcc

SEQ ID NO: 79821 - DNA, 348 bp, Zea mays
  Clone ID: MRT4577_172822C.1
atggccagggtgcgctcaacagctagggttacacacgacggagaggaaaccgaagctactgaaactgctccgatttccgaagttatgaggtggtcgggactagttgtgacggagggtgcttctgacgaaggcgcccctgctactgaaaccgagcaggctgatattgaagagggcgatactggtgaagaagagattgattataacaccgctatgccatcgaagcctagccatttggattttaggaagtcaattgtgtctgaagctgatatggctatgatgtcgaagttaggctacttcacactacaggaaacgcctaaattttcatgggccaaaaacccacgaaaataa

SEQ ID NO: 79822 - DNA, 1383 bp, Zea mays
  Clone ID: MRT4577_172823C.1
cggacgcgtgggtccggttcggaccggttttcacgccttcgaaggccgggcaggcaggcagcacccgcggagacgcggagcctccactcctgatcctgtcacccaccgtcttcgtcggtgctgttgcctcctatatcacccaccgcctctgaagaagaagacgcggattcgagggtaggtaactgctgaagaagaagatccggtacggagaagacgcggagcataatagctctccaacagactagccatctaactttctaatctatctggctctctaaattaactttctcactagccaaatttggctagcaactctcgctatctaagctatcttgtatgttggagagtctgttggaatgagacgttatatatagagtttaatatttatagagatacaaataaagatttaaatagagagtaaaaaataaagagtctcttggagatgctcttatgagcagatacgtagttaaatgagcatggaacgttgcatattgattttcgatattgatgtgtattgcaggatgttggtaaggttcttcctgatttgaacggcaagctcactgataatgagttcctgggaggcgaaagctagacagtttctgttagaggaggaaaaagaggatgatgaactcttcttagtaattgtccctgctgttctcttggccatgcaagaagagaaacggtcagtacgtacttccggtacctcagcacatggaagcgcgaaaaagtggaagaaaagtcatgttgcaagtgttctggaagactatttggagcacaggaagaagcaaacggagaagactgtagaggcgttacttgagcggaagagtggggtgaagaggagtactctattgagaggtgtcttgacatagttgatgcattggaggagttgacggatgaggagaaggccgctgcagcagaggtgttcaataatgaagtgaatcgggagatgtttgtgattgcaaagcaaaaaattccaaatgtggggttgatttggcttcggaggaagataagtaggattgcatctacctgagatggataaggtgcgactgatggagtgatggctcattgagttgcttgctgtgtgcgtgcgcatttgttttctatgcccgacgatgagtagcttgttgtggtgcctgatccaagagctcacaccagtttattcagttcagttcagagcttgcatgctccatataagcagaccgctgcatgctatgtgttgttaagcagactgctacattctatacggagtttgcatgctccatgtactgttgcatgccacttgttgctgatcgaaaattttagtttgcgaactacatgttgaggacagatattttgtaaactgctactagcactgatgcatgcttgcaccgcagtttagcatct

SEQ ID NO: 79823 - DNA, 203 bp, Zea mays
  Clone ID: MRT4577_172824C.1
gggggtgaagcaagcaaccctgacggacacgggaaaagccaagacctgaacaacgccagcaaactcaaacggcccccatcaggggagctttgtcagaacacatgaccgggggcggtattcattgtacagctatccaaaaaaaaacctacaatggtggaaagctccactgcctgggcccaggaaaagaagcacccctttcctgg

SEQ ID NO: 79824 - DNA, 374 bp, Zea mays
  Clone ID: MRT4577_172825C.1
gtcatcatttttaaagcagcttcgccaacaaaaagagggtcaggatggtgttgatttggaaatgaatatgaacgggacaaagtctacatttgaagacgatgagtttgacgatgtggtccgttttattttggtctttacatgctgcatgccgattttggtgattctttttatctctgtgtatttgatattagcatgaggagtgcctatggactatgagtctgtcttcattggatatgagatgttagctgcatattagatattgacaagagagtgtgtggggtctgtctggcagaggctccatgtgtcttctcgcctttgtttgtacacttactctctgggactccttgagacttcaaagatgtgcttgacaggac

SEQ ID NO: 79825 - DNA, 556 bp, Zea mays
  unsure (1)..(556): unsure at all n locations
  Clone ID: MRT4577_172826C.1
gcttgagatcgatcgaggcacaagcccaacaacctctctctctctctctatctatctctccctgactgccatggagccgccggcgagctttcttcgcgaccaaggcggaggaggaggagcagaggagcagagcggcagccagctggagcacgaggaggatgtcccctgcgtgctggacatgttcgtgcacgaggcgcggggcacccacaagaccatccgcgtctacggggaccaccaggacgtgtacgcgaggctggcgctgacgtcggcgcccgacgccggcgccagcgcgcgcctcggcgagcgcctcccgccgctgcgcgtcgcccgcgggaggctggccgtggacgtgctcaagtgcgagctctggatgcgcagcgggggcgtcccggacgaccagctcctcggcttcgcgctcgtgccgctcgccgccgtcgccgcggccgacggcgccagggtcatcgcggccgacttcgagctctcgtccaccgacctcctccactcgcccgggngcgccgtgcgcctntcgctcgccctccgccggggcacgccgacg

SEQ ID NO: 79826 - DNA, 220 bp, Zea mays
  Clone ID: MRT4577_172827C.1
ggggggttttttttaaatcgatatgcgcgtactccacttatccaggttggaaaaaaaactcaacccggaccacaagtggccaaggctttctaccatggaacacacgggaggggacaaccaccggctgagactagggcgaggaaaaaaaaagaggactgctggggaacccggagagaaggacaaactcccggccccacacaaaattcaagccccaccctca

SEQ ID NO: 79827 - DNA, 305 bp, Zea mays
  Clone ID: MRT4577_172828C.1
accacgcgttcgcccacgcgtccgattacgcttacgagactatggatattcaacatacgtctggaatatatatggaggagcttatgtcccgttttatggatgagtaacagttggtatggtgacaggaacaagtacctattattcatattttcattttgggcagttttgaaacactactatcaactattcaatagtacaatgcttctacttgctacaattcttacatatgttacaattatcaactgaatcttctacagttgctgtatgttaccgtttatgatcagtaatattgaagatcatttgtt

SEQ ID NO: 79828 - DNA, 932 bp, Zea mays
  Clone ID: MRT4577_172829C.1
ccctcgagccggccgggccgggatcgaccgcaccatcaaaactaactcgttgagagcggcctcctcaaagcccgcagaaaaaaattcccaagatcgtcgtcgtcccgagctcaaacaagcgcagatggagcagtccggcgccaagaagtcgaacaagatcaccgagatcgtgcggatgcagcggatgctgaagaagtggcgcaagctgtcggtcacccccaaggagccaagctcgccgaccggcggcggcggcggcaatgccgttggcgagagcaaggctaagaagttcctgaagcggacgctttctttcacggacgcaccgccctcggggtccccgcccaagggccacctcgccgtgtgcgtgggccccgcggcgcagaggttcgtgatcccgacggagtacctgaagcaccgcgccttcgcggcgctgctgcgggaggccgaggaggagttcgggttccagcaggagggcgtgctccgcatcccctgcgaggtccccgtcttcgagtccaccctcagggccgtcgagaagaacaagaaggacgccgccgcctcctgttactgcagcgccgagtacgccgccgacgaggtcgggcgcggcacgcccaacaacccgctctgcagataggtggagctcgaggacagaacaaaaatgtcttcttcctcttcctttttttgtttctttcttcttgctctatgtaacgtggtgtggtgagggattgagccgatagcatctccccccgcggattacaattactgctccgatttctctctctctctgctgaaccgagctgatcttgactgggtaatgcagccctcgtggatgcaacgaattatggaaaaattgatgtggaaacgacgggtgttacgtgttctattgaaaggcaatgaggaggatctacctctgactgaaagattcgattttgttttct

SEQ ID NO: 79829 - DNA, 415 bp, Zea mays
  Clone ID: MRT4577_17282C.1
gtcgtttatttgaaatggacgatgatggctgtgaaaggacgatggtggtggcaacggtggtggaaggaggcatggcggcctctaacggctagtcgtgggcatggcagacggctgcatctggtcggcgcaccagcgtttggaggaggggtcggagatcggcttggcatagagaggcgcaactgatggcagcggaggccggctcggctcgagaggcgcgggcggtggagatggaggccggcttggcacgagagacacggccgatggagggaggctggacttggcgcgaggcgctttcggtggacgaggccggcttggtgcgagaggcgcgactggcggtggaggacgcgtcctcggtgcgaggaggagctgccggtggatgtggcgtattcttcggcgcacgaaggctggccggctg

SEQ ID NO: 79830 - DNA, 281 bp, Zea mays
  Clone ID: MRT4577_172830C.1
cccacgcgtccgcccacgcgtccgtggatggtaagtactttataataaaaaaaaaaggagaaaaaaaaaaaaaaaagaaaaaaaaaaaaaaaaagaaaagaaaaaaaaaaaaaaaaaaaaaaggtcctttggtctatcggtttctagcttacgtgctcttgcatgcaatatcttaacttttttatattgtcacctaatttcaattaactggccgacagttcacaatttcgggcctgggaataccttggcgtttcgaaatttactttgtttgcatcatattc

SEQ ID NO: 79831 - DNA, 847 bp, Zea mays
  unsure (1)..(847): unsure at all n locations
  Clone ID: MRT4577_172831C.1
gccgccggcgaggtcctcgtatgaggatcgagtggtgctgcaatccggagctcctctccgagctgcgatccgcaatcaggcggttcctctccgagctgcgaccggcaatcgaagcaatcaagcggctcctctccgagccgcaatccgcaacgaaagcggctacctttttgagtcgccgtccgcgatccaagcattccttgtcgggctacagtaagaaacaagtcctctttcgtttccagtctccgagccgccgccggaggcgggatccaagccgctgtatatcagcccgagctatctcccgagacatcacgaaacctctccggcgatggagaacactcatcacgggcgaccggctgctagagcaaactccaaacagtccgtcaagggccccggcaagtcctcctccctcgacatggtggaggccaatgaagatgataggctcagcaagttgcctgatgacattttgctcaacattgttgagcgacttgatatagctgacgctgcacgaacaaccatcctctccagacgttggaagcagatccctgctgtactctcaaaaattgttataatggctggttcttttgagcccaagcacaaagaatggagcaagttaacctcagatngatatagttcgggctaacaccaccgtgctggaagcaaccaggagcatactggaaagtaagggctggaagtctgtaccccatccacatgttgcgcattcattcctacctgggagatgagtccattttatttggccagactgttgccaacacatgacaacacaaaagggtgcttcagcgagttacaaatcttgacgaaggtgcgtaaaagtgtgccaacatgactg

SEQ ID NO: 79832 - DNA, 2737 bp, Zea mays
  Clone ID: MRT4577_172832C.1
gcatgtggaggagggctttagcgatggtcctgttcatggttggcgccgcgctgctcgccggggccgccggcgccggcgcgcagcagggcgtgtggagcatcatcacccggcccatgttccagagcatgctgagccaccgcggcgacagcgggtgccagggcgccttctacacctacgacgccttcatcgaggccgccagcaagttccccggcttcggcaccaccggcgacgagcagacgcgcaggcgggagctcgccgccttcttcggccacacgacccacgaaaccaccggtggatgggcgactgctccgaatttttttttgcccccacaccttgggtacgcggaccggccgggccccaaccccaaataattcgcacgaggcaccaaggcaccaagcccagcgaggccaccagctgtccagctccacctcgtcgactcctccccgcacaagacaaaaaaaccctcgccttggaggcgcgtgagcccgacacccagagcgaaaaaagcgaggggtctgaccgccggcgatggcgtccatctccggagcggcggcggcgccatcttccgctgcgtgccggctgcggctgcgtaggcacctcctgctgcggccctcgcacctccgcctccgcgcgccccactccatcgccgacctctcccgctcctccagctcctctaattccgccccgacccgggcccagccgctgggctccaggccggagaacggcggcggcgtccgcgcggtggagaaggacccgatcaagctgtgggagcgctacgtcgagtggctctaccagcacaaggagctcggcctcttcgtcgacgtcagccggatggggttcacggaggacttcctgcgccagatggagccgcggatgcagcgggccttcgccgccatgcgggagctcgagaagggcgccatcgccaacccggacgaggctcgcatggtgggccactactggctccgcgacccggccctcgcgcccaactccttcctccgcagcaagatcgagaccacgctcgacaggatcctcgccttctcccaagatgtcgtctctggcaagattcaatccccatctggtcgtttcacttcaattctctctataggaatcggagggtcagctttgggccctcaatttgttgctgaggcacttgcacctgataaccctccactgaagataagatttattgacaacaccgatcctgctgggattgatcatcaaattgctcaactaggacctgaactggcaactactcttgtaattgtcatttctaagagcggaggcacacctgaaacccgcaatggtctactagaagtacagaaagccttcagagatgcaggtctgcaattctcgaaacagggtgttgcaatcactcaagaaaattctctgttggataacactgccagaatagagggatggttagctcggtttcctatgtttgactgggttggtggtaggacttcagaaatgtcagctgttggtttacttccagctgcattgcagggtattgatatcaaggaaatgctagttggtgcagctttaatggatgaggaaacccggaacactgtggttaaagaaaatccagcagcattgcttgcattatgttggtattgggcatcagaagggataggcaataaggatatggttgtacttccttacaaggatagtttgttgcttttgagtagatatttgcaacaacttgtcatggaatctcttgggaaagaatttgatctggatggcaaccgggtaaatcaagggctatctgtatatggaaacaaaggaagcactgaccagcacgcttacattcagcagctgagagaaggtgtacacaacttctttgttacttttatcgaggtcttgcgtgacaggcctgctggtcatgattgggagcttgaacctggagtcacatgtggtgactatttgtttgggatgttgcagggaacacgttctgctctttatgcaaatgaccgtgaatctatctctgttactgtgcaagaggtaactcctagagctgttggagcactgattgcactttatgaacgtgctgtggggatttatgcttctttggtaaatatcaatgcctatcatcagcctggtgttgaggctgggaaaaaggcagcaggagaagtattggcccttcagaaaagggttctgactgtattaaaggaggccatctgcgagaaccctactgagccattgactctagatgaaattgcagatcgctgccattgccctgaagatattgagatgatctacaaaataatccagcacatggctgctaacgacagagcacttatagcagaaggcagctgcggctctcctcgcagtgttaaggtgtacctcggtgaatgcagtgtggacgaagatatgcaggccgcatagattctgtgtctggatccgtgtaacattgttggaataaatcagaagcaacacaatagcgatgctatgcatgggtgtcgctgatcctgatgtcccattagtttcttgtttggtggtgcttgcacacgattgccggaacgatgtaattttagaatttgattttttttggaccccttaaaatataaaatacaaagatagaaggtggtgtccgcaaaaaaaaaaaaaaaaaactatcgtattttttgctttttaacaaaaaaaaaaaaaaaaaaaaaaaaaaaaaaaaaaaaaaaaaaaaaaaaaaaaaaaaaaaaaaaaaaaaaaaaaaaaaaaaaaaaaaaaaaaaaaaaaagggggg

SEQ ID NO: 79833 - DNA, 579 bp, Zea mays
  Clone ID: MRT4577_172833C.1
cccacgcgtccgcatcaacctggtgttgaggctgggaaaaaggcagcaggagaagtgttggcccttcagaaaagggtgctgactgtattaaatgaggcaacctgcaaggacccttgtgagccattgactatagatgaaattgcagatcgctgccattgccctgaagataaacacaacgcttttcccccctctataacacatgcccaacgtttgcttcctcagattgagatgatctacaaaatagtccagcacatggctgctaacgacagagcaatcatagcagaaggcagctgtggctctcctcgcagcgttaaggtgtacctcggtgaatgcaatgtagacgaagacttgcaggccgcgtaggttccgagcctggatccgtgtaaaattgttggaataaatcaggcgcaacaagatagcgatgcaatgcatgggtgttggcggatcctgctgtgcagtttgtttcttgtttggtgtttcttgcacgcgaatacgcgattgccgcaacgacgtattttagaatttgaatttttttggaacccttgaaaatacaaaataaagaagataaggtggtgtccg

SEQ ID NO: 79834 - DNA, 348 bp, Zea mays
  Clone ID: MRT4577_172834C.1
gcggaccgtgggtgagtatatgggtgtaaacatttcatcgtcatgaatcaagcctatatggatactgcattgaacatgcacttgtacaatacaactgaaacatgctgcaaggtcaaaataggcatatactctgagactcacattaaaacgcgatatcaatatataattatattactatccccaatacatgttttgaccactttaaacctcaggtccacgaaacccctggttgtcacacttcaacagatcctataaaccccattatgctcagttcacgtagtatataaagaccctgaagcgcccgaccttacaaaagattgttaaccactaagacgaaatggaacacat

SEQ ID NO: 79835 - DNA, 1087 bp, Zea mays
  Clone ID: MRT4577_172835C.1
gatagtttgttacttttgagtagatatttgcctatcccttccgatgcccaataccagcagcattgcttgcattatgttggtattgggcatcggaagggataggcaaaaaggatatggttgtgcttccttataaggatagtttgttacttttgagtagatatttgcaacaacttgtcatggaatctcttggaaaagaattcgacctggatggcaaccgtgttaatcaagggctaactgtatatggtaacaaaggaagcactgaccagcatgcttacattcagcagctgagagaaggtgtacacaacttctttgttacgtttattgaggtcttgcgtgacaggcctgctggtcatgattgggagcttgaacctggagtcacgtgtggtgactatttgtttgggatgttgcagggaacccgttctgctctttatgcaaatgaccgggagtctatctctgttactgtgcaagaggtaactcctagagctgttggagcactgattgcactttatgaacgtgctgtggggatttatgcttctttggtaaatatcaatgcctatcatcagcctggtgttgaggctgggaaaaaggcagcaggagaagtattggcccttcagaaaagggttctgactgtattaaaggaggccatctgcgagaaccctactgagccattgactctagatgaaattgcagatcgctgccattgccctgaagatattgagatgatctacaaaataatccagcacatggctgctaacgacagagcacttatagcagaaggcagctgcggctctcctcgcagtgttaaggtgtacctcggtgaatgcagtgtggacgaagatatgcaggccgcatagattctgtgtctggatccgtgtaacattgttggaataaatcagaagcaacacaatagcgatgctatgcatgggtgtcgctgatgctgatgtctcattagtttcttgtttggtggtgcttgcacacgattgccggaacgatgtaattttagaatttgatttttttggccccttaaaatataaaatacaaagatagaaggtggtgtccgaaaaaaaaaaaaaaaaaaggcccctaa

SEQ ID NO: 79836 - DNA, 3830 bp, Zea mays
  Clone ID: MRT4577_172836C.1
ctcccctaaccccagataaggaagcccttaaagccaagcccagcgaggccaccaaacctcgtggactccttccccacaaaactaaaccctcgcttcggaggcgcgtgaacccaagaccgacaggcgaacgaagcgagggtcctcacaaccaccatcccctgctgcaacgacgccgccggcgatggcgtccatctccggcgcggcggcgccgccatcttccgccgtgtgccggcttcggctgcgccggcaccttctgctccggccctcccacctccgcctccgcgcgccccactccatcgccgacctctcccgctcctccaattccgccccgagcccggcccgcccagcgctgggctccggcccggagaacggcagcggcggcgtccgcgcggtggagaaggacccgatcaagctgtgggagcgctacgtcgagtggctctaccagcacaaggagctcggcatcttcgtcgacgtcagccggatggggttcacggaggagttcctgcggcagatggagccgcggatgcagcaggccttcgtcgacatgcgggagctcgagaagggcgccatcgccaaccccgacgagggtcgcatggtgggccactactggctccgcgacccggccctcgctcccaactccttcctccggaacaagatcgagaccgcactcgacagaatcctcgccttctctcaagatgtcatctctggaaagattctttccccatctggtcgtttcacttcaaatctaaatcctcgcttcggtgtcgcgttatatcatgaccgacaggctaacgatgcgagtcaccaaccaagtcctatgcctgggaaaaaggtcgccgcaggcggtatggcccatcgcaaggggggggcgactgtattaaatgagccaacgtgcaaggacccttgtgagccattgactatagctgaaattgcagatcgctgccattgccctgaagatattgagatgatccacacaatagtccagcacatgggctgctaacgacagagcaatcatagcagaaggcagctgtggctctcctcgcagcgttaaggtgtacctcggtgaatgcaatgtagacgaagacttgcaggccgcgtaggttccgagcctggatccgtgtaaaattgttggaataaatcaggcgcagcaagacagcgatgcaatgcatgggtggtggcggatcctgctgtgctgtttgtttctggtggaggggttgttgcacgcggataccctcgtcacgcgagagcgtggtcgagaagttgatctttattggaaccgtggaacgtacaaaacaccgaagctgacgcggcgtccgacgtttgacacggcactcgacaaaatgctccacgaccctgaccacgctctcacaggatacgaatcggagggtcagctttgggccctcaatttgttgctgaggcacttgcgcctgataaccctccactgaagataagatttattgacaacaccgatcctgctgggattgatcatcaaattgctcaactaggacctgaactggcaactactcttgtaattgtcatttctaagagcggaggcacacctgaaacccgcaatgggctactggaagtacagaaagccttcagagatgcaggtctgcaattctcgaaacagggtgttgcaatcactcaagaaaattctctgttggataacactgccagaatagagggatggttagctcggtttcctatgtttgactgggttggtggtaggacttcagaaatgtcagctgttggtttacttccagctgcattgcagggtattgatatcaaggaaatgctagttggtgcagctttaatggatgaggaaacccggaacactgtggtatcacattattaataacacggacaacttgcagtgatggcatgattatctatattgtgtcatgtcaaacatgtttatctttttattaacaggttaaagcaaatccagcagcattgcttgcattatgttggtattgggcatcggaagggataggcaaaaaggatatggttgtgcttccttataaggatagtttgttacttttgagtagatatttgcaacaacttgtcatggaatctcttggaaaagaattcgacctggatggcaaccgtgttaatcaagggctaactgtatatggtaacaaaggaagcactgaccagcatgcttacattcagcagctgagagaaggtgtacacaacttctttgttacgtttattgaggtcttgcgtgacaggcctgctggtcatgattgggagcttgaacctggagtcacgtgtggtgactatttgtttgggatgttgcagggaacccgttctgctctttatgcaaatgaccgggagtctatctctgttactgtgcaagaggtaactcctagagctgttggagcactgattgcactttatgaacgtgctgtggggatttatgcttctttggtaaatatcaatgcctatcatcagcctggtgttgaggctgggaaaaaggcagcaggagaagtattggcccttcagaaaagggttctgactgtattaaaggaggccatgtatggaacttctgacctgtgttctttctgtttctctgtgaagtgattggttatgcatagtatttttggggcatatttctagttgtgatgctttgaaaatgcatttcgttgtatcactaggtgggactttgttttgaggaatggtgtggttcatcatattctcaccctcacttttttgtttggtttatggagttgaataggttcatctgccaccaccctatcccttgcaaagtaataattagtacaaacatgagggatgtactcatgggttggttcctcaaaatacattcgaagtgcacccaccccaatagctgtggcaatgcccatttctcctttgagactctctaagaaggcatttttagatgttcgaactgatataggtttgaaaagttttcctagctgaaaattacaattgacggcttattgacagttatcatgtgcgcatggggctgcaaaattacagatagcgtcctgctggttttacagttacatgtctttagagtctaaagtcaatattcttacaaagaaagaaacatgtgtattatactaaagtataataactcaacctttccttgttcatgaaataatttttatttttcgaagttccaattcctgtacaagtaaactcaaagaatgggggcacaagagaggacactaatgtgtatgaaaagaaccattttttcccttacgcaccggagagctgcgtatctatataagaactacaaggggcaataacccttaaccccccccccccccccccacacacacacttggtttacacataactgcaatttactccccaattgattctcactcattaatgttatattggagttattggattgcttgttgattcatgtacttgttgtctcccagctgcgagaaccctactgagccattgactctagatgaaattgcagatcgctgccattgccctgaagatattgagatgatctacaaaataatccagcacatggctgctaacgacagagcactcatagcagaaggcagctgtggctctcctcgcagcgttaaggtgtacctcggtgaatgcagtgtggacgaagatatgcaggccgcatagattctgtgtctggatccgtgtaacattgttggaataaatcaggcgcaacacaatagcgatgcaatgcatgggtgttgctgatgctgctgtgcagtttgtttcttgtttggtgtttcttgcacgcgattgccggaacgacgtattttagaatttgattttttttggcccctgatatataaaatacaaagatagaaggtggtgtccgtcgt

SEQ ID NO: 79837 - DNA, 1559 bp, Zea mays
  Clone ID: MRT4577_172837C.1
ctggcttggctggacagagaaggctctggcgtgtgagcagagccatgctcccgttccagatggtccaccggggactatgtatgtcaccgggatgctcggtttgtcggagattcaggccgcaggctgcgtgtcgacggaaaggtttgattgagcgaagggaaagagtgtcaaggttgtcccagtggagaagggcatagaggcggagcgacacgacggggtggccgcaaccctcgtcgccatctcggcggacgggactgggaggagcgcggagaaggtgcaggtgctactatcgcttcccacaagcggcagcatgaacaagcagtgcaggttggtggagcagataaggtatcttttgaaagacgacgaggaagcaaggatccagctgggctcaaatggctttgccgaggcactggttgagttcttgaggaatgctgtgaatgatggaaatgagaaggcacaagaagttggtgcaatggctcttttcaatcttgcagtcaacaacaacagaaacaaggggctcctgttatctgctggagtcaccgatctacttgagcagatgatatcgaatccacggctatctggtcctgccacagcactctacctgaatatttcctgccttcctgacgcgaaggccgtcatcggttcgagccaggccgtgccgttcctagtcgaccgtctgtacagccaagacggcagcgacacgagaggaagctcctgcaagcacgacgccctgtacacgctgtacaacctctcgtaccaccaggccagcgtgccggcgcttctagccgcgggcatcgtggacgctctccactgcctcgtcacggagtctccagggtcggaggaggggcttgggtggacagagaaggctctggcggtgctcatcagcctcgcggccacccaagctggccggaaggagatcatgtccacccccggcttggtcagcacgctggcgatgctgctggacacgggcgagtcgacggagcaggagcaggcggtgtcgtgcctcctggtgatgtgcggcgccgacgacaagtgcatcgcgccggtgctccaggaaggggtggtcccgtccctcgtctccatctcggcggccgggacagggaggggcagggagaaggcccagaagctcctgaagctgttcagggagcagaggcagcgggacacgccgccgccacagcagcagcagcagcagctgctgcagagccagctggcggagggcgggaacggtggtggtggcgctatcgtgtgccaccgggaatcgaagccgctgtgcaagtccaagtccaggaagctgggcaggacgctgagctcgctgtggaagaacaggggcttctcgctgtaccagtgctaggagatgcatgctagagtagtgttttgagttgatcagtgggtgtctgtacatcatcttctgccttgtttttctcaactggtcctttcttccccccttcttctctgggggtgttgttttatttgaggtaaaaaaaaacttgatgttcttccccccctcctcggttgggtgatgtagggcattttcttccagctcggtttcccccgtgttt

SEQ ID NO: 79838 - DNA, 374 bp, Zea mays
  unsure (1)..(374): unsure at all n locations
  Clone ID: MRT4577_172838C.1
cnttggggggggggttttttttgttggggggtgtttgttcttttttttcaaaaaaaaattgggccagggtaaacgtggcccttttttccttttaacgggcccctttaattttttggccaaaagaaaaccctttccccaaaaaatggaccgggtggggtcttgactttttgtaggaaaaatttcttggggggcccccccaatgaggcccttttagcccacccttcctattttttttgggggaatttggggtttttggcccagaaaagattttaacccttttttggagaaaaaaaaaaccttttttttctcaaggggtttgtccattctttaggcctttttttccaaccccctaaggggggatatttttttttttt

SEQ ID NO: 79839 - DNA, 197 bp, Zea mays
  Clone ID: MRT4577_172839C.1
cgtactcgtgggaccaggctggggctgcgggacagggccagtttaaggggcccttcgcctgacagaggtatcagtatggggtgaaccaaaaggtgtcatctaagaccctagccctgtgtgtcacgacctatgtctaagagctgttagtgcatgggatgccatgcttgcctgtgacagccaggcaaggattggccgtt

SEQ ID NO: 79840 - DNA, 1407 bp, Zea mays
  Clone ID: MRT4577_17283C.1
cacttccaccgcttctgctccccttcgcgcctgcgtcatgttccgcgattcccttcgcacaccctcccgctgccgccgctgttctcctaccacccgtcctcccgcgctgggtagcggtactaatttaggatctgatacactttctgtgcggaagcgcggtcctgctaaatccgtgtgccggggttccagattgcaggagcttgccttgtagcgtcgggttatgctggttgcagcgagtggctaagcagagatccagtcgcggcgcgctgcttgcttgcttccaaccctgggtgcttgtgctactctttcaagctcgtgatctcatcatgggcaatgcagcatgctcgttcttactagttactaagtttatttatccatacaacccatgttataagttgggtcaggaactcaggatacggatactgttatgcagctgtgcaggcagggccacagaacaagtttgtttgtacacagactcaagaaatggaaaacaaattcttgttatttgggaaaacaacttcttgttatttgcgtttgcacaccattttgagttgatttcatccactgaagactaaagagtgaagtaataaggtcgtgtacacttgattttcccctcctctggttggttgcacaggaccatgatctggtcgttgagccgaggtcattcaccggttccactcagcccagcagaccggatgtaaggccatcgtcttcatcgtccagcgataatgccagggcacataattcaggtaaagtatgtatgttgtggacatccatcattttcttctgtcacagttgctgcactacctgtgctttgctgggcacttgataatgttgccagattccgaaggcttaactttgccggatcctctttctataggagatacctggaagagccttgtctttggctgggtaaacacaaataatactacgctgagcctcctcagttcaaatgctgaaagcgccttgggttttcttcactgttctcgtggcgcggtagcataattcagacattcatgtactgggagctgagggattagtacgaggccatttatgctgttttgctgcatgtaattcttaacctctgcatctctgctggcaaacgcgttgaagccgatgtatcatgctgctcccgtgacatccagacgccccgttcctccttccagacgcccatttctgggatccaaatatggtggctctggtagggtggtttaagatcatgtatctgctgctgaatagctgagctgcccgggttgtctgcacagaccttagcacagccgctgtgttcttatgtaatgctgcagcagtgcgcgggataagttttctgcagaaaaatagctttcattgtatttgtctggaacgtatgatcccaatttgataactgtagcttctgctatttgctgtcat

SEQ ID NO: 79841 - DNA, 283 bp, Zea mays
  unsure (1)..(283): unsure at all n locations
  Clone ID: MRT4577_172840C.1
cgaccacgcgnctgctagccccactgattctcttagcccagctttctcaagggaggggatgccncgggggccactttttagggcagggggcggttcattgacccccctcttctttacacatcatcccccgcctgcttgaggtgccgaccgcgcgcccaaggaagcaagttcatctttcttaatcggagatcccccagctttgcaccgtcttccgcgccatttttcttagccagcccaaccttcttgagctcgaggcgcccatcaagaacttcggtgacattca

SEQ ID NO: 79842 - DNA, 157 bp, Zea mays
  Clone ID: MRT4577_172841C.1
ggccaatagcacccttacctggggaattaagataatcggacaaaagaaattcctgcccttgggaggttggcgtgggaatgtcttaatgagccccaatcccttccgcttattgtgacatattttaggcaccaatggaggcgccacgttaaaaacaaaa

SEQ ID NO: 79843 - DNA, 338 bp, Zea mays
  Clone ID: MRT4577_172842C.1
cggagcttgatccttagagcggcgcctttctccttttttaggaagaacaccttcttatggggctttatacacatgacctcgaataaagaagtgcaaacgaacagttacacgagagattcagagactcaaggcacgcaacaactattcgggactattgttaccatgcgcaggtgctcaaaagttccttacgtgagatggacaactctgggcgtggtcgccatgtcctgcctgttttggagcgtattggccttcatcttgcagcaattgcacggggggcttactatcggcaccgtgtgtcgagcatgcgcgtgttcattctgaagccccttggcgtgggc

SEQ ID NO: 79844 - DNA, 332 bp, Zea mays
  Clone ID: MRT4577_172843C.1
ccggactggaataaccgggtgcggccgacgcgtacgtttcaagctaggacagtcataatgtccttcatctttatccaaagggccccaatattggcttgagtaagtttctaaggacgctcaacagagagcttcaattgcatatttgaggagctgtcaaatattttatgtgatataccatctcaatatgctcgcacgtcgtaagatatcatactcatattcaagaacttgcatcatttaatcaattcccatacaacctcatcaagcaatatccacattgattaacatgctatagagccaaatgcagcgccatatggaaccatttgaacatataa

SEQ ID NO: 79845 - DNA, 1920 bp, Zea mays
  unsure (1)..(1920): unsure at all n locations
  Clone ID: MRT4577_172844C.1
cattgggtacctcgagccggccgccgccgccgtcgccgctgtgcgcatccccgtcaagcacggttgttgccgctgccttccccaggagagccctcgcctctggaatccaacactctcagggaagttgctgttgcagaaagcccctccaaaaagatttgccacgccttaagctctaccccctcttcggcacttggccctgatgtttgggtggatctcttggacagcctgcttctccaaataattgtcctcgttagctcattccatgatctccttgctttcattggcacctgccgttcttggcgcgctgtgctctcttccctcccacctgtatataccttcaacgtcccacctctccaccttcgatcagatggttgtgattctcacccccatcgctggtacatgagggcaaaacttttatccgatatcaattggcagctcactgatcctgcgaagcaaacctcctcccttagttgttcggccctccaagactttcaggtctacatgcggtatttgggctgctcatatggttatcttatcttctccaatttggagcaatgcctccttgtcaatgtgtacagcggtgctacggtgcggcctcccaagctcaaattcactgacaaccgcaatgtctaccatggagcccttgttgctccaatcaacttatctaattcatgtctcctattttgctcaagatcatccatttttcagtggaaggttggatcagacttttggtctgagcaccctttgggtgtcgagtgtattagtcaaatcgtgtcgttcaaaggtgagatatttgctattgacttacttaggaggcttcacagaatacagttggaacctcagctgagcttgcaggaagtagcagttgtctgggacgcggacatgtttctaggcctggatagtacacaatggttggtggtctgtggtgacatgcttctcatggttcacttgtcagtaacaatcgattctccctgttctggattttctgagacctttaatgtatgccgcctcgactttcaagttgagccagctaagtgggtaaaagtggataatatgggagacaatgctctatttgttggtactgatgggaggagtccaacgttttcttgcctgggtcccgagaaatggggcgggaaaaggaactgtatttacattgccagcccgcttgcagattctaatgagccttggggtgtgttcgaagttggtcaggcggtgcgttgttacaatgcaaagaagtatctgccccgtgtacattcgagccgactgccaagcctttgggtgcttcccagtcttgtttatggtgttggccagtgaccaatccacgcttgccttggagttttggcaatttgtgaggatccatttcctttgatgctccaatatgatgtattagttagtcctgttgccttgttatttcttattttggcattcagtgtcctgtacagattgcagctaaggtgttgttgatgttgatctcaagatatatctaggtttctaaaccgagttttctcactgtgctgctggacagtaactgaaactatttggtatgagactttgctatgacagagcctaaagttctttgtanaaaaaaaaaaaaaaaaaaaaaaaaaaaaaaaaaaaaacaaaaaaaaaaaaaaaaaaaaaaaaaaaaaaaaaaaaaaacaaaaaaaaaaaaaaaacagtttttgaaaaaatttccccaaggggggggaaaaaaaaacaaacttccccaccccccgtttgattttcaacaaaaaccccaacccggattttttccgcttttttacaaaatttggcccccgttggaggcggaaaacgggatttaaaatttttgaaggtttcccgggagttggaaaaaacaaaactcaaaagccttaaaattccccgggttatcccccaaaaaaaaaaaaaaaaaggccccta

SEQ ID NO: 79846 - DNA, 489 bp, Zea mays
  Clone ID: MRT4577_172845C.1
ggggaaaaaaaaggttcaagctccacaaaaccggttcatgtcacattttgttcaggggttacaactgaaagtttgaaacgactaatcatttttttcataattacccacaggccgggcaagaaatttttttggcctttaatttgaaaacctgagaacaagtccaagacataaaaaaagggtaaatgtaattaagtactttttacattttttttttttttgaacccttttgcccttatttttcgttcctgtagcctccattaggaaacttgttgtcgcgtgttggcacccattttttttttttgtaataaaacacattcttttgcaggctgtgggtttgttcattctttaaaccacccacccagcaaccttaccgttttctgtcccatattttcttcagcttcctggccaggtccttttggcgtcccacaaccatggtgacctggtccttgccgtcgatgacccttacctgggcgcccgggaccttggcct

SEQ ID NO: 79847 - DNA, 123 bp, Zea mays
  Clone ID: MRT4577_172846C.1
cccacgcgtccgggcactcgcgcaagagctctactgccaatagttggttaagatactcaagaccttgtggtacttgatcctgctacatgtgcaattcacactaaggaaatgggtgatagtacg

SEQ ID NO: 79848 - DNA, 593 bp, Zea mays
  Clone ID: MRT4577_172847C.1
cgttgctctagattctttctcttcttggtttccccacatcaccattatattcatggttaatcttgatttgcttttggggattcttcttttgctcaactcgtgactttggttgaggcttcacttgtggattcactagtttcttggttgggcacattgaggtgaggtgaccccaagtgtggcacttgaagcactggtcatgctttagcctccattcttccttcttcaacttgagcttccttttattggggcatgcctttgcaagatgacccatctcatggcatttatagcacatgaagtgaaatatcttatttccttttaatttgaattgcccgcctttgatattgctcttgttgaaaccaaggccactcttgtcatcatatcttctttgatttttcattataagatcatgagtgacttctgatttatgccacctctcaaacatgttgcttaaattcttcactttgtttttgagcttattattttccttcaaaaggttagtctcacaagacaaggaagaataataataatctatagttgaagaacatggcatagctaataaatcatcacaataggtgggttacctgcccgggcgg

SEQ ID NO: 79849 - DNA, 301 bp, Zea mays
  Clone ID: MRT4577_172848C.1
cccacgcgtccgcggacgcgtgggcgccactccagtgtgccgagggcggagacggtcacggttggctgagtgactcgccgcacgcgtcttcgccccggtccgctccagattgcgcgcacccacccatggcgctcgccgttttccaccacggcctcctgcccttcgcccccgctgccacgcctaccccgtcacggaggcacctgcgctttcgttctgcgcgccctctgaaccgccccgtccggagaattagttgccaatctatcaactcagctataagtttttgagcggtttctacgatcat

SEQ ID NO: 79850 - DNA, 998 bp, Zea mays
  Clone ID: MRT4577_172849C.1
tatagaatatagctgccctgcaaggattgtgcgcgtgaccgaatttgtttgtagagatcaaatttgccacgcattccgaagaaccctactgcattggaagtcatgcatctgtccaaaatccaaatacttcagaagttggatcgcgagctagggaggactggcaaagtcgcatcagtcaccaacactaatcacactttagtagccacaccaacgtaccagctccaccccttcggccacacaacccaggtgatcgaccatgtcctcgccggcaccatcatcggcctccaggtccagccacggctcacgaggctccccgcgcatcgtcctcttcccgagcgctggcatgggccacctggtcccgttcacccgcctcgccgtcgcgctttccgccggccacggttgcgagatctccctcctgacggcgctgcccacagtttcgtccgcggagtcccgccacatcgccgcgctctacgctgcgttccccgccatccggcagctggacctccgctttgcccctttcgacgcgtcgtccgaattccccggcgccgatccattctacctccgctacgaggccctgcgccgctgcgcgccctcgctcctcggcccgctcctcgctggcgcaggcgcgtcggctctcgtcgtggacatggcgctggcctccgtggccatacccgtagccagggagctccacgtcccgtgcttcgtcttcttcaccgcgtcggccacgatgctctcattcaaagcctattttcccacctacctcgacgacgtcggtgccggacatggcgttggtgacgttgacgtgcccggcgtgtaccgcatcccaagttcgtccgtcccacaggcgctgcatgatcccgacaacatcttcacccggcagttcgtcgcgaatggacgggcgctcgcgacagccgacggcctcctggtcaacgccttccacgccatggagccggaggccgtcgaggcactacagggtcgcttcgtgctctccggttttg

SEQ ID NO: 79851 - DNA, 336 bp, Zea mays
  Clone ID: MRT4577_17284C.1
atggcgctagtggtcccgcggcggagcaacggcacggagaagctcgccgcgttggttgaagatgagggaggcaccgctgacaatgcgggcccacaatgcagagcaagcctaggacgcacgtgctggggcgttggcgagatctcaggcggggtggaggacgacccaggcctcccaggcccacctgccagaggcgcgagacgccaagttgaccgttatggagagcaaagtgcctcagaggctgacgagagcgacccaccgacagaggtccacgcggcgcgcggcattgaagcggagttgaggaagataccgctgacgatcgggcccaccaggcggtga

SEQ ID NO: 79852 - DNA, 197 bp, Zea mays
  Clone ID: MRT4577_172850C.1
ttggccactgccttcctacagcaggaacaattgctaccataccaggcgcgtctctttgatgaaccctgccttggccagacatgaacccatggtgggaggggccatctttcacattacctctcagcagacatccctaatggagccctcataccggcttgggcgcctctagagtaatcaaactatcgttagacgtgtat

SEQ ID NO: 79853 - DNA, 380 bp, Zea mays
  Clone ID: MRT4577_172851C.1
tgagaccaactatcaacagaaaaagcacattccagcaccgacaatggcagccaagagatttcgtatgcttatgctccttggtctatgtgcaagtgctgctaccgtgaccattaaacgcaaatgcgctcaagctgctatagtttttcttctttacctgtaactatcagcagctgtgtcttgtgaatgcgaaaacctaaaactttaaccgtacaagatcgaacaggcaattacagttggaattttatcattatcactcttgctactataacaatcattattactattacatcatttacctcatgtacatttatagacactaaagatacaggcacaacaactactagagctagcgctagcagatgttgatgcttactatcagc

SEQ ID NO: 79854 - DNA, 916 bp, Zea mays
  Clone ID: MRT4577_172852C.1
acctcgagccggcagggcatcctcgacacctcggggcccgtgcgggtgcgctttgctcctctccccgcgtgctctccctctctctcgcgcgcgcggcgacgactcggctagtcggctaccgccgccgccccctacgccagcttcccagctcttcgtcaggcccttctccgtcaacgagcacccagcacatatcctgagcccctccacacctcaacgatggcgggattcagcagccttgcacccaagaccaggaacctggtggtggctgggggcctgtcggccttcgtgctcggggtctactactacaccatgagagccgtgggaggcacggacgagctgcaggtggcgatcgacaagtttgaggagatgaagaagaaggacgctgccagaaactccagcacaggaggatcgtaaacgcggcgcccttctcgtctctgtactgaacctggatctgcaggctgacatgatacggtagtcaagtcgctcagtaggccaagaacatgcgtgcctctactgtgcaataaataatgtgtgatactctttatcagatagagcttggcagcttgtgttttaaggagagatgtacactcgagtgtttttgtcctatgatataatagtggtcgcaatgtctaaatttccctgatataacttggcgagacggaaattctgtgggataagtatttgcttgtgaaaaaaaaaaaaaaaagggcatataaaaaaaaaaaaaaaaaaaaaaaaaaaaaaaaaaaaaaaaaaaaaaaaaaaaaaaaaaaaaaaaaaaggggcggccgttttaaaaaaggggggcttccttacaaagtatatgcaatctcttcccttttttatggggtaaaaaaatttaaattgggggccctaaattaaaaaacatggggactggaaaaacactggagtatct

SEQ ID NO: 79855 - DNA, 251 bp, Zea mays
  unsure (1)..(251): unsure at all n locations
  Clone ID: MRT4577_172853C.1
ccccgcgtccggtttatgacatatgaaccgagcatatctgantttgtgtatgtgagacgtatctaagacttgtgtatcaatgtaatttgcttggttgaactagccatgtgtattatccctttgtgacacatggccaatgtaattcatccaagcagagaacaaggtgtgtgatgaacttgtcttctcttgtgttctatgccactataatttgtatgacattatggaacttgtatggtgttgtggtctatgac

SEQ ID NO: 79856 - DNA, 754 bp, Zea mays
  Clone ID: MRT4577_172854C.1
attctacacccccatccctcagcaggcagaagctacctagccgccgacgctggcggtccctccatcgccgccaagatgcagatctttgtcaatactctgacggcgaactaccatcactttggatggtggaggcctccccacaccatctgcacaatgcgtaaggccaagatccaccacaaggaggtgatccccacggaccagcaccgggtcatcttcgccgatgagcagatcaagtacgggcgcaccctctccaactacaacatgcacaacgagtctcaccctcctcctggtgctcatgctccgcggcggcgccaacaagctaaacatacaagacgtacaccaagccccttaagatcctccacaagcacaagaaagtgaatgtctccgtgctgcacgtctataaggaggacgactccacacgtaaggtgagccgaccacgaaaggagtgaccctacacggagtgtgtcgcgggcgtcttcatggacaaccacttcgaacgacactaatgcggtaagtgcggcctcacgctatgtgtacgaacagaacgcgtaattgtttgccccgatgtgctttatccgactgcctatcaagtgttgagatgtgggctactcatactgtatctcatttacatgtgtctgaagttgaaactttgatggagcaggagtatctagcatattgtgaccgctgctacggaggataattttgatctcatatacatgcttacagacgattgcactttttgcccgctcgaaaa

SEQ ID NO: 79857 - DNA, 267 bp, Zea mays
  unsure (1)..(267): unsure at all n locations
  Clone ID: MRT4577_172855C.1
tctcgnncccctcgcactcccgcccncctcagctcccantgggcggtctcgccgtgcgctgacacatgganggcccaacgctctcccccgcgtnccgcnngcccgcctcctccccnctcaaccctcnnctcctcctctnntgttgcctccaaactgactctaaagccgaccgcnnccccgcccaaccgnnacatcggaagtccctaagctnngctgcaggaacctgggggggcgcggggcgcgccgnnctcctccgctttcgaaagc

SEQ ID NO: 79858 - DNA, 297 bp, Zea mays
  Clone ID: MRT4577_172856C.1
ggtgttttttttcaattcggggggatattccatcacttctcaaaataatttccatcacaaccttaacacactattccaaatcacaccaacacacccatccttatccacaatcagcccttaaaagctccatctttatattgcctatctacacacaccctaatctctgaccctaattagaccgaccctacatcactcaaattaccatataatatgcatgatcaaccctatcctacccccattttcactcttggccctttttttacctccatacacgttcattctactaacctagactat

SEQ ID NO: 79859 - DNA, 380 bp, Zea mays
  unsure (1)..(380): unsure at all n locations
  Clone ID: MRT4577_172857C.1
ttttgttcttaccgtttccatcgatttccaggaatgttgagcaccagaggtgctgggtggtcacancaattaccacacgcaagattatcattctcatggttgcgacagcagccatagccgctctctttcccagctgaacgaccgcgggcaagaactgaatgtgccaaacgcagtgccaggagatccagcccaactgcgacgcatggatcaagacgataggctaccccaagggcgggaagtgcatagcgccacactaccacaactgctggtgctgggtggggccaccgtcctacaactcctataaacaacttaatggaacgcctgcagggtctttttacaaccgcacgttacatttttgacgactttaatttgttttgtct

SEQ ID NO: 79860 - DNA, 716 bp, Zea mays
  Clone ID: MRT4577_172858C.1
tcgagggccgctttttttttttttttttttttttttttttttttttttttttttttttttttttttttttttttaaaaaaattggaggaacagatttggggggccgcatattctgacagacttcccataggcataatcacaagtttttaactggccaaaatcgaacccccaaaaatagggttctgaacatccggggaatattcttacacgcggaaaaaggggggttcccatcggaaccataaatggaaacccggggcaaacgggaaaatatgggggggctttttgcaaacaaaaaaaagggggggaccaacttcggaccaaacccagttggggtctaattttttttcagctccacggaggacccctaggggtcccaacaaaggggggggctttctaaggtccccccccggcacgctttggggagccttttcgggaaacccagagggggccattttttgggccagggcatttgggagctttggaattcaatctttttttttcctaagctttccacgtgcagaatgggcattaaaagctcctgggggcggaagggacacagacaagtttttgtggacaacagaagtggcacaatgggccggagtttcatcactctttgtcaggatcttgggattggatatggaagaaagaccacgattaaagatggatggcattggatagtagcagcgacctctgggcctcggaaaagggcaaaagca

SEQ ID NO: 79861 - DNA, 124 bp, Zea mays
  unsure (1)..(124): unsure at all n locations
  Clone ID: MRT4577_172859C.1
aaactggntagaagccagaggatggcaccaagcagctgacaaaacggacaagcaataatcgtagagtcgagcctctttcattcgtcattatgggtgatgtgtgcatagaggtcaatacatgggg

SEQ ID NO: 79862 - DNA, 1959 bp, Zea mays
  Clone ID: MRT4577_17285C.1
actcaacccacatcaacaacatggtatatggagctagggttcgcaggcgccgccactcgagctccgccttgcgcgtgtgaggaagaaggcggtcacccagccgagcccggagccggagcaggaaaccgtggtggagaagcgcgtggaggaggcggatccatggagcgcagctcggcgggcggccccctggcagctggcgtggcgagctcatccgcgcgtcctcgactcgtccgcgccggtgccggccgccgtccccgtcctgtgcgacggcgagctcgtcggcgtgggctcccgcccctatgcgcaccagctgcgcactcccccctgctcgacccctcagttcctggtggtcgccctcgggcccctccgctggtgtggctgctgggattgctgctacggacgctggtgctgtagctgctcccaaggaagaagagaaggccgagtacctcaaggaccgagcaagtttgctgttgctgctcctgcagctgagaaagggggaagaggaggaagcctctactgctgcggtgagcgtggagttggggagagtgaggtggtgctgctcctgcagctgagaaagggggaagaggaggaagtccctactgctgccctcgtagctgttgtggcctgtgtagctgtggaggccggtaggagctggtatggggttctgaagcgagttctgaactgtcctgtctgcttgaagccggagctactgctctgcttgttgtggtgaaggagtagatgtgcgagctcatggaggagctgctggagcatagcctggaggcgtctgctaatcccatgaaggtggtggagtacgtgcagaaggagtcgccgctgatcgccgtggtgctgaaggcacacatgcactgcgaggcctgcgccgaggggatcaggaagaggatcctcaatatgaaaggcgtccagtccgtagaaccagacctcaaggcatcggaggtggctgtcatgtccaaaaaggtccggagagtggaggcggtggtggcggaactggagtgtaggaactctgagctgtttggcgagaagggtgaactggaggagaaattggtggctgccaaggaggtgttggcgaggctgacggcgatgacgagggaacaggaggctagggtgtttgctagaaggagagagtctgatttggtgaaggagaaagaggctgttgctaaggctcttgatgctgagaaggctgaagtagcaaggttgaggttgaaaattgaggagctagagaaatgtagcggtgagaaggatggtgacatcaggaagatgaaaccagcctactttgccaactatgcccacatgggtgaaggtactcaggaacaagctcttacatactcatgtaggcatcaaaaggagtgggtcatagattcaggagcatctaagcatgtcatgggcatatccagctctttcaaagcttacatcccacatacacattatgagtttgttcaaattgctgatggctcatcccaacgaatccatggtgtagggtccatagagtgtacaccatctcttagctcatcctcagtcctacatgtcccatcttttccggtcaatctcatttctgtaagttcaatcattgatcagttcaagtgtacagtaacgtttgatgaaaacacttgtgtctttcaagagaaggggactgggagaaggattgggactggagtcagacgtgatggtttgtggttcatcggtcatgaagaatcagcattgagagcagttgctgaaagggatgtgaaggaaattctgctacttcattgtcggttaggacatatatcttttgagaccttaagacggctgcaccctgctatgtttaagggagtggacaaaagtaggcttgtatgtgatgcatgtgagcttggcaagcatactagatccatctatcccagtattggtcttcgcagttgtgaaccatttactatgatacactcagatgtttggggtccttgctctgtt

SEQ ID NO: 79863 - DNA, 514 bp, Zea mays
  Clone ID: MRT4577_172860C.1
gttttatttttttttttattagtttattatttttttttttttttatttattatttttttttttttttgggggacccggcataatttttaatataataacctgggaacagacaggaggcacaaaagccagtccacggggtatggaagggtaactggagagaaccacacactctaaatattaaataggcaagcacccgtagacagatatgatgtaaggaaaaaacataacaccaagagttgaacagaaaggagcccataaactgaccagggatgggccatagagggacagccccataatgttttaggaatatatagctgagatagctagacggagcattaacttgccctaaaatctacctggtaaagagccctaagaaacttcgcttgatggtgaacatatagttctgaaagatcacgttgcacatctctgagaggtgaaagcccatctattgcacctgttgaaggagaagatccaattgattgagcccacactggggatggaaaagagtgtacca

SEQ ID NO: 79864 - DNA, 523 bp, Zea mays
  Clone ID: MRT4577_172861C.1
agacacgtaaaatgagggtatccagcagttcccaagacgtgaagcacagagtacctgttgaggcgcacaagtcgcccagtccataatttcgtctcgctttctttcctttcgagactgacagtgacagtaatagtaatacttggcgaatcaagataaccaccacacatacacacacaccttggccgggattctcggtaaatcccgggggggggggggggggtcatttgaaccaccttcttccacaccccaattaacaattgagcacgaaccgggtttttactgccggggcccgggagaggggtaatttgctccaagggattgaacaccctcttttgatcgacagaacaaacttgactgctgtagggagaaacaggcgtcacgggcggtcacctggtcatgtgaccaccccccagccttgaggggcacacaacttacatgcctgcttccaccccaagctggggcctttaacatttgctgggggggaccacaaccttttcagctttgcttcatcggacccgtgggt

SEQ ID NO: 79865 - DNA, 277 bp, Zea mays
  Clone ID: MRT4577_172862C.1
ggaattcggctctcgagtgtttttaaaaagattgtattttaaatctactggatattagaatgatcgagagagacaaaaggcactggttgtctgctgtgacttcacccaccactgggggccatcaacaatcagcagtcataaggatcaaatgtctatcaagtgctgcgaccaggacaacgactgcgatcagtagattctgcaccgtagctgaggcgccttcttggtggacgacatgaggctcgactggctgaccgagctcatccagaggatgggactg

SEQ ID NO: 79866 - DNA, 228 bp, Zea mays
  Clone ID: MRT4577_172863C.1
agaggtacggacatcggtatgaaaagtaaccattaagcgacaaggggttatgaacaaacttgctggcggtgtagacactggaattatctgtccatgcattgtgttcatgtagaaagagtctcttaacacacgaaacactggagcttactgacgaagcgggtatacataaaccgaacaaaacgatagatgtcgaataacatgctcccgggcatgttcagaatggagagg

SEQ ID NO: 79867 - DNA, 587 bp, Zea mays
  Clone ID: MRT4577_172864C.1
cccccccctaccgtggtcgcggcccgagtacaagctttttttttttttttttttttttttttgttttttttagttttttttttttttttttttttttttttttttttttttttttttttttttttttttttttttttttagaaaaaaaaaccttttttttttaaataaaaatgttcaatcaagaaaatgccaaaaccaacactgccacccaagggaaacccgaaaaaaaaaaaaccaaaacaaccccccaaaaaaaccaaactaactaactacccaacggctaaaccaaaaaaaaaaattttttaaagggggaaaaccccccccaaaaacgaaagggcaagaaatccgtttctgaaaccccaaaaaccccccaaattgctgccctatttgccccccaaaaaaccccaaccttggccggaaacaccctaaaggcaaaatccaaaaaactggcggcccttactaagggaacccaactcggaaccaaacttggggaaaacaaagaaaaaactgtttcccggggaaaaatgttatccccttaaaatcccaaaaaaaaaaaaaaccggaaaacaaaaaaggaaaaacccggg

SEQ ID NO: 79868 - DNA, 321 bp, Zea mays
  Clone ID: MRT4577_172865C.1
ctccttaaatatgcataagaaacggcaacttcaatctgttttacaagcatgacatttaacactggtagagaaataacaatgaacaaagacagagaactaagctgtacactacaatatgccacaagcaaagatgacttacaatcaaacattgaaccaaggtgtgagtgctatcctactcaaccactacatacaatgatgttacaagtacacacatgctctcgtattatatctgactcaagaagatcgaatatactgatctaacaacaaagctctattcttgatcaagctgatagaatgaacatgtcttgagcacaacctgct

SEQ ID NO: 79869 - DNA, 239 bp, Zea mays
  Clone ID: MRT4577_172866C.1
gcaataccagagaaagggatctggggcgctgcagctggaggtcaggtatgaactgtacaagacggacggacgagctgggacacctgtacgcactctttctgaacttggactgctgacatattgaaggtattggactacagtgttggtggctactttaagaaggcatcatgctcacatctccatatgagaactgcacgcacatacctggcctatcagctgtagaccattgacgctcacgt

SEQ ID NO: 79870 - DNA, 2205 bp, Zea mays
  Clone ID: MRT4577_172867C.1
tgggtacctcgaggccggccgggatatcctttctccaaactaatttgtctgtcttgattactgctgcagcaacggtcgtccactcaaacaagtcaactttagacacatctgctaggcccgatgtaaatgctgtacagagttccaatcagacggtgaaaaaccatgacacaaaaccagtggcagttcaagccgcgacaggtaaccctgttatgggtcatcgtgctacaccaggcgtggcatttgctccaccaaaacctactttcatcaatcacaatgagatagcaaagaatgttctacaatttcttcaccaacctgcaaaccatcctagctggactccaccatcaactgagtacatgcattctcgtttgtgctgtcaaatatgcaaagttgatatcattggtacagacaatttacttgtttgtgatgcttgcgagaggggagtacacttgaaatgccttcatcagtatggcaataagggcgtccccaaagctgagtggcattgttctgcatgcctgactcagagtaagggaaaacccttgccaccaaaatatggcaaggttacaaggactgtagttgcatcaaagactgctccacctggtggtggagcacagctttctttgcaggaatcagcagaaaacatggctgcaaaggaaaatcaccaaaagttggctgcaaatggaaatcttatgaagccattctccattcatggtggcagcacagtacccgacagtaatgtattggcactgagtgctgtcatggctggttcacaatcacaattagtttctaccttgagaccatcaatagtcgttaaagctgaaacaccctctaatggaaaggaaggaactgggcaaccatgcaatactgcaatacaacctaatgtgcgatcatcttctcttaacaacagattgagaagtgattcctgtttgaaccctgctgattcagcaaatgaaatcatgcatggtaagcatgctgcagaaatttctggtgttgaagcaaaggtcaagtctgaagcaaactctgaggttgttgtgagtacagatgaggaattggttcatagcagtggaacatcaatcgaaactgaacgagccaaggttgtcgctattgaagaaaacagggcacaatcaacctttgagacagataaaatgaaagttggggaaacaactatcaacacaggaacaacagatcaatgcatcaatactgaagaaaagctccccagtttagcaacttctgaggcacacacaatcactgacgtgaagatgactagcaatacaggaataccagtacagcaacacaacattgctactattgaagagaagacccagattgatgcagtgtctgatccacatccacatgcaatccaagatattcaagatatggaaatgggcaccaacaatggaccacccatagatcaaacaagcagtcttgttgaagaaaacccccctggacaatcctcttcaattgctgatgcgtgtgtcactgctaatactggaataccaacagatcaaacacagcatccaaatgagtcaactgaaaatgcagtaaagaaatctcccaacagagaactatataaagaaaaaccgggctgcaacataacctcagatattacccaaaaagtaacttcaaatggcatcatgtgccctgaggacaaaactttatgtgttcatgaagataaagcagtgggttgtgacacagaagcaaaagaagaaaactaatttagtagcaggttgcatccaattttcattttccagatggaactgttctgaatctaccattattttaccaacgtcagtgattgactgtgttctctacattctcttggacagcattatacatttagccattgccaaccatttttccaggaggtttgttttgtgccccttggaaacatgctcaccaggattactccattcgtagtttactggtacaccacatttttacaaaaaaaaatggtgtttctgctgacatgaggtttactaaactctgcaggtatccattgcctcctggtgtagtttagagaatccctgaacacaggaaatataatcgtgatgttgtactttatgtagattgataatcttgagttcctaactattgaattccattttcccctttatttgttccgtgctcatctgtaatgttgtaactagatagggtttagctgagttaggactggatttatcagtcataataatgatacgtgccttcgcc

SEQ ID NO: 79871 - DNA, 390 bp, Zea mays
  Clone ID: MRT4577_172868C.1
attgggtacctcgaggccggccggggaataattcttttcgtggctcttggtccgcgcagtctcatctcttgctgcgtatggagagatgactacctgaactcgaaggtcgagtgcacagccggctgatgatagtcagaaggtcgagctcgaaggacgatgagtgtctgcatcgcggcggtctcaggctcaccgtgcccagaggagagctgctgaggcggccatcgaagtcgacagcgtctaggacctcggggaggaacccgtccatggctaccgggtccaggtccgactggccaccccagcgaggtgtggaccgcccactgtggggcacatctaacagaatctctctcctacatacatgcgagactgccctgctattaagacttcgaccct

SEQ ID NO: 79872 - DNA, 335 bp, Zea mays
  Clone ID: MRT4577_172869C.1
cggccggccgcacacacctcgcccgtttcttcccggccgtggcatgcacgccttgacatagacgcccctctcgttccttcttctccacactaccagtcaccagacccggtacataccccaggccgcccgcggctaagacataaagcagcgcacacttgcgccgccgatcgaggcatatcgtacagggcgaccgagggagcaaactgacccgtctatggtgttgagggcttgcgcaatggagggcactttcggcgtgccgtattacgagtggctcaagccgcggtcctcctcttcgacgccgccggcatcgccgtcgtcctcgtctacgtcctcga

SEQ ID NO: 79873 - DNA, 615 bp, Zea mays
  unsure (1)..(615): unsure at all n locations
  Clone ID: MRT4577_17286C.1
agttaaaatccttttttttttttttttttttttttttttttttttttttttttttttttcaaaaaggatccttgtttctttgttaaaacaaaaaggcaaggaaacaaaaacctggctgcaaataccctgcaacccttaggggactttttccgcaaccgcaatgccaaaacgccttgccaaaggagcaatcaaaccaaaaaaacaccttcaaatgcattcagcgccggaaacaatcaagctcgctgtttttaatcgtctgcaggctcaacccttacaagcaccttttccaggaatccctccaaaaacccagccatttttccccccatgcccacttcccccttttggtcccatccatccagttggctaaacttacccttgatctcattcacaagcctgactattttttaatggaattcttgcctttgccttctacgctaaataaagccctgggggtcgtgtagggattgcgcaaactcctgcttgttcttgagattgaaatgatacccgcgcggcaaaaacncagcgaggagcgccgcgacaacaactccactgagcgccgtgatctgcgcgggtgctgggggggaaccgggtgcttgcactggcttggaatgattg

SEQ ID NO: 79874 - DNA, 1500 bp, Zea mays
  Clone ID: MRT4577_172870C.1
gccagtgtcagccatgtccatttctgacttttcatataaggtcttgttcgtttctatcggattgcacccggaattgttccagctaatcaaagtttatataaattagagaagcaatccggctaggaatcgttccgacccaccaatccggcacaaacgaacaaggcctaatgaaatctgaaaacaagtggttctatctttcaaaaaaaaacccgaaggaatacatgtgattaaggcatgcttgggagttgggaacaactacagtgcagttgatcaacaataaactccagtttttgcagttgatcaagtctgaatcttactcgcggggacgggaagcccagaggttgctgagagctctgaggcggctgtagtactccccaatggagaggaagcaccgcgcagcctgccgagtggtcaggatccggcgcatctgatgcaacgtctggtgccttagattgtcggcctgttgatagaaattttcgaggctggcgagcttctcaagtgcgacggccatgatgttcatgtagttgggggcggcggcgccgtcgttgagcgtgcccgcggcgactgtgtcggccagggactggtgcagctggtgcaggccctgggcgagagcttcctccgcttgctccgacgactgctgcagattgcagatccccagcagctgctgctccgtcagcgggtccagctgcggtatcaggatcttgagcagctcggacgggcggaagccgcccatccagaagaagcagcgctcggcgggggtggcccaggagccggtgaggaggtggaagacgtcggagcgcgcgagcgccgccttgagctggaacagctcgtcgtagtgctgcatgcactcctccacgatgagtcccaggttgccgtccagcaggtgcgcctgcagcccgcctcggagctccgccagccgcttggtgtcgtcgtcaagccaccgcgcgtactccatgtcgaacatggcggcgccagagctcatgtccccggcggcgctgcaccctccaacgaacaggccctgtgaccgtgctctctggagctcatgctcgacctgctgaagcctgatcctgctagtctcgagctgctgcacgtaagccttcttcctcagcctgctcttcctcgcagcctctctgttctgcgccagccgccgttccgtcttgtcatggtctccccctccctctcctccgtgcagctgcagcgggagcgggtggtgctgctgaaagctcggcggggcggcagcagcgggcgcagcggcgaggcctggcttgtagctgtaatcatcagtggtcaccatcatgacctcctgccgcggcgcagaggaggctggggacaccaactccatctgagacattgtgttctgagctgagctcgagtcagtgccggtgctccctactgactgcgaattcccactttgcctgcgcgacgtcgttcttgatgatcacgcccggatcgacgccgccgccggcgctggcggcgccaccaccgtggatgagggcctcc

SEQ ID NO: 79875 - DNA, 616 bp, Zea mays
  Clone ID: MRT4577_172871C.1
ggccggggaacgagggcattgacttctactcaccttcctccgtgcgcccgttgcggctgctgcctggctcaccggatcgacgcgactggaggcatgggaggaaggggacggtggatgacagtatgagcacggaggccgatccatcaccgtagcctcgagcggggggagattaagatcatcattgagacggatccggtcctggactactgcgcggccatgctgatggcattacacaatgccgctcgtgcaggcgctaggtatgacgatcgttttcagaatctgtatcctaaagcatgccgcacgcaacaccttgatcctgctgcgtgatggtaggccatctacaggtctctgtggctgtgggcactcatgagcctgtgatggccggactgacgcacgtggctgcattatttcatggacctgagggcctggggaacgcacatattcctgatcccactctgaagaaagtgtacgaaagtgctaccgacttattgcctgatacggtctcgccattctctggggagggctctgggcttgccttgtgccctctgacaaacatagcattggccatcaaaaaggatccctcattcgtgaaaaacgctaagaagatcgacgtgct

SEQ ID NO: 79876 - DNA, 1993 bp, Zea mays
  unsure (1)..(1993): unsure at all n locations
  Clone ID: MRT4577_172872C.1
agtgctctctggcaagtgagcagccagaatcttctgccactgatttgttttctcctgctacccgcacaaaaattctgcggtgctaacccttcaatcagttcaagagccatatgaacaggtgagccacccaacatcgcactacagcaattcctttccccccgcccttttcgcctagtgatgttgctttctcagtactttaatgatagaacattacaatgcatctccctctcaaaacctctaatctttgtaacaccaccctcgcggccaaagttttacaccctccctcaccaggtgaggcctcaaaatccggcgaactggttctgctgctggtggtgcagggcttgcagttccgttgctgtggggctgaggctctctgtcccgatgaagttgtcgcggggacgggaagcccagaggttgctgagagctctgaggcggctgtagtactccccaatggagaggaagcaccgcgcagcctgccgagtggtcaggatgcggcgcatctgatgcaacgtctgctgccttagattgtcggcctgttgatagaagttttcgaggctggcaatcttgtcaagtgcgacggccatgatgttcatgcagttgggggcggcggagccctcgttgagcgtgccggcggcgactgtgtcggccagggcctggtgcagctggtgcaggccctgggcgagcgcctcctccgcctgctccgacgactgctgcaggctgcagatccccagcagctgctgctccgtcagcgggtccagctgcggtatcaggaccttgagcagctcagacgggcggaagcctcccatccagaagaagcagcgctcggcgggggtggtccaggagccggtgaggaggtggaagacgtcggagcgcgcgagcgccgccttgagctggaacagctcgtcgtggtgctgcatgcactcctccacgatgaggcccaggttggcgtccagcagcaggtgcgcctgcagcccgcctcggagctccgccagccgcttgctgtcgtcgtccagccaccgcgcgtactccatgtcgaacatggcggcgccacagctcatgtccccggcggcgccgcaccccccaacgcccacgccctgtgagtgtgaccgtgctctctggaactcgtgctcgacgtgctgaagcctgatcctggtagtctcgagctgctgcacgtaagccttggcatctaccagcttgccatcttttcctgtggatccatgcttcctctgtacgtgcgaatgacacttgtcatggtctccacctccgtctccgtgcagcgggagcgggtggtggtgctggtgctgctgctgaaactgaaagctcggcggggcggcaccggcagccgcagcggcgaggcctggcttgtagctgtaaccatcagcggtcaccatcatggcctcctgccgcggcgcagaggaggctgctggggacgccagctccatctgagacattgtgttctgagctgagctcgagtcagtgccggtgctccctactgactgcgaattcccactgtgcagctgctgttgatgcctcattggcaacgaagggaagatctccagcgtggggggcctgccggtgccagcgcccgcgagatatcctgccgccgccgccgccgactttgcctgcgcgacgtcgttcttgatgatcacgcccggatcgacgccgccgccggcgctggcggcgccaccaccgtggatgagggcctcctccagctcaccgaacccgaagtaggcagcggatgcggccgcaggctggaagtccaggaagcaggtcggcggtgcagccgcggcggcggcggcggcggcgtgggcttggactccgtacgcgagcgccagctggttgagaggcagcgctgccctctccatcctccaagaactctcctcgccttgcaccatggccactgctagttctacgaccaacaagagaccagcaggaagtcgctgtgggcggtggcgatggactatataaaagagcaaaattgntatctgtcccg

SEQ ID NO: 79877 - DNA, 206 bp, Zea mays
  Clone ID: MRT4577_172873C.1
actgctcacgcgtgcgctggccccttgagggagggcgttcttgagacaggggcttgtgtcccaggacccatgttcgggggtgcgaccggtgggacccctgtggtggtgccgcacaggcatgcccttgtccccaagcttagggctcgacaaaccgacgggaacacgaacggccgctactactgggtcaggcctgacgggaagacgca

SEQ ID NO: 79878 - DNA, 456 bp, Zea mays
  Clone ID: MRT4577_172874C.1
tatttgtgttgtaccgaataatgagttgacatgccatcgcgtgtgactcattattaacaataaaacaagtttcctcttattatcttttaaaaaaaaaaaaaaaaaaaaaaaaaaaaaaaaaaaaaaaaaaaaaaaaaaaaaaaaacgaaaaaaaaaaacaaaaaaaaaaaaataaaaaaaaaaaaaaaaggaaaataaaagcttggatcctggccgggcgggccgtcccaagggggaattttaaaaaaatccaactgccgggggggccacatcgagcgggaatggaaaggccccaatttgccctaaataaatccctttaaaaaacatcggcccttcgttataaagcgtaataacgaaaaaacccttgccgtaaccaacttaaaacacctggagaaaaatccctttttaacaactgggcgttataccgaaaaagccctcaccgagggcccttccaaa

SEQ ID NO: 79879 - DNA, 441 bp, Zea mays
  unsure (1)..(441): unsure at all n locations
  Clone ID: MRT4577_172875C.1
ggggggggggggggggtgtttttttttttttgtggggttttttttttttttttttttttttttgggagaaaaaaccgggccgggtaaaaaaacctcaatttattcgccacagaccacaggattagacgtaaaaacgttaaacaacaacgggggggggggggaggtttnnnttccatacaaacacaangcaaaacaaaaaacacaaacgggcggagactacccaacacgacagcacaacaccaacacggacggggaactagctagccaccccagggggaaaaaaaaaaaaaaaaaacaccggccggcgggtncaggaattaaacgggacgggctcaccaagtatttaacgggaagcgacggacccaacgctgagggggccccagaaggggtgggagtactggaaggagacgggctcccggggcccgagcgccccacccccct

SEQ ID NO: 79880 - DNA, 391 bp, Zea mays
  Clone ID: MRT4577_172876C.1
ttctcgcgtccggctcattgcattgatctgggggtacgatttattcctcttcatgggacttattatcgccgttgtcaacagaccgcactatcatgaccatctgtaaagacagacacaagcctgctgcgctgctcgacaggtgcaatctgacggagatccctgctacgggtattgtgctcggaagctacctcactctgatgactggcatttttttctgggctatgcacaagacccatttcctctcggacaaattctgcgtgaggccaatcagggacagggagcatgacatgatatccgtgctggacctccaagggagattcgggagccaggctgtgatcgtcggcaccgcgtgccggagctagtgcttcgtggagcgccatggactgctact

SEQ ID NO: 79881 - DNA, 308 bp, Zea mays
  Clone ID: MRT4577_172877C.1
caccacgagtaatcttaaacacttgttgagaataatcttaattttaaacttgtttccagacaaaatcttaggggcgggtgaaaacaagtagacaactttaagttcacgttttaggcaacctcatgtccagactcagcctagatatagaaggagcaaacaaactactgggcggcggcaacctcctgcacagcctcatttccctcaacagggctttaaagcttaacaccaacattctttttgggggcgccatgaacctccatgggcttcccaagagcgagcttgggggccttgggtttcttcaccttgcg

SEQ ID NO: 79882 - DNA, 265 bp, Zea mays
  Clone ID: MRT4577_172878C.1
cgggatcgcttcagctcggcgtcttcacaaacgccggcgcaaactctcgcccgagcccgacagatcttcaattccccattccgcccaccgatcgaccttcacgccagtctcggtctcttccgaaggcgtcgcgcgcggttgtttgagagggcaggatgaagatgaggtgatgtctgatctaaacccctgatttaagttggaccttagtaccgctgcaaaattatatattaaattgccttcggtatgcagaataaacataaaggtc

SEQ ID NO: 79883 - DNA, 375 bp, Zea mays
  Clone ID: MRT4577_172879C.1
atggcctcagcctcactcccgccgcgtgccagcctcgttcttgcgcgctggagtcgctgggtgtgggccgcatggacggggtggccatcttctccgcggaggctgggcgcagagctcaacgaccgcgtcaagctccgacaatcgcgcagccgcacggacccccctgccctcattaccaggcgcaggttaactcggcgtcaccctacactctccccacgccatctcttccccaacggattcgccgcaacggccgctggagctcgggccgagttcctcgcgttgggcacgcctctatgcggcataaaaccccaacgatttgcggtagcttctccctgttttctccatcgcctcgacctcgcgcaggccctaacgtag

SEQ ID NO: 79884 - DNA, 1828 bp, Zea mays
  Clone ID: MRT4577_17287C.1
tcggtcgctttccctcctcagcttcagccttcagctcctctcctctcctttcctctcctctgctctcctctccacagctgcagccagagccacccaccttatcgtcatcctcgctcgctcctcatcgccagcgcctcctcctcctcttcttccccaccgctgccgacatggctgcgcaagaggagaagaccgctgttgctgctgctgctgatgtcgccgcagaggagcctgcgccggcgccggagcagcagcctcagccggctggggcggcgcgcagggcagggccatcggcacccggcggggctccgcccaaccccttcgacttctccaccatgatgaaccttctcaatgaccctagcatcaaggagatggcggagcagatcgccaaggacccggcgttcacggagatggcggagcagctgcagaagacggtggtgtccccgcggcagcaacagcagcagcaggcgcggcagcagcagcagcagctggacccgcagaagtacgtggcgacgatgcagcagctgatgcagaacccgcagttcgtggccatggcggagcggctaggcagcgcgctgatgcaggaccccgccatgtccgccatgctggggggcctcaccaacccggcgcacaaggagcagctggaggcccgcgtcgcgcgcatgaaggaggaccccacgctcaagcccatcctcgacgagatcgagtccggcggccccgccgccatgatgaagtactggaacgaccctgaggctctgcagaagttcggccgcgcgatgggcgtcggcgtcggcccgtccggcgaggccggcggcgcagagcacgccgaggcggaggacgacgctggggaggaaggcgagtacgaggacgagtccatcgtccaccacaccgccagtgttggcgacgtcgagggcctcaagaaagcgctggagaacggcgcggacaaggacgaggaggactcggaagggcggcgtggcctccacttcgcgtgcggctatggcgagctccagtgcgcgcaggcgctcctggaggccggcgccgccgtggacgccgtcgacaagaacaagaacaccgcgctgcactacgccgccggatacggccgcaaggactgcgtcgcgctccttctcgagagcggcgccgccgtgacgctgcagaacctggacgggaagacgcccatcgacgtggccaagctcaacaaccaggatgacgtcctcaagctgctggagaagcacgccttcgtatagacgtcccacgccgccggccggcccgtcttgctcgtctgctcctgtcgccgccgctgccacgtcgcttgcctctgctactgctgccgccgccgccgccattaatgctttgttgatttctctcctggtctagacaacgcaggttccttcatcacttcactgttgagtatttgcattgggtgtgtatgtatcagattttgctttgcgtgatcacggtatcatatttatttatcggactcctcgttcatcaggaggttttcgtaatgaataaggaagaaatttccatttcaccgtccaaaaaaaaaaaaaaaaaaaaaaaaaaaaaaaaaaaaaaaaaaaaaaaaaaaaaaaaaaaaaaaaaaaaaaaaaaaaaaaaaaggaaaaaaaaaaaaaaaaaaaaggcttgctttttaaccgggccaatttttgggcccaaaaaaaaccgggtcccgttttatttttttccccaaccaccccccccagggggaaaaggggttttttaaaaaccccaccccccaaggttttttttttattccccacccctttttttcaagctttaaaaataaaccaacagattttttttgggtttt

SEQ ID NO: 79885 - DNA, 543 bp, Zea mays
  Clone ID: MRT4577_172880C.1
aacccaaaaaaaaaataaaagggttttttttcccggaaaatttagaaacagccccccccagttgggagggcccaaacgggaaaaaaaaaccgcatttagtccccctttttttaaaaaggggggggtttccatagtccttggggaaacaaaaggtcggccccgggaaggggttttgtccaaaaaatttggggaaggaacattttttttttttttaaaaatccctccttgggggggggaaccaatccaaacaacaataaacggagggggaaggggttttgccccccctttcttgggaactaaacgtttttttaaaaaagggttgggttccaaaatagggaaaaatgggccccttaggccccaaatttattttggggggggggatttcataaaaaaggggggggttttaaaaaaaaaaaattttgtttccaaaaatccttaaacgaagctgttcctgaaaagttgttccttcttaattaactccaaaaccaacccctttttaatttcctttgggggacccctgagggtggtccaatttccggggag

SEQ ID NO: 79886 - DNA, 649 bp, Zea mays
  unsure (1)..(649): unsure at all n locations
  Clone ID: MRT4577_172881C.1
gccggccgggccgggctcttttccatcgtcaacagacttgaaggcaatatacgatgagtactgaacaaaagactcctgtcaaccccatgcgtaacctcagaatcgaaaagttggttctcaacatctctgttggtgaatctggtgacagacttactcgtgccgctaaggtgctcgaacaattaactggtcaaacccccgtttactccaaggcccgttacactgttcgttctttctctattcgtcgtaacgaaaagattgctgttcacgtcactgtccgtggccccaaggccgaagaaatccttgaacgtggtttgaaggttaaggaatacgaacttaaggctcgtaacttttctgaaactggtaactttggtttcggtattgacgaacatattgatttgggtatcaagtatgatccctctattggtatctacggtatggactactatgttgtcatgggccgtcctggttaccgtgtctctcgccgtaagcactgcaagtctaccgttggtgtcactcaccgcatcaagaaggaggaatccattgaatggttcaagaaccgttttgatggtgttgttagtaacaaggcctanattataaataaaaactttctttattgaaaaataaaaaaaaaaaaaaaaaaggcccctan

SEQ ID NO: 79887 - DNA, 1442 bp, Zea mays
  Clone ID: MRT4577_172882C.1
ctcgaggccggccggggaggccgggcagaccccctccgccttctgctctctctcgcctctggtgcgcagagctagctctcttgaagcctcgagactcgtctcgccgctgctctgctctgctccccagctctgccgctgcgtgcctgcgtcagttgttgcattgcagccagcgagccttgagctgctagctctctcttcaccacagttcacaggcatggagttcgaggatcgctgccacaaggtccaggagcccaagttcgactgcctgctcttcgacctcgacgacaccctgtacccgctgagctccgggatcgcggaccatgtcaagaagaacattgaagattacatggtcgagaagctgggtattgacgagagcaagatcgagaacctgggaaatctgctgtacaagaactacggcaccacgatggctggcctcagggcgatcggctacagcttcgattacgatgagtaccacgccttcgtccacggaaggctgccgtacgacaacatcaagcccgaccctgttctcaagcacattctcaagaacctgcccatccgcaaactcatattcaccaacggcgacaaggtccacgccgtgagagccctggagaggctgggcctggaggactgcttcgaggggatcatctgcttcgagaccctgaacccgccgtgcccgcctcagggagaccgggaggccgagatcttcgacatcgccggccacttcgcccgctccggcgcccgccgccgagctgcccaagacccccgtcctgtgcaagcccaacgtcgacatccatggagggagcgctcaggatcgccaacgtcaacccgcaccttgaccatctccctgacgaaagctttaccggattgatctcctgcagatcttcttcgacgacagcgtacgcaacatccaggccgggaagcagattggcctccacacggtgctggtgggcaaatcgcagcgggtgaaaggcgcggaccacgcgctggagagcatccacaacatcagggaagcgctgccggagctgtgggaggaggccgagaaggcggaggacgtgctctaccccgaacgcgttgcgatggagacctcggtcaccgcgtaaaacccctgaatgcctccggtgcaccgtcagccgaactttctcgacatctccaggaccgcatcaacgatcacatgtcactcgctccccgagccagggccggtgatgatctcgcgctggaactgaatccaccagcaatggccgggccgaggatcgatttccgacagcaggaggggtgcagcatgtaaagggggaacagatgagatcatgtttgggttggtcccccgttgtatatgtagttatgtatcagccagtcctttgtttgtaaattaccagtatttagaagtaataagaaaatgggggtttacggtaaaaaaaaaaaaaaaaaaaaactcgagagggggc

SEQ ID NO: 79888 - DNA, 829 bp, Zea mays
  Clone ID: MRT4577_172883C.1
ctcgaggccggccgggccccctcctcctcttgctctctctcgcctctggttggcagagctctcttgaagcctcgagactcgtctcgccgctgctccctcagctctgccgctgcgtgcctgcgttagctgttgcattgcagcactgcgagccttgagctgctagctcgcccttcaccacagtccccagacatggagttcgaagaccgctgccacaaggtccaggagcccaagttcgactgcctgctcttcgacctcgacgacaccctgtatccgctgagcgccgggatcgcaggccatgtcaagaagaacattgaagattacatggttgagaagctgggtattgacgagaccaagatcgagaacctgggcaatctgctgtacaagaactacggcaccacgatggctggactcagggccatcggctacagcttcgattacgatgagtaccacgccttcgtccatggaaggttgccgtacgacaacatcaagcctgaccccattctcaagcacattctcaagaacctgcgcatccgcaaactcggagaccaggagcccgagatcttcgacatcgccggccacttcgcccgctccggcaccgccgacgagctgcccaagacccccgtcctgtgcaagcctaacgtggacgccatggaggaggcgctcaggatcgccaacgtcaacccgcacaaggcgatcttcttcgacgacagcgtacgcaacatccaggccgggaagcagattggcctccacacggtgctggtgggcaaatcgcagcgggtgaaaggcgcggaccacgcgctggagagcatcccaacatcagggaagcgct

SEQ ID NO: 79889 - DNA, 1572 bp, Zea mays
  Clone ID: MRT4577_172884C.1
cagggggtacctcgaggccggccgggccccctccgcctcctgctctctctcgcctctggttggcagagctctcttgaagcctcgagactcgtctcgccgctgctccttcagctctgccgctgcgtgcctccgttagctgttgcattgcagcgcagccccgcgagccttgagctgctagctcgcccttcaccacagtcctcagacatggagttcgaagaccgctgccacaaggtccaggagcccaagttcgactgcctgctcttcgacctcgacgacaccctgtatccgctgagcgccgggatcgcaggccatgtcaagaagaacattgaagattacatggttgagaagctgggtattgacgagaccaagatcgagaacctgggcaatctgctgtacaagaactacggcaccacgatggctggactcagggccatcggctacagcttcgattacgatgagtaccacgccttcgtccatggaaggttgccgtacgacaacatcaagcctgaccccattctcaagcacattctcaagaacctgcgcatccgcaaactcatattcaccaacggtgacatggtccacgccgtgagagccctcaagaggctgggcctggaggactgcttcgaggggatcatctgcttcgagaccctgaacccgccgtgcccgccgcagggagaccaggagcccgagatcttcgacatcgccggccacttcgcccgctccggcaccgccgacgagctgcccaagacccccgtcctgtgcaagcctaacgtggacgccatggaggaggcgctcaggatcgccaacgtcaacccgcacaaggcgatcttcttcgacgacagcgtacgcaacatccaagccgggacgatggagacctcggtcaccgcgtaaaacccctgaatgcctccggtgcaccgtcagccgaactttctcgacatctccaggaccgcatcaacgatcacatgtcactcgctccccgagccagggccggtgatgatctcgcgctggaactgaatccaccagcaatggccgggccgaggatcgatttccgacagcaggaagggtgcagcatgtaaagggggaacagatgagatcatgtttgggttggtcccccgctgtatatgtagttatgtatcagccagtcctttgtttgtaaattaccagtatttagtagtcatgaaaacctcggtctccgcgtaaacccctctcgcgaatcctccggtgcaccgtcagcccaactttctcgacatccaggaccgggacgatcgcataccactctctccccgagccagggctggtggtctcacgctggaactgaatccagccatggccgggccgagaatttccgacagcaagaaggggtgcagcatgtaaaggggggagcagatgatatcatgtttgggatgctcccagatatgtatagttatgtatcagccagttgtttgtaaattaccaataaatattagaagtaataagaaaaaatggagtttacttgtacgtttcttgtgctctgtcatctgaagtaataaaagcggttagcaagaatggaagagcaacacatttgcttctctg

SEQ ID NO: 79890 - DNA, 1381 bp, Zea mays
  Clone ID: MRT4577_172885C.1
cttctgctctctctctctctcgcctctggtgcgcagagctagctctcttgaagcctcgccgctgctctgctccccagctctgccgctgcgtgcctgcgtcagctgttccattgcagccagcgagccttgagctgctagctctctcttcaccacacttctcacgcatggagttcgaggatcgctgccacaaggtccaggagcccaagttcgactgtctgctcttcgacctcgacgacaccctgtatccgctgagctccgggatcgcgggccatgtcaagaagaacattgaagattacatggtcgagaagctgggtattgacgagagcaagatcgagaacctgggaaatctgctgtacaagaactacggcaccacgatggctggcctcagggcgatcggctacagcttcgattacgatgagtaccacgccttcgtccacggaaggctgccgtacgacaacatcaagcccgaccctgttctcaagcacattctcaagaacctgcccatccgcaaactcatattcaccaacggcgacaaggtccacgccgtgagagccctggagaggctgggcctggaggactgcttcgaggggatcatctgcttcgagaccctgaacccgccgtgcccgccgcagggagaccgggagcccgagatcttcgacatcgccggccacttcgcccgctccggcgccgccgccgagcttcccaagacccccgtcctgtgcaagcccaacgtcgacgccatggaggaggcgctcaggatcgccaacgtcaacccgcacaaggcgattttcttcgacgacagcgtacgcaacatccaggccgggaagcagatcggccttcacacagtgctggtgggcaagtcgcagcgggtgaaaggcgcggaccacgcgctggagagcatccacaacgtcagggaggcgctgccggggctgtgggaggaggccgagaaggcggaggacgtgctctacgccgagcgcgtcgccatggagacctcggtcaccgcgtaaacccctctctcgaatcctccggtgcaccgtcagcccaaccttctcgacatccaggaccgggacgatcgcataccactctctctcccgagccaggtctggtggtctcacgctggaactgaatccagccatggccgggccgagaatttccgacagcaggaaggggtgcagcatgtaaaggggggagcagatgagatcatgtaaaggggggagcagatgagatcatgtttgggatgctcccaaatatgtatagttatgtatcagccagttgtttgtaaattaccaataaatattagaagtaataagaaaaaaaatggagtttacttgtacgtttctcgtgctctgtcatctgaagcaataaaagtggttagcaagac

SEQ ID NO: 79891 - DNA, 598 bp, Zea mays
  Clone ID: MRT4577_172886C.1
cattgggtacctcgagccggccgggatatcagttccgctgcctcagcctctagacgttggcctatcctgaaatctcctatctcatctactcgacctgcggcatgggctatattaatatcggaatcaaccgattcggaatgatcggcaggctcggggcgagcgtcgccctccagaaccaggatgtcgagctcttcgccgtcaacgatgacttcttccccacggagtacatgatctacatgtacaaggacgacaccgctcacgagcactgcaaggccatcgatatcacactcgatgactccaagacccttctctatattgacgaggcggccacccacatttctatcaggaatgctgatgagatgcctcgaggtcgtgctggagctgaaaatggcgaggagttcaccaagcgtcttcactgacaaggaacatggagtgctgcgcttctcaatggtgaggccctgcaggttgctacttctgtccgacggatacatgcagccacgtgtggctgtatgtgttaatgatgacaagaacaccatggactgttaacattgtttcccatgcttagtgcagctcgaagtgtcttgctccccttgataag

SEQ ID NO: 79892 - DNA, 1385 bp, Zea mays
  Clone ID: MRT4577_172887C.1
cattgggtacctcgaggccggccgggctccccctccgcctcttgctctctctcgcctctggttggcagagctctcttgaagcctcgagactcgtctcgccgctgctccctcagctctgccgctgcgtgcctgcgttagctgttgcattgcagcgcagccccgcgagccttgagctgctagctcgcccttcaccacagtccccagacatggagttcgaagaccgctgccacaaggtccaggagcccaagttcgactgcctgctcttcgacctcgacgacaccctgtatccgctgagcgccgggatcgcaggccatgtcaagaagaacattgaagattacatggttgagaagctgggtattgacgagaccaagatcgagaacctgggcaatctgctgtacaagaactacggcaccacgatggctggcctcagggccatcggctacagcttcgattacgatgagtaccacgccttcgtccatggaaggctgccgtacgacaacatcaagcctgaccccattctcaagcacattctcaagaacctgcgcatccgcaaactcatattcaccaacggcgacatggtccacgccgtgagagccctcaagaggctgggcctggaggactgcttcgaggggatcatctgcttcgagaccctgaacccgccgtgcccgccgcagggagaccaggagcccgagatcttcgacatcgccggccacttcgcccgctccggcaccgccgacgagctgcccaagacccccgtcctgtgcaagcccaacgtggacgccatggaggaggcgctcaggatcgccaacgtcaacccgcacaaggcgatcttcttcgacgacagcgtacgcaacatccaggccgggaagcagattggcctccacacggtgctggtgggcaaatcgcagcgggtgaaaggcgcggaccacgcgctcgagagcatccacaacatcagggaagcgctgccggagctgtgggaggaggccgagaaggcggaggacgtgctctaccccgaacgcgttgcgatggagacctcggtcaccgcgtaaaacccctgaatgcctccggtgcaccgtcagccgaactttctcgacatctccaggaccgcatcaacgatcacatgtcactcgctccccgagccagggccggtgatgatctcgcgctggaactgaatccaccagcaatggccgggccgaggatcgatttccgacagcaggaggggtgcagcatgtaaagggggaacagatgagatcatgtttgggttggtcccccgttgtatatgtagttatgtatcagccagtcctttgtttgtaaattaccagtatttagaagtaataagaaaatggggggtttacgtgtataaaaaaaaaaaaaaaaaagcggcc

SEQ ID NO: 79893 - DNA, 355 bp, Zea mays
  Clone ID: MRT4577_172888C.1
attcggctcgagcaccaccaccaccggaccgtttctccgaccggactagctggcgcagggtcgggcggccacagtcaaaggagatggtgaaagggagcgggtttgtaggcccttcgcttcctgaccgtgggtaggggccgcccttatgaacggtcgctctacttcgccacataaagcggctgaacaacatggcttggatcatctccaccgctcacgtacacggaggttgggacattttctcactcgagcaagctccggatcatccgccttatcccccagaacgtggctacatacgccatcttccacatcaccgtacccaagggcagcgttggcttcggcataagcggcacctgcc

SEQ ID NO: 79894 - DNA, 359 bp, Zea mays
  Clone ID: MRT4577_172889C.1
tgagccaattgcagaaccactattccattatatcaagaggcaaagatgctcggatgtgagatgtgaataggagttatctgattaggcatatcgtgtagcctgaggccatgagatctgagatccgaattgctatgcgaattccacatttcacatgatcaaggatgcggaagcgttcattgtatatataggaattggaagtattcgtattaggcctatgccgatcccgaaggcaatgggaacgggatcccaaggggaattcgaattccacattctcaagatctagggatgcagaagtgttcatgtatcaataggaattgttagtattcgtatttaggactatgctgaatccgaaggaaatg

SEQ ID NO: 79895 - DNA, 393 bp, Zea mays
  Clone ID: MRT4577_17288C.1
tactcatccctatcgcaaccagaacaaaatggacaccgtcacctctgaagcctaagtccgtgagtccctcgcaactaatgtcggccgactcgatgaagaggctaaagactgtgctccaggcaccccgtcgctgaagacgcggacgtcatcgatgacagcgacgaggacggctacttcttgtggtccgtggaggaccacgcccgcgcccatgatgaaggagactgcatccgtggtggtgctcgtatcccgcgctgtatgtttctcgctgaagaagtatttgtactatctagctcttgcgcaacgttttgagatgcggctatggcatgaactctaaccatcttatgcatgcagaaaccgtgattcgaagtccgaaaaaaaaaaaaaaaaagcacg

SEQ ID NO: 79896 - DNA, 775 bp, Zea mays
  unsure (1)..(775): unsure at all n locations
  Clone ID: MRT4577_172890C.1
gggcccctccgccttctgctctctctcgcctctggtgcgcagagctagctctcttgaagcctcgagaatcgtctcgccgctgctctgctccccagctctgccgctgcgtgcctgcgtcagctgtcgcattgcagccagcgagccttgagctgctagctctctctcttcaccacagttcacagacatggagttcgaggatcgctgccacaaggtccaggagcccaagttcgactgcctgctcttcgacctcgacgacaccctgtatccgctgagctccgggatcgcgggccatgtcaagaagaacattgaagattacatggtcgagaagctgggtattgacgagagcaagatcgagaacctgggaaatctgctgtacaagaactacggcaccacgatggctggcctcagggcgatcggctacagcttcgactacgatgagtaccacgccttcgtccacggaaggctgccgtacgacaacatcaagcccgaccctgttctcaagcacattctcaagaacctgcccatccgcaaactcatattcaccaacggcgacaaggtccacgccgtgagagccctggagaggctgggcctggaggactgcttcgaggggatcatctgcttcgagaccctgaacccgccgtgcccgccgcagggagaccgggaggccgagatcttcgacatcgccggccacttcgtccgctccggcgccgncgncgagcttcccaagacccccgtcctgtgcaagcccaacgtcgacgccatgggagaggcgctc

SEQ ID NO: 79897 - DNA, 1804 bp, Zea mays
  Clone ID: MRT4577_172891C.1
cattgggtacctcgaggccggccgggctccgccttctgctctctctcgcctctggtgcgcagagctatagctctcttgaagcctcgagactcgtctcgccgctgctctgctccccagctctgccgctgcgtgcctgcgtcagctgtcgcattgcagccagcgagccttgagctgctagctctctcttccccacagttcccaggcatggagttcgaggatcgctgccacaaggtccaggagcccaagttcgactgcctgctcttcgacctcgacgacaccctgtacccgctgagctccgggatcgcggaccatgtcaagaagaacattgaagattacatggtcgagaagctgggtattgacgagagcaagatcgagaacctgggaaatctgctgtacaagaactacggcaccacgatggctggcctcagggcgatcggctacagcttcgattacgatgagtaccacgccttcgtccacggaaggctgccgtacgacaacatcaagcccgaccctgttctcaagcacattctcaagaacctgcccatccgcaaactcatattcaccaacggcgacaaggtccacgccgtgagagccctggagaggctgggcctggaggactgcttcgaggggatcatctgcttcgagaccctgaacccgccgtgcccgcctcagggagaccgggaggccgagatcttcgacatcgccggccacttcgcccgctccggcgccgccgccgagctgcccaagacccccgtcctgtgcaagcccaacgtcgacgccatggaggaggcgctcaggatcgccaacgtcaacccgcacaaggcgattttcttcgacgacagcgtacgcaacatccaggccgggaagcagatcggccttcacacagtgctggtgggcaagtcgcagcgggtgaaaggcgcggaccacgcgctggagagcatccacaacgtcagggaggcgctgccggggctgtgggaggaggccgagaaggcggaggacgtgctctacgccgagcgcgtcgccatggagacctcggtcaccgcgtaaacccctctctcgaatcctccggtgcaccgtcagcccaaccttctcgacatccaggaccgggacgatcgcataccactctctccccgagccagggctggtggtctcacgctggaactgaatccagccatggccgggccgagaatttccgacagcaagaaggggtgcagcatgtaaaggggggagcagatgatatcatgtttgggatgctcccagatatgtatagttatgtatcagccagttgtttgtaaattaccaataaatattagaagtaataagaaaaaatggagtttacttgtaaaaaaaaaaaaaaaaaagagaaaaaaaaaaaaaaagcggccggaggaggccgagaaggcggaggacgtgctctacgccgagcgcgtcgccatggagacctcggtcaccgcgtaaaccccccctctcgaatcctccggtgcaccgttagcccaaccttctcgacatccaggaccgggacgatcgcataccactctctccccgagccagctagggctggtggtctcacgctggaactgaatccagccatggccgggctgagaatttccgacagcaggaaggggtgcagcatgtaaaggggggagcagatgagatcatgtttgggatgctcccagatatgtatagttatgtatcagccagttgtttgtaaattaccaataaatattagaagtaataagaaaaaaatggagttaacttgtaaaaaaaaaaaaaaaaaccatcaaaagcaattaaagtggttagc

SEQ ID NO: 79898 - DNA, 1657 bp, Zea mays
  Clone ID: MRT4577_172892C.1
cctcgaggccggccgggacaagattctcatagacggagtggtaggggagagtacgcgcgagggtgaggtcgacggttcgaatactaacaaccgcgtagtgcgcgaaaaatgtcgcgacttgcgacttcgacggagacgggtgcattgggcccctcgaggccggccgggccccctccgcctcttgctctctctcgcctctggttggcagagctctcttgaagcctcgagactcgtctcgccgctgctccctcagctctgccgctgcgtgcctgcgttagctgttgcattgcagcgcagccccgcgagccttgagctgctagctcgcccttcaccacagtcctcagacatggagttcgaagaccgctgccacaaggtccaggagcccaagttcgactgcctgctcttcgacctcgacgacaccctgtatccgctgagcgccgggatcgcaggccatgtcaagaagaacattgaagattacatggttgagaagctgggtattgacgagaccaagatcgagaacctgggcaatctgctgtacaagaactacggcaccacgatggctggcctcagggccatcggctacagcttcgattacgatgagtaccacgccttcgtccatggaaggctgccgtacgacaacatcaagcctgaccccattctcaagcacattctcaagaacctgcgcatccgcaaactcatattcaccaacggtgacatggtccacgccgtgagagccctcaagaggctgggcctggaggactgcttcgaggggatcatctgcttcgagaccctgaacccgccctgcccgccgcagggagaccaggagcccgagatcttcgacatcgccgaccacttcgcccgctccggcaccgccgacgagctgcccaagacccccgtgctgtgcaagcccaacgtggacgccatggaggaggcgctcaggatcgccaacgtcaacccgcacaaggcgatcttcttcgacgacagcgtacgcaacatccaggccgggaagcagattggcctccacacggtgctggtgggcaaatcgcagcgggtgaaaggcgcggaccacgcgctggagagcatccacaacatcagggaagcgctgccggagctgtgggaggaggccgagaaggcggaggacgtgctctaccccgaacgcgttgcgatggagacctcggtcaccgcgtaaaacccctgaatgcctccggtgcaccgtcagccgaactttctcgacatctccaggaccgcatcaacgatcacatgtcactcgctccccgagccagggccggtgatgatctcgcgctggaactgaatccaccagcaatggccgggccgaggatcgatttccgacagcaggaggggtgcagcatgtaaagggggaacagatgagatcatgtttggggttggtcccccgttgtatatgtagttatgtatcagccagtcctttgtttgtaaattaccagtatttagaagtaataagaaaatgggggtttacgtgtacgtttcctgtgctctgtcatctgaagcaataaaactggttagcatgaccggaagatcgacatctcggaggggaaaaaaaaaaaaaaaaaaccggttagccgctgtccagctctacaggcttacgtacgcgtgcactgcgtgcatcatagcgtcgagc

SEQ ID NO: 79899 - DNA, 272 bp, Zea mays
  Clone ID: MRT4577_172893C.1
atgggtgtgtggatattacaaacttgcccgaatagctaacctcactacaatcacaacaaatccccaaaatggggactgaacaccttacataaaggcacccttaatctttcacatctcagctatctaataaattggctgacgacactataacctacactgcccccaaaagaaaaggatcccaacctgactaccaccaaatgttcaataccttaacaaactatcactatgatgaaacctattattgcatcaaccatcctcttaatatggggaaa

SEQ ID NO: 79900 - DNA, 1431 bp, Zea mays
  Clone ID: MRT4577_172894C.1
ctgctctctctctctctcgcctctggtgcgcagagctagctctcttgaagcctcgccgctgctctgctccccagctctgccgctgcgtgcctgcgtcagctgttccattgcagccagcgagccttgagctgctagctctctcttcaccacacttctcacgcatggagcgagaagctgggtattgacgaggttcgaggatcgctgccacaaggtccaggagcccaagttcgactgtctgctcttcgacctcgacgacaccctgtatccgctgagctccgggatcgcgggccatgtcaagaagaacattgaagattacatggtcgagaagctgggtattgacgagagcaagatcgagaacctgggaaatctgctgtacaagaactacggcaccacgatggctggcctcagggcgatcggctacagcttcgattacgatgagtaccacgccttcgtccacgggaggctgccgtacgacaacatcaagcccgaccctgttctcaagcacattctcaagaacctgcgcatccgcaaactcgtaagcgtcctcctcactcagacgacacgaatttctcctccttcggacaaggatcgagttgctgaaccatacgatacctgtggtgtggtgtggtgtttcagatattcaccaacggcgacaaggtccacgccgtgagagccctggagaggctgggcctggaggactgcttcgaggggatcatctgcttcgagaccctgaacccgccgtgcccgccgcagggagaccgggagcccgagatcttcgacatcgccggccacttcgcccgctccggcgccgccgccgagcttcccaagacccccgtcctgtgcaagcccaacgtcgacgccatggaggaggcgctcaggatcgccaacgtcaacccgcacaaggcgattttcttcgacgacagcgtacgcaacatccaggccgggaagcagatcggccttcacacagtgctggtgggcaagtcgcagcgggtgaaaggcgcggaccacgcgctggagagcatccacaacgtcagggaggcgctgccggggctgtgggaggaggccgagaaggcggaggacgtgctctacgccgagcgcgtcgccatggagacctcggtcaccgcgtaaacccctctctcgaatcctccggtgcaccgtcagcccaaccttctcgacatccaggaccgggacgatcgcataccactctctctcccgagccaggtctggtggtctcacgctggaactgaatccagccatggccgggccgagaatttccgacagcaggaaggggtgcagcatgtaaaggggggagcagatgagatcatgtaaaggggggagcagatgagatcatgtttgggatgctcccaaatatgtatagttatgtatcagccagttgtttgtaaattaccaataaatattagaagtaataag

SEQ ID NO: 79901 - DNA, 293 bp, Zea mays
  Clone ID: MRT4577_172895C.1
acttgaggccctgttagtgccatcggcgctctacactttcgaggctgcgcatccaccgcgcccatgtagggcgactggtagaacagcggcagcaccctgctactcccgcaccgacaaggaatgcaatactacgatgctggatcccctaaccagccggggcgtccaccaaccgcctactgcactgacgatgaccgccgcccaacaatccgtcatctaccagaacaacgactgatgcgcgctgctgctacagggaagtgaagcaccgagcgacgagtgttgcttcggcccgacga

SEQ ID NO: 79902 - DNA, 210 bp, Zea mays
  unsure (1)..(210): unsure at all n locations
  Clone ID: MRT4577_172896C.1
ctgganaacaangaggactacaacaagttttacnnggctttctccaanaacctcaagcttggcntccatgangactcgcagaacangaccaatatcnccgngcttctganataccactccaccaagantngtgatganntgaccagcctcaaggantacgtgaccaggntgaaggnngngcagantgacntctacnatatcactggtgag

SEQ ID NO: 79903 - DNA, 362 bp, Zea mays
  Clone ID: MRT4577_172897C.1
gggggtgggtttttttttttttttttttttttttttttttttttttttttttttttaacgccaacacattgttttccgtttttgttttgggggctgggggggccctgtggggtttttttcaggtcccgggggagcaaaaactggggaacaaaagaaaaacagggtcaactggtacatttttataggtggggggcaattggcataaacattataaacatttagtttttcaacccgccggggaagggttgggtttcccggaatttatttttttgggacggggggacacaagggttttttagctaacggggggggagggggtattacacgaaatgggggggccaacaaattagccaaccgttccc

SEQ ID NO: 79904 - DNA, 587 bp, Zea mays
  unsure (1)..(587): unsure at all n locations
  Clone ID: MRT4577_172898C.1
gttgtcccccaggccgcgctccggctcgcggcngaacggggcgcgcgcgcgccccggatgcggtggacgacgtcgctgcacgcgcggttcgtccacgccgtcgagctgctcgggggccacgagagagctacgcccaagtcagttcttgagctaatggacgtgaaggatctgaccttggcccatgtcaagtcgcacttgcagatgtatcgcaccatcaagaccaccgaccacaagccagctaattctgcttcatcctacgggcaagcagcagccgcgaaaccggtcatcgacatccccgaccccgacgacgacagcctgttcgacctcatcaccaccagcgccgggtctgatcagtcgtcgtcgtcggctcagcactctaaccctgacggcggcggcggcaacgagcatggctccagcatgtgcgctctgtggtgcagctcctcgacaagcatcagcagggggggctggttccatgacagaccaagagacgatgatgccgccactcccggtcccggcgacgacatcaaatccttcgaggacgtgcaatcacacagccttcttgacgatgtcgccgacctcaactcgtc

SEQ ID NO: 79905 - DNA, 321 bp, Zea mays
  Clone ID: MRT4577_172899C.1
agtgttctaatttttacacaaatcggagcattaaatagatactaatactatttgacatgcaatatatacacagtgtattccgtatacaagcaaatagagtggaaatgggctatgattgccacaagctgatatatctaggttcatgaaaactgggggtgaagcaagcattgtcagaacatgccatttgagccatatattaggccataaggaaatgcaaatccctcctctccatttactgatagaagatgacgaggcgcatagaatacagccgagcggaaccctgaagggtcgtctattaacacaatatgtccaccctgccaa

SEQ ID NO: 79906 - DNA, 459 bp, Zea mays
  Clone ID: MRT4577_17289C.1
ggaagaaagctccacaacgccaacgcattacaacgcacaaaaaccatttgaagctctgaagcaacgtgctgaaccaaagggggaactccgcatgcagcattgtcagtttgcattcgatagctagagagcgaagagcatgcatgtccaacatagttgtgcagatctcgagcgtctgatgcgaagcatgatccccagctggtaacaataaggcatttgacgaacccagccacaagctcacaggcctagtgaccaccatcttctccctgtgatgtctttgatcgcattctccgcatccatttcctctggttgggagtcagcgagctggatgaagcagcagtcctctggtggtgctgcgccgctgccaagctcgggagctcccccggaagcgcggcggccgtgctggtgaaggcgtttaggaccaggaaagcgaggatcggcgacaggtccagcgttcccccg

SEQ ID NO: 79907 - DNA, 250 bp, Zea mays
  Clone ID: MRT4577_1728C.1
gacgcggaccacacacgagcacacgcggcgaccgacatggctgggcgcgcaatcggcgcaaaccagccgatgtacctcacatgcctgaaccagctagaaaggctacaccattcggaacgacaagtgcatgcacaccgctcgcagcatggaccgatactccatgatgtggctctgaaaacactacaactctaagcacgatcgtgctacgctcttagcgagacgacatcctttaccggggcatgacgaccac

SEQ ID NO: 79908 - DNA, 448 bp, Zea mays
  unsure (1)..(448): unsure at all n locations
  Clone ID: MRT4577_172900C.1
acacgtacgcatacacncatgccgcttgttgactccacccctcctctcttactgcctacctctctttctctctcctgccccaaccaaccaatggaggctctcgcggtcgccgcatcctcctnnnnagaaaggcgcgccacccgcccttcctagtggccgcgcaaaccctcgcagaagncagatccgctgcggtccgatccgggcgtttagcgccagcggtgtgagtggcaaggacaacacccacagggacagcgagattagaaggcctcaagacccattttttaggctgtcaagcttgccaatccatacgaggaacttacttcgtgaccacaagatgcacgcttgttgtccaagtgcctgcatggagtgcactgtcaaacgcgcgagtcaccatatttggagatgtttacctctttccagctgtacaacggtcccttatactttatcg

SEQ ID NO: 79909 - DNA, 363 bp, Zea mays
  Clone ID: MRT4577_172901C.1
ggggaaaacccctgctagatatccaaaacgctgctgctttatttacatgccaaatcaaccggccagacgacgattaaccgtcggctagctgctactactacgtactactagctagcggtggtgtgaaccaactgccttaaccgcgatcattgctcaaggaaaccaactcgtggcgcggcgaccgacggacgggtcactgggcgccggggcccacgtccttctttgcggccctgttcttcttggccgcgccggcggaggaggaggcagcgcccgacgaccacggggcgaagaggcggtcgatgcccaaggcggcggcggacttgcgggagccgcggagcgagcaaactggcacgttgagcacgg

SEQ ID NO: 79910 - DNA, 417 bp, Zea mays
  Clone ID: MRT4577_172902C.1
tttttgcgtgcgcacagtcgtggaggttgggcgcaggctcgacgggacgtcagtctacaggatgaaggaggatgcactctctacacaagaacatgggggaggtagagtacttgtacggtgagaagcgtgacttcgttcagaatgaggatggaacaaaagtcaaatacaaggagtggaaccccgttccgatgcaagcatggctgctgctgggcttggatgtgttgacaacatctggattgatactggtaccctggagatgtatattggtgatgttctttgcacaactgtatgtgatgtgtttcgtattgtatggtccgttagtctggtctacgctagccggctctctaacatgagcggaagagaccttgtcctcatcgcaaagatgatgagctatgtgatcgccattattgacgatgt

SEQ ID NO: 79911 - DNA, 327 bp, Zea mays
  unsure (1)..(327): unsure at all n locations
  Clone ID: MRT4577_172903C.1
actattgaactcttctactttttattttccaaacaatttaattcttactaaaattataaaaattctgggttggttcaccttacaaacgcggggggtgatcncatccatccaaatcacaatacaaaaaatctgaagatttcattttatcacccaaaacgtactgattaggtctctcacaatacttaagggaactaaaacagacaataatatcccatttacgtgcaggaacttcatttgaaacaaaacaccactttgatattgtccgatgatttatacttgtataccctttaagcttatgggatctcgaccttaccattatccatctcc

SEQ ID NO: 79912 - DNA, 479 bp, Zea mays
  Clone ID: MRT4577_172904C.1
attcccgcaccaggtgcattcacaaccttctttctgaaaaaataaacgaaatttaatttaggtaccaatttaaattcatggcattattgttgtatcttgtagaatatataagttaccggtatagtgtagggatcaaattccagtagttctttgatagttttgtgttgacgttttgggacgtcaaatggaacaatgtcgtcttttgtaaccagcggcaattgtagtaccatttcttgtgttgaaatccttttacacagaagaaaaatattaattgtgaacaatgttaattgaacttcaattgtacatttctaatatggtaatgtgcagtaactataaaatatttgatgcaaggaatgtggtaagtattaaatttatgtataggctagaatataaaggtaggaaacctgtcatagtatggttgagcctcttcaatggttggattgaagtaccaatggcaagctgctccaccattgagaact

SEQ ID NO: 79913 - DNA, 404 bp, Zea mays
  Clone ID: MRT4577_172905C.1
gttatgagattaactttttacatttttaacattttatattacattcaagtctattggcaaacaaacccacaattccctttaattgcatggtacatcaaagaatacatacccccctgcacaggcaaaaacatgaacatttcaggggccagcccacgataggctaaggggctacaacaggcccaacttaaagcttaccaccaaaaccaataagccccgccccggctcaaactaacaggggggaataaacatgcatgctacccaaaaccacacgctacacccactgggggagccagaacacacaacagaaccatgccgacgacgccccgaagacaaggaaaaaaaaaggactggtctttaacccaaggcgcaggaaaaaaccccatacgccgacgtcgtttaacacc

SEQ ID NO: 79914 - DNA, 1158 bp, Zea mays
  unsure (1)..(1158): unsure at all n locations
  Clone ID: MRT4577_172906C.1
gggnaaaaaaaaattgacancatggatccatacatctcgatcggaaaagaatcaatagaaggagaatcggacgatatctttttcgaaacaaataaaaaggaaaaaaaagagaaaacagaaatcatgatcaactgaccgatctgtccgatctctctcccgagtccactccaagccttttcgccttttcctccgccttctcgcgatggcgccgccgcgccgcgctctactcgtcctcgccgctctcctcctctccctctcccttggggccgcctccttccattccgacgagctcctcctcaacgatgacgaagagttcgagggcgtcgtcgcccgcccctccgccccctccccgccggcggccccggtggtctcctcctcccgccgcagatcagcggacgcgccgttgcccgggtcaggcgagtccaacgcagtgcagttcacgctcgagcacgaccttggcgacggcaagggcttcgtctcagctggaaccttctcggcccgcctcaagaccttcgcccacggcacgcagagatgcattccacgtgacagtttggatgaacacattgttatccacatggatggtgtaaatatcttggcagtcaattatggctctgttgatgggtgccaataccctaggcctatgaaattgccatcaaaatggacattcagctcttacactatcctaaagactgctgaacaggcaccaagaaccccatcgtttgcagatcagttaatagaagctgacaatggtcttggcgaagtaatgaaaccacctgagaaatctttctgggctaaatattggatgtacatcattccgcttggtcttattgtcatgaatgctgttacggcagctgccaacataccagaggaagctgcagggcagggccaacctggagcacaacgggcacctgctgctgttgctgggaggaggagatgatggctgccttccataccgtagttaactatcttcacattgttttctgttttttttggggtattgtatcaatcttaccttgactgcatcatctatggcactgcatgatgatgccatcttttgcttgtgttgaaacacgtagcctatccaagacaatgtggttcctatacatctgtagccaattttggccactagcatgccattggacactgaaactttgcttg

SEQ ID NO: 79915 - DNA, 516 bp, Zea mays
  Clone ID: MRT4577_172907C.1
cagccgcctcacatatacggccacaacagcggctcctgacgagcatctcgacacaactgcctcatgaattcgcattagtgttcgcaaccttggtgttggccgtcagggggcttgcttgttggctgacctcgtgtaccagctcggataccgggcacggacctgtgaccatgccgaagctcacagtctagctgacaagcgctttctaacacgctttcgagctgcctcttactctggagaacccgtcgcagaacgttgcggaccttggtattgcctttgagatcactgtcatgaatactgacacgaatgatcccgcatagcttattgctcatatcatcgatgatgttgccgatgatggcctccctgttggtcgctctgcacgcacgcctccactcacgatatcgcttcagatggtgaaacagctggctaataagattgctgctaatattgaccacggtattgaccacggtgacctcccgtgtgaccagcactttatgaattgcttccagaactgcatgc

SEQ ID NO: 79916 - DNA, 1503 bp, Zea mays
  Clone ID: MRT4577_172908C.1
cattgggtacctcgaggccggccgggttggactgaagccacgcgtccgctcagctggaaccttctcggcccgcctcaagaccttcgcccacggcacgcagaccctcactaaactcacgcgtccgcggacgcgtccgtaactgggtggttttctttggcgtggaaacctcgaccgatctgtccgatctctctcccgagtccactccaagccttttcgccttttcctccgccttctcgcgatggcgccgccgcgccgcgctctactcgtcctcgccgctctcctcctctccctctcccttggggccgcctccttccattccgacgagctcctcctcaacgatgacgaagagttcgagggcgtcgtcgcccgcccctccgccccctccccgccggcggccccggtggtctcctcctcccgccgcagatcagcggacgcgccgttgcccgggtcaggcgagtccaacgcagtgcagttcacgctcgagcacgaccttggcgacggcaagggcttcgtctcagctggaaccttctcggcccgcctcaagaccttcgcccacggcacgcagaccctcactaaacttcgctttacaaggaatgattttactgaggatgataaagcggcgttcaaaaaagtgcttcaggaagatggcttttatacaattaggctgccatctaatgtgttggacactacaaagaaacatcatgttgtttcttcaatcagagctagatgcattccacgtgacagtttggatgaacacattgttatccacatggatggtgtaaatattttggcagtcaattatggctctgttgatgggtgccaataccctaggcctatgaaattgccatcaaaatggacattcagctcttacactatcctaaagactgctgaacaggcaccaagaaccccatcgtttgcagatcagttaatagaagctgacaatggtcttggcgaagtaatgaaaccacctgagaaatctttctgggctaaatattggatgtacatcattccgcttggtcttattgtcatgaatgctgttacggcagctgccaacataccagaggaagctgcagggcagggccaacctggagcacaacgggcacctgctgctgttgctgggaggaggagatgatggctgccttccataccgtagttaactatcttcacattgttttctgttttttttggggtattgtatcaatcttaccttgactgcatcatctatggcactgcatgatgatgccatcttttgcttgtgttgaaacacgtagcctatccaagacaatgtggttcctatacatctgtagccaattttggccactagcatgccattggacactgaaactttacttgaagcctgtgcacacatcatttgcagtgaccacttcatacttgatgcagcaaaaacacctattaatttcagctgttgaattttctgctaataaaaaaaaaaacaaaactcgtgctagaaaaaaaaaaaaaaaaaaaaaaaaaaattaaaat

SEQ ID NO: 79917 - DNA, 241 bp, Zea mays
  Clone ID: MRT4577_172909C.1
gctcaagttctcgcgctcacattcaaatatatgttcactcaatcgcggcataagctgcggtgcggccatggacgccagcggagccggtagcaatggccaataacggggcagttgggcgcaaggctggtggccccagcatgaagtccgagtcgcagaccgtcaaggccaggctacacatcttcggcatggacatcgggctctacctaatgaacgggcggtacgtctcaagcgtgcacaccgg

SEQ ID NO: 79918 - DNA, 162 bp, Zea mays
  Clone ID: MRT4577_17290C.1
acaaataataccctgcacaagggcttctttacttgtatgcggatcagctcatcaaaaacacatttgccaattcatgcctgatagacagacaaaacaccaggaagtataggcattattggacaagctcaggaatgagcctcaaccagaacgcttgagccgaat

SEQ ID NO: 79919 - DNA, 148 bp, Zea mays
  Clone ID: MRT4577_172910C.1
gataatagttggttctgctgttggtagtgcaattataactttaataatagcttgtggtattttatggatggtcttgcgaaaaatgcctaagaagaagaagttaaaggatgtacaagaaaattagtgggctaagactattaagggagca

SEQ ID NO: 79920 - DNA, 2561 bp, Zea mays
  unsure (1)..(2561): unsure at all n locations
  Clone ID: MRT4577_172911C.1
aggttgtgtccatctcagagcatgcatctgtaaatgagaagcaagcagaaaatagcagcagtgtcatgtgcaagctgggaagtcagtctacagacccaaattcagctgcaaacgaggctatgactgaaactgaaacaggtgatccttttatgatatttagtgaggtacaaatgctaataccaatatgtctaactctgactctcaaccctgcagaaaacatacaagatgcaaatatggaggaacaacaatcttccttggtggatggtcttaaaactcccactactgtggctggtatgtccaatcatgagcatcaatcggtagataaccatgtagttcaaaatttgatcaggcaaacnnnnnctactgaagatcaagaatccacaaccgtggagtgcttgtccgacattgcacccaataaccataatggagccaccaacagtttcaaggaagagaaagaagcttcggagcagcatttgcaagccaatgagattgagagtttcagaaccaataatgtggccagacctgttgaaaatggcaacgttggcatgtatgaagtaactcccagacaagacgacggtgatgtaaatgctggtgccaatccaactgatgaacatctgaagaagtcccggacatacctccttcttctagccattcttgcagtatccctggcgtatcaatcaggtttaaatccaccaggtggtttctggacacaaagaggtaccaacaattcacctaagagcacccatcatcgtccctatcatttaccgggtgatcccatccttgaggatactcgccatcgacgctatattgcattcttctatttaaacgccatcgcctttgtggcatcccttgtcatgatcatcatgctcctgaaccggaggatgagctacaagggcataaaacgatatgcgctgcagatggctatgatagttgatcttcttgctctaacagggtcttacattatggggagtagtagggggacgaagagctccatatacatatggctgttggtatgccttgtgctggtttatgttgctgttcatgttctgatagcaacacatgtaatccctgaagggtgcaagaaggtcgtggcacagaagattgagaatttctcctgcagatacatatggacaaaggcttcgtttcggaaccggggaattgatggtaatggtagtgattgtgaggctgggcaaagccagaggagtgatgccgatgacaagacctgggagcggaggcgcaatctactgttgatgcttgctgttctagctgcaacagtcacgtaccaagctggcatcaaccctccaggaggtgtatggtctgatgatagctcagccagtggtaaaccaggagacccaatccttcagcacaacaattccaagcgctatgatgttttctactactcaaactcactctcattcgtggcatctgtagttatcacaatactgcttgtgaacaaggaatcctgcgagcatggtatcaagtcctatgcgctaagagtgtgtttggtggtgggcttggtgagcctcttgattgcctactctgcaggaagctctaggaaagcaagagaatctatctatctcatcgtcattgctgttgcagttctgattgctcttgtgattcaagtgcttcttctctcctgtacgcaagacagtctcagaggaccaactggacagtttatagaacgtctgctccagctgctttttgggacggacaaggcctggcatggagacacttctaaacagaaagaaagctcaggtcgtcccgagaaaaaagttcggaagaggcacaagtatttgatgctgcttgcagttttagctgcctccatcacgtatcaagctggtctcaacccacccggtggtttctggtccgacgacaatgaaggccatgtggaaggcaatcctggcctgaaaccacctggtgccttgtggtctgataacaaaggtcatttggcaggcaatcctgttctccttgatattaatcctcggcgctacgaaatattcttctgcttcaactctatctcgttcatggcatctattgtcgtagtcatgttcctgttgaacaaatctgcccggaagaaggccgtgccacttgaagtactgcacttgatcatgatactggacctgctggccctcatgactgcttttgctgctggaagctgcagaaaattcaggacttcagtctatgtgtatggtctagtgctcggtgtcgtggtataccttgtgatcgcagttcttttgtcaagtggcattgcaaaatgtctgagacccatggatagaaatagggtttcctctcagagaagtcctattcgcgctcctacagcaagcacaaggatacttggagaccatgcttgatggttccattcctttggtaatagtactagtttaatagtagtgtatgtatttggcttttcagtgtacgttatgttgtgggagtttgaattgaactgaaattcgacgctttatgttgttcatttcttttagaatgtaaaatcagtgccaaacaaaaaaaaaaaaaaaaaaaaaaaaaaaaaaaaaaaaaaaaaaaaaaaactcgaggagggg

SEQ ID NO: 79921 - DNA, 500 bp, Zea mays
  Clone ID: MRT4577_172912C.1
atcaatagattatttatattcccatttcataaatatgaataaatattcatattacttatattacattgataccttcggcttgctagaaggtgaagtgcgagagtgacgcaagagtgattacaatttagcgtgaacagtgtggggggtactgttcatctatttataggcacgggacgcagcacggacaaaattacatctatgtccctgttaactaattatgatcataatgcaaactgttaaggactatacagtcttttcctctttaagtcggtatcgtctttcgcctttatcattacaccaagccgaagctctgtgagccatagcttcagcttttgtacgcatcatcttcggcttatatcttcatatctcacttgcctgtcctgtctagccgaaggtgtttttgtcttgaggaccttcggcggaggagaagacccccaacaggttctcttgctaggagttgctcaaaggatgcggatgacgtatgggagcaaactcaaatc

SEQ ID NO: 79922 - DNA, 343 bp, Zea mays
  Clone ID: MRT4577_172913C.1
gtattatgtaacttgccaatccattacgtaacttttctctttcaaacaagctagaagcctcactctagctatgtgtggacatgaagaatatggagaaggagggtgacacgatgatgtgtggcgcctgcatcactggcgtcatgcgcttgatggcgcaaatgtatatcccggtccaatgcatgcatgtgtagtgcattgcttgggacccaaccaattttagtatagctagcataggccgctttaaagtatgtgcgggactagcgttaatcatttgggggggtaggcggggttggcgtttcaggtggcaaggatgacatcggccgagacggacttggggcctccc

SEQ ID NO: 79923 - DNA, 222 bp, Zea mays
  Clone ID: MRT4577_172914C.1
tcttaacatatgtcaccgtgcaatcaaggggtggcatccaattttgtgggcccgaccaaccccaacccaacttcagaccacagcccacctatccaaaaccatcctggtgttcgtaactccaccatcaatgatgctcttcacttttgttcgcctatacaacaagcacaacctccatgacatggctggcatgaacgctcaaagtactcaagccccaaacccttc

SEQ ID NO: 79924 - DNA, 182 bp, Zea mays
  Clone ID: MRT4577_172915C.1
agagagaggaaagccagcgacggagcacggagcgcgccaacaagaacgcattaggaggagcagggacagcgcgagggcaggcgatcacagccctgcacaggggaggagacagacccgcaaccgcgccgcagcaggaaacaaagaaggccgccgcaggaccaggaggcaaaggcagaggaagc

SEQ ID NO: 79925 - DNA, 378 bp, Zea mays
  unsure (1)..(378): unsure at all n locations
  Clone ID: MRT4577_172916C.1
gggggagcgacgcgnncggaaagcacaatattttacctttaattgcagccaaaatattttgcttcctggttcgtccttttctttcttcaagtgtttctaccacaaccattttcccacaatgctcacaagctcctatagcttccctttttcccccatacctctcaccatcagtgtcttcaatgtgtgaaaacccaattgttcaaccctacaggatccaacatgcaattctcaacaggcatcttaccattatcacccttgttcctccaacaaccgtcatccctatttacatcaattacctttggtccattttgttgtcacaaaacaatttgtcacaacaacttcaacaacttttgctttcaaacctttctttatactctt

SEQ ID NO: 79926 - DNA, 561 bp, Zea mays
  unsure (1)..(561): unsure at all n locations
  Clone ID: MRT4577_172917C.1
ctgggcatgctatttttttagataatgggaattcaaagttcctggcctttgtctaaaagagactatagccgaattattacagactcagatagaaacaacactatctgaaaactcaaagaaaggcaaaacatagtgtggcgaaacgagattaaagacaaagtctaaatgcagatccccatccatgatgtctaaaaatctgcattaccaactcctccaatctacgtaatgccttgattattagttcttgatcatcctgtctaagttgtagttgagctcaaaactggagccaatgcgtagcccgaaaaaccaccttgtcctgtcgccatatctaggttccgtcctgctttgagacgttctgcccggcccagggatccctttcccgttgatgccgcgcgacgtttactccaacacaaaaactcctggctgtcatcagctttcggaattgcaaccatcattttaacctcattctgtatccaaactttttcagcaatataggactcaccaccccaacctgcttntgatccatgctgttttcctcaaccataatatgctcctgctaaa

SEQ ID NO: 79927 - DNA, 411 bp, Zea mays
  unsure (1)..(411): unsure at all n locations
  Clone ID: MRT4577_172918C.1
ggaatgactggctggaccaactcgcccgggctgctttaaaagggataggcgcgcacctcaagggccggtacagtatggactggctgcccgcccatggacagagaggctggatctgccccaccacaatgagcacatatgcagcctcacagtgaacggcgcggaccacggcctcagacctgcggtggactgctcaaccttcaccncacatagagcgggagcgccaccgacggatcgagcgtcgcgccttcctggcagaccttacacgccagcatcgccaggaccagacctgctaggacctggtggccctggagaagtgcaaccctaagtagctcgcggaggtgtccgagcgacaggtcgtctaggatcaaaccggacccccttgaccggggatgggggagatacatacataca

SEQ ID NO: 79928 - DNA, 730 bp, Zea mays
  Clone ID: MRT4577_172919C.1
ctcgaggccggccgggatcatatatcctatcctagctagcagcaaaagctgtactactgcaacagcagtgcgagggcttgataattgggctcatgaccattaagcgttccagggcctgcataccatcataatacacagtagccgtctttccacacacacacaccccctaaaagaagctaccataactttgagctgttggaccgcattcgatcgccgataacgagagactttggactggtttgcgcggccactagtagtgtgtactgtcgcgcacgaaatagtggctcaaccaccgaatccagtccaggccgcggtccccacgcagcagcaacatgctccgctccgctccggagccccgtccatcatccatcaatcatcatcatacttcggtggactcactcaccgactagtactgtcatcagtatagtagtacagttcagaatacgctttgattaaagtcgattgtttggactgctcaacatataatccatagagacaaaaaaatattgtacaaacagtaggcagttagaaactgatacagattaaagtcaaacgaacagttaatcaatcctggcgcacgaaatatttatcatctgttttttttcactgacacggcgaaacgtcgcaggcgcgcacacgatcggtgtggcccactgcaacaccttcgcggcgcgtctgatcggttccaccaccagctccggagcggacccggagctgaacgcggcctacg

SEQ ID NO: 79929 - DNA, 102 bp, Zea mays
  Clone ID: MRT4577_17291C.1
tcacttacctccctttcctaggcttgctagtccttcaacttcaatgcttcctaaaccgcctccttcaccatctcctacattcttgacacctcaaccttctta

SEQ ID NO: 79930 - DNA, 500 bp, Zea mays
  unsure (1)..(500): unsure at all n locations
  Clone ID: MRT4577_172920C.1
atagtttttttttgtgcgccagaagattttagaagacttgcccgacgaatctggtctagatttttagaaggatcncaccttctgcaaatatattttattctggcagccactacctttctgttccttgttttttttatagtcacgattctgattccatgagtatcaaagaaatcgttacaattcaaaggtcaagacgcttattctacgggtcgagagcggtttcatcattttgggaacactgcataaataaacatccacgtaaaagttatgcatcaacgccatgtgcattcctatgcattcagttagacatctatattctcctgaattttctttagttcaaacgttgtcatctatgttatgctttatgtgttcctctcattcaaggttcagaaaattatcggtaagtggtataggtcagtaatttctagctcgcaaaatgcctggtttcgggtacccactaaccacatggtcggtttccatattgtgaatcacgtgagctg

SEQ ID NO: 79931 - DNA, 584 bp, Zea mays
  Clone ID: MRT4577_172921C.1
cgatgggtacctcgaggccggccgggatccatccgcgcgctctttagcttcctcctccgatcctcacctactagcaggcacaggcagcagcagcagcagcagcacagcgcgcgtcaccgcaagctcaagtgtcttcttccttgcttgcttgcctgcttacctctcagttccccactcacgtctcttgccgtacgtacgtgcgtccaacacaccaggtgaaaatgggctcggagacggagacggtcaacgtggaaggcatcccgttcccggcggagatcaccgtcgggaaccctctctccctcctagccacaggtatcacggacatcgagatccacttcctgcagatcaagtacaacgccatcggagtctacctccacaacgccgtcgccgcgtgatttatcgagttgcgttggatttgagttcgtgaatgtccgtcctgtacgcgtcttgtctcgtgtgtgttgtcgtttgcagcgaatttgcaagtaataataataaaaagagtatgtcctgtaggttgtgcagattgtcgttgtggaaaactgtaatatgagatagaaaatttgacggtctgttggaaacaa

SEQ ID NO: 79932 - DNA, 1131 bp, Zea mays
  Clone ID: MRT4577_172922C.1
taccctcgcggccgtccgggaattgggcccctcgaggccggccgggatccgcgcgctctttagcttcctcctccgatcctcacctactagcaggcacaggcagcagcatcgatcggatcggagcagcacagcgcgcgtcaccgcaagctcaagtgtcttcttccttgcttgcttgcctgcttacctctcagttccccactcacgtctcttgccgtacgtacgtgcgtccaacacaccaggtgaaaatgggctcggagacggagacggtcaacgtggaaggcatcccgttcccggcggagatcaccgtcggcaaccctctctccctcctagccacaggtatcacggacatcgagatccacttcctgcagatcaagtacaacgccatcggagtctacctccacaacgccggcggcggcgacagcaccacgcccacgctgctgggccacctcggggcctggaagggcaagacggcggaggagctcctagcggacgccgccttctgggccgcgctggtcgcggcccccgtcgagaagctgttccgcgtcgtggtcatcaaggagatcaagggctcgcagtacggcgtgcagcttgagagctccgtccgcgaccgactcgccgccgccgacctctacgaggacgaggaagaggaggcgctcgagaaggtcgccgacttggtccagtccaagtacttcaacccgggctccgtcgtctccttccacttcccggcaccggcctccgcctccccgggacccgcggcggagatcaccttcgcgacggagggcaagggcgacgccaggatcgcggtggagaacgggaacgtcgccgggatgatccagacctggtacctcggcggcgactccgcggtgtcccccagcaccgtccgcagcctggccgaccgtttcgcggcgctgctcgccgtcgccgcgtgatttatcgagttgcgttggatttgagttcgtgaatgtccgtcctgtacgcgtcttgtctcgtgtgtgttgtcgtttgcagcgaatttgcaagtaataataataaaaagagtatgtcctgtaggttgtgcaaaaaaaaaaatattctctactactaactttttttattttctcgaattacttatttttaacaggcccctagggc

SEQ ID NO: 79933 - DNA, 563 bp, Zea mays
  unsure (1)..(563): unsure at all n locations
  Clone ID: MRT4577_172923C.1
ccggccgggacacgcccggcactaccatccatccatccgcgcgctctttaatttagcttcctcctcctcacctactagcagcatcgatcggatcggagcagcacagcgcgcgtcaccgcaagctcaagtgtcttcttccttgcttgcttgcctgcttacctctcagttccccactcacgtcccttgccgtacgtacgtgcgtccaacacacctgcaggtgaaaatgggctcggagacggagacggtcaacgtggaaggcatcccgttcccggcggagatcaccgtcggcaaccctctctccctcctaggcacaggcatcacggacatcgagatccacttcctgcagatcaagtacaacgccatcggagtctatctccgcaacgccggcggcggcgacagcaccacgctgctgggccacctcggggcctggaagggcaagacggcggaggagctcctaggaccncgcnccctctggggncgggctgtgtcgcggcccccgtcgagaagctgttcccgcgtcgtggtcatcaaggagatcaagggctcgcagtacggcgtgcagc

SEQ ID NO: 79934 - DNA, 1188 bp, Zea mays
  unsure (1)..(1188): unsure at all n locations
  Clone ID: MRT4577_172924C.1
aaaaaaaaagttcgttgtcagttgatggaccagccacagcccacagcttcctcgctcgcttccctgcctctcctcctacctaacctcaccaccacctgcaacaacaaagcacacggccggcactaccatccatccatccgcgcgctcttaatttagcttcctcctccgatcctcacctactagcaggcacaggcagcagcatcgatcggatcggagcagcacagcgcgcgtcaccgcaagctcaagtgtcttcttccttgcttgcttgcctgcctgcttacctctcagttccccactcacgtcccttgccgtacgtacgtgcgtccaacacaccagctggtgaaaatgggctcggagacggagacggtcaacgtggaaggcatcccgttcccggcggagatcaccgtcggcaaccctctctccctcctaggcacaggtatcacggacatcgagatccacttcctgcagatcaagtacaacgccatcggagtctacctccacaacgccggcggcggcgacagcaccacgcccacgctgctgggccacctcggggcctggaagggcaagacggcggaggagctcctagcggacgccgccttctgggccgcgctggtcgcggcccccgtcgagaagctgttccgcgtcgtggtcatcaaggagatcaagggctcgcagtacggcgtgcagctggagagctccgtccgcgaccgcctcgccgccgccgacctctacgaggacgacgaagaggaggcgctcgagaaggtcgccgacttcttccagtccaagtatttcaagccgggctccgtcgtcaccttccacttcccggcaccggcctctgcctccccgggacccgcggcggagatcaccttcgcgacggagggcaagggcgacgccaggatcgcggtggagaacgggaacgtcgccgggatgatccagacctggtacctcgccggcgactccgcggtgtcccccagcaccgtccgcagcctggccgaccgtttcgccgcgctgctcgccgtcgcagcgtgatttatatatatgatgctcagtctgctttaatctaatttccggccggttggtcgagttgcgttggatttgagttcgtgaatgtccgttctgtacgcgtcttgtctcgtgtgtgttgtcgtttgcagngaatttgcnngttntaataataaaaagagtatg

SEQ ID NO: 79935 - DNA, 280 bp, Zea mays
  Clone ID: MRT4577_172925C.1
gtttgtcatataaatctgtgcataaaagctaagtacgaaacagtcttgatgacaactagcatagtatcgtgcagggaaagagaataagatcatgttgctttgtgcttgatcctgtgtttctctgcttccttgcatatctaattacagccatgacaaaattggcacctcagctttctctctgcttctcattcatcgatggttggatcaagtgaggcttggtgggagggttagacacggacagtatcacaaatgaggacgtaccttccctattcttgcaagc

SEQ ID NO: 79936 - DNA, 547 bp, Zea mays
  Clone ID: MRT4577_172926C.1
aaaaaaaaaaaaaaaaaaaaaaaaaaaaaaaataaaaaataaaaacaaaaaaaaaaaaaaaaacgtttttccgcttgtccctatcccccttaagggccaattgtgcatttttccataacactgaagaccgcttaaccttgcttctatagggccaaattccccttttggggagtagttttacaattaactggccgttgttttaccactttcaaactggtaaaacccaggcccttcccaatttaatggctttgcagcaaatacccctttccccatctgccttcttatcaaaaaggcccgcagcattgacatttcccaccccctgaacattctcattaatgaatggacacgccctgtacccgggcattaacccctatacgcgtgggggttacctgcaacgcgcccctttcactttccagtgccctatcccccacacctttggcttttttccctttctttttctaaatggggggcggttttcccggttacgctttaaattttgacctcccttttgccttccgatttatggtttaagggatccttgacccca

SEQ ID NO: 79937 - DNA, 1223 bp, Zea mays
  Clone ID: MRT4577_172927C.1
acctcgagccggccggaaaccggccgtgggcagttgatggtcattgatcccagccacagcccacagcttccttgctcgcttccctgcctctcctcctacctaacctcaccaccacctgcaacaacaaagcacacgcccggcactaccatccatccgcgcgctcttaatttagcttcctcctcctcacctactagcaggcacaggcagcagcatcgatcggatcggagcagcacagcgcgcgtcaccgcaagctcaagtgtcttcttccttgcttgctcgcctgcttacctctcagttccccactcacgtcccttgccgtacgtacgtgcgtccaacacacaccaggtgaaaatgggctcggagacggagacggtcaacgtggaaggcatcccgttcccggcggagatcaccgtcgggaaccctctctccctcctagccacaggtatcacggacatcgagatccacttcctgcagatcaagtacaacgccatcggagtctacctccacaacgccggcggcggcgacagcaccacgctgctgggccacctcggggcctggaagggcaagacggcggaggagctcctagcggacaccgccttctgggccgcgctggtcgcggcccccgtcgagaagctgtttcgcgtcgtggtcatcaaggagatcaagggctcgcagtacggcgtgcagcttgagagctccgtccgcgaccgcctcgccgccgccgacctctacgaggacgaggaagaggaggcgctcgagaaggtcgccgacttcttccagtccaagtacttcaagccgggctccgtcgtcaccttccacttcccggcaccggcctccgcctccccgggaccccgcggcggagatcaccttcgcgacggagggcaagggcgacgccaggatcgcggtggagaacgggaacgtcgccgggatgatccagacctggtacctcggcggcgactccgcggtgtcccccagcaccgtccgcagcctggccgaccgtttcgccgcgctgctcgccgtcgcagcgtgatttatatgatgctctgctttaatctaatttccggccggttggtcgagttgcgttggatttgagttcgtgaatgtccgttctgtacgcgtcttgtctcgtgtgtgttgtcgtttgcagcgaatttgcaagtagtaataataataaaaagtatgtcatgtagtttgggaaaaaaaaaaaaaaaaaaggggcggcc

SEQ ID NO: 79938 - DNA, 532 bp, Zea mays
  Clone ID: MRT4577_172928C.1
tttttttttttttttttttcaaaacaacacagaaacatacgtgtgtacgtgtatatataaatattgaatccggcacgaggctgacaggaccgcgagaacgttcagatgaacgaaccccaggaccaggagacgaaggcgaggcaggcgaccatacaatggcgggtgcagttgactcttgacaggatcttatttagacgctgctacatacatatatactacgcctcgtcgtcgtcgtcctctcgtgcgccaccattgggccggctcagctgcagttgcagttgcagctggtgccgccgcacttgcaggtgttgcagccgccggcgctggccttggtggtcggcgcagcgaggatgccgctggcggcggcggtctccacttcagggtacaaattgcagcagtcgcatgggcacccgcagtcaggggggcagttgcagccgtcgtcgcagcaatacgccatgattacaggcgaagggagcaggtgctgctagctagctgtgtttgctgaaagaggaggaggcgtgctgctgccttt

SEQ ID NO: 79939 - DNA, 1308 bp, Zea mays
  Clone ID: MRT4577_172929C.1
ggtgccctctcgaccggccgggatatcccagccaccgcgcgcggcttccttgctcgcttccctgcctctcctcctacctaacctcaccaccacctgcaacaacaaagcacacgcccggcactaccatccatccatccgcgcgctcttaatttagcttcctcctcctcacctactagcaggcacagcaggcagcagcatcgatcggatcggagcagcacagcgcgcgtcaccgcaagctcaagtgtcttcttccttgcttgcttgcctgctgcttacctctcagttccccactcacgtcccttgccgtacgtacgtgcgtccaacacaccaggtgaaaatgggctcggagacggagacggtcaacgtggaaggcatcccgttcccggcggagatcaccgtcggcaaccctctctccctcctaggcacaggtatcacggacatcgagatccacttcctgcagatcaagtacaacgccatcggagtctacctccacaacgccggcggcggcgacagcaccacgcccacgctgctgggccacctcggggcctggaagggcaagacggcggaggagctcctagcggacgccgccttctgggccgcgctggtcgcggcccccgtcgagaagctgttccgcgtcgtggtcatcaaggagatcaagggctcgcagtacggcgtgcagcttgagagctccgtccgcgaccgcctcgccgccgccgacctctacgaggacgacgaagaggaggcgctcgagaaggtcgccgacttcttccagtccaagtacttcaagccgggctccgtcgtcaccttccacttcccggcaccggcctccgcctccccgggacccgcggcggagatcaccttcgcgacggagggcaagggcgacgccaggatcgcggtggagaacgggaacgtcgccgggatgatccagacctggtacctcggcggcgactccgcggtgtcccccagcaccgtccgcagcctggccaaccgtttcgccgcgctgctcgccgtcgccgcgtgatttataccggtcggcgggccggttggtcgagttgcgttggatttgagttcgtgaatgtccgtcctgtacgcgtgttgtctcgtgtgtgttgtcgtttgcagcgaatttgcaagtaataataataaaaattatgtccggtaggttgtgcagattgtcgttgtggaaactgtaatatgagatagaaaatttgacggtctctcgacctcgaatccatggatcatggatgcactacacttctcaataaacgctcttcataattttgcctccccaaaaaaaaaaaaaaaaaa

SEQ ID NO: 79940 - DNA, 437 bp, Zea mays
  Clone ID: MRT4577_17292C.1
gtcgccggcggggagcgcttctgctagacgagaggtagcgtgcagggcgtgccgtgtggctggtgtgcagaccaagatccaacctcaagactcgcgaggtggcatcggatgctaacctatgctctggccaccatgcgtcaacgcacacagcgcagcgatcacgtctgagcttctgcaaccaatttgcggtgtgatggccttcttccttaatatgatgaagcatcgaggttctatcaaaaaataagatcgtcattgagtgagaatagtaatatgtactactctacatgcgctagagggtccctttatagattgtgcacctattacctacaggcaagaccttatatctaaggtgatgctactattcaaacgtacgatgctcacaacacgccagtgaggctatggtgcgagcactacttcgaatggagctaaggaacatg

SEQ ID NO: 79941 - DNA, 573 bp, Zea mays
  Clone ID: MRT4577_172930C.1
ttactatactggaatccttcaagactgcggattgactcttctatcgagtggattcacgaagaatacttgtttgggtcatactacttttttgagcggcctcctttgtgaacgggagcaggacaaaaccgagatgcctagctactgtgagcatgattgggttcatttacattcttcttactacactacgcatgacgctctggcacttacctacctacaacatatggataaggagtacctcagtcggtatctttctgatctactacgctctcgatcgagtgagatacggaagtgcttttctatgactaacgcgattcatgagacggtacatgactccctaattccgaatcacgagattagttgaggaatccgctactgccgttaactaatagtgttatgatctagatcgtctacccgcattgaacactgagattgtattttcctgcagaagtctggcgtacaagatggctaatgatgtgaatttgcataacactgacaaattctttctatttgcgattcgggttatctcttttttataggatggatgtcatcctctttttggagcaaattttaact

SEQ ID NO: 79942 - DNA, 132 bp, Zea mays
  unsure (1)..(132): unsure at all n locations
  Clone ID: MRT4577_172931C.1
tnctccttttcgacggctgctcggtaacctgggcgcccctagccagctctaagtgagcgccaccagcagcatctgccaccgactcacgcataccgtggaataaattatggtattggtagagtgtcatctatt

SEQ ID NO: 79943 - DNA, 772 bp, Zea mays
  Clone ID: MRT4577_172932C.1
gtcgtatgaatagtcagccactgggcttgttttcatcacagacacattcacgcttcccccttctgtaagatgaactaaccaagcctcagcggatctccttcgaatccgactgcctctgctatctcccaatagcgaaacctcccaaaaccctaacctccgccttgtgcatgtcgatcgctacaaccggcccaacccctgcatcgtccacaccgatgttgcccactccgtgatacccatccctcctccacgatctccgcctcctctgacgtactatacgaggaacatgacgacctctatggtcgcctcaagctgctcgatgggctattggaactagtccaaatccaaaatgaggacgttaaagacaaacagaagaacctcaagcgggaactcttactggatgaggatgaggatatgatgaatccaagtatataacgatcgtattcggtcagtgtatggagatggtcgatggaaacgacgctatcgtgctctatactacggttatgaactactatgtgaggatcctcagcaccatcgaccgagagctgctcatacctgcatcatgtgtcacgttgcatcgccactccaacgctttaaacgatgtgctgccgaccgaagacgactccagcatctccttgctgtgatcgacgtagaatcccttagttagctacaacgatattggacgatgtcacatccaaaaaccagaaataccagatgcgtttgagatacccttgactcatcatgagatgtacaatcagattggtattgatcctcc

SEQ ID NO: 79944 - DNA, 162 bp, Zea mays
  unsure (1)..(162): unsure at all n locations
  Clone ID: MRT4577_172933C.1
aaaacccaaggtgnngngaagtagtcaacaacatgtgagaaaacatttgatagaatgcaataagtaccctcgtgcattcaattgaggaagaaaacgtccaacaaggggaaaaatgacagtgataaaaacaacggaccgaccaatccaaccccccaaaataga

SEQ ID NO: 79945 - DNA, 832 bp, Zea mays
  Clone ID: MRT4577_172934C.1
ccggccgatggtgttcctgtccggggtcccgggctcgttctacgggcggctgttccccaggacgagcgtgcacttcatctgctcctgctccagcctgcactggctctcccaggtccctccggggctcttcgacgagacggacaacaggccggtgaacaaggggaagatgtacatctcgagcaccagccccgcggccgtgccgctggcctacctgaggcagttccggagagacttcggcgtgttcctcaggtcgcgcgcggccgaggtcgtccccggcggccggatggtcctcgccatgcttggccggcagaccgaaggctacgtcgaccggcggacgaccttcctctgggagctcctctccgagtcgttcgcggcgcttgtgtcgcaggggctggtcgaacaggagaaggtggacgcgtacaacgtgccgttctacgcgccgtcggtacgtgaggtggaggaggaggtgcggcgggagggctcgttccggctggaccacgtgcagacgtacgagatcaacctgagtagcagcggcgacgccaaggaggacggccggacggtgtccatggccatcagggccatccaggaatccatgctcagccaccacttcggcaccgacatcgtggacgcgctgttccacaggtacacggagctggtcaccgagtccatggagcgagaggacgtcaagagcgtgcagatcggggtggttctcacaaggttgtgacttgtcacccaccacaggactttaacatgcttggcagcctactgctgcgttgcatttgcatgaccctgttcttaattccccgtgtgccgtgtgtttgttcatcactac

SEQ ID NO: 79946 - DNA, 819 bp, Zea mays
  unsure (1)..(819): unsure at all n locations
  Clone ID: MRT4577_172935C.1
ttaattcggcacgaggaggcggcgatcgtggatgggcagcggcggggtcgcggggcgtgggttgtaggagcggtggcggtggggaagccagagtcggagcgggtgcttgcgctggtctccgcgctggggaggaggggagggagcggcgggtagggatgaaattcgggaagggggcaaggaatgggttgctgccgagctcgctgcggatcatatcgtcctgcctcaagacggtgacctccaacgctggctccgtcgcgtctaccgtgcgctcggcgggcgcctccgtcgccgcctccatctcctccccttccgaggacgagaaggaccaggttttgtgggctggatttgataaactggagcttcaaccatcatcattcaagcatgtcctgcttgttggttattcaaatgggtttcaagtgctcgatgttgaggatgctgcaaatgtttgcgagttggtctcaaaacgtgatggcccagttacgtttttacaaatgcaacccactccagttagctctgaaggcattgaaggattcagagcatcccatcccatgcttctagttgttgctggtgatgagacaaatggcctgggtgcggttcaaggtggtcgcttaagtgctcttatcagagacacaaacagtgagcctcaagctggaagttgcatttctaccccaacggttgtccgtttctactctttgaagtctcacacctatgtacacgttcttcgattccggtctgctgtatatttagttcgctgcagtccaaggattgttgctgtagcacttgcagcacaaatctactgctttgatgctgntactcttg

SEQ ID NO: 79947 - DNA, 403 bp, Zea mays
  Clone ID: MRT4577_172936C.1
aatcggttttttttttttttttttttttttttttttttttttttttttttttttttttttttttttttttaaaaccaaatatacctgctttttttttttggcccctcaagggaataaaaatttttaggtcccttttaaatcttgcagcaaaacgtacaacactgaagggcacactagcttctggtcctacaacatacaatacacataaaccctgggacaacaacttttttttcctgaaacaacaaccctgacctcaatcgtaggtcaatcatggtttggcatttggtaccgccgggtaggggctttccggtttggggggcaactccggctcgggcaggggggggaacttatgctttggcaccaccggcacgtgctccggcacctttggcacgggggggtttgg

SEQ ID NO: 79948 - DNA, 821 bp, Zea mays
  Clone ID: MRT4577_172937C.1
tgggaccctcgaggccggccgggctgtagccgagccagttccgaatgggggtggcttggcttggctggctcaagtcactcaaattgaaataagactgaaacggacaaaggcggacacagcaagcaaagcaggaatcggaggtagacgacgaccaccacggggataacaaccaaacctcccaaataccatccacgaacgaaagggaagggaaggtcgtttaggcggcgcgccgaggccgtggctatggaccccaacggcggcggcgacaccatcctcggcgatcccctccttcccctctcgcagtccagcaagcagcagcaggatcctctcgccggcgtctccgactaccttgggcggtccgtgcaccgcggaagctccgggggatggagatccgcgctcttcgtcgtggtccaacgcctccgccgccgcctccgtcaacgcctggtccggcacggcctgcatcatgcccctgctcggcgccttcctcgccgacgcctacctgggccgctaccgatccgtcatcatcgcctgcaccctctacgtcctgggttatggtatgctgacgctgtcggcgacggtgccggcgctgcagccgtcgcacatgccctgcagggaggatggcgtctcgtcgtcgtcatgccaacccgggtggccgcaggtggccttcttctacgtgtccctgtacctgatcgccatcgcgcagggcgccgacaagccgtgcgggctggctttcgcggcggaccagttcgacgcggagcaccagggggagcgcgcctcccgcgggtcctattccaactggtggttcttctgcatggcatcgg

SEQ ID NO: 79949 - DNA, 278 bp, Zea mays
  Clone ID: MRT4577_172938C.1
ctcaattggagactgagcggcaagaaatcgacggactacgagatgaactccaaagcttgaaggctaagacacaggcatctgacgagaccattgctaagcaatctgacgacgttgcagatttgaagaagtccatagcagaaaacaatagcctccttcgccagattttaagcatcaatcgtagccaagtgtctccttaaatatgtctgccaacttgatggtgtcaagatacatcacataccagatggaggactaaagttatatgagcttaagttacatgt

SEQ ID NO: 79950 - DNA, 2095 bp, Zea mays
  Clone ID: MRT4577_172939C.1
aaaaaaaaaaaaaaaaaaaaaaaaaaaaaaagaaaaaaaaaaaaaaaaaaaaaaaaaaaaaaaaccggccgggctgtcagccgagccaagttccgaatgggggtggcttggcttggctggctacaagtcactcaaattgaaataagactgaaacggacaaaggcaaacacagcaagcaaagcaggaatcggaggtagacgacgaccaccacggggataacaaccaaacctcccaaataccatccacgaacgaaagggaaggtcgtttaggcggcgcgccgaggccgtggctatggaccccaacggcggcggcgacaccatcctcggcgatcccctccttcccctctcgcagtccagcaagcagcagcaggatcctctcgccggcgtctccgactaccttgggcggtccgtgcaccgcggaagctccgggggatggagatccgcgctcttcgtcgtgggcgtcgagatcgccggtagcttcgcctacttcggcatctctgccaacctaatcacgtacctgactggtccgctgggacagtccaacgcctccgctgccgcctccgtcaacgcctggtccggcacggcctgcatcatgcccctgctcggcgccttcctcgccgacgcctacctgggccgctaccgatccgtcatcatcgcctgcaccctctacgtcctggggtatggtatgctgacgctgtcggcgacggtgccggcgctgcagccgtcgcacatgccctgcagggaggatggcgtctcgtcgtcgtcatgccaacccgggtggccgcaggtggccttcttctacgtgcccctgtacctgatcgccatcgcgcagggcgccgacaagccgtgcgggctggcgttcgcggcggaccagttcgacgcggagcaccagggggagcgcgcctcccgcgggtccctattcaactggtggttcttctgcatggccatcggcatctccgtgtcagtctccgtggtgggctacatccaggagtacgtcgggtgggggctcggcttcggcgtcccctgcgccatcgtgctctgcgccttcctcgtcttcctgttgggcaccccgacgtaccgcctgtacgcacccacgccggaagccaagtccccgttccgccgcctggcacgcggcctggccgccaacgccaacaaaacaggaggcctctccgcctcgcattcggaggaggaggaagcggcagcagacgcgcggtgcgtgctgcgcctgctgcccatctgggcggcgagcctggcgtacggcgtggtgtacgcgcagattatgacgctgttcaacaagcaggggcgcaccctggaccgccacatcggggacggccttgagctgcctccggcggcgctgcagacgctgggccccgcgagcatcctgctgttcgtgcctgtttacgaccgcgcggtggtgccggcgctgcggtgggcgacgggcaacccgtcggggctgagcatgctgcagcgcgtgggcgcgggcatggcggtgtcgctggcgggcgtggcggtggccgcgctggtggaggcgcggcggctggcgatggcgcgggagcacgggttggtggacgacccgtcggcgacggtgcccatgagctgggcgtggatcgtgccgcagtacgccatgatgggggtggcggacgtgctggccgtggtgggcctgcaggagctcttctacgaccagatgcccgacgggctccgcagcctggggctggcgctctacctcagcgtcatgggcatcgggggattcatcagcagtctgctcatctccctcatcgacggcgtcaccggcagcggtggcggggacagctggttcgccgacaacctcaaccgcgcgcacgtcgactacttctactggctgctggcggggctcagcgccgtcgaactcgcgctcttcctctactttgcgcgctcctacgtctacaagcacaagcccaattaatcctgctagtgcagtctgtacagatgaatggaaagcagatgcaggcatgcagcccgtcgtcttcatgttttacttgtccttgtaaaacaaggcaaactcagctcaaagtcaaattcagattctagcccccaaaaaaaaaaaaaaaaaagcggcc

SEQ ID NO: 79951 - DNA, 186 bp, Zea mays
  Clone ID: MRT4577_17293C.1
ccatataatgtcacaggcaggtacgattaagggttctgttttaccacccaaggcacacagcagctaagtacccaaagtctctcacaggtaagtattgaagctcttggtaagtatgcacatccccaaggacctcactttggggccctgctctgaaagcccagacctcggggtactgacccttggagc

SEQ ID NO: 79952 - DNA, 534 bp, Zea mays
  Clone ID: MRT4577_172940C.1
ctggactcgaggccgtttttttttttttttgggggggggggggatgcctgaacatttatgacgggaacagggggcgtcgcagcatactcgctcgggttaaatatgactgagcctgtgcttgaggatacaccgatctatagccatacattaccgcccctgtgcagacctggggggggggcgttgacagcctggaggcatgaacagtgggctacagaggagcttctcgtattctggttcgtgtgactcggcttgcttatcctctggctctccgtgggggggccatgatgccagctactctctagcctatgggtcgttggcctcagcaccaggctgcgcattgaggattgatgacacgcccgttttcaagttaggcacctttctgctgtccctgtctctggacaggtttgcctgctggaccgaccttttgtgagccagggcttagtcggggtcatgtgggccacctcctggcgtagcgtagacggtcacggtttctgctcctgcagcaccgccgtgccttgacgttgtcagcgcctg

SEQ ID NO: 79953 - DNA, 111 bp, Zea mays
  Clone ID: MRT4577_172941C.1
tactgcgtttcttttgaaggtgctataaatccacagagatagcttcctcagtaacaaggggagacggccatacactgagaacataagactgccctaagttctcgcaggctc

SEQ ID NO: 79954 - DNA, 288 bp, Zea mays
  Clone ID: MRT4577_172942C.1
aaaccatgagcggggtttgtttaatttttacagtctacgagttctttttcaggcagatcactttggggttgggcctactgttgggcgctgccagcttgacctttttggtagctgcccctgcccgcaggggtaaacacagccagcttatgcttcctaccgtttttgagctttgaagcttcctccatggagatgggatacaagctggcgatgacgggggccggaaattctcttaagacggattttttcccggggacatgggttaccattgtgtcagggttcctctctaag

SEQ ID NO: 79955 - DNA, 1438 bp, Zea mays
  unsure (1)..(1438): unsure at all n locations
  Clone ID: MRT4577_172943C.1
gccgggctcgtctccgttgacattgacaagggggccaggtcgaggctttccgagctccgatccctctccaacgcctgagggatggccgtgccggcgcccgcgaaggcggcgcgcttgcttgcggcctccgcggcggtgctcgtgctgctgtggtgtgtccatttccgcggtgggctctccttcggctcccccaccaacaagggcctcatcttcaacgtgcatcctgtgcttatgctaataggattcatcatcctagggagcgaagccataatgagctacaaaatatggccatggagtcatgatacaaacaagatggttcacatgcttcttcatgctgttgcactcttcctgggttctgttgggatatatgctgccttcaagttccacaatgaaagtggaattgataatctgtacagcttgcattcgtgggttggacttggaactatctgcctgtacggtatacagtggctatttggcgttgctaccttcttcttccctggtgcttcgccaacagtccggcgcagaatgctcccatggcacactcgcgctggacttgttgtctacatactggcactgcttgcttcagagctggggttcctggagaagctcaccttccttcaggctgccggcctcggcaggtacagctcggaagctctgctggtgaacttcacagctcttgtgatcctactgcttggcgcttctgttgttctgtatgtcaccgctccaatgcacaatgagcacgcgcatgggtattcagcagtgcacaagccctgaaccacagatgcagcttcatcggttccagttggcgtatccttgtacgagtaggaatcaaatccaatcaaattttgtccgccggaattatgagactttagagtgtctccggcagtcagtgtaaaatagaggacacaaaactgtagatgacactttttgacactgtttgtagagtgtaattttaaataagggatgagatagaggatctattggagatagccttagggctagtttagaaaacccattttcccatttttctaagagatttttatttttaaagggaaattatttcattttatcttgagaaaataggaatctcttgggaaaaaaagagtcccaaactagcccttagagggtgtttgtttaaaattataatctgtcagattatatgatccagcaaattttgactcaaacacccccttaataaccagttcagttcagtggcgtgttgtgtgtaaatgtgtaatggtgctgcaaaatgcattttcctcttaacaatagcaggaattcaaagatctacgtgaaagagtatgaacatgcttcggtgtatttgattgataaggctgcgtttggtactttggtttttggtttcctcccgataaggctgtctccagcaacgtcctctatatctatcctctatnnnnnnnnnnnnnnnnnnnnnnnnngg

SEQ ID NO: 79956 - DNA, 486 bp, Zea mays
  unsure (1)..(486): unsure at all n locations
  Clone ID: MRT4577_172944C.1
cgagaacacagagagaggagtggaggtctagggcgccgccgacgtcgtctgcggtcgtcacctccgttcagtactcgcgtacaaattccggggaagcttcgtgtcgtgagggacctgggtagacctctcgcatgggaattggccggactcgcggggaatttctctctgtcgctcaaggtgcgccgccgaccgcatcacaacgtggctgggaacctccgcaccataaacaccgtagagaggttacgaggatctgaagaatcaccttggtaactggaatctcaagtgccaggagatgaacaggtggttcaagaggagccatacaacgaggagtttgattcaattctaggtggtgtctccgagtcgactttctagcgctaaggatggattttagatcatgttatatttatcttttattttgtaagacttccgctatgtaataagtactctgattatattgggatatttatctctatacactctggtntt

SEQ ID NO: 79957 - DNA, 440 bp, Zea mays
  Clone ID: MRT4577_172945C.1
gtttgggatttcattcgcaacaactgagcgcagggtaggaaggcacctccaaggaggaagaggggctcgcagacattgccatccaagctttctccacgacatcaactgacagcaccaacagagtggccagagcatgagcacgagcgcccccagctacactcccacagctgcagcccgtcgtcgcgtcgtcaccacgccacagcggacactgaccctgtcaccaaatgttggtgacatacacgagcgttactgctatctccaaaacgtcaagtagttagaatgtagattatccattcttaatatgatattctacaatctacatttctgtaaacaatgattattttaccttttcttgttgattgtgagcataactgtagagctcaaagagcttctctggatctgtcatgtgggttatggtttacatttgcacaccatgtggg

SEQ ID NO: 79958 - DNA, 174 bp, Zea mays
  Clone ID: MRT4577_172946C.1
gatgagtgcccgtggtctcgaccttcttataaatctaagtaacccttctatacttcataatgaagatggtcactaaagctagcatatattccatacttatgctttttctaatcataccgataaaataatgtacacttctagtaacttgttaaatttgcgtaataagatttccgc

SEQ ID NO: 79959 - DNA, 272 bp, Zea mays
  Clone ID: MRT4577_172947C.1
gctctagatcgccagcggccgccctttttttttgtttttttttttcttcttttttttttggttttttttttttttgtttttcttcctttttttttttttgttttttttgtttttaagaaatttcccgggggattccctcccttccttggggcttactgccccccaatcaatccccctccaaagttatagggggcgggagccaccttattacatcccgccctgggctgtggggaattatgggaaaactgcaaaggaaacagccacccccccga

SEQ ID NO: 79960 - DNA, 592 bp, Zea mays
  Clone ID: MRT4577_172948C.1
tcgagccggccgggacatctcacttcctcgtctcttctacatgtcctctgccgtctcctacagaccggctctgcgcctgtctctatcctgcagctaggcagatagacgttcagactgtgaaatgcttgcatggacataagccccacctctgaggatgactgttacgtctcgacgcgtcacctgggcctcacgatttcctcaacctgatatcgccgccgactatgtccacgtcgtttcacatgataagaacgatgtaggacgacgacgtacccgacgctccagctaacagagggccgtagggccatcgaggtggacttcttctgcgacgacagtgacaagaacagcgctgccgttgtggttaaggacaagaaggaagacctgactaccattaaccttcttcgcggcagcaacgccaacgacgacgacgacaaggtggtgaccctgctccggatgccgaacgaccaagacaggcagaacaggaacaccaactagctttcggccatgcattcaaagcttgcgcggatgaacgacaagaatcagcgcctgcgagtgatgctcacccatctcaccaccagctaccaggtgctccaga

SEQ ID NO: 79961 - DNA, 109 bp, Zea mays
  Clone ID: MRT4577_172949C.1
gccgctgcttctcgtcgcgaaggaggcgcgtgctcccggagagcggccgagcctcaaggaggagcacacgatcgcgcaaactctcacatcgctagacttatggctgatg

SEQ ID NO: 79962 - DNA, 735 bp, Zea mays
  Clone ID: MRT4577_17294C.1
ttttttttttttttttttttttatatcaagatcgataaaatcatattatacaacgaacatgtcaaactctctaatacaacgaatatgtcaaatactctacatgtcagatgagaggggagtaattacaaataggtaaatagagcattctgaagaaaaggcaatgaccattatttggatgaagtgactttcccctattgcttgcaatctatgaatgacgatcagctgtcgccttcagtgaatacccctaaagaaaccacgtggcagttggtctcaaacttgtcgaggagatctgacgcctgcgcgggagagacaacacaaggccagtcccgtccgcgagcaggaaggcagatcgagatcaaaagggaggcgaagaggggaggattgggggaactgatttcctggtagaagaggtggcggtggaagttgagcgccgtgtggtaaagcaggtgcacccacttcttctgcgccgcccgccgagccaggccaggtacgctgccatcgatgccatagacctcgtcgccactgctcctttctctctctcctctcgctacagcggtcgagctggagaataggaatcagattcggacgggatccctccaccaagttggtctacgcggcggtggcgtggcagatctgctccaagccgtgaaaaccggcggagctgcgtgctgcggcgacgggaggagggagggggaggcagagggagctggcgaggtcccggcaagcccgagggtc

SEQ ID NO: 79963 - DNA, 445 bp, Zea mays
  Clone ID: MRT4577_172950C.1
ccggccgggatggatccatcccagccagcactataaagccttgcattgccctgcctgggtgatccgagagaaagcaagcaaccgtgtgccttttggagacgcgatgtcgtccggcaacaagatcagcgtggccttgctgagcgtggccctagtgggcctgctcctctgccacctcgccaccaccgcctccgcccaccagaaagacatccacgtccccgtcgtccggttgaactgagaagcgtgcgtccagccaagcaaggtggtcaaaaccgagaactaattaagggctcgattgtgtgtccggctactactgttcttgccataattatatatagatacgcaaagtgtggccaagcctacccacatgcatgctattgcatgcctccgaatatatatatattatccgactcgatcctacaaaaaaaaaaaaaaaaaatgggcggcc

SEQ ID NO: 79964 - DNA, 413 bp, Zea mays
  Clone ID: MRT4577_172951C.1
cttatccatgggatatatgaaacaatattgtgttttttggaaacattagaacattggggggccacaggcttgattggctttaaactatcacattaacataacagttaaggggttgctaaaaatatcatggcttggaagggttttttgggggaacgtcgacagaacacttttccacaggagatgatgggtggctaaaagtattattggcataaaacagtttttgggggggttgccgccggtttaaaatacatccccaaaacaaaaacgcgggaaggcgcttggggggttcattttgactaccaaaattttggggggaaaaaaaaacctccttggaaaagcacataagtttttcccccaaaaaaagcaggtggaaatcagtttgtataaaaaagttcatccaaccgctggggggg

SEQ ID NO: 79965 - DNA, 611 bp, Zea mays
  Clone ID: MRT4577_172952C.1
tggagaaaaaaaaaaaaaaaaaaaaaaacgagaaaaaaaaagaggccggccgggagaacatcatccgagagaaagcaagcaaccgtgtgccttttggagacgcgatgtcgtccggcaacaagatcagcgtggccttgctgagcgtggccctagtgggcctgctcctctgccacctcgccaccaccgcctccgcccaccagaaagacatccacgtcctcggcagcgtcgacggctccagcgacggcagcagccccgagtccgaaggccgcgtcgtctacgcggacatgaagctggctgatacggaatccgatgcgccggcgccggcgccggggccgtcgtccggttgaactgagaagcgtgcgtccagccaagcaaggtggtcaaaaccgagaactaattaagggctcgattgtgtgtccggctactactgttcttgccataattatatatagatacgcaaagtgtggccaagcctacccacatgcatgctattgcatgcctccgaatatatatatattatccgactcgatcctgccaaaaaaaaaaaaaaaaaagtggcggccaaagcggccagggaaaaaaaaaagcggccaaaaaaaaaatttgcggcc

SEQ ID NO: 79966 - DNA, 454 bp, Zea mays
  unsure (1)..(454): unsure at all n locations
  Clone ID: MRT4577_172953C.1
aacacaaatatttctatctagaatgcagcaccacagccatggcgatctcacccatgtttttacagcagccctttgttggtgctgcattctagatataagcatttgtgttgtacccaataatgaagtcggcatgccatcgcatgcgactcattgtttaggaataaaacaagctaataatgacttttctctcaaaacaaaaaggcaagcaccaggcctcgatgagtaggagggcgcagtggncgctgcaaagcataaggcgtgagcccgtgcggagcggccattggtgcagatcttggaggnaagtgcatatattcccatgacaactttgagggccgaagcggggaaaggttccatgtgaacggcncttgcacatgggttagnggatcctaagagaccggggaagcccgtctgatagcagccgagtgcgccgtcttcnaaagggaatcgggtgaaa

SEQ ID NO: 79967 - DNA, 1080 bp, Zea mays
  Clone ID: MRT4577_172954C.1
aagcaaaaaatatggtatattagatatacatttgatgcaaaaaaatcagatcagcaatacatcatactgtttggtgcaaagatttggcatctcatgtcggttcattttaacagttccacaatgcaaaatccatcacatgtacatctacataataagtgatacgaaatatacaggggcatcagtgaaaatcaatgctcgtatgggtgactgacaagaggtctcctctactatgtatttcatcatggcattgtttgttgtcccatgcaactatcaaccatcataatcataatttgtctcgatgcttgctttaggagttagcactaacccagctgaaaggtcttcggatagctcgttggttcaatgtgaagcttaacccaaacatttccttgatggcttgccccttctccagatgttctaccaattttatgacaagagcggcactttccctcacatgttccatgtcagtctgtgtccagatgcggcgagatagttgcagccttcgttgtttagaattcagatcaattccccatttgctataaaggctctctctttctagaagatggagtctcctcagcatttgcttgtagagcatgtctctttcatgccgaagatttctcaagcttgatgtaacagtaacattaggctcacatccggcaatgaaagaactgtgaatgaaggacaatcttctgtgctccacttccaaataaatattgtctgctttgactcctttgaagaggaggaagaaatatgttctgtgtactatagagacattgcattcatgccataactcaatgatttctttctgttttttctcaaaattaataggccaccgtgaaggggagtcaatattggccacaaatatatctttgtcaatattttttgcatgtttcatgtccaagatttctgcagtaacgttgtcctgattgccctctagttgggatgtacaatagtcttcttgcttctctttaacctttgtgatgcagctgaatttattgttggcatatccatcttcttcattgcaagtgtttttgtctataaccatgtcagatgccggacgcgtgggtcgagccgggaattccg

SEQ ID NO: 79968 - DNA, 381 bp, Zea mays
  Clone ID: MRT4577_172955C.1
ccgatgataccaactatcacatacatagttatttacagtagcaacatctcatcaccaatggcggcctatatatttgcgctgcttgccctccttgatttttcatcaagttttgcttccctgactattattccacaatgctcacaacattacctctctccagtgacagtcgctatatttgaatacccaactatacaatcctacaagctacaatataccatcacaacaatcattttacggtcttcatcattgactgtacaacaaccatatgccctatcgcaacaaccatccttagttaatttatatcttcaaagaatcactacacatcaacttacacatctttagctttcaacaatcaattttgtattttcatctaaccttttc

SEQ ID NO: 79969 - DNA, 192 bp, Zea mays
  unsure (1)..(192): unsure at all n locations
  Clone ID: MRT4577_172956C.1
ctcctgccagttcatnggcanagcagacngagngcgccnngagcttangaacatggagaaccngggggcntgaatactggntactgttacctacgtcnttntacggganntcgttccantttggangancgggacgatgcngttcccgggncttccaantggngcaangtggaagacgaacgggggntggta

SEQ ID NO: 79970 - DNA, 289 bp, Zea mays
  Clone ID: MRT4577_172957C.1
cccccgcggggggcgggcgctctagaatagggtgaccccccggccctgcaggaagttcggcacgaggcgtcttctgctccgaccaacgaggtcccgattcagagccagccatacaggccagccttccggcggcggggagagcgatcaatcttccttcggcagcaggggggcggccccgtcgtgctccatcctcaccagagacaggagcgcagcaggagagccagccagacctgcgggggcacctgacttgtggcgagaggataatgagctcttcagggtagaggagagc

SEQ ID NO: 79971 - DNA, 428 bp, Zea mays
  Clone ID: MRT4577_172958C.1
ctcaggatcagcttctacagtgccagctccttcttgtctgtgcggtagagcatctacttcttattcctacagaggtggacgcagtggaggcttacttccttgacgacgtcgccaggtgctcctccttggcgacggcgtcgaggttcttcttgaagcccgttctcttcatgtgaagcttcacggactcatgtagcggggccagcacaattatgtcgccctccgacgagcgggccgacttcttgttcaccatccacttgtacgcgcttcccatgtggaacagcacggagatcatcgtgttgaacttggtcacggacattgcgttctccaagagtaggctcagtatgatcaagggaaactacttgggggactgtaggatgttcaactcggacatcacggccgggacgaagaacaacaaccagtcggggagc

SEQ ID NO: 79972 - DNA, 107 bp, Zea mays
  Clone ID: MRT4577_172959C.1
cccacgcgtccgatgagatgttaatgcctttttaatggagtacgtgcacttggattcgtatgtgcgagatgcaaagctcccggttactgctctgccatgccatcttg

SEQ ID NO: 79973 - DNA, 540 bp, Zea mays
  Clone ID: MRT4577_17295C.1
ggtacacgggcccctcctctcgagttttttttttttttttttttttttttttttttttttttttttttttttttttttttttttttttttttggaaaaaaaaaaatacccagatttttacggttaaactttaaaaggagaaaaactgggggtatcacagaaggcccaaaaaaccccaacccagcacaaactttaaccagttaataggaggggatcccaaatcaacatcgaccctagaaaaggggcaaccttttccataggcaaattcaggggctaaacagttttgtccccaggcaagccccctcacttgaagcatttgggggaaagcaaggcccccccctaaaagggctccgggccccaaataatggaatggaccccctcctttggggcctaatcaaagagggccccctgggcccacccgaagagccccatggaaaaaacctcgcccaatacaaactggggaacatccgtgccagggaaaaaccaaaggcccttcagctggagggggggctaaaagcctatcacgagctttttcccaaag

SEQ ID NO: 79974 - DNA, 361 bp, Zea mays
  Clone ID: MRT4577_172960C.1
aagctcgaattcggctcgagtggtactgccctgaccccccttttttttttgtcccgatctgcaagcagaccccggcgtgcctgaccagatacatccccgacgactctgaatgatacaccagagtcctatgatgctaccctgagaccttcatgcccaacctggagctagaggagatccactcccgatggactatgctggaggcgctgggctgtccgacaccagacatcctgactaataacggcaaccatttcggccaggcggcgtacctaaggacggtgcgcacaacttatcggaaggcaacctggactacctagagaaccccaacctgacgcactcacagagcatactggccatctgggcg

SEQ ID NO: 79975 - DNA, 585 bp, Zea mays
  Clone ID: MRT4577_172961C.1
ctcctcccttcgctctcctcgctcctctctgactcgaccgagcagcagtactcgaccgcgcctgcaacgaccgcgactcagatcggcgcccaggaggaccgacgccggcgcacccggacagggctgcgtagccgcatccacgcgagcccagaaaggcgagtttatctgaatttgatgatcttgcgggccaccctgatctccacaatcatggaacacgattccagcggctcattcaagaccataataatcataaggacctccaggagcgaattatacgcctagttctttcgctctggaaaggggactaccaagtggatgaacaaagaacgaagacggagggcactgatgctgttatatgtagaggtgaacagctctgctcattcgcctatgacctcatccagcggacactgaaagcgggacgtgcgcattggcttatagagaagatgtattgaacttcggagcttgctagtgtgacccctgtcctgatagaacaacgacactctataccgtgagatcgagtgtaccggttgcgacgccttgtgctggacgcagttaaaccactgtatggagtttgggtatcacctc

SEQ ID NO: 79976 - DNA, 334 bp, Zea mays
  unsure (1)..(334): unsure at all n locations
  Clone ID: MRT4577_172962C.1
tgttttcaacacagcacaggcagattnagagagctgttagtatatagagagagataggacgatgtcatggttccgggcacccaccacacacaacttcagccggcttcccacacggcgtctgggcccccaaaccaggttgttcaaagatcttcgtgccgcgccaacccgagaactactgcctggccgtccgcgacgggcgccgtcgtgctggccccggtcaaccccaaggacgaccaccagcactggtacaaggacatgcgcttcagcacccgggtcaaggacgaggaangcatgcctgcgttcgcgctcgtcaacaaggccacggagctcgcca

SEQ ID NO: 79977 - DNA, 142 bp, Zea mays
  Clone ID: MRT4577_172963C.1
acccacgcgttcggcttaatggaagttctagttatcgacccaaataagcagccagctgttacctactgccagggttttttttattaatccaaccaccattcatataactcttctgcctatgaacattatacaacaactaact

SEQ ID NO: 79978 - DNA, 224 bp, Zea mays
  Clone ID: MRT4577_172964C.1
tgctttctcgttctgggccgtctccatcgtcctaagccacctgctcaggctgtgggcgctctattccacgacgaccagcacccagcaaacctcaagaaattggtaatggtaaggtcatacatccccttggctgccacaatggctccccaatggccaaggctgcttctgttggcaaagaaccaccaacgaacgttgctcttatccttggtagggcggtctcgcca

SEQ ID NO: 79979 - DNA, 211 bp, Zea mays
  Clone ID: MRT4577_172965C.1
gtggattgttcttttttacattatttggtagaatcttcgcataaattttagagcgaacacagatcgccaaaacccacaggggcggggtgagagctcctcaaccgaaggctccggcccaagcgtgggggcggaggaaaacccggcacgtagaaacgtacatgtgcgagacctgcatgggaaaaaaaaaaaaacctgcctgggccggaacttt

SEQ ID NO: 79980 - DNA, 236 bp, Zea mays
  Clone ID: MRT4577_172966C.1
acaggggggataataaagacctccggcgacaagtagtgggaggggtccccgtgtacatactcagagctgaaccccaagatttttcccgagcagatcaagaagcatccagacccgattagggcgacggcaagttctgccggcaaccgtccgactacttaagtacaccgaggcgggtgccgaatgctgaacgttcgccaaggagaagcttgtgacggcggtccacgagaacaaggtgg

SEQ ID NO: 79981 - DNA, 344 bp, Zea mays
  Clone ID: MRT4577_172967C.1
ggaggcggcaacaatggcgaacagcggattcgtgttatatatccgagagcacgactagcatggagggggcgtcaggcgtacgacgacttcgacgggacacgccagatctcgtggttgtcgagttcgtttgactccaaccgtggccatgcgtcgggacactggctacgcgggtcccacgtaggctgcccattttgggacccttgtcttcagacacgtgcatttttacagtatctcgttttagaactgaattctacattaactatcacagtgcaagtgtatatcaccctctgggtcctaaactatatttagatcgttttggaatactccctagtggtaatagactc

SEQ ID NO: 79982 - DNA, 494 bp, Zea mays
  Clone ID: MRT4577_172968C.1
ccctcgagtttttttttttccttttttttttttttttttttttttttttttttttttttacacccccgatttaaaatcaaaaatttttaaaacctaccaggttatccttggtgtggggctggaacgggccctttaaggcccccggggcttttttaaaccaaaacccaaaaaacagggcggggggtttccaactctccggcttggacctaaaaacctttatgttttaagaaccaggcgtttggtggcatggaaatggatttttttcggaacccttctaaaaaattcaggattatgacccaggggcaccaaaccaaaccccccggaaaaaactatcttttgggcataataaaaattttttaaagtttaaacccgcccttgctttgggcccgtttaaagcgggaataacgacccttggggttcaatattcctttaaccgaactttttctttccttggagcaattcaaccactaacaatttttcggttccctatactt

SEQ ID NO: 79983 - DNA, 303 bp, Zea mays
  Clone ID: MRT4577_172969C.1
tgcgaggtcgcgtccctgttttttgtgctcctccgagctcgctgttcgtccgggttttttacgttttaatttccaggacttgaactgccatgtcctctgaagaaggaaagcttgtcgtgggagggcttgactttaacaccgacgagcaggcactggaagaccacttcagcagtttcggacctatctctgaggtggtcgttgtcaaggaccgggagactcagcggtccaggggttttggtttcatcaccttcaccaacccagagcatgcttcagttgccatgagagccatgaacggagagtctc

SEQ ID NO: 79984 - DNA, 358 bp, Zea mays
  Clone ID: MRT4577_17296C.1
ttgtttcgaggggtgactgaagaacgggggtggctctaaactatttgttggatccaaacataactgcatttgtctggtcaagaaataaaacttatcatgtaattcgatcgatcctcttaggacaatctttctgactctattatccctctttcgctacaagcattacacgtacatacgaactttctacagccgatattttttcaagctctacgcacccggtgataatttgttagtgtccttatccaaattgtacactaagcattacatgaacatatgtcgaacgcgacaaagatgctgtccacaaattcctttattgaaatgtatacgctccaaataatctgcgctttatatatataca

SEQ ID NO: 79985 - DNA, 420 bp, Zea mays
  unsure (1)..(420): unsure at all n locations
  Clone ID: MRT4577_172970C.1
tggtggaatgtgtgagcccaaacggcaaagctcaccagagcatcaaaacttacctacaatgtactctatccgaatgaaactcctacaacagtggtatggtggttgtggtgggccccctgccactcacctggtagtagtagtggttgttgtagttgtcnttgccntagtcanggtggtagtgatatttgttgtagtcgtagttgtagtcggcgtctttgtcgtagttttctgtgtagtagacttagtcctcctagtagtcgtcctcttcttatttggttccagtgggtgcccgtggttgtagtggttgtattaggggttgtaccaatattgtgggctggtggccgtgtaggctttgggcccggcttagagtttgttttggtgcccatcggtgtggtatttgttgttttaacgtattagttg

SEQ ID NO: 79986 - DNA, 413 bp, Zea mays
  Clone ID: MRT4577_172971C.1
aacacgcgtccggtctctgccctcacagcgcccttctccccctccaacttctcccctgcgcgtgggctggaagccagccgagcttccccattcggtcgccgtttctcccagcaagctctctgcacctcccatggccgctgagctcccaaccagggtgtcccaagcccctgtgctcggcgtccttcttccacctccggctgacctccctgtgcatagtgcccccttcaccttcggccgcgccccctgcacagcgacctgctcgccctttcctcctcttccctagtgcggcagcaaggagcccctgctcggactgcagccacggcgtccaagtctctgtgcagcgatgccggtccaaaaactgcagccccggcacatcgcccggcttcctcgctgctaccgctgcgcgcatgcca

SEQ ID NO: 79987 - DNA, 2131 bp, Zea mays
  Clone ID: MRT4577_172972C.1
agacaatccgtaaaagtactaccattcataaatatattacaccgttatttttttataaaaaaactttaccactcgtcttatttaaaaaaataataagttattatttattttttttaatttggttggtagtttgtgtttgatttaaaatttaacatttttgaaaaaaaaattaaataagacgagtggtcaaatttttgaaaaaagtcaacggtgtcatatttgtgagtggtacaaccaaaggaacatagcaatattacgggcaagtccatatttcacaagccccctatttcccacacaaagcctgaggcaacgagctgcctacttgcgtgctgccagaacaggcatccgagtccttgagctcgtggaactggcgctctgccacgaggacggcttcaccctgcctgccatcagtgctgtagcggctccagcttttatgttccgcctcttcagcacgaggtcgggtttaccatgtgatgctgagcttgatgactcctaaaagatggaccattcataaatatattacaccgtattttttttaaaaaaatcaaatcctcgatgcaaacttaaactgaagcataagcgattatttattttttgatttgtttggtagtttgtgtttgatttaaaatttattatttttgaaaaaatactttaaataagacgagtggtcaaatttttgaaaaaagtcaacggcgtcatatttgtgagtatagtacaaccaaagaaacatagcaatattacgggcaagtccatatttcacaagccccctatttcccacacaaagcctgaggcaacgagctgcctacttgcgtgctgccagaacaggcatccgagtccttgagctcgtggaactggcgctctgccacgaggacggcttcaccctgcctgccatcagtgctgtagcggctccagcttttatgttccgcctcttcagcacgaggtcgggtttaccatgtgatgctgagcttgatgactccggaaagatggaggcagctttgattgcggccctcttatcccttctgcttttctcaaatttcgatgcaaacttcactgaagccgctgcggtggcatcttctgcggagggaggcaagagccgcacaccaaggcctatctttctcgcggacttcttctcttcagcaactctctttttttggctcctaagacgatcgcggagtgctctgttcagggcataatcatcagagtgccggctgtccgagagtcgctgaaggcgaactaaaactggctcagcttcttttttcttccgaagatcctcttcctggtgttcaagccggtacataggatccgcaagcttgtctcgatcttcatctgctggcagcagcaatgtctctgcatcctcaacatcaaaatcttctgtcttcttgtgggccccactgattatgacatattcagtattttttgggtctgtctgtatgacaatttcatgcttgcaacagggcgatttcatggtgaagctccatatcttggtagagtaataatttccaacttgtttcttctcagcattaaatcttactcccttcgctatcatggaattgcatccaccacaccaaatgttaaaaggcatctcaaaccttataatcaggatgccctggtcgagcttcctcgctcgcttcgtgagcgcatgctggccatggaacttgttcagcccacccttcttggggctccattccggcggatagtagaagttatctgctctcgcagcggcgagcgacgacatgttgcctcctgggtggaagaaggggagaaagaggtcgacaacgatgccaactttccggcggcggcggcagtgatgtcgaccgtggcgagcacggtgtcgaaccgctctggaagatcggctgccgaggacagtgaaggcgtgcggcgtcgggaagaggggcgtcgagccggcgattgttcgactctctaccgtctgtctggtgacggaagaaggatgattcgcgttggggacacgaggcgacaccgtccttgcggcggtcaatggcagagagccaaaagaatcaatccgtcaaacaatcgagctaccggcgaataacaaagcatcatggccccgacggatatggttttgcaccagatttagggcaggtgtggataaatatgccaagagaggcccccg

SEQ ID NO: 79988 - DNA, 196 bp, Zea mays
  unsure (1)..(196): unsure at all n locations
  Clone ID: MRT4577_172973C.1
cggacgattcaggaggggatagcatcgtcatcgcaaaatgcaggctctcctgttccccgcgcggaccgcntctngaacgnccggccatngcttgcngcagagtgcggtttctgacctccgagtgtgntacgcaggttnancagcccccaattccggtgccggcnaattncatgtaccngtnggntntacggaaagg

SEQ ID NO: 79989 - DNA, 391 bp, Zea mays
  Clone ID: MRT4577_172974C.1
cacacttctgcttcgaagtagatgccccgtgcgtggacgccgccgccgcagcgaggcgcagctgcgctcccaggccttccggttccggaccacggaacacgcggcggcgtgcagcctgtcgacgccctccgccactgaaacgcccgtgcaccttgttggcggcgaagaaacaggggggggtgtcgcagccgctggagtccaggaccaggacgtcgaaggagcagccgctgccgctgccgccgccgccgccgcgcgtgaagaccacgaggtcgtcctcctgtagctcgtgcgctctggcgaagtcgccccatcctgacccgaggagcagctcgtcggcgtcggcgtttcttgcgacgtcgacgagccacgtagtgcccgtcggcgaattcag

SEQ ID NO: 79990 - DNA, 761 bp, Zea mays
  Clone ID: MRT4577_172975C.1
gtcaacgaagggcaccccgacaagctttgcgaccaggtctcagatgccattcttgacgcttgcctagaacaagatccagagagcaaggttgcatgtgaaacctgcacaaagacaaacatggttatggtctttggagagatcacaaccaaggccactgttgactatgagaagatagtgcgtgacacatgcagaggcattgggttcacctcagcagatgttggccttgacgctgacaactgcaaggttcttgtcaacatcgagcagcagagccctgacattgcccaaggtgttcacggtcatcttaccaagaaaccagaagagattggagctggtgaccaaggtcacatgtttggctatgccactgatgaaaccccagagctcatgccccttacccatgttttggccactaagcttggtgccaagcttaccgaagtgaggaagaacaagacttgcccatggctcagaccagatggcaagacccaagttactgttgagtacaagaacgacaatggtgccatggtcccaattagagttcacactgttctcatctcaactcaacatgacgaaactgtcacaaacgaccagattgcccaggacttgaaagagcatgtgatcaaacctgtgatcccatctcagtaccttgatgagaataccatcttccacctcaacccatcaggtcgcttcgtcatcggtggaccacacggagatgctggacttaccggcaggaaaaatatcattgatacttacggcgggtggggaat

SEQ ID NO: 79991 - DNA, 308 bp, Zea mays
  Clone ID: MRT4577_172976C.1
gggcccaccacaaaataatggggcgtacaagaaaaaggcaaattgcccaaaataataggcaggggtttttttaaaaaacccccttgaaaaaagaaaatttttggggggggggggccaaccataaaacccccgggttttggggctttggggccaaaagggttgggaaaaaatttggggcccttttaaaaaaaggccaaaatttaacccaggggtgaattgcctgaaaaactaaaaccccacagggaagttgcccctaaaccccgggataaccagttttggttgaaaaaccggttttttaaaaaggggaa

SEQ ID NO: 79992 - DNA, 411 bp, Zea mays
  Clone ID: MRT4577_172977C.1
tcgctttagggttctgttggggcaagtgcatagttcggagcgcgggggctaccgtgcgggaggcgctagccgcgtgcatgagctcttgcggcctctgctgtgaggcatgcaactgcgtgccgcgcgacatccatgactgcccctgctaccgcaacatgctcaccggcggccccaagaagaggcccaagtgcccctgagactcgagactgctaggctgactcacatggtggcattaatgggactgcgactggtgcctgcaactgcgattcaattcatgctgagcctgacaacctggtatgttatggatccagatatctatatggttggtagatttttttttggtattttgatgttagattattggttttctttgtgcgggtggggataatgagaatgcgggttctactattc

SEQ ID NO: 79993 - DNA, 538 bp, Zea mays
  unsure (1)..(538): unsure at all n locations
  Clone ID: MRT4577_172978C.1
taatgccgagatgcgtcttccagcccgacgcctactgcgccaccatgaaggagggccgcgccgaggcctccgccgccatgttcgccgcgctcgacgagctcttcgacaagtgccgcgtccgccccaaggacgtcggcgtcctcgtcgtcaactgcagcctcttcaaccccaccccgtccctctccgccatgatcgtcaaccactacaagatgcgcggcaacatcctcagctacaacctggggggcatgggctgcagcgccggggtcatctccatcgacctcgcccgcgacatgctccaggccagcggcgccgggctcgccgttgtggtgagcaccgaggcggtgtcgttcacctggtacgccgggaagcgccgctccatgctcatccccaacgcctttcttccgcgcgggcgcggncgncgtgntgctgnccaaccgccgcagggacttccgccgcgccaagnaccacgctggagcacgaggtgcgcacccacaagggcgccgacgaccgcgccttccgctccgtgtaccagtaggag

SEQ ID NO: 79994 - DNA, 763 bp, Zea mays
  Clone ID: MRT4577_172979C.1
gccggccggggccagggatcaatgctatgtctcggatgagccgcatccgcaacctgcctctctcgtcccctggaggcgtcctcggcaggatgacggaatctactgcgaggacgtcgaatgatgacaacccgtacgagttccgcgaggactactccgtccacctcaagttgctccgttaagatggagctccctgagaggattgacattgagaagactgcgacgatacaggagcttcctccttatagatcctagactgacactacatcacgtctgcatacattgcaaggaagatctacctaagggaagggtctgggtgagggaatttccaaagatctacgggggccggctgaggaatggctcccgcccaccacacttctgcacagagcagtgatggtggtgcacgcatcatcctgcaacaactgcagattatggcgcatcatcaatgtctatcccaagggatggacgcctcctcaccaaccaggtaatgcgcgagctggaccaagcgcatggaacgatccctgctagaacgcgagcagtgtcatctttgatgtcaatggtgacatgattgatggttgagaagactgcgctctattcgctcatctgcagtatgagtttccagtacagaggactataaggttgattgcatctagctatggcgccactctatgctccgcgagtacctaatgcgatatcaagactccattctcgaatctacgatatatgtttgcgtaaaaactgaaaaagaaggacgctagggccctct

SEQ ID NO: 79995 - DNA, 625 bp, Zea mays
  Clone ID: MRT4577_17297C.1
cattgggaccctcgaggccggccggggccgtgtcctccctcactctcgtttcatttccccatctcccagatccaattcttcgagttctccctcctctgccgtcatggtgctctctgtggataagacctcgtctggacgggagtacaacgtctaggatctctcagcaggcggacttcggccgcctcgagattgatgtgatcgagagagaaatgcccggcctcatgacagtgccgcgtctagttcggcccgtagaatcccttcgctgatgctaggatctcggagtctctccatatgaccatacagatcgtcgtactcttcgagaccctcaccgagctcggcgacgatggccgctggtgctcatggatcatcttctcctggcaggaacacgtgcgtcgacgacatagtgcgcgattcgcacggcgagtgtccactgtaacggctatgacctcgaggagtagtggtgatgcaccctacgctgttatctgactggtgaagattggccaggccccgagctcatctacgattatcacgaggatgcctctgtagtcatccacgaagaagcgctcggcaatgatgctgacccaaagaccgttgagaccccgtaatacttgctcctctctaagct

SEQ ID NO: 79996 - DNA, 224 bp, Zea mays
  Clone ID: MRT4577_172980C.1
cggcgggactaatcccacttatagcgtgctgaccgttgccaaagactgctgtggtaatgcggactcacatgtgttaatggaacatgtgaagcaagccttgaatatgctcatggattgatgatctgatggtgatgcaaggaagacgaaagctaatgaactgtaggccaaatcaaatactgctctggagcattgatgatcgtcatatattaacctgtataagctga

SEQ ID NO: 79997 - DNA, 358 bp, Zea mays
  unsure (1)..(358): unsure at all n locations
  Clone ID: MRT4577_172981C.1
aaaaataataaaaaaataaannnnaacagcggaatattctaaacaacctaaaaaacaagggagggtataaagaatagcggnanaaaataaaaataaaataataacaggggcgtccccttaaaagatccccctctaccaacccccctcatccaacattatacattttctattggaccccctaaaaatatttcccggccccatgtataacaaccgtagtacctggaaaacccccggcttaccccaactaaatccctttggaccactatcccctttttcccacttgcgcataaaacaaaaaggccccccccgatcccctttcccacacattgccccccctaaaagtgaaaaggcacccccc

SEQ ID NO: 79998 - DNA, 253 bp, Zea mays
  unsure (1)..(253): unsure at all n locations
  Clone ID: MRT4577_172982C.1
cagaggtgttttttctagagggtcccgccgtgtcgttccagaactatgtgggaggccgagggcctgtcgggaaacacggaggaccgaagaacatatggtagacacgatgcaccgggctacagatgcgtgcgagaacttcatcttcttgacatcacatatgcaggcataatggacgtctgcgtgcattgcgtgggacgagtgcctaaccncgcaagagtcttcatgagatacataagagaaagagacatagaag

SEQ ID NO: 79999 - DNA, 629 bp, Zea mays
  Clone ID: MRT4577_172983C.1
gagctcctcagagatctgggggggggggggggggggggggggtgggggggccacccacccctaccctaccctaccctacttaccggactcgtcgtcgttactcacccgacgtacgacctcttgacaaaacaaacggcggaggaaagtatcgttacttcgtaaccccccctctccccaggtaacctcccggactgcactcagtcagtcagtcagtcggtcggaagcctcgcgtacactactactacgtacgtacgtaacgcgaaccaatagaggctggactaaggaacgggaggtttggccgaggtccaaaaataactgggactactttagatagactgacacctcaaaactatccccgagtctttacggcacgctactactactactacgtactcgacgaccccatacaacaacaaacgttgacactgcacacaagtccaagcgaaactactaggaccaatcctatactacaacgacaatacagagtacctaatttcaccacttatgtacaggttttggttttcgttaaagtcctgttcatcatagtggtaattgactaagtattattaagagtactgacttccttaattcttcatatgatagtaataataataaagtagtaccattat

SEQ ID NO: 80000 - DNA, 622 bp, Zea mays
  unsure (1)..(622): unsure at all n locations
  Clone ID: MRT4577_172984C.1
ggttgataaggaaaccaagcgagttgccgatccagacatccatgatgagttacctcatgttaatagcactcagtttgctttagagcttcacgtgaatgctgcttctatggtgcctcttgaaaatgagatggtagagaacaaagatgcgcagaaatttcgtgagacaatgcctttcgataacatcgtatgggatgaggaactagcatcagatggcaacacacatgatggcttattgcagcagctagctgaggtggaggaccagacccagtacaagaaagtctgcacagtgttgtctgagagcgaggcacangtgtatgatgaaatacttggcaaggttgtatgggacgaggaaatgtcatccgagcttgacatggacaatgacttattgggacagctggtttctggcggggagtacccagttgatgagcaggttgtggatgactcctcggatttcaaagagtttggattggtcgatgcagaccatgtttttgtggaagggctcgatgaagatagcaaagcagtttgcaaggcaagcatgtatgatgagctaactcttgagataaacactacttttctctttggggttgctatagatcacgtgaatgagatgtctgtcaacatc

SEQ ID NO: 80001 - DNA, 1834 bp, Zea mays
  Clone ID: MRT4577_172985C.1
gcacaatctatcagtagtgcttctatcgacctgcaagggtggttcttcattacaggaagatgaagaggaacttctccaatcagtgattcaaaatcttacagctgccagttccaaaagaagcaaggttgaacaaaaaaatgatgatggattgagtaactccagccaaatgaaattcaaagatattaattatgtgaggaaaaacttttggaggtcaatgcatgaagactcagaacaggagaatgctgattcagaatttaaggccactgtttcacaggttcttactaatcaccaggaggataaggtgctcgacaacactgaagttcctcaggcatcaatctatagaaacttgtggattgaagcagaagcttcagcttgtaaactcaaatacgagcttcaacatgctctcctgaagctcgagacagcaaaaggcctcaacgacacaataaaagcccctgactcattggaagacagtaaaggctctaactcatacattttcagtaacaaaccacagaaccatgggaaaggaaccgtttcatgcgctgcggcctttcagggccacggaggagattctcgtgacaagcaatctcctgttgtaaataggagcattttcaatggtgttgatgctgatgtgtttgcccgatttgaagttttgcagtcccgtattgataatataaactccttgagtgagattgactgtggggagcagaaagaagcaagcaagagaccatatgcagtcgaagatactgttatggcgagactgaaagttttgaagtctcgtcctgacaatataacctctttgagtcaaggaagcactaaacaccagctagatggaagcacaaacagtgcagataatgttgatgacactgttattgctaggctgggaattttggagtcccatcctaataatgaagccctattgggacaggaaagcagcaagcgacaactggatgcgagaacaaatagagaagatgggattgatgctgctgttatggctaggctgagaattttgaagtctcgacctgataatgaaacctcaatgggcgatgccaacaaggagcagcaagacgcatgtggtgaacaattaaatggggatgaccttggtattgtgtccaatggagccattagcaacaccctgagtgagaagtgctctaagtttacgcactctgatgatcatttaggagaaaaaaactcagtaggtgtcccggacacatttggtgatggaaacagtgctagggagaaaaatgaggttggtggttcagcagatgttgctacccccatgaggtgcaaaggtacatctgatggagtgagcgtcggaagcgcagtacatagtgaagataatcttggtgaaaaccatgtgtggcttcaaactgctggggactctcatgtttgcacagaagggtctcaggaagcgcacccaatctcctctccagttgaccagtatggtggttcacctacagagtgggagcatgtgctgaaggagaatttcttccatccaggcaaattggcgaattctgacccataaactggaaagcttttgtttcagctcatgttgcctcaaaatgctgatgcttcttgtaaatatatgatacgatattatacatcccctccccccgaacctttgtctctatgttcaataatctgcatatctggtgatcaaggaaacgcactgtgcccccgatggtgctatatggaactagtctggtttgtctgcttgggtctatcatgccatagtttatctgtaaatggcacatgtatgttctggaccgagagtgaattattgtatatatttacttccagcaaatttagaaaaaaaaaaaaaaaaaaaaaaaaaaaa

SEQ ID NO: 80002 - DNA, 582 bp, Zea mays
  unsure (1)..(582): unsure at all n locations
  Clone ID: MRT4577_172986C.1
cccggcggcaccaaccccttcgcttcccccgccgacgccgcctcatcgccgtgggacgacctcccanacgacttcttcctctccacttccatcacctccccgtccccgtccccaccccctatcccgccccccatcccctccacctcgccccgtcacgccacgccccaccgatccacctcactcccgcccgcctccactccctccgctgctacctccgcctccgtctccgcttccttctccgacccgcgcccccgcgccgctccggcatcgcatcagcatcagcatcagccgcagctcctccatcccagccactcactccccggcttgcccgccgcggcctcccgctccccggtcgccgcagcacaaggatggccaccgcccccggggccccaccactcgggctcaatcccggagttcgccgccgctccggcctgcagcgcacacctcccgcccgcgcgcaccggcttgggcgccgaccgcccgcccgcgctggatctgcgcccgggcccgtccagggagtcccaggccggtgcggcgctgcgcgttcttgcctgctgatgcgatgcttgccggtgcgagccc

SEQ ID NO: 80003 - DNA, 395 bp, Zea mays
  Clone ID: MRT4577_172987C.1
ggtgttcaatattttttaatggttttttttgtttggtatttgaatgatctttttaaattggaagaaaaagaaaccttttttaaagaaaaaaacagtcgtgggcgccaaaaatacgaggccttaaatggggggtgttgcttaaaaaaaaaaaaaaaggcttgaaaattttggggggggaatgtttccctttgtaaaaaaaaaaaaaaaaggggtttttttattaaagaggtagcgagagacactaatgggggggggtgggaagaggcttttattaagaaacggggggggaaagcttaccaacttttcttgtagcgagttttgaaaaaaaaaagggaagggggggtcaacggggtattgtgggggaaaaccgaatcgtgaaacaattttcctaaaaa

SEQ ID NO: 80004 - DNA, 124 bp, Zea mays
  Clone ID: MRT4577_172988C.1
cctccgactcagtcgagtgagacagtaatatatacagtagcatatagtaggaacaatatgtcaggactagagaataagatattgtccctccttatgctccatgatccttctacatgtgttgcta

SEQ ID NO: 80005 - DNA, 426 bp, Zea mays
  Clone ID: MRT4577_172989C.1
ttccacaacacatacgtgcggttcggcaacagcgcaataagagaaccagtgtgctagtgctacagctacggcctagctacctactacggcccagctagcagcagcggcggacatgagcgacgggcgcgaggagagcacctgcctctgcctcgtggcccgcgcgcggcgtcctcgcttccttctccgcccgctgcccgcacgggttgtacttgtacatgtaccactgctagactagtactgctgctgtgcctgtaccatagtactgtgtattgtattgtacgtgctagtagtaaaccgctgccttcttcctcctcttctcttctcttccccaccactctgctgtcttgctcgtcgtcgtcgtcgtcgtcgtcggcggcggcggcggcggctgtgagttgtgacctgtatgtaattaagccatcatcc

SEQ ID NO: 80006 - DNA, 842 bp, Zea mays
  Clone ID: MRT4577_17298C.1
gaattccctcccgcgtcgcctcgcctcgtcccggagaaggctagccgccccgcgagccgagcgcggcgcccatggcgttcgacaagatccaggtcgccaaccccatcgtcgagatggacggtgacgagatgacacgaattatatggaaatggatcaaagataagcttatatttcctctcctggacttggatataaaatactttgacttaggtctacctaaccgtgatgctactggggataaagtaacgatagaaagtgcagaagctaccctaaagtataacgtggccatcaaatgcgcaactgtcaccccagatgaaggacgcgtaaaagagtttaatttaaaagctatgtggaggagtccaaatgggacaataaggaacatcttaaatggaactgttttccgagaaccaatcatctgcaagaatgttcctcggcttgtgcctggatggacaaaacccatatgcattggcagacatgcttttggtgatcaataccgagcaacagatacaatcattagagggccagggaagctcaagttgatatttgatggcatagaggaacaaatagagttggatgtgttcaactttagtggtgctggtggagtagcattgtctatgtataacactgatgagtcaattcgggcatttgctgaagcttcgatgaatgtggcttaccagaaaagatggccactttatcttagtaccaagaacacaatcctgaaaaaatatgacggaaggtttaaagacatattccaagaaaactatgaaacaattggagaggcaggtttgaggatgcaggaatatggtatgaacatagactgatcgatgatatggtggcttatg

SEQ ID NO: 80007 - DNA, 233 bp, Zea mays
  Clone ID: MRT4577_172990C.1
tttttcgcgtggggagaaatcgtcccaactcttcgtgtcctgagacctacatcgtgcgtgccgatgattgagacaggaattgtaattggtgacagtactgggtgtgttatattaatgtggttctgactttagcacatggataggttgccctatgtggacatacacaatctggtcaagggagttgacaggagcagtattcaattggtgcagtagctaagagcaagaaagtttct

SEQ ID NO: 80008 - DNA, 464 bp, Zea mays
  Clone ID: MRT4577_172991C.1
gtgtagagccttttcccccttttttttttttttttttttttttttttttttttggaaatcaaaactgacccccagggcaaaattacctgggggggtaaaacttccaaaatcacctttcagggctataaactgaaaaccttctgacaattttttttcagaggggggccaaaaaaaaaaaaaagggggggcaaatcaaacctcctaacccgaaaaaatttcccatgagggcggcccccggccccaaatgttatttaagttggcagtacaaaaacctggttccataaaattggcccccggaaactcttggcttatagcccaacattcagggcccacaaatcttgggcccgtaagcctccaaaaacttgggcccccccatgagtcctttatttgggggaccggtcccccaaccaaaataccaaaaaagccccctttgttgaaaatgaggcggggtaaaatgggccccc

SEQ ID NO: 80009 - DNA, 249 bp, Zea mays
  unsure (1)..(249): unsure at all n locations
  Clone ID: MRT4577_172992C.1
tgtgctagtgctacagctacggcctagctacctaacctactacggcgcagctagcagcggcggccatgaccgacgggcgcgaggagacggcaagacggccaaggtcatgcacctgctgctctggggacccaaatgaggtgaagtgaagcgctgctgctgcagcacagcacctgcctctgcctcgtggcccgcgcgcggcgtcctcgcttccttctccgcccgntgcccgaacgggttgtacttgtacat

SEQ ID NO: 80010 - DNA, 655 bp, Zea mays
  Clone ID: MRT4577_172993C.1
ccgagaacggatacgtgcggttcggcaacagagcaataagagaaccagtgtgctagtgctacagctacggcctagctacctactacggcgcagctagcagcagcggcggacatgagcgacgggcgcgaggagagcgagaggaccaccgccacggccacggcaagacggccaaggtgatgcacctgctgctctggggacccaagtgaggtgaagtgaagcgctgctgctgctgcacctgcctctgcctcgtggcccgcgcgcggcgtcctcgcttccttctccgcccgctgcccgcacgggttgtacttgtacatgtaccactgctagactagtactgctgctgtgcctgtaccatagtactgtgtattgtattgtacgtgctagtagtaaaccgctgccttcttcctcctcttctcttctcttccccaccactctgctgttttgctcgtcgtcgtcgtcgtcgtcgtcggcggcggcggcggcggctgtgagttgtgacctgtatgtaattaagccatcatccaacacgtctaatccccccctcccctttctgccgaaggttattcgatgttaactagatcatcacgagatcgaaaactaaagataaaagcacaggaaagtttttataccagttcagtttctctctttctgagac

SEQ ID NO: 80011 - DNA, 681 bp, Zea mays
  Clone ID: MRT4577_172994C.1
gggctcctcgaggccggccgggatacgtgcggttcggccacagagcaagaagagaaccagtgtgctagtgctacagctacggcctagctacctaacctactacggcgcagctagcagcagccgacatgagcgacgggcgcgaggagagcaccagcagcaggtggccagagctggccgccctgcgcgcgctggcgcgcgacgcggcggcccgggccgggagggagacgcggggtggcgcgggcgggagcgggaggaccaccgccacggccacgccaagacggccaaggtcatgcacctgctgctctggggacccaagtgaggtgaagtgaagcgctgctgcacctgcctctgcctctgcctctgcctcgtggcccgcgcgcggcgtcctcgcttccttctccgcccgctgcccgcacgggttgtttgtacttgtacatgtaccactgctagactagtactgctgctgtgcctgtactatgcactgtgtattgtattgtattgtacgtgctagtagtaagctgctgccttcttccttctcttctctcccccaccaatctacaaaaaaaaaaattcgcggcctcgtcgtcgcgtcggctgtgagatttgacctgtatgtaattaagccatcatccaacacgtctaatctccctcccctttctgtcgaaggttattccatgagtc

SEQ ID NO: 80012 - DNA, 718 bp, Zea mays
  Clone ID: MRT4577_172995C.1
cattgggtaccgccggccgggccgggaacagatcaagaagagaaccagtgtgctagtgctacagctacggcctagctacctaacctactacggcgcagctagcagcggcggccatgaccgacgggcgcgaggagagcaccagcagcaggtggccagagctggccgccctgcgcgcgctggcgcgcgacgcggcggcccgggccgggagggagacggcggggtggcgcgggcgggagcgggaggatcaccgccacggccacggcaagacggccaaggtcatgcacctgctgctctggggacccaaatgaggtgaagtgaagcgctgctgctgcagcacagcacctgcctctgcctcgtggcccgcgcgcggcgtcctcgcttccttctccgcccgctgcccgcacgggttgtacttgtacatgtaccactgctagactagtacttctgctgtgcctgtaccatagtactgtgtattgtattgtacgtgctagtagtaaactgctgccttcttccttctcttctctcccccaccactctgctgttttgctcctcctcgtcatcgtcgtcgtcgcgtccgctgtgagctgtgacctgtatgtaattaagccatcatccaacacgtctaatccccctccccttctgccgaaggttattcgatgttaactaggtcatcacgagatcgaaaactaaagataaaaacacaggaaagtttttatac

SEQ ID NO: 80013 - DNA, 347 bp, Zea mays
  Clone ID: MRT4577_172996C.1
atcacaacatcgtatagtgagtcgtattaagccgtacctgcccatcgatgatctcgtcaactggtcaggcagttcgcgacaacatgagctccacagattgctgatgcggcagtcgttgcgccagcaggtcgatgcctgacgtggtcgaacttcgcgtggaggacgccaagaatgtgattctcaaagacaacccggacgccgctatctctggtgctgcccgtcgggctcagttgcgacagcggattatcgccctaaccgtgtccggatcttcgtcgacatcgtcgcccagacgcgccacatacgctgataatatataagctaacggctatttcctttccttgccccag

SEQ ID NO: 80014 - DNA, 401 bp, Zea mays
  Clone ID: MRT4577_172997C.1
cacgcgtccataggtccaactggcacttttatatttgctcatgccctggcggggggggtgtcgcacctttcccacatgctcacaagctctatagcttcttttccctccttaccaacggctcgatgtaaaacccaatcttaccctaaggaccacaggcaatccactgcatctaccttataccctgtctcacaatatacccatacagattaccttgggcttatgcacaaacatagcacaacactcacacttggctgcaaacttgtgctacttacaacgcagtcttcattaccactgctgatgacttgttttattgacaacacactccttagcgctttgtgctaccccacatttttcattaacatgacactggacttctgttattcagagcacaactctccatt

SEQ ID NO: 80015 - DNA, 581 bp, Zea mays
  Clone ID: MRT4577_172998C.1
cctgtgcggcgctcgggccggcgggccgggaacggcatacgtgcggttcggcaacagagcaataagagaaccagtgtgctagtgctacagctacggcctagctacctactacggcgcagctagcagcagcggcggacatgagcgacgggcgcgaggagagcaccagcagcaggtggccagagctggccgccctgcgcgcgctggcgcgcgacgcggcggcccgggccgggagggagacggcggggtggcgcgggcgggagcgagaggaccaccgccacggccacggcaagacggccaaggtgatgcacctgctgctctggggacccaagtgaggtgaagtgaagcgctgctgctgctgcacctgcctctgcctcgtggcccgcgcgcggcgtcctcgcttccttctccgcccgctgcccgcacgggttgtacttgtacatgtaccactgctagactagtactgctgctgtgcctgtaccatagtactgtgtattgtattgtacgtgctagtagtaaaccgctggcttcttcctcctcttctcttctctttcccaccactctgctgttttgctcgtcgtcgt

SEQ ID NO: 80016 - DNA, 828 bp, Zea mays
  Clone ID: MRT4577_172999C.1
acggcagcagagcaagaagagaaccagtgtgctagtgctacagctacggcctagctacctactacggcgcagctagcagcggcggacatgagcggcgggcgcgaggagagcaccagcagcaggtggccagagctggccgccctgcgcgcgctggcgcgcgacgcggcggcccgggccgggagggagacggcggggtggcgcgggcgggagcgagaggaccaccgccacggccacggcaagacggccaaggtgatgcacctgctgctctggggacccaagtgaggtgaagtgaagcgctgctgctgctgcacctgcctctgcctcgtggcccgcgcgcggcgtcctcgcttccttctccgcccggcgcccctcggggcggcccttgttcttcccagtgaggtgaagtgatctgctgctgcacctgcctctgcctcgtggcccgcgcgcggcgtcctcgcttccttctccgcccgctgcccgcacgggttgtacttgtacatgtaccactgctagactagtacttctgctgtgcctgtaccatagtactgtgtattgtattgtacgtgctagtagtaaactgctgccttcttccttctcttctctcccccaccactctgctgttttgctccttctcatcgtcatcgccgtcgtcgcgtcggctgtgagttgtgacctgtatgtaattaagccatcatccaacacgtctaatctcccttcgctttctgtcgaaggttattcgatgagtcgatgttaactagatcaagatcgaaaactaaagataaaagcacatgaaagtttttatacaagttcagtttctctctttctgag

SEQ ID NO: 80017 - DNA, 367 bp, Zea mays
  Clone ID: MRT4577_17299C.1
gggcacccacacacccacccaccgacattagttctttcaccagcacccaccacaactgctcggcgtgcgactagattatccactccatggacctcctaaccgcccaattctccatctaccataacacatgcttaaaaagccggaacctgcaaaggcatactggtaatgtgcatgtactcctctatcgacagtatgctgaactccaagacccacttacagcagatatataaggaaacaaagcaccttcaacaagaacttcacaccacttatcaactcatcaccacaatcatgaacttacaattgaacccaaacaaactgtccgatgcattcattaatacccagtataattgcgcagcatgccagaaaa

SEQ ID NO: 80018 - DNA, 385 bp, Zea mays
  unsure (1)..(385): unsure at all n locations
  Clone ID: MRT4577_1729C.1
atttactaacaggcatttacgcctcctgtccaatggccagcaacaagtttacaagtcatgaaaatcgcatacagaaatcttctgaaaaacatagcagcaagatataaaaaaaactgacgaagttcttcaatcagactaggcttaaggatgccaccagttggcatttccaaactctcttctggtcatggataaagaaccctttcccaacagaangccatagcatgacattccacgtcaggttattccttcatgacgctgtagatcttctcgnagccattgtcacctcaataaaagaagatgaattcaccattgctaatgataatgacataagttaaaaatcttaacaatgcaccaataaaaatctgttaaataaaaataaacattt

SEQ ID NO: 80019 - DNA, 480 bp, Zea mays
  unsure (1)..(480): unsure at all n locations
  Clone ID: MRT4577_172C.1
tttgggggggggcgcgggggggtaaaaaaaaaacataaaaggttttaaggtttngagccatactggtgaaaaaaagttttggggccaacacacagaggacacaacagggccattaaaccaacgaagccacaacttctatttattacacacaaaccatttttttttttgaaaggggaaccccgttcttttgggacaccaaaggggaccaaaaaaaaaaaaaacccttttttaaaaaaagccccccccccccagggcttaangaaaaacgnggagggggagcaccagggggaaaaaaaaaaaaaaaaaaaggtgnagcccgggaggggggggccatcccccaactggttgccagcaaaaaaaaaaccctgctgggctggggggaggccctctttggcccggatcttccccttcaccgtggcgaggggggcggagcccccaacccccacgggtatgggcttgccccccaagggcttcacaaaa

SEQ ID NO: 80020 - DNA, 265 bp, Zea mays
  Clone ID: MRT4577_173000C.1
ggccctgactcaaatggggcccggtacaaaccacggagcgtataattacccgtagccccatagggcccgagcggctcttacacgagctccctatgcctagcggcaagcaaatgactcagcgtgagacgggtccaaggtggagtagccaaagaagagtgccttcgcgattgcggcaggataataccttcttaccccacaggaagtgacggcacgcctgcaacatcagccgtacgaatacaaaggtgcacccccggggccagttaaa

SEQ ID NO: 80021 - DNA, 598 bp, Zea mays
  Clone ID: MRT4577_173001C.1
gccggccgggccgggactccacctgtgctgcctgcctgcctgccgtcggtcagtgcgtcacgctagtagactgcccgcgcccgcgcttatataagcggccggcgaggctggccgctgacaacggcatacgtgcggttcggcagcagagcaagaagagaaccagtgtgctagtgctacagctacggcctagctacctactacggcgcagctagcagcggcggacatgagcggcgggcgcgaggagagcaccagcagcaggtggccagagctgtccgccctgcgcgcgctggcgcgcgacgcggcggcccgggccgggagggagacggcggggtggcgcggtccggagcgggaggaccaccgtcacgggcacggtcacggcaagacggccaaggtcatgcacctgctgatctggggacccaagtgaggtgaagtgaagcgctgctgcacctgcctctgcctcgtggcccgcgcgcggcgccctcgcttccttctccgccgctgttccccccgattggacatgtaaaagcaccgcggctgtctataatctactgtccatgcatgctcaaccttctgcgtgtagcaatagtcagggctactc

SEQ ID NO: 80022 - DNA, 280 bp, Zea mays
  Clone ID: MRT4577_173002C.1
cgactctagagcgatccaaggccttacttacgtcgtagcatgtcgactgtcatatgcttcttctatagtcgtcaccgtagaattcaatgtcgactggcacgtcgcttttacacagcgtcgtgacatgtggaaaactccttggcgttacgccatacttaagtcgcccttgcatgcacattcctccctttccgccatgcttggcgttaatatgcgatagaggcctcgcactcgatctgcccattcccaacaagtttgcgcagccctgaattggcgaatggga

SEQ ID NO: 80023 - DNA, 402 bp, Zea mays
  Clone ID: MRT4577_173003C.1
ggaaggtaaccaaattttgcaaaattggcaggggcttgtaaccagcaaattttcctgacaccctttccccacacatagcctttcagcaggttccggggacttgaaacaacaaccttttgaacactggttcaacagaagatttttcattacaagcgggaaccagcccaaacactttcaaatttttaactgggaaagcttggacactggggtgcatagggcttgtttgcttcgggggtgatcccggaaaatggaatgggtcacactgttttttatgggggtatcttgcaaatgtccccgttttcgacagccctaaaaacctttccctcataaagaccttttttaacccgcacttttggccaaaatttctcaatgtcccctgagagcaacctgggtttttaaccc

SEQ ID NO: 80024 - DNA, 447 bp, Zea mays
  Clone ID: MRT4577_173004C.1
aaaaaaaaaaaccggggcccgaacccaaatttttttttggtcatcccaaaaaacttggcaaatgcccccaggggagttcaggggaacatgggggcagaaaagaggggggcaaaatgcgaataaaagggggaaacaaaatgggttgggggggactgttttattgggggccattacaggggggggggggtttaggggaacacaagtttggggcctttcaaaggcttcctttttttattttaaacggaaaaaagagggtttgttatacagggaaatgaggggggtaactccccacaggacgggtaattccaggggaattttaaaaaaggctaacttggggggcgggggggatggtgcatcataggggggttcaggttttggttaacccaggggaatgggggaggggtccacattcccgtcacgggggccccacaaaaaccctaggggggg

SEQ ID NO: 80025 - DNA, 393 bp, Zea mays
  Clone ID: MRT4577_173005C.1
taattcggacgaaggacctctatggcctctggaaagagctagtattgggaccgatagatgactgggaacatcggtagagatctcaattatggcggagctgacgggcagtaacaggaatgttgacttgaagggcaacgaggcgttagcgcgcaagaccgtgttcggcttggacgtcacacagggggtcggatcactgctggacagggtccgcgagctcctaggccgctgcgtgacttgtcaacttataagactccaccgtacccgatcatagcaacggtaaccgggcaaggttggacgaggtggcgaacctggagcagtggatgctgaacctggcggagattatgatcagacgagaacgagattcgtgtgaccttgaactgcgaggcggagaag

SEQ ID NO: 80026 - DNA, 252 bp, Zea mays
  Clone ID: MRT4577_173006C.1
cttgcttgtcccttgcgaacatcggagagtgacttttacctacgttactacgtgggtcacaaaggcaagtttggtcatgagttcctggagtttgaattccgacctgacggtaaattgcgatatgccaacaacagcaattacaaaaatgatgtcatgatcaggaaagaggcttatgtacataagagtgtgatggaagaattaaagaggattattgacgacagtgggatcaccaaagaagatgacgctctgtgg

SEQ ID NO: 80027 - DNA, 294 bp, Zea mays
  unsure (1)..(294): unsure at all n locations
  Clone ID: MRT4577_173007C.1
tttttgttttttttgaggagaacatggaatccccactaaacagagagaaaggcatcacagccagtacacacaagactcaggctgactggatcacaattctagtcccaaagcaaaagaaaaaaagtcgaccgtgattagcctgcactaaaagagccatgatgtacaaacaacacggaaggngtggcgaacatgccccagagaaggtatctaggcgagatcaggactggacttgccattgatcgaggatggggccctaggccttctggataaactggtgtgccctggcctagacca

SEQ ID NO: 80028 - DNA, 277 bp, Zea mays
  Clone ID: MRT4577_173008C.1
gctcggaattcggctcgagcgcggatgtcaccccccgtataatttggcacccctagaccaaccaacaagggtgggtctagttacataaagatggctttccctcacggcacactacgactaattcatgacgaggggcgacatgaccaccagaacccggcactgccatcaggtgtgcaacccgcgcacacaagatgacctgatcataacctcccaggaggtagggcctgccatcaagataggaacctccagcccggcggcgtacccgctgcaccttcac

SEQ ID NO: 80029 - DNA, 315 bp, Zea mays
  Clone ID: MRT4577_173009C.1
ccctggaacgaggaaaatgggtttttccccaaaaagcaaaacccaaacatccaacacggacggggtaaaaagcttggggcccaaaagaccaaaaaggaccaggccctgctacggaaaaaaaagctgggggagtaaaaccggggggggccatgtatccaaaaaaaccccctcgacgggaaaaccggggggaaaaaatggcttaaactgggtggccttctcagcatcaaaaacccaaagggggtccaagtcctgggagcagccccccttgaacttgacaacatccttacccctttggatcttaaccggacccggggg

SEQ ID NO: 80030 - DNA, 185 bp, Zea mays
  Clone ID: MRT4577_17300C.1
ctcgagccgatcgcgagtggccgccctttttattacgctgagcacttccaagacggactatagggaatgttaggaatcgggccccaccgggtccttccgggatcaagggttccgggagctatctaataacctgaaactaacggtcttaatcctttaaactctcaaaagtcccctgaaagccttgc

SEQ ID NO: 80031 - DNA, 202 bp, Zea mays
  Clone ID: MRT4577_173010C.1
gctggtaggcgggagcccgaacccgtcagcgaggtagttggtcgagttgccggatggcacacgcaaccctcaggtgtctgggggcctgatggggaagccagtggggtatacaactgggcagggctacaatgctgggctcgatagtagctggtgaaataaacaagcgcaagctcatatgcatgctgccaggctatgagggcat

SEQ ID NO: 80032 - DNA, 117 bp, Zea mays
  Clone ID: MRT4577_173011C.1
gtgctatctaggcgaagcatccggccaatctagcattttcgcgcggggtctgagtgcagaccgggggggggttttgacgtaagatggcctgcacccatgccttcgtcttgtggaggt

SEQ ID NO: 80033 - DNA, 848 bp, Zea mays
  Clone ID: MRT4577_173012C.1
ataggccatatgcatgtaggcatgtagctgcaagtctctctctctctacaccctatacttagtagcggagatcatgctgtccctgtcgctgcctaagtggttggaggactgactagttagtgccagacccagactagagacgggcaagccagcagccaattcgtccgtgttgttgtcgtcgtccactatttagttgctttgcgcgcgtgcagagagcgagctacctaccctatagagtgtacatagcaagctccgccgccgtcgccattcctagacacaccttagctcgctctcgcccatgtccgtgacaacaagggagccggagctatagctgacacccgctttcgtcctttgtcctttcgcggcattcctcttggccttggatggaggggtgcccgtgcctctgagctccggcctccgggaattaataaagcaagataggaggatatcgccaataagcaggcggcggccaaggccaagacttaagaaaaggaggccaccgacgacgaagctgtcggagctggagtcccagctgtcgcagctgcaagaggagctcaagaaggccagggagcaactacactcctctgaactctccaggaagcgggccctgcaggaggccgacgacgccaaggcgcaggcgcgcgactccaaggcgcagctcgccgagctctcgtcggccgaggagacccgactcctggagctgcgacgtctatcgcaggagcgcgaccgctcgtggcagtcggaactggaggccatgcagaagcagcacgccgcggactcgaccgctctggccgcggcgatgggcgaggtgcaccgcctccgcgttcagcttgccgtcgcggtgcgcg

SEQ ID NO: 80034 - DNA, 903 bp, Zea mays
  Clone ID: MRT4577_173013C.1
ctgcgtcgtctcctactcgatctatagctccttcgtcccccatcttcagaaattggaatttcttgcagtcgcttcgctggttctgctctctagcttttaactcgttcctgctctttcttcagaccgatctgagttgcgggccgtcgtccaaggcgaaaggaggacagccggcagcgacgagctccggcggcgacaggcaggggaggggcaagatcgagatcaagcacatcgagaacacgacgaaccggcaagtcaccttctgcaagcgtcgcaacagcctgctcaagaaggcgtacgagctctcggtgctctgcgacgccgaggtcgcgctcgtcgtcttctccagccgcggccgcctctacgagtacgccaacgtgtatcttgtgcctagatcctacacgctgcgcgcgtcagctgtttgcgttgtccaaattcggagcaagttcgctcccatctttctcgaggcaaaaccgcggggctggagggtcaattggggagctagctagctgctgcatcttttgctgtgtgatccttgctggttacacagaagacgcatttggcttgttggtgctgctcctcgtgcgagagaaggagccagtagtgccaccactgtccagcagcttgaggacttcaaggtcggtggctagtgcagcccccgcccaaagcttagctgacttctgcaaggattcctcctcttcagctgcacacggtctcctgaatattctacctaacatgttgtttctctaaggctactatgtgatctttttgttagtcacaatctattagttagaatcatagagatccttagaagcatagcaaaatcactttctgagtcttggtctttcctttcaagagtggacaatcagaccatagttgatatgcatcaagcactaccagtatctt

SEQ ID NO: 80035 - DNA, 961 bp, Zea mays
  Clone ID: MRT4577_173014C.1
gccggcagggccggagccgccatcgggaaaccttcactccttctcctactcgatctatagctatgaagatcatatcgtacatctgcgtcgtctcctactcgatctatagctccttcgtcccccatcttcagaaattggaatttcttgcagtcgcttcgctggttctgctctctagcttttaactcgttcctgctctttcttcagaccgatctgagttgcgggccgtcgtccaaggcgaaaggaggacagccggcagcgacgagctccggcggcgacaggcaggggaggggcaagatcgagatcaagcacatcgagaacacgacgaaccggcaagtcaccttctgcaagcgtcgcaacagcctgctcaagaaggcgtacgagctctcggtgctctgcgacgccgaggtcgcgctcgtcgtcttctccagccgcggccgcctctacgaccttgctggttacacagaagacgcatttggcttgttggtgctgctcctcgtgcgagagaaggagccagtagtgccaccactgtccagcagcttgaggacttcaaggtcggtggctagtgcagcccccgcccaaagcttagctgacttctgcaaggattcctcctcttcagctgcacacggttcgacatgccccgtgcctactatcactctcgatttgaagaagagtctcaagattctgcaagtgttgtgttactcctaattcagttaccttactggcaataggatgccattgcaacttctgaaagtgcaaccatctgattgaagcggatttaattatacaagatagatctagaattgctttacttgagatccaagcaatgttggatgcttttgtgactgatcatctctagagcttttgtaaatgatctagctagctatctgtaaatgatctagttgtgaatgatattataattgtgatgcttttgtgaatatataattgtggtgcttttgtgttt

SEQ ID NO: 80036 - DNA, 464 bp, Zea mays
  Clone ID: MRT4577_173015C.1
ggaacattttggttctaaggtttgtttatgaatggatctgtctacatttcaaaaaaaaaaaaaaaaaaaaaaattgttgtcccaaactgaaacatagccacactatcgaagcatgacacatgcagtgagcttgaggccggatacattttggttctaaggtttgtttatgaatggatctgtctacatttcaaaaaaaaaaaaaaaaaaaaaaaattgttgtcccaaactgaaacatagccacactatcgaagcatgacacatgcagtgagcttgaggccggatacattttggttctaaggtttgtttatgaatggatctgtctacatttcaaaaaaaaaaaaaaaaaaaattgttgtcccaaactgaaacatagccacactatcgaagcatgacacatgcagtgagcttgaggccggatacattttggttctaaggttgtttatgaatggatctgcctacatttc

SEQ ID NO: 80037 - DNA, 368 bp, Zea mays
  Clone ID: MRT4577_173016C.1
tatgctcggacccagtctgtgggatgtctggaataataaatctcacataatgtcagttgagatggtttcttgtattgctattgaagcaatctgcatacttgagaaattacattcaaaagggtatgttcatggcgatgtcaaaccagagaatttcttgctagggactcctgggacacctgaagaaaagaaactcttccttgttgatcttggcttagctacgaagtggaaggatattgcaacagggcggcacgttaaatatgatcagcgttcagatgttttcaggggaacatttcgctatgctagtgttcatgcacatcttgggagaacaggtagcaggaaggatgatttaaaatctctagcatatacac

SEQ ID NO: 80038 - DNA, 392 bp, Zea mays
  unsure (1)..(392): unsure at all n locations
  Clone ID: MRT4577_173017C.1
accgnggtgaacacacnacagtccggggggctggaaagcacaacgtgagcacagcgaaaacaatgtcagtacccaaactaattttttaccccaacatgcacactttatcagcgggggtcgtatgtaatgggccattgcgagccgccaacaccatcagacaggcaacaggtatgaccatgggtacgccccgtgctactgcgacttactctcgggaaaggtggtgctcacgcacataccgacccgtaaactcggcatcgacctacgcgcccgtccacgcgttcgcccacgcgtctcggtacccatggtcgccagatataccactacagatcaaacaggctagatccctagagaggaccacacaacggctagacagcacgctaaccactagaaac

SEQ ID NO: 80039 - DNA, 610 bp, Zea mays
  unsure (1)..(610): unsure at all n locations
  Clone ID: MRT4577_173018C.1
ctccacgaaccaaacacaccatagattcttcttttttttgacggaggctcatctctggattttctctctatccttggtgccaacgtgtggttataattatctacctttgtcgtttggcgataatgttttgtatccatttggttgttggtactcagaaatttctaggcagctggtgctgttgttggttttgttgtaatgggtcagaggtggcagcaggaccattggcaccttcatcaatttaagttcagtgcagcggtgaggttcgacatgccccgtgcctactatcactctcgatttgaagaagagtctcaagattctgcaggtgttgtgttactcctaattcagttaccttactggcaataggatgccattgcaacttctgaaagtgcaaccatctgattgaagcggatttaattatacaagatagatctagaattgctttacttgagattcaagcaatgttggatgcttttgtgactgatcatctctgaagcttttgtgaatgatctagctagctatctgtaaatgatcttgttgtgaatgatattataattgtgatgttttttgtgaatatataattgtggtgcttttgtgtttatgtgaaanaaaa

SEQ ID NO: 80040 - DNA, 1285 bp, Zea mays
  Clone ID: MRT4577_173019C.1
attcccagatgacaattccataaaaacaaacacggcgtatacagactgaaataactcgctcaaaattatttatcggataccccatagcagttacaagccatgaacagtggctacacaatgacgttctagcaagcctgggatacaaagccgattcagaaaattgagagcaaaggtacagcgtaaaaactaagaggagagccagcaaggtagcattttatttagtaaaatcgttcactcgcaggtacccaatcttctcagctttacacactcgccatcttgaggctgttgcccttctcctgcaggctcacgagtaggctgtcaaagctcttcttgaaggagtccacgccttccagctcaagctgctttccaacctcttcccagtcgatgccaagcttctccaaggcactgtatacaccttccgcctcagacacattcgcatcaactgtccttgaaacggtgccgtggtctatgaatgcttgcaaagcttggtcgggcatcgtgttgaccgtgtcaggtccgatgagactgtccacataaagagtgtcaggataagctgggttcttgacaccggtggatgcccacaacaacctttgtttcttggcacctttcttggccaacgcctcccaccttgggccagagaatttcttctggtagagccgatttgctgcttcaacagttccttgagtgtcatttgccaacctaggagacacctctacggagacatacccatcagccccatcagtctcatcgtagatgggctcaaaaagtttgcacgcatcttggatatcctttataacgagttcccagtaagcgctctccgcgtcctttccagccgaaatgagctgcttgaactgatcatcatatgcgctggacgatgaaatggccttttggaaaatcgttgcgttgctggtgactccacggacgccgctggcgataatgggcagcaagtctgtgacagggcggcataggttgtcgtaccacggggacaggccctggagctcgtagagatcatgaagcgcagtcctcttggtcggtgcaccatttccttccttggccgaagccatcgcaatgatggggctcctggctcgcccggcgacggagacgcggacccggcgcgcggagggggcgaaggcgagggcggcggtgcggagggacgccggccggagcggcggtgccgccggacggggcgccgccagcttaggcaccgtgccggtcatcgccgctcgtcggggttggtggcaaatggggggtttgctcgttgggttgttgcgacctgtccggccgg

SEQ ID NO: 80041 - DNA, 242 bp, Zea mays
  unsure (1)..(242): unsure at all n locations
  Clone ID: MRT4577_17301C.1
tcgagccggccgggccgggaatataaattaatttanngcttacctaatcctcaaacatgccaccaaagttcgatcccagtgagctcaagatcatgatcctcaagactagaggaggtgaacccggtgctgcctcttctttggcccccaagatgggtcccctcggtcttaacgccaagaaggtcggtgatgatattgccaaggaaaccgataagtggaagggtattaaggttatgattgaaatg

SEQ ID NO: 80042 - DNA, 238 bp, Zea mays
  Clone ID: MRT4577_173020C.1
cggacgcgtgggcggacgcgtagtgatgaggccgtctgggtgcgcgatgccgagcgccagacacacgaggagtcatttcccgcccatatatttgagctattattagtagatgttttgggctgccgctctagttgacccaggcagattactccttgatgcaacgcaataagtattataaagcgttacctaaatagaattgactggccgtcgttaaaaagctctactacagggaaaaccc

SEQ ID NO: 80043 - DNA, 786 bp, Zea mays
  Clone ID: MRT4577_173021C.1
tcgagccggccgggccgggatcgggaaaccttcactccttctcctactcgatctatagctatgaagatcatatcgtacatctgcgtcgtctcctactcgatctatagctccttcgtcccccatcttcagaaattggaatttcttgcagtcgcttcgctggttctgctctctagcttttaactcgttcctgctctttcttcagaccgatctgagttgcgggccgtcgtccaaggcgaaaggaggacagccggcagcgacgagctccggcggcgacaggcaggggaggggcaagatcgagatcaagcacatcgagaacacgacgaaccggcaagtcaccttctgcaagcgtcgcaacagcctgctcaagaaggcgtacgagctctcggtgctctgcgacgccgaggtcgcgctcgtcgtcttctccagccgcggccgcctctacgagtacgccaacgtgtatcttgtgcctagatcctacacgctgcgcgcgtcagctgtttgcgttgtccaaattcggagcaagttcgctcccatctttctcgaggcaaaaccgcggggctggagggtcaattggggagctagctagctgctgcatcttttgctgtgtgatacgctgctgaagctccatgcgcttcctgcctctttgtcagccttgctggttacacagaagacgcatttggcttgttggtgctgctcctcgtgcgagagaaggagccagtagtgccaccactgtccagcagcttgaggacttcaaggtcggtggctagtgcagccccgacagcaacg

SEQ ID NO: 80044 - DNA, 618 bp, Zea mays
  Clone ID: MRT4577_173022C.1
ggtaccctcggagctggccgggccgtcgccgggcgagccaggagccccatcattgcgatggcttcggccaaggaaggaaatggtgcaccgaccaagaggactgcgcttcatgatctctacgagctccagggcctgtccccgtggtacgacaacctatgccgccctgtcacagacttgctgcccattatcgccagcggcgtccgtggagtcaccagcaacccaacgattttccaaaaggccatttcatcgtccagcgcatatgatgatcagttcaagcagctcatttcggctggaaaggacgcggagagcgcttactgggaactcgttataaaggatatccaagatgcgtgcaaactttttgagcccatctacgatgagactgatggggctgatgggtatgtctccgtagaggtgtctcctaggttggcaaatgacactcaaggaactgttgaagcggcaaagtggttacacaaagtggtgcttattttctcaattgcaagatatgaggctgtgattgatgcttacctcgatgggctagaggcttctggcttgagtgacttatcccgagttaactagcgtgcatcctttcttgtcagccgagtggacacccttattgac

SEQ ID NO: 80045 - DNA, 471 bp, Zea mays
  Clone ID: MRT4577_173023C.1
ccggccgggaacttagccggctattctttctcttaccaaacttatcactctaccatccgaatagtaataccttcaaataaatcatacacaatggatgctgctcaaacaacactctcctcgcctgtgagcgctgccgcaaacgttgcgtccacttccaccacagccaccaacaagcccaagccctgctgtgtgtgcaaggacgaaaaggctaagcgcgatgagtgcatgctcttctccaacgcaaaggaccctgccgccgactgcaagtctatgatcgaccagtaccgatcctgcatgtcgggctttggattccaggtttaagcaagacaaaaaaggcgacgactgtcgatgacgaaatgattcctatggtcacattctgtgggccgtgtacaacattagacgatatagtgtagaattacgggcaatccatgcattttcctctccaaaaaaaaaaaaaaaaaacccgcggcc

SEQ ID NO: 80046 - DNA, 1048 bp, Zea mays
  Clone ID: MRT4577_173024C.1
gcggactaggaactagtccccctttttttttttttttttttttttttttttttgggcaaataaaaatcgtatagaaagtaacagagatgttttccaaccgtttacgtcccataccttgttacaagccatgaacgttggtcacacaatgatggccaggcaagcctagaatacaatcccgattcagaaaatggagagcaaaggtacatcgtaaaaactaagagagccagcaagctagcattttatttagtaaaatcgttcacccgccggtacccaatcttctcagttttacacagttgccgtcttgaggctgttgcccttctcctgcaggctcacgagtaggctgtcaaagctcttcttgaaggagtccacaccttccagctcaagctgctttccgacctcgccccagtcaatgccaagcttctccaaggcgctgtatacaccttccgcctcggacacattcgcatcaactgtcctcgaaacagtgccgtggtctatgaatgcctgcaaagcttggtcgggcatcgtgttgaccgtgtcaggtccaatgagactgtcgatgtaaagagtgtcgggataagctgggttcttgacaccggtggacgcccacaacaacctctgtttcttggcacctttcttggccaacgcctcccacctcgggccagagaatttcttctggtagagccgatttgctagtttggcctgtgcgacggcagccttccctctcaaggcaagtgcctcaggtgttccaatcttctcaagcattttgtcgataagggtgtcgactcgactgacaaagaaggatgcgacactggtaactcgagataagtcgctcaagccagaagcctctagcccatcaaggtaagcatcaatcacagcctcgtatctcgcaatagagaaaataagcgtgacgttgacgctaatgccattagcgataacttcacggatggaatgaacacattcggcggtagcagggatctttatgtagacattggggcggttgaccactttgtgtaaccactttgcctcctcaacagttccttgagtgtca

SEQ ID NO: 80047 - DNA, 1904 bp, Zea mays
  Clone ID: MRT4577_173025C.1
gaccaaacacactttagagcggggcaaataaaaatcgtatagaaagtaacagagatgttttccaaccgtttacgtccgatcccttgttacaagccatgaacgttggtcacacaatgacggccaggcaagcctagaatacaatcccgattcagaaaatggagagcaaaggtacatcgtaaaaactaagagagccagcaagctagcattttatttagtaaaatcgttcacccgccggtacccaatcttctcagttttagtgggtgtttggtttatagggactaaacattagtccctctactttattccattttagttcataaattgttaaatagggaaactaaaatatagttttagtttctatatttagtaaattagggactaaaatggaataaaattgagggactaaaaattagtccctagaaaccaaacacccccttacacagttgccgtcttgaggctgttgcccttctcctgcaggctcacgagtaggctgtcaaagctcttcttgaaggagtccacaccttccagctcaagctgctttccgacctcgccccagtcaatgccaagcttctccaaggcgctgtatacaccttccgcctcggacacattcgcatcaactgtcctcgagacagtgccgtggtctatgaatgcgtgcaaagcttggtcgggcatcgtgttgaccgtgtcaggtccaatgagactgtcgatgtaaagagtgtcgggataagctgggttcttgacaccggtggatgcccacaacaacctctgtttcttggcacctttcttggccaacgcctcccacctcgggccagagaatttcttctggtagagccgatttgctagtttggcctgtgcgacggcagccttccctctcaaggcaagtgcctcaggtgttccaatcttttcaagcattttgtcgataagggtgtcgactcggctgacaaagaaggatgcgacactggtaactcgagataagtcgctcaagcccgaagcctctagcccatcaaggtaagcatcaatcacagcctcgtatgtcgcaatagagaaaataagcgtgacgttgacgctaatgccattagcgataacttcccggatggaaggaacacattcggcggtagcagggatctttatgtagacattggggcggttgaccactttgtgtaaccactttgccgcctcaacagttccttgagtgtcatttgccaacctaggagacacctccacggagacatacccatcagccccatcggtctcatcgtagataggctcaaaaagactgcacgcgtcttggatatcctttataacgagttcccagtaagcgctctccgcgtcctttccgcccgaaatgagctgcttgaactgatcatcatatgcgctggaggatgagatggccttttggaaaattgcagggttgctggtgactccacgaacaccgctggcgataaggggcagcaagtcggtgacagggcggcagaggttgtcataccacggggagaggccctggagctcgtagagatcgtgaagcgaggttttcttggtcggtgctccatttccttccttggcagaagccatcgcaatgacggaggggatcctggcccgcccggcgacggagacgcggacccggcgcggggagggggcgaaggcgattgcggcggcgcggagggacgccggccggagcggtggcgccgcaggccggggcgccgccagcttggacaccgtgccggtcatcgccgctcgtcggggttggtggggagcgcgaggaggggcagggcggatgggtgtgggtgtcacggggttgttgcgaggttttggaggctctttcgtttctgttgccggacgcgtgggcggacgcgtgggcggacgcgtgggcggacgcgtgggcggacgcgtgggcggacgcgtgg

SEQ ID NO: 80048 - DNA, 1908 bp, Zea mays
  Clone ID: MRT4577_173026C.1
gctagaatgtgcttgctcaatctttattatatttgcaaatggtagctcatggatggaaacacagatcaacctgatcaatagtgattgtctggtggtggttgtagcctatgtcatgatgaatctcaaaacctaagtgccgcagaagtgctatgaacatcctattgcaagccaccaatgacagattattgcagagcacacgtaaatgcatagaaaccacatggcgacattgagttcaagagtcagggcaaacaggcctcatccacaatgacgttatcggataccccatagcagttacaagccatgaacagtggctacacaatgacgttctggcaagcctgggatacaaagccgattcaggaaactgagagcaaaaggtacagcgtaaaaactaagaggagagccagcaagctagcattttatttagtaaaatcgttcactcgcaggtacacaatcttctcagctttacacactcgccatcttgaggctgttgcccttctcctgcaggctcacgagtaggctgtcaaagctcttcttgaaggagtccacgccttccagctcaagctgctttccaacctcttcccagtcgatgccaagcttctccaaggcgctgtatacaccttccgcctcagacacgttcgcatcaactgtccttgaaacggtgccgtggtctatgaatgcttgcaaagcttggtcgggcatcgtgttgaccgtgtcaggtccgatgagactgtccacataaagagtgtcaggataagctgggttcttgacaccggtggatgcccacaacaacctttgtttcttggcacctttcttggccaacgcctcccaccttgggccagagaatttcttctggtagagccgatttgctagtttggcctgtgctactgcagcctttcctctcaaggcaagggcctcaggtgttccaatcttgtcaagcattttgtcaataagggtgtccactcggctgacaaagaaggatgcaacgctagtaactcgggataagtcactcaagccagaagcctctagcccatcgaggtaagcatcaatcacagcctcatatcttgcaattgagaaaataagcgtgacgttgacgctaatgccattagcgataacttcctggatggaaggaacacattctgcagtagctgggatctttatgtagacattggggcggttgaccactttgtgtaaccactttgccgcttcaacagttccttgagtgtcatttgccaacctaggagacacctctacggagacatacccatcagccccatcagtctcatcgtagatgggctcaaaaagtttgcacgcatcttggatatcctttataacgagttcccagtaagcgctctccgcgtcctttccagccgaaatgagctgcttgaactgatcatcatatgcgctggacgatgaaatggccttttggaaaatcgttgggttgctggtgactccacggacgccgctggcgataatgggcagcaagtctgtgacagggcggcataggttgtcgtaccacggggacaggccctggagctcgtagagatcatgaagcgcagtcctcttggtcggtgcaccgcttccttccttggccgaagccatcgcaatgatggggctcctggctcgcccggcgacggaaacgcggactcggcgcggggaaggggcgaaggcgagggcggcggtgcggagggacgccggccggagcggcggtgccgccggacggggcgccgccagcttggacaccgtgccggtcatcgccgctcgtcggggttggtgggaggtgcgaagaggggcgtgtgtttggtcgcgtccctcacggtggggggttgttgcgacctgtactttttttttttttttttttttttttttgttcaaacaaagtcgccattagcatggttgccccccggccgg

SEQ ID NO: 80049 - DNA, 326 bp, Zea mays
  Clone ID: MRT4577_173027C.1
gcgtgcccctaatattgctcttagcgcagtcattgactaatgctataatgcaagaatatttcggtccttggcgggccatgtcctaattgcggtactgaaaacctttccctttttgggactatactgccagtctacattggcggaccaccaaacaaagtgaattgtgcacattgccattcacatctggaatatgactcagaatctatgtagaccactcatctcaaacgcatcactcgcttacacatacgtcactatacatttacgcgagtaactataaacggacactatgcggtatatatgccaaatgtacgacaactcactcggtc

SEQ ID NO: 80050 - DNA, 280 bp, Zea mays
  Clone ID: MRT4577_173028C.1
aagaaatagcacttgacttgattttttacagacattgaggaaattgccactttcaaaggattgggaaaaaaaggccaaaaagggctttaaaacatgatttaaaggatttttacaaaaactagggcattaaaaccccgcaccccaaagacctggggtggcgggaactcttaaggccccgccttatttccaacccccaaaacccaccccttaagggggaacgacaagggaaattaccggaaaccgggacccaaatctcagaatgaaagggggccccaaaaat

SEQ ID NO: 80051 - DNA, 609 bp, Zea mays
  Clone ID: MRT4577_173029C.1
ggccgcttttttttttttttttttcttttttttttttttttttttttttcttttttttttttttttttttttttttttcttttttttttttttttctgtttttttttcctcttatacagaaaaagcaaaggggccccaaggcaaagggaacccaacacagggggacaaccaaacaattcacccaggaacccatttaaaaacagggccccaagggaaaaaggacccccccacttttatcaaaccaaagaaaacggagggggactgaaataagaaggggttattacacaaaaaacagcactgggcttttaaacacccaaagggtaccggcgaagccactccttgggtgggggaaaaacaaaaaaaaaaaaggatttcccttgcttccccatggtaaaaaagagagggccacctttaggtggggcaaacaggttaacccctatacttaaaacaaccgtttcaaattgaaatgggggggggcctttttactttgggacgcccagggaaaaccctccaacccaaaaaaaggtgggaaaaaaaaaagggggccgaaaccttacccttgggggaggccggggaaatccccccaggcaaaagagggggggggtaaaa

SEQ ID NO: 80052 - DNA, 190 bp, Zea mays
  Clone ID: MRT4577_17302C.1
ttccctccttttcagaaaaaacaacaacaaagggctcgattgttttaaattcgctccgagccaacaccccccaggataggctcaaaaaaaacccctgggattcagattacaaaccaagctattctttgacccagaccagactcccagagtagccgctacctctaaataacacaagcatcacactacgagg

SEQ ID NO: 80053 - DNA, 133 bp, Zea mays
  Clone ID: MRT4577_173030C.1
ggctatttttctctgcggcccgtatcctatagcggctcgatccactgcaccgagctagcgatatacgactgttgctgccgaagtatctgctgatggtgcttgctcaatcctgaatcgacacattcggccttat

SEQ ID NO: 80054 - DNA, 219 bp, Zea mays
  Clone ID: MRT4577_173031C.1
gggcccccacagaaaaaaacggcaataccagagaacactacaagagaagtggcaaattttgcaccataaaccctagatgcagctgacgctaactacaaacaatttacttggtttgtgaattacagttgtgggacagtcaccgagcaaagagtccaacattcaatgccttaattgagcagattggacggccaccgttagtgccctgtcgggtattccgga

SEQ ID NO: 80055 - DNA, 801 bp, Zea mays
  Clone ID: MRT4577_173032C.1
ccgggagcgccggccggggaaccagtggacccagtgggaacaggaggcccacgataccctgcctcctgccgccgcgcctctctcctacccgaagcgaagcgccggaggtgtccctccgtgcgatgcagacgccggcggcgaccatctgcggggcccacggggcagccttcaccccatgcccccgtcgccccacccctcctggaagcctccggaagcctttcactggctcttctcggcggactccaaggcgccggctcctcgctcccatggcctccaccgtcgactcacccgggagctcatccgacttcaccaagcgtatagagcgcgcctggctaatctcccagcaaccaagaccagtttcttgctcttcctgtcaatctgctggccacgttgagtgcaagtggtgtgcaggaacaggcttctttatccttggtgacaacatattgtgtgaagtaccctcaagaaattcaaaatgtgtgatatgctctggaaagggcttcacaagttgtgctgattgccaagggacaggttttcgtgccaagtggcttgaagaacctcctattgacaaatgaggaagtcaaccatactgtaaaatttaccatttcacagtaaactagctactttttatgcttttctgtccatatccttcaatgtaactctggtaatattatttttcttttcctgtaattgcatcaattccatattatgacatgttcttaattattcaacatacattttctgtaagaacatgagtatcaagagggtattttttgctctaaaaaaaaaaaaaaaaaagcggcc

SEQ ID NO: 80056 - DNA, 185 bp, Zea mays
  Clone ID: MRT4577_173033C.1
ttattatcataggtgaaaaccatacatgattaatttatcattagatagttaaaacatggggctgcctcataaacaaacaaggggtgagttctaacaaacacaaataccaataataacaaataaaaaataataaaaataaatcaaaaaaatcaaaaacataaaaattggggcgccccttctatatt

SEQ ID NO: 80057 - DNA, 149 bp, Zea mays
  unsure (1)..(149): unsure at all n locations
  Clone ID: MRT4577_173034C.1
attgccaaccggcgagtcttgtaatatcaaaagacattaaaattgcacgtacataaggctttnnaaggtggtggaacatcacgcccgtgaagaaaagcagttgctcggagaagggcatcaccaggggccccagcgtggtgatgttggtt

SEQ ID NO: 80058 - DNA, 257 bp, Zea mays
  Clone ID: MRT4577_173035C.1
ctgggaagccacacacaccagacaaaaaacacgatgatagaagcatatctcatatgcaatctataagagggcaccaccacagatggggtgtggggagaaaactgttgtgtttttctaagcacgaggggtgaatgtgggggggagtggcacttttttttttttgccacagcgaggcatacagcgtactgataaagggggcggatgtggtcccccccccaaagcggcaggggtctcataacatatatgtgtgaaagtga

SEQ ID NO: 80059 - DNA, 434 bp, Zea mays
  unsure (1)..(434): unsure at all n locations
  Clone ID: MRT4577_173036C.1
ttacttacgcgcccttaaatagacgactagaaaattaagagacgcggcgggatttataagaataactatgcgtcagcatgcacagctcnctgctctccagaggggctggaatcacaagccatggatcgagaaggtaggacagcattgccgtatgaaatagaaggtggaacaagcgacgaagacatcctagcatagagggaggatcatagcagaagaacttgaaaccgcaccttcagtaaattgaggaccacttggtgtggacaactcaactaaggtcttatccgggtagcttctaaatcccccggattgagggtgaatgggcccgcttcaaatttaaagaaagctaaaaggttattaaaacttcctctaatcccatccaatccatccataatgggaaataaccgaccaggacctaacaggatccagccccgctc

SEQ ID NO: 80060 - DNA, 335 bp, Zea mays
  Clone ID: MRT4577_173037C.1
ggccgctccgccaccttggcactcggctcttttcgctctagccaccgggccaggggagggggcattcgatcggctgcgttatggctggagctgctgctctcaatgagggtatgctttcttccgtgatcgaaaaaaatgtggctgctcacccatggcctgatttggagataggaccagatgttcctcaatggctaaattgtgtggtagagattcctacatgcaccatggttaattttaagacggactcaatctgtatgctgaataaggtgcaccgtgtactttactgcttatttagtgacccaccattccttcggattattctacgcttactgtgt

SEQ ID NO: 80061 - DNA, 254 bp, Zea mays
  Clone ID: MRT4577_173038C.1
caatctccatcacaaatcctgtattgtgactggtccaacacaggcaagtacccatctactgggtggaacacaatccatatgattcgcagaacccaatcacttgcatgatccaacatacccaaggtagattctcgtcgtagctaaaacgcacacatcaggatttgcgctagggccctacttagagccctgtacccttgatcccctctcttgaaggacttgaggctcgcgactggaaatgttgcaacacatatgtt

SEQ ID NO: 80062 - DNA, 1717 bp, Zea mays
  Clone ID: MRT4577_173039C.1
ccggccgggaggttcccgtatgcgtcgcgcggcgtcgcctgccgaaccccgaaccttctcgaggtcgaggcccctcccctttcgccaggaggtgcgcacggcacgactaatctccacactccccactagcttttcttcccagtttgctccgattttgattccatgaaaacaatgagcaggcgcaacagccgtaccatctatgtaggcaatctccctggggacatccgtgagagggaggttgaggatctcttctacaagtatggccgtattttggatattgacttgaaaatacctccgagacctcctggatacgcattcgttgagtttgaggatccacgtgatgctgatgatgcaatttatggccgtgatgggtataactttgatggctacaggttgagggttgaattagctcatggtggcagaggccagtcttattcttatgatcgttcaagcagctatagcagtgcatgccgtggaggtgtttctaggcgctctgatttccgtgttatggtcactggtttaccctcatcggcatcgtggcaagatctgaaggaccacatgcggcgcgctggtgatgtctgtttctctgatgtataccgtgaggctggagaaactattggaattgtggattatacaaattatgacgatatgaaatacgcgattaggaagcttgatgactcacagttcaggaatgcattttcaagagcatatatcagggtgagggagtatgatgctagatcacgaagcagaagccgtagccactcgtactctagaagccccagctacagcaggagcaggagtccaaaatctgtttctcagtcaccctcatctgtggatgaaaggtttgcttttgtttttcctagatttggccatgcggcgatctgggggctgcattgatataatactggatgttttgagaatcggagtggatggtttgggacttcggatagtagagatggattgtgatgcatgtatgacaagtgggctacaatcagtcctaggagcaagataggctgacagtaagaaaatgtgaagtaaagcttgtggtgttattaaaacaaatgtctactattaagttcaatgaccccatatagatggacagtaatttatagatcgctatcaagatctcgatccccaatttcttctccttctcatgcaagatatgcgacaagccctaggagcagaagcgcatcccgttctcggtctcctgtgagatccgattgaactttgagagcccttgaagcagtgagcagccccagggagaagaaaggaacttgagagtatgccgtgccatcacaatggtccgagtgattatgctgttgccactgctccctcacatttaagaggtttcctcttatttagacggagcatttaattaacattatcttgctaaagagagacttatgcgtagtctacttgtgtactcgttcgtttgtcctcatgttcttggcttcaggaactctggttttttatcattgtacccatagtaaaacctagatgtagttggggtatgccgtatgcgtctatattcggttggtcgaatgtaaatctggatgcatatatgcatctgtttggtttcatttaggcctttccttggtttcgtgattaatgacaacataagcttattgctgtgatcaaagtatattttgtagaggtaattaaagctagtcacacaataatggagattgcttagacaacgtatggtttttatgcctct

SEQ ID NO: 80063 - DNA, 876 bp, Zea mays
  unsure (1)..(876): unsure at all n locations
  Clone ID: MRT4577_17303C.1
cattgggtacctcgaggccggccgggctagcccctagccgccagtgtcgtgcattcgtgctgaggctctactgctgatccgtcttccaagctctggtttcatccctgagcactgatttaagatgtatctccagtactacatcaacgagaagggggacaaggtctacaccaccaagaaggagtcacctcttggggtgccaacgcagtctgctcacccaggtacaccgcctttgttcactggagttacttttgtttctgctgttcagctgttataacttgcctgtcaagttgtaatagtggggtaatactctttggttgggtacaggatgtagagtcatggttatctaattattagcggtaggcatgtttgtagacttggagccctacccgatttgtgtcattcatccagtagtatgttgtatcctcaatttcttctgagtttagattctgggtattttatcagacaaataaaaatcccttgcataactcttaagaatggagttaagagtaacagtacctatcaaaactgcagaccattctttctttctctgtgctttatatgataatatgacctcatgtggcattcacataatatagagttctggtcaatcatggatggctttaccatgagcattgtctgccaggttaaagcttcattgtgttgtattattggactagatgtaaatagactgtagatagatagaacctatcttagtttacctgaggtgaacacttgtgttgtggatgtgtaggaccaaaaaaagatgtaaactgcagaactgaaacgtgtggaattcgttcatttttatggttgcatttggnngntttgattgttaataaatctggntgccatggccctcacatcatgatttactga

SEQ ID NO: 80064 - DNA, 832 bp, Zea mays
  Clone ID: MRT4577_173040C.1
tcttctgctttgagtctggggggtgtgcagtcaaacttttcggaattgcagctaagtaatggggaaaaccaaggtgcgagtggtacgggtcttgggtctttgattaacccaatgctcaaggtcttggatgagatgtataaagctcaagacgaccttgctagggacatccgtcagcatgataatagcaaacaagaatggagtgatgatgaactcaagaaactttatgaaacccatgagaggcttcttgatttcgtttgtttattctgtttcgttccaaggattaaatacttgcctttaggccctaccagtgccaagctaattgagatctaccgcaatcggcataacattagtgcatctgtcggtctaagtgaccctgctgttgctaccggaatatctgacctcatgtatgagtcgaaagaagtacataaggagaccagtactatgcaatccggaattgaccctgatctagctatggcctgggcagcgggtttggaagatgatgcctgggcaaacgatgccccaggtgtggacaaagtcaaggatttcctttctggtgctggaactgatgctcctgatgtggatgacgaggaatacatgaattctaggccatcagtcggttatgatgatatgtgggccaagacaattcttgaagaggaagatgatgggaggtcttctggcgggtcctccctgactcgactggttcctgtggagacgtccatatggtccccatttcggtggcatgaactatccggtctttgtttagttcaaaaccaccaagctatggggcttcacacaaacgatacgtgaaagaccaccatcatattcaacatct

SEQ ID NO: 80065 - DNA, 478 bp, Zea mays
  Clone ID: MRT4577_173041C.1
aatccgccccgacacttcgtcttcggccagtccggcgccggcaacaactgggccaagggccactacaccgagggcgccgagctcatcgactccgtcctcgacgtcgtccgcaaggaggccgagaactgcgactgcctgcaaggattccaagtctgccactctctgggaggaggaactggttctggtatgggtacactgctcatctccaagatcagggaggagtacccagataggatgatgttgacattctcagtctttccatcaccaaaggtgtccgacactgtggtggaaccttacaatgctacactttctgtacaccaacttgttgagaacgctgatgagtgcatggtacttgacaatgaggctctctatgacatctgcttccgcactctgaagcttgctacacccacatttggtgatctgaaccatcttatatctgcaactatgagtggtgtcacttgctgcctccgcttccccg

SEQ ID NO: 80066 - DNA, 1282 bp, Zea mays
  Clone ID: MRT4577_173042C.1
cggaggttcagtataattcgcgcggcgtcgcctgccgaaccccgaaccttctcgaggtcgaggcccctcccctttcgccaggagaaaacaatgagcaggcgcaacagccgtaccatctatgtaggcaatctccctggggacatccgtgagagggaggttgaggatctcttctacaagtatggccgtattttggatattgacttgaaaatacctccgagacctcctggatacgcattcgttgagtttgaggatccacgtgatgctgatgatgcaatttatggccgtgatgggtataactttgatggctacaggttgagggttgaattagctcatggtggcagaggccagtcttattcttatgatcgttcaagcagctatagcagtgcatgccgtggaggtgtttctaggcgctctgatttccgtgttatggtcactggtttaccctcatcggcatcgtggcaagatctgaaggaccacatgcggcgcgctggtgatgtctgtttctctgatgtataccgtgaggctggagaaactattggaattgtggattatacaaattatgacgatatgaaatacgcgattaggaagcttgatgactcacagttcaggaatgcattttcaagagcatatatcagggtgagggagtatgatgctagatcacgaagcagaagccgtagccactcgtactctagaagccccagctacagcaggagcaggagtccaaaatctgtttctcagtcaccctcatctgtggatgaaagatcgctatcaagatctcgatccccaatttcttctccttctcatgcaagatatgcgacaagccctaggagcagaagcgcatcccgttctcggtctcctgtgagatccgattgaactttgagagcccttgaagcagtgagcagccccagggagaagaaaggaacttgagagtatgccgtgccatcacaatggtccgagtgattatgctgttgccactgctccctcacatttaagaggtttcctcttatttagacggagcatttaattaacattatcttgctaaagagagacttatgcgtagtctacttgtgtactcgttcgtttgtcctcatgttcttggcttcaggaactctggttttttatcattgtacccatagtaaaacctagatgtagttggggtatgccgtatgcgtctatattcggttggtcgaatgtaaatctggatgcatatatgcatctgtttggtttcatttaggcctttccttggtttcgtgattaatgacaacataagcttattgctgtg

SEQ ID NO: 80067 - DNA, 403 bp, Zea mays
  Clone ID: MRT4577_173043C.1
acctggatcacagaggttgctcgcctgcccggcgggggttagcttgctcgccgggcgcgtccttcttcctcggctccgtgcattccgttccgccctccaccgtcgccggcggattcagggatggagatgaagaagatcgtctgcgccgtgctcgtcgccgcctcggcggccaccgaggcgctcgccgcggaggctccggctccggcccctaccagcggctgctccgccgttgagcccgccgtccgcgcccccctcggggccgtcgtcggctccttctctatctactacatttagagagccggccggggccgcccggaggctcgggagtgagacgaacgggatagagagtgacatggcctgccccattccgatgcgagggcatgttttttgatttgacacacct

SEQ ID NO: 80068 - DNA, 731 bp, Zea mays
  Clone ID: MRT4577_173044C.1
ccaaaatctgtttctcagtcaccctcatctgtggatgaaaggtttgcttttgtttttcctagatttggccatgcggcgatctgggggctgcattgatataatactggatgttttgagaatcggagtggatggtttgggacttcggatagtagagatggattgtgatgcatgtatgacaagtgggctacaatcagtcctaggagcaagataggctgacaagatatcgctatcaagatctcgatccccaatttcttctcatgcgatatgcgacaagccctaggagcagaagcgcatcccgttctcggtctcctgtgagatccgattgaactttgagagcccttgaagcagtgagcagccccagggagaagaaaggaacttgagagtatgccgtgccatcacaatggtccgagtgattatgctgttgccactgctccctcacatttaagaggtttcctcttatttagacggagcatttaattaacattatcttgctaaagagagacttatgcgtagtctacttgtgtactcgttcgtttgtcctcatgttcttggcttcaggaactctggttttttatcattgtacccatagtaaaacctagatgtagttggggtatgccgtatgcgtctatattcggttggtcgaatgtaaatctggatgcatatatgcatctgtttggtttcatttaggcctttccttggtttcgtgattaatgacaacataagcttattgc

SEQ ID NO: 80069 - DNA, 2632 bp, Zea mays
  Clone ID: MRT4577_173045C.1
ccggtcctaacacaaccctccgcctttaccgggcttgggaccggctatgtcgaaacgtctcaaggaagtcttccaatcaacataggcggaggttacacttctacagatacagcacattaacttaattatttcctactatctgatacactttcgtcaaacaacgaaatgcctttccagagctgagactgccttatacaaacttctacaaatacagcttaagttattaagtgtgtgctctaccctaaccttatagaacatgctgaaggtttggctcacaaacttctagataaatctttcaatgtcgtagcagggacgaataggtcgattagaaggttgcccaatagacagggtatataaagaggtgttaccagaactttccttctttcaaaacaatagttttgtcgccttttcctgtcgtttcagtcgtctacatagcatgccaaaacccctctgtttctttttcctcatggaaaagcttcagtccccttcttatttatcaacttcatacaacattaacccatagttatcatggcagcgcgtaggcgctgactaggcatccaagcggtcggcagtggatgccatgcctcgtcgcctcgcctgaacccagttaggcgatggtaagacatctcctagaagcccacctagctgttgaactaggctttaatgggtctgccttgtgcactatacgcccagtttcctcttctttcctctgctgccaccaccgttagagccgctagatcgctcacgccggctgcctgccgcgtgcctgtgccgcgcgcccgcgtggcctacacagtgcaccgcccacaagtcgcctacaccagcgttgctcgtgcgtcgtgccgcctgagctcgaccatggatgcttgctacttgctggatttatatttatttgctagtttttcatatatcatgtgatatatgactatatgttgcatttttgctgctggagaaaagggcgtcttggcagcacctaggcggttgtctagaacctaggcgtctaggtgaccggctggcgagaccgtggcgccatgataaccatgcattagcctagagctcttttttctgagttgtaacaacatattttcgtgttttatattttaaacgtagaaaaagactacagataaaattcaccccagattttaatgataataacaatatatttcaaaagatttttttctgttttttgttaaagcaagaggaaaaacaaagtaaggtgccagaattttaacttgatatactttggaacacctactaaaatcatctgtgttatgttatttttttgatgtattgatatctctttaaattagtataactttttgtgttgtactgatttctctttaaaatagtatgacataaatttgctctgtggttcaatgattaaacataccgagcttgttggctaacctccattgttcaaggtttgcttttgtttttcctagatttggccatgcggcgatctgggggctgcattgatataatactggatgttttgagaatcggagtggatggtttgggacttcggatagtagagatggattgtgatgcatgtatgacaagtgggctacaatcagtcctaggagcaagataggctgacagtaagaaaatgtgaagtaaagcttgtggtgttattaaaacaaatgtctactattaagttcaatgaccccatatagatggacagtaatttataggtttgtgtttttgtttaactaatgctgccaccttagtaaaaatttctatggcgccttttgcattttggctctctttagccatttccttgtcaaggttcacactagccgaagttgacattacaacaaaattcagtatacacattgctttgtttgcttatttgtattccagttatgagctaattacctgataggctgaaaatctatattatttttctgagagtattaccataaacaccaaaatgtgtccttacattgcagcttcgctcctgtttcagttcattcatatgccgtggaatgttgcctctttattcacatctcgagttgccagtttaatttttatcacaattttatatcagatattagagtgctactaacacatcattaagtaatggaatttgtttcttgtaccttctgcagatcgctatcaagatctcgatccccaatttcttctccttctcatgcaagatatgcgacaagccctaggagcagaagcgcatcccgttctcggtctcctgtgagatccgattgaactttgagagcccttgaagcagtgagcagccccagggagaagaaaggaacttgagagtatgccgtgccatcacaatggtccgagtgattatgctgttgccactgctccctcacatttaagaggtttcctcttatttagacggagcatttaattaacattatcttgctaaagagagacttatgcgtagtctacttgtgtactcgttcgtttgtcctcatgttcttggcttcaggaactctggttttttatcattgtacccatagtaaaacctagatgtagttggggtatgccgtatgcgtctatattcggttggtcgaatgtaaatctggatgcatatatgcatctgtttggtttcatttaggcctttccttggtttcgtgattaatgacaacataagcttattgctgtgatc

SEQ ID NO: 80070 - DNA, 195 bp, Zea mays
  Clone ID: MRT4577_173046C.1
acctcgagccggcctacactctctctctctctctctcagtctcacggcagcgctatcgtatagccatggctcaccgccggcgacgtggccgcggtggtggacgaggaggcgtgcatgtacgcgatgcagctggcgtcgtcggccatcctgcccatgacgctgaataaccccatcatagctggtgcccatggacgg

SEQ ID NO: 80071 - DNA, 651 bp, Zea mays
  unsure (1)..(651): unsure at all n locations
  Clone ID: MRT4577_173047C.1
attgggacctcgaggccggccggaaaaaantnnnnnnnnnnnnnnaaaaaaaaaaaaaaaaaaaaaaaaaaaaaaaaaaaaaaaaaaaaaaaaaaaaaaaaaaaaaaaaaaaaaaaaaaaaaaaaaaaattggttttccttgatatccaaaaaaaagcctttttcctttttccagaagttcccccaaaccccccccttttgggggggccggctccttttcccatccaaagggggggggaatttggggggcaacttcctcccccacccgggggtttccaggccccgttttgtcgggggggggcctcctcccgcggggcaacgccgaacgggggtggttttttttcccgggggtggccccccgcccctttggggaaacccccaccctttttttccttggaaaaaataaaaaaaagggggggccgtttttgtttcaaaaaacgaaaaaaaaattttttccccccttccccccaaggataaaaggaaaaggggaaatttgttttgggaacccagggcccccccaaatggcacaagggttggggggaacccggcccaattaaaaaagcttagggtggggaaaaagttaaaaatggtttatgaggccgggaaattttttaacctggaaattcaggggcctaatcggcccaaacttct

SEQ ID NO: 80072 - DNA, 353 bp, Zea mays
  Clone ID: MRT4577_173048C.1
atccttctcactcatcattgggtggggctcttttttttgttgtggaaatcgtaatcctctgctaggacggcgcgacaggaacttccccggcgtcttctgtgactgcaccagaaacatagccgctagcgctggacgccggagctcgcaaaatgagggtcagcgcagcgaaacaaaactagcggcggacaggcacatcaaaacggacaggtagtgtatagaggtctaattggaccgactcgtccgagcgggcaaatcctagaggtcgtgctcgtgccggactgatacagctgccgtctgccggccgacgttgctcatttgcacacaggacacgagacggtctacagctcgagttc

SEQ ID NO: 80073 - DNA, 424 bp, Zea mays
  Clone ID: MRT4577_173049C.1
tgttcgggaaaaaaactctctcgatagcagcctctggcacttgttgggtaacggtcgggcaaaaatggtgaacgtcccgaagaccaagaaggccttctgcaagggctgcaagaagcacatgaccatgaaggttacccagtacaagactggcaaggcttctctctatgcccagggtaagaggcgttacgacaggaagcagtcgggtttcggtggtcagaccaagcccgtcttccacaagaaggctaagaccaccaagaagattgtgctcaggctgcagtgcgctgagtgcaagaccaccagcatgaagggccttaagcgttgcaagcacttcgagattggtggtgacaagaagaagggcaactaagcctcacgccccccggttgtcactagttagcaccgtctcttcaatgtaaccccgacgttg

SEQ ID NO: 80074 - DNA, 540 bp, Zea mays
  Clone ID: MRT4577_17304C.1
ctctcttctctcccccctccctgcgccgccgcctccgtccgttgtagcacaagcagcttgcgccgcctcctccgtcgtcccatccccaacagccgaagaaagcatggacacgcaggtgaagctcgcggttgtggtcaaggtgatgggccgcacggggtcgaggggtcaggtgacccaggtgagagtcaagttcctggatgaccagaaccgtctcatcatgaggaacgtcaagggacccgtccgtgagggggacatcctcaccctgctcgagtctgagcgggaggccaggaggctgcgctaagaaatttcttcctttatacctgtctgtcttcgggaagaagaatgctgtactgttgccttcttagtctactgctttcgttatttgcctagctatgtggaggtgtaatgagtcttgttctgttgcctaaattaaagtgcacttgatgttgtgagacttgatcattgttgcagacctcttggtaatatgaaccgtgaatcgtctatattagatcctagaaaaaaaaaaaaaaaaaggcccct

SEQ ID NO: 80075 - DNA, 348 bp, Zea mays
  unsure (1)..(348): unsure at all n locations
  Clone ID: MRT4577_173050C.1
ctccgngcngctcccgctccgccccagcgcatcgctggccgccacagcgtaccgcgacctcatcgatcaccttcagctttcaatcatggncgacgtcgatgtcnaatcggaggttgcgcgccggcnctccnaagnagaggacgttccgcaagnccagctaccgcggcgtcganctagatgcgcttntcgacatgtccacggacgacntcgtcnagctcttcncngcgcgcnccaggagnaggttccanaggggtctgaagangaagcccatggcgctcatnangaaactgcgcaangcgnaaaaggatgctnctgctggtgagaagntcgagctagtnaagacacatc

SEQ ID NO: 80076 - DNA, 772 bp, Zea mays
  Clone ID: MRT4577_173051C.1
cccacgcgtccgcccacgcgtccggaaaaagtttcgagaaagctgtaacgcactatgtgtacaaacctaagagatccacattgaaactctatgatttcatgtgtggttctcttaggtttctacacatagtgtctcacaactttctccaaacattctaaattttttatcacagactctacatatgatatcatgacatgtggacaagtttcatgattttctaagtttgtttgtattttataaattttttaaacagttggatggcaagttcacggccatgttgagtgagcatggtgctcgaagtttccggtccgctcctgaaatcggtcgtaacttgtgctatgtagcatggatatcatttttgcatgcacggtttttcaagtttcgagtgacctgcagttcaaatctgaattttccgaagaaattcaaataaacgaactaaatctaatagctattgaaaatactgttataattgtcccaaaatagtacatgtaggtgtacatagtgtaggaacatggcacaaaaagtttggttggaaaaaataaaaacaattaaaatttgatttgtcgagtgtccactgtagacactggacaaagaagtctttgccgagtgccagccgtgtgacactcagcataagttttctaaaaaaccctaaataaagactttgccgagtggctgtctgctgacactcggcaaagaagactttgcagcttgtcaaatatggggcactcggcaaagttaatattttaattttaaaaaaatctttgccgagtgc

SEQ ID NO: 80077 - DNA, 391 bp, Zea mays
  Clone ID: MRT4577_173052C.1
ttcggcatgtgctgctctccctatcacggtacctatttgatgatgaggcttgctacaattcatgcacactcgatcaaagattatggccaatacatcttgcttgcattgccaagaatgaggattcttgcaggacatgacgctgtcatgttaatgaacggatggcaacgccatgtggtgctggtcccgctgcatttttagatactgaggtacctttactctctctttgaaaaaccattatgaatctgacactgctcaaggtattcatattgctacttcattaccattatctgatttgaccttaactaggagaggttaggtggcaatgctgctccaactcccaagataactatgcaaatgccccatgtgcatacttgcctatctacctgtgggt

SEQ ID NO: 80078 - DNA, 294 bp, Zea mays
  Clone ID: MRT4577_173053C.1
attttagtcaaacttgagtactattttggtgttgccttgagaattcctcttatcctaatttagataacgtacattagaatattttgtaaaaaggttaatatgtaccacctcctttcagagatgggcactaaaacgcccaggaggatcaaccaagcctgctagcactaaacacgcctctgttggctcagaagaaagatcagcaactatcaaggcacttcatttggctgtcggtcctatgcctgtatcatctgcactaagatcaggacgtgaacaaagcattcagcataagtctac

SEQ ID NO: 80079 - DNA, 278 bp, Zea mays
  Clone ID: MRT4577_173054C.1
agcatactacgatacgggtatatccatgtccaggggccaacccaacaattcaaacagtattcagcccaaccaagtagtaactttatacaagaacctaaacaaaaagcagggggtccaataaccaattacaccgggtccctactaagggaacgtcaaaaagaacactggtggattccttcaacatgaaacgaccggggccggcctttaattagttgtaagggcccatgccaatgctggagcccccgtaggggggaccacccggggggttccgggacttg

SEQ ID NO: 80080 - DNA, 2679 bp, Zea mays
  Clone ID: MRT4577_173055C.1
cccgggtcgcccagcgtccgctctgtttctctctctctcgtggagacgactgggcgaccgccggcgccgacctacgccaggtgcccaagccttcgacgggaccatcgccgacgacgagcactcacgagctggatctgatctaattacagtcagaaatgtcttcagtcgggagcggcagtggcaccagggctgcgaatggtgcagctgccatcagtgctgccgcgacggcagcaggctcggccgacgccagattccacccccaactactacagcagcaggacagggtacatacactacacgacttgttgttccataggcggatgcaatcggacttgtgctttagctgcagcttttgccctgcatgctttagatatgtggacggcaggatcagtaccggaattttagtaggccttgagtccttgacgacctagattggccatttggcccagcctttgcttactcagtacgaattgtactgctctgcagtggttacagtttcaaactgggcatctttaccagcaataatttggcttcagtactatatatatgcttggttacttcgatccaataatttgttcagttcgattttgccgataatccttgctttatgataaaatattttttccatgtgaatacctttgatttttttgcgaaacactaacacttcttgtgttctattgcacgattgccttttatgcctatcgttatgtagtttttctccgcataatgatagtggattttttttttgtatacaaagtgtagtttactgtttctttaaaattctgttgtcatgcattttctttttatttctgcggtgacagctaagttatttgtttggacttacatgtgcttctctactctaaacagcaaagtagatgggctggctgcttttcaggcttatcatgtttcggatcgcagaagggcgggaaaagaattgttcctgcagcacgtacttctgatgggaatggatcaaatgctcgcggaaatggtctccagtctggtgccaattcaaaccaaaatatgcctatgaatttatctcttctggctccaccatcatcaccggcatccttctcaaactctgcacttccttcgactgctcaatcgccaaattgctttctgtctgtatccgcaaactctccttgtggcccaacgtctaatatgttcgccgttgggccatatgctaatgaacctcaacttgtctcaccacctgtcttctcaacttacacaactgagccatccacagcaccgttgaccccaccacctgagctggctcatgcaactacaccttcttctccagatgttccatatgctagatttctttcttcttctatgggtatcaaaactgccagcaaggatcacaacatgcctttcttatcaacaacctattctggtggttcaggactccagacatcttatccactttaccctgaaagcccctgtagcagcctcatctcaccggcttcagtaactccgaggactggtctatcttcacctatacctgagcaagaggttcctcctgcccattggaagacctctaggtctgcctgcgacacgccatatttcagggcttcgcccattcccgagcaagaaaccactgcacaatggaagacctctagatctgcttgtgacacaccgtatgccaggacctcaccaaccaatatatttgggctggattcatctacaccgagaaactatatgctagacaacaatttctttcggccagcggcatctgctcaattctacctggaccaggctcagcaggcattttcacataatggcgggagggtcagtgtatccagggagaagcaagatgccgatgaaattgaagcttacagggcttcatttgggtttagtgccgatgaaattgtccaatctcaatcttatgttggaataccggatgcagttgatgagtcattcagtatatcaccatttggaaacaatgctccagctactgagatctgcccattcagtgatctgcctaatgaggttcagaaggcggataaatcatgtgcctacgctaaagatgacacaagcccaaagaaatcagcaaaccagctctccactgattctccaaacaaagttctgcgtttggacgtgttcaaaggaacaaaaggaggtcatcagtctgaggacgagtgtatcaggaaagatggtcatcttttcagaaagacagcagatgaaatatccctaaaacccatagaagtaagaaagaaatcgcttcctggccattcttgctcggatgcagagatcgagtacaggaggacacggagtttaagggatgccaacggcgttctatcacggcgcagtgcattggcaagacagctgcactaatatggtactagtatgcagggtgatttcatagttcatgtagcctagtgtgcattggatccgagctgtcattagagtaatctgtagggcaaagagtagcctctaccgtatatgaggatcatattgccagattgtgctctagatatgtgattatgagcctgtactctgtttgaactccaagatcctctttgtaggcacactccaatcgtatgcaggagctgtgaaatggaatagcgttggtacattacaggagttcgtgtttcggtcttcctcttcctgatgatgtaacttgtgtttgaatcttgcagaatgctggtttggaatcataaaaaaaaaaaaaaaaaagcggcc

SEQ ID NO: 80081 - DNA, 426 bp, Zea mays
  Clone ID: MRT4577_173056C.1
ccctttttatacggtcctgcttttatgctgcgatgggggaggagacgcacctgagcgtgcaggagctgttggaataagtgtgcgcgctaccgacagagttagtgcggtctgagcatgaccaggctgatgcgaccacgtaccgctgtgacaccgtgccggacgctccagtgatcgacaggtgccatcccgggtctcagagcgcgcatggacgaagccgtcagggagtgggggcttgttccaggaggtcaaccacgttgtgccctcaacgggtgttgcggatctccagcgcgtcggtcgggcctttttcgtacttccgacggaagagaaggagcgctacgccatggaccctggcgtacggcaagatctagggctacggcaccgagctgcacagggaccttgagggcaagaagacgtgggacgactttt

SEQ ID NO: 80082 - DNA, 443 bp, Zea mays
  Clone ID: MRT4577_173057C.1
atatcgcatagtttttcgagatgccaagacatgatgcacttaaagctcttgaaatctacagaagggctggccaacaggtgactccagagttcacaagaggatgatcattaaagtatccgagactctaaaaggtcaagacactatgaacatgtactcttatttaggttattcgacacatttcaggctgggaatctatctgatttctacgagaattgccggggattagaacttgctaggaattttcagattcccactctgagggaggagagggcttgtactctgactagtcttcgctatgtgcactggattatgatatgacatcttttacatgagaaaattctcagccaccacaaacatttcttgctactatggaggactatgttaatgaagcttcacgcatggtccctgttcgagaacccctgatcatcgtatgagtactggaa

SEQ ID NO: 80083 - DNA, 900 bp, Zea mays
  Clone ID: MRT4577_173058C.1
cggacgcgtgggtttttcttctccgtttggcaccctcgaggccggccgggactctcactctccctttctctcgtggagacgactgggcgaccgccggcgccgacctacaccaggtgcccaggccttcgtcgggaccatcgccggcgacgaacacccaccagctggatctgatccaattacagtcagaaatgtcttcagttgggagaagcaatggcaccagggcggcgaatggtgcagctgccatcagtacttccacgacggaagcaggctcagccgacgccagatttcactcccaactactacatcaggacaggcaaagtagatgggctggctgcttttcaggcttatcatgtttcggatcgcagaagggcgggaaaagaattgttcctgcagcacgcacttctgatgggaatggatcaaatactcgtggaaatggtctccagtctggtgccaattcaaaccaaaatctgcctatgaatttatctcttctagctccaccatcatcaccagcatccttctcaaactctgcgcttccttcgactgctcaatcaccgaattgctttctgtctgtatctgcaaactctcctggtggtccaacgtccaatatgttcgctgttgggccatatgctaatgaacctcaacttgtctcaccacctgtcttctcaacttacacaactgagccatccactgcaccgttgaccccaccacctgagctggctcatgcaactacaccttcttctccagatgttccatatgctagatttctttcttcttctatgggtatcaaaactgccagcaaggatcacaacatgcctttcctatcaacaacctattctggtggttcaggactccagacatcttatccactttaccttgaagcccctgtagcagcctcatctc

SEQ ID NO: 80084 - DNA, 324 bp, Zea mays
  Clone ID: MRT4577_173059C.1
cccacgcgtgcggggacgactaatctagtttggagacagtttggcaagtaccacgggcaagcaaaaaggaagtagtggaccgtataggtacaggtattcatataatcttgtggaaagaggaaggtataagggagcgacagcaacaatcgtggtggtaaccggcataagatctggaaatagggtgtgtaatatttattgataataaaatgcggagggagagatgcctaacggatctacattaacgtatgttccttcaagtgaacagaacgaaacgactttcttatggtgatagattgacgggaatcaaacaggaatagctccttt

SEQ ID NO: 80085 - DNA, 312 bp, Zea mays
  Clone ID: MRT4577_17305C.1
agcacattcactacttcctggacgctgttgggcaatgttagaacaacacaggcctccgagacagagttgaatagcccttcgtttctaaccttcttcagccaagttactaaggttccaagcctgaagaccttcaagaaactggatgtctccgccatggctgtatacaaggtgaagcttgtcggtcctgaaggtgaagagcacgaggttgatgcttctgatgacgcctacatgcttgacgcggccgagactgccgcagtggatttgccatactcgtgccgggctgggtcttgctacatctgttgcggttaaaaa

SEQ ID NO: 80086 - DNA, 221 bp, Zea mays
  unsure (1)..(221): unsure at all n locations
  Clone ID: MRT4577_173060C.1
tataggggangctggtacccccgcaagtacccgtcccgaatttcccggtccaccccacccttccgctggttttcgttagaaaaggaaatcnattccggcaccttttaaactcttcgtgcctagaaaaatatangccgccnncccctcctcctcattcggtgaaaggtgcgcagttagtgttggtagatctcttgcctcactacactatcaccataatttgt

SEQ ID NO: 80087 - DNA, 336 bp, Zea mays
  unsure (1)..(336): unsure at all n locations
  Clone ID: MRT4577_173061C.1
gggcaaaagggggcatatttccagcaacaccatggggtaggttcacaacaaagggtacaaccgatttgatcggggggaccaccccggggcccccacacaaaaaaaattggctttccccgaccccaggagcctagggggggacacatcgggggcccttgcccacacctcatcaccggaccgggggggccgatttaagttgggcccccctccctcccgttctggcaagccccgggggtcccttcttggggggggggcgccacgggcttttccccgnncggggggttccccttgggcctggaggggggcgccggcccccccccgggctgggggggcccc

SEQ ID NO: 80088 - DNA, 221 bp, Zea mays
  Clone ID: MRT4577_173062C.1
ctgcatctccctcgctctcgtcgcctcgttcgcatcgcatccggcccgccccgccccgagcagagcgcagctcgatccggagctgggatggcggacgcgaacagcagcagcagcagcagcagcagccacagcaggcggcagctgcagccaccggcgtgtggaagacggtcaagccttcgttaaggcggcgctctggatgctgcgacctcgtcatcagctat

SEQ ID NO: 80089 - DNA, 345 bp, Zea mays
  Clone ID: MRT4577_173063C.1
gcgcggcgggcgcatggcggcgctgtcgtcctctaactgggcggggcggggcgggtcagtgcccagcaggagtcggatgcgcaggcatggtgcggcggcaagaggccaagagctgcgggtgcgggtggctagtgaaagtgtggcactagcggcgggcggcgggccatgatgcgtggacgtggtcgagtgtgatgcggtgcaccagggcacgcaccgccggcaccagcgctccactcagcctctcacgctagcgtacagcggttggtgcgctgatttattagggaatgccgacttcatttacttccatcccaccagtgcagtgaagggggcaccattttctggatc

SEQ ID NO: 80090 - DNA, 350 bp, Zea mays
  Clone ID: MRT4577_173064C.1
gaaccggagccagagccaaagccagagcctaagcctgatccaaaaccagagcctaagcctgagcctaaatttgagccaaggccagaacctgagcctgagccagagcctgagccgcagccggaacctgatccagagccagagccacagcctgagcctgagcatatgccagaagcagatctagagtgaaggcgtgagtctaagcaattatcgaagcgagagactaagatggcgtgtagacgcgtgctatggtcggagctagtactagaggcagagattatatctgaactaagacattattcggatgttgtgctattatatgatcttagtgcagtttagcttgttccgtgtat

SEQ ID NO: 80091 - DNA, 242 bp, Zea mays
  Clone ID: MRT4577_173065C.1
cgtggccacgcaggctagaagcagaacagttacagaagacccgtctaagcgcgcaaagcaacttgcccgttctcttcttcgccagcggcggctcacggatcactcagggacagctggtgacccaggcgcccccagcccagccccagcaacgctggacgcagctctccgctcacccgagcaccttctcttcccagacccgctggagatgccgctgcaccctgaagctgctccttacttctgtc

SEQ ID NO: 80092 - DNA, 665 bp, Zea mays
  Clone ID: MRT4577_173066C.1
tccggactcttctttggctctgattatactttttgaccacattctatcgtttcgaccccgattctccccattccttcgaccaactgaaatcaccactgagtagctcgcgaaggagcttacagccaccaagatggcgctctacggaagctcacgcaatgtcgacatgggcaaacaagagtctgagttggccgtcagcgttcgcaaagcgacaagtatcgatgaggtctcacccaaacgaaagcatgtgcgagcatgcattgtctacacctgggatcataagagctcggcttctttctggcaaggcatgaaagtgcagccaattctcgccgacgaggtacagacgttcaaggcgcttatcaccatccacaaagtccttcaggagggtcatcccatcgttctcaaggaggcgcagtcgcatactggctggctcgagagtttgtcgcgaggttctagcgttggcgagggcatgcgaggatatgcgccgctcatctcagaatacatttactacctcctggccaaacttgcgtttcacaggcaacacccagaattcaatggaactttcgagtacgaggagtacatcagcttgaaatccatcaacgaccctaacgagggttatgagaccatctccgacctcatgacccttcaggatcagatcgatgccttcc

SEQ ID NO: 80093 - DNA, 1081 bp, Zea mays
  Clone ID: MRT4577_173067C.1
cgcatgtacttcaaagcccaccacgagggccgattcctactgcgagttttgtgaattcggaggcgcagcgccaccaacttctaccagctcaccgccgagcggaacgaaactcggcgagtgagagcggaagcggcgccgagcaaccaacccctctcctcgtccgtcgccgtctccccggaccatggccatggccgcctcctcctcccggctgctctgggcgtcccgcgccgccgcctacctcaggatctccacattccccagggccttctccaccgtgatgaaggatctgaagtatgctgactctcatgaatgggtgaaagttgagggtgattcaacaaccgtggggattagtgaccatgcccagcgtgctttgggtgagcttgttgttgtggagctaccagaagttggcatcagtgtatcccagggaaagacctttggtgctgttgagagtgtgaaggcagccagcgatatctattcaccagtgtctggagaggtggttgaagtgaacgagaaactatgtgacttgcctggattggtgaatacaagtccatatgagaagggatggattatgaaggtcaagctcagcaattcaggtgagctcaattcgctcatggatgatgatacgtactcgaaagtgtgcgaagactcgaaagtgggcgaagacgacaaccattgaagaaatcaaagtgtcttctgaagaccagaacgtgtttttcaagctttatcactggttatggtctggagaccagctgtgacaaattggcaaggttcatcgcaaggaataaatgttaggatttgccaatcctacaagggcatgggaaatccaagtttgtgttgtcaatgacgtggtcatatttgatatttctttgtagttgtaatctcgtgaattccttcttttttcttaaaaaaggactctttttgattccttcctaaaaaaaaaaaaaaagggcggtccgcaccgcggtggaccatgtccatggccgcctcctcccggctgctctgggcgtcccgcgccgccgcctacctcaggatctccaccttccccagggccttcagcacggtggagaagcggacgcgtggg

SEQ ID NO: 80094 - DNA, 1101 bp, Zea mays
  Clone ID: MRT4577_173068C.1
aaaaaaaaaaattaaaaaaaaaaaaaaaaaaaaaaaaaaaaaaaaaaaaaaaaaaaaaaaattcgccgggacgaccgggagcgccgggaacttgcaccattttggcaaccccgcagggacaaaagaaaggcgaaacgaggccaccagctcaccgccgagcggaagcggcgccgagcaaccaacccctctcctcgtccgccgccgtctccccggaccatggccatggccgccgcctcctcccggctgctctgggcgtcccgcgccgccgcctacctcaggatctccaccttccccagggccttctccaccgtgctgaaggatctgaagtatgctgacactcatgaatgggtgaaagttgagggtgattcagcaaccgtggggattactgaccatgcccaggaccatttgggtgatgttgtttttgtggagctaccagaagttggcatcagtgtatcccagggaaagaactttggtgctgttgagagtgtgaaggcaaccagcgatatcaattcaccagtgtctggagaggtggttgaagtgaacgagaaactaagtgaggagcctggattggtgaatgcaagtccatatgagaagggatggattatcaaggtcaagctcagcaattcaggtgacctcaattcgctcatggatgatgataagtactcgaaattctgcgaggaagaagacggtcattgaagaaatcagagtgtcttctgaacaccaaggacctgtttttcaagctttatcagtgctttctggtctggacacctgctgtgacaaatttaaattggcaaggttcattgcatggaataaattagttaggatttgccctattctaccagggcttgggaaatctgagcttgtgttgtgagtggcgtggtcaagtttgattatctctttttagttgtaatctcgtgatttccttcttttttttaaaaaaatatttatccttttgaatccgtgctagtatgcaaatttttggtccttttaaaaaaaaagaaaaaaaaaaaaaaaaaagcggccttcagcactcgtaggaatttgcgccctaatatttcattcacttataagccatagcagaaaaggcttaatgataatatg

SEQ ID NO: 80095 - DNA, 427 bp, Zea mays
  Clone ID: MRT4577_173069C.1
ggggccggaaaacaacccccccgggggggggggggggaaaaaaaacgaggcaaaggcccccctgggtttttaaaaaaaaaggccccgggcaatttccttaaaaacccccaaaaagaggggagaaaaaccggcccccggggggggcgaaaacaaaaaaacttctaacctaaccccagggggggtacaaaaaaagggggggcccacccctttttattggaaaaaaatggggattaaccaccccctccttgaaaacaaaaaaggaaaaaaaaaggggctcacttggccctggcaaactgggggcggaaaaacttaaggggggaaaccattttggtaagggggggcttaacccccgggaacttgggggttttggggcccaaatcggggttcacccaagaggagggtggggcccaacccccccagaattttg

SEQ ID NO: 80096 - DNA, 811 bp, Zea mays
  Clone ID: MRT4577_17306C.1
gccggccgggctgcggtctcccgcaatcgtcgctctctcccgcaatccgcgcccagatcccgcgtccgcgacatcctccgccctggatcgccgcgccaggctctctccgcgtccgccctctccatggagttgtgcccccatgtgccctcgcgcgagcgacctctcccctggtgcaccgtgccccgcccgccctgctctccgtcgcgcccttccagggatcctccatcgcagctcccgccatcatcgcgcccgcgctccatcgatggaaggtgtcgcccctgccatcctcgccccgctccccgcgacacgcggcgccaggtactactccgccttctcgacctcggcctccgcggtgcccgcctggcctgctgcggtagccgttgccatgctcgaagcggatccagcaccccatcccaacatcttcctaaaatcctcggatccgcccccttcctccgcagcttgtgtcgcatcttctatctattcaccagcaaggtacctggcgcagaacccagtcgaatcctagaacccagccggatcctagaaatttcccattggcatttggtgaccgtatccgatggttgggcgtcagacgcagcggggcggtaccggtgcttggagttggaccacccgtgcaaggcaccatggtgcgacgggccgctcggcgcgctggagagcaacgggtgggtgtactcggcgcactgctccttcaagctctttgtggccgatgcgtcgtggcggtgccttgacgggaagtggctcttcttctggggcgactctaaccacgtggacaccatccggaacctgctcacct

SEQ ID NO: 80097 - DNA, 827 bp, Zea mays
  Clone ID: MRT4577_173070C.1
agcagcggagtgtcgctttaattatcgctcgtcaccccccaccattgcctcccagcatcacaagtgtccctcccccatcttcttcctccccgcaactcgctgctcctcccagaaccgaagctcagtcccgcggccacgcagaacaaaatgcagcgagcaattcaagctatcggatcacatggcagtgtgctcaaatctgctgtcctgcaacacatcagtgttgtgaagcctgctatgctgcctgctgtgttcccgcgcttcatgtcagtatcacctgctcaaatagaggagagtggatttgagagcagcaccgttgcagatattttgaagtccaaagggaagagtgctgatggatcatggctctggtgcaccactgatgacagtgtctatgatgctgtcaaatcgatgacacagcacaatgtgggagctttggtggttgttaaacctggggaagataaatcaattgcgggcatcgtcacagagagagattatctccggaaaatcatagtgcagggtcgatcctccaagtcaaccaaagttggagatatcatgaccgaagagaacaagctgatcacggtgaaacctgaaaccagagtcctgaaagcaatgcagctgatgacagacaagcgtatcaggcacatcccggtgataagcggcaccgagatgatggggatggtctccatcggcgacgtggtgcgcgcggtggtcagcgagcacaaggaggagctgaaccggctcaacgcctacatccagggtgggtactaggaccccgccgttttgcagggcgtccctttgaatgaactcgataacgacccaggtgatgatga

SEQ ID NO: 80098 - DNA, 321 bp, Zea mays
  Clone ID: MRT4577_173071C.1
gcgggtgtcgccggtgtccacaacgatggcggacgcaagggccaagcagttcaacacgccgcaactagataggtacaagtggctcaacactacttaggataagatcaagggctatcgactcccgtgtcacgcagcagttcaatggatgtaccaatatcgctaacatttaatatagctcttataaggatatcagctaatatcttcccaacaaggctaataagtgtaaacctgccaatatttctaatctcgagttcactatgattcacaacaggagatactgttcttgaatcgcatacaacgtgtccactaagaagcgcaagg

SEQ ID NO: 80099 - DNA, 686 bp, Zea mays
  Clone ID: MRT4577_173072C.1
ggcgattgggttcctcgaggccggccgggcttcacttgaagcccgagcaaggcgcgtgggacgggggtcgtggtgtgcgagcagcggttattcaggactttctccccaccacatcacaacacaaagacctaaatctagcggccgaccttccgtccgctatctgcgtccgcccctcgctcccgcgtcactcggagacttccgtgtcgtggtagttgacgactttgggccagccatagcaccatccgccgccatcatccgcttgtcatcgcatctgctcctctttggccacggagatgtggctgcaccgtcgtgtcatgtgttgcacaggcaccgtcggcgacatgggaagcaagaaggtggtggtgaaggcccaaacaaccgctttgactgtcactaggatctcaaacatgtagcattcagcttcttgaaatttgccacggtcatctaagccgcggtcgcccgaagttcctggcatagggggccttcatcgaccaacacctgactcgatggaactctactcgcaaggaaggaggattggagcctacacgatgtgagaggaaggagagaaacagttgggtaacaggcctacttttttgtttgtaattgaaagaaacgagtttaagtatttttttatatgtacggttactaattactagttcaacaaaaaaaaaaaaaaaaaagcggcc

SEQ ID NO: 80100 - DNA, 275 bp, Zea mays
  Clone ID: MRT4577_173073C.1
acacttcgctggtcctgggcgtcctggtgggcagtttcatcattgctggtgtggctgtaggcatcttcctgtgcacaggtggacggcgatgttaattactctccagccccctcagaaggggctggattgatggaggctggcaagggaaagtttcgctcactgtgaagccagactccccaactgaaacaccagaaggtttggagtgacagctcctttcttctcccacatctgcccactgaagatttgagggaggggagatggactggagaggtgga

SEQ ID NO: 80101 - DNA, 226 bp, Zea mays
  Clone ID: MRT4577_173074C.1
ggcccaaacacaaacaaggggggccttattttattcaaataaaaaattaacctacaagagagaaaagacaagttcccgcaggaaaactaaataccccccggggtagtcaacaccgggcatgccctccgttgagcagctcatcaattgttggaaaatttgcccccaattttaaaccactccgggggaaaaaaaccaagcctttccaccctctcgtaggggggagccc

SEQ ID NO: 80102 - DNA, 334 bp, Zea mays
  Clone ID: MRT4577_173075C.1
cttttgttgtgcaggaaatcagagcaggaactgcaaaacctacttggagccacctacgctgctgttttcttccttggatctgcaaacttgctctcatctgtacctgttttttctatcgaaaggacagtcttctaccgtgaaaaggctgctgggatgttctctccgctgtcctattcgtttgcggtggtaatttctagataccttatcgtgtgttagtagttattttgtcacagttgtttttgaacccttgcagacacaaaatctctactaacgcttctctgttgaaacctattggtgtgtgcagacagttgtggagcttgtctacagcatagct

SEQ ID NO: 80103 - DNA, 312 bp, Zea mays
  Clone ID: MRT4577_173076C.1
cacacacaccgatcaggtagctgtcactgtagcacgatcgtactaaaaccagcggcaccaatagatcgacgacacgcgcgcgatccaggtgaggagcgaaagacacggtggccttttcgaatccgacggacggcgcgtagcgctagctagctctctaggcctgagaggaggatcgtgggacgaggatcatatacggacttctagtgcactgctgtcacagtggtagctacggtggcttcgctgcctcagcagttgaatgtgctgatctacgacacgctgtgctcgacggtcgcgatcatggcacacgatgat

SEQ ID NO: 80104 - DNA, 436 bp, Zea mays
  unsure (1)..(436): unsure at all n locations
  Clone ID: MRT4577_173077C.1
gcagaacgaaagagatctccggtccccgggccccggctcctcccctcccgattccaatctggtctcgccggacgccgggcctggcggcgagggagagatggggaagaaccaggcgtacaaggcgatgcagcgggcgcggctggggtcctcgtccggcgcgccgggcgccgtcgacgcccccgaagacggcatgagtggcatgcggcgcgcctggccagccttaacaagacgcacaccctcacctgggaggagttcaagaagaagcagaaggaagaggaactgaaaaggggcgagctggaggctgacaaagacaaaatgatgagagagtatagagctcaactggatgctgaaagagctcaaaagctagcaaacggaagaaatcactcaaggtcatactcataatcatcatcttccaagaaagaganggaggataagg

SEQ ID NO: 80105 - DNA, 546 bp, Zea mays
  Clone ID: MRT4577_173078C.1
gtggattcctgggacgagttcgtggagcggtccgtgcagctcttccgcgccgaccccaacaccacccgctacgtgatgaagtatcggcactgcgaggggaagctcgtgctcaaggtcactgatgaccgcgaggtgggcccaatcactcgggagacaagagagctcaggtgcacaacgagacagtaggtagggaactgtagcatctcgttatccgtgtcccatccgtgtacagtgtaggggtatttataggtaactgggaggggcggtgtgtccccaagtactgttgtacccctggttacctactacattaccggaatattccctacacgggatcattacagtggggtgaagtacaataatttagacaaactacgaaatctaccccgcaagggggcttacaagtaggccctgatggtgacggggcagatcctgggtcccatcgtaatctgatgtggccttcgcctctgtgtagcagccttgactccacgaagtcacgtccttgacttcgtcaggacttgggacttcactgtctgggaaagacctttg

SEQ ID NO: 80106 - DNA, 1084 bp, Zea mays
  Clone ID: MRT4577_173079C.1
gaaagggatctccggtccccaggccccggctcctccccttccgattccaatctggtctcgccgggcctggcggcgagggagagatggggaagaaccaggcgtacaaggcgatgcagcgggcgcggttggggtcctcgtccggcgcgccgggcgccgccgacgcccccgaagacggcatggcttccagccgctgaggaattttggctaccatcccactttcgctttgggtgaaagataaagaaaaagaactttggctaacgagggccgtcgcagacggacggttcattccattctccagagtggcatgcggcgcgcctggccagccttaacaagacgcacaccctcacctgggaggagttcaagaagaagcagaaggaagaggaactgaaaaggggcgagctggaggctgacaaagacaaaatgatgagagagtatagagctcaactggatgctgaaagagctcaaaagctagcaaacggaagaaatcactcaaggtcaaactcaaaatcatcatcttccaagaaagagaggaaggataaggacgcaaagaaaagaagtaaaaagaggagaaagcacaaaagttcatcagagtcaagttccagctcatcttcagaatcttcaagcagcgacgatgaggataggggttcaaggaagtccagatcacggtcgagatcaaagagaacaaggaaggaaaagaagagccggtcaaggtccaagcgcagaggcagtgaaagcgaggaggaaggcccggtacgcctctctaaattcttcgggaagtaaggagtagacgctgctgtacccaagacgcctttttcattttgaaacgtagattggtgggtttggatgtatcattcaacacaaattacttctgaaggttgagcgagccgtttaccatggtgttctcaatataatgctcagctgttaagagggtctggtcaagttgtgtggcttccaaaaactttgtaagcaactggtaagtcattgttaaatcgctgtaccttggaggatttgatgccatatatttgagacattgaactgctatatttatgttaagactttacatatgcagtcagttgtttcagtt

SEQ ID NO: 80107 - DNA, 368 bp, Zea mays
  Clone ID: MRT4577_17307C.1
gtcggtcgttatcagccgcagctaatgtggatggcgggggggttaacattgaaggcacatttgatgcgcatgcggaggggcatgggacaggttcaggtgccactgaaggcagtgcacggagggggttcaacaatggccgattcagaagggatggaggctagcggatgccaaagatagtggtctataattagctgccagagccaactacaagggagcttcccaggaatgaggacccgaatttggtgagaagaaataagatgatgctggggcaggtctttgacggttcattatagaaattacaacaagaagataaaaaactgtctaatctcgaggattttctgcggagatcagagactcactgaaaggct

SEQ ID NO: 80108 - DNA, 829 bp, Zea mays
  Clone ID: MRT4577_173080C.1
aagggatctccggtccccgggccccggctcctcccctcccgattccaatctggtctcaccgggcctggcggcgagggagagatggggaagaaccaggcgtacaaggcgatgcagcgggcgcggctggggtcctcgtccggcgcgccgggcgccgccgacgcccccgaagacggcatggaagaggaactgaaaaggggtgagctggaggctgacaaagacaaaatgatgagagagtatagagctcaactggatgctgaaagagctcaaaagctagcaaacggaagaaatcactcaaggtcaaactcaaaatcatcatcttccaagaaagagaggaaggataaggacgcaaagaaaagaagtaaaaagaggagaaagcacaaaagttcatcagagtcaagttccagctcatcttcagaatcttcaagcagcgacgatgaggataggggttcaaggaagtccagatcacggtcgagatcaaagagaacaaggaaggaaaagaagagccggtcaaggtccaagcgcagaggcagtgaaagcgaggaggaaggcccggtacgcctctctaaattcttcgggaagtaaggagtagacgctgctgtacccaagacgcctttttcattttgaaacgtagattggtgggtttggatgtatcattcaacacaaattacttctaaaggttgagcgagccgtttaccatggtgttctcaatatgatgctcagctgttaagagggtctggtcaagttgtgtagcttccaaaaactttgtaagcaactggtaagtcattgttaaatcgctgtaccttggaggatttgatgccatatatttgag

SEQ ID NO: 80109 - DNA, 593 bp, Zea mays
  unsure (1)..(593): unsure at all n locations
  Clone ID: MRT4577_173081C.1
nnctcgaggtccggcccgggcgtcacacaccacccagccccttaagcatgattcatctagccatctagcgcatccacagacctccatcttctgctccgacagaccatgagcttaactaacctggcggactccaaggccacctcaacacgcaccctcctgacttgcaagttcatgaccaaccaggatgctgacccggagacactcaaggccagagggtatgcacacatggcgcgcctgcgcgtccaatgcggagtgacaggagaggattgccataatcgacgacgtgaatgaccccaactccatgttcatattcaagatatggactcactttatataaggcaagcgctctgtcttttgcctgatctacaattacctatagattgtcatacaagttaaagaccacatacctgctgattaagaaaggtcttgatactaactatgaaaagtccggctagctaatgatagtgcggaagaacagggccaagcacgatccgccgttgtgatagaagaccataggctgctgacgcgcaagaataagtaaacagctcatttatatttatgtattactgtcctgaactctggaaggtcgtata

SEQ ID NO: 80110 - DNA, 853 bp, Zea mays
  Clone ID: MRT4577_173082C.1
cccacgcgtccgcccacgcgttctcggacgcgtggggtctcgctgggcctggccgctggcggcaagggagagatggggaagaaccaggcgtataaggcgatgcagcgggcgaggctggggtcctcgtccggcgcacctggcgccgccgacgcccccgaagacggcatgacggacggttcatttcattctccagagtggcatgcggcgcgcctggccagccttaacaagacgcacaccgtcacctgggaggagttcaaaaagaagcagaaggaagaggaattgaaaaggggtgagctggaggctgacaaagataaaatgatgagagagtatagagctcaactggatgctgaaagagctcagaagctagcaaatggaagaaatcactggtccaactcaaagtcatcatattccaagaaagaagttcatcagagtcaagttccagcttatcgtcagaatcttccagcagcgatgatgaggataggggttcaaggaagtccagatcacgatctagttcgaagagaacaaagcaggaaaagaagcaccgatcaaggtccaagcacagagacagtgaaagtgaggaaggtccagttcgcctctctaaattcttcgggaagtaaggagtagatactgtacccaatacgccttttcattttgaaccgtagattggtgggtttggatgtaatattcaatacagattatttctgaaggttgatggaatcagttaccatgttctcaatagaatgctcaacagttaagagggtctggttaagttgtgtggcttcctaaaactttgtaaggaattggtaagtcattgttagattgctgtaccttagaggatttgatgtctatattt

SEQ ID NO: 80111 - DNA, 455 bp, Zea mays
  Clone ID: MRT4577_173083C.1
ggacaaaaattgtacccatggatttcaattgcacattcagggcaatgcacacactgacactgccacccaagggcaagcgagaaacagtataactcaaacatcgacgctaaaaaactcaactagccagctagccagcggtaagactacaagagagggttccccaagggggggacacgggggaaacaccgtaggggtatggaataagatgctgaggacggaaaacgttggcagttgctgagaaagctgcccgccaaaagccccgggacctggaagcttgggagaatgcgggaggactggactgggggaccaggcccaaaatcgcctggaaccggtgctggggatccaactgccagagctactggaaacactgctgccgaaacgactggaactgaggcgagcagtaaggcgtcggggtagggctaaactgaagcctcagaaactcgacgcagtggccc

SEQ ID NO: 80112 - DNA, 351 bp, Zea mays
  Clone ID: MRT4577_173084C.1
ttggtcatcgggacatgaaacctgagaacttcctattcaaatcaaaaaaggaggactcgccccttaaggctacagattttggtctttcagacttcataaaaccagggaggcaattccgtgacattgtcggaagtgcctactacgtagcaccagaagtactcaaacgcaggtcagggccagaatctgatgtttggagtataggtgttataacctatattttgctgagtggaagacgaccattctgggacaaaacagaagatgggatatttaaagagcacatgattgggtgagagaaggaggaaaggcatctgaaatacccttggatatatcagcattacataatatgcggca

SEQ ID NO: 80113 - DNA, 415 bp, Zea mays
  Clone ID: MRT4577_173085C.1
gaagccttaaaatatatatagcagttcgatttatcaaatatttcaaatatagacatcaaatcctctaaggtacagcaatctaacaatgacttaccaattccttacaaagttttaggaagccacacaacttaaccagaccctcttactgttggagcattctattgagaacatggtaactgattccatcaaccttcgggaagtaaggagtagatactgtacccaatacgccttttcattttgaaccgtagattggtgggtttggatgtaatattcaatacagattatttctgaaggttgatggaatcagttaccatgttctcaatagaatgctcaacagttaagagggtctggttaagttgtgtggcttcctaaaactttgtaaggaattggtaagtcattgttagattgctgtacc

SEQ ID NO: 80114 - DNA, 2473 bp, Zea mays
  Clone ID: MRT4577_173086C.1
gctgggaacaaaccaaacatagtattgcaatagcaagaatacagtgctcgttttcaaggaacaactacggattacctccattcatgtgtattattgattgtctaatttacatggaaaagcctttctccaatcacatgtgctgctgctctctagttcagttatgtgaactacaaaaaacagaaaactatgacttgcgaacacccctaggagtttgtacattgcgtgcgctcatgcttgcagtcttcaagagccggcgaaattcatctaggcttatcttgccatctttgtcaatgtcagcctcctccaggaggggatcaatagaacccttcattcctgtatgcattctaagttcatcaggtgtgatgtagccatctctgtcaacatcaattttatcaaatgcagcttgagacaatgatttccacttctcagtatcatgttccaccagctgatgcacgtgtagtgttgcagcaacaaactcctcaaaatcaactagcccatctgtattactgtcaatcgcttcaatgatctctaaaacacgtggaccctttaatctccatggaacatcctttgcaagagcctgcttcagttcctcaagactaatcgttccatttttgtcaacatcaatggcattgaattgatcacgaagatcagacatctcttctgagtttaatgtagatgctaatgcccttaaagcaaattgcttgaaacgactgtatttcacaaactgacgcatattatgtaatactgatatatccaagggtatttcagatgcctttcctccttctctcacccaatcatgtgataatgcctgtgcagcagttagtcttgcacggggatccttaactagtaatttttgtacaaaatcttttgcactcgaagtaatgtttgaccaaggcttgcggcggaaatctggcttcttttttaagacctctttaaatatcccatcttctgttttgtcccagaatggtcgtcttccacacagcaaaatataggttataacacctatactccaaacatcggattctggccctgacctgcgtttgagtacttctggtgctacgtagtaggcacttccaacaatgtcacggaattgcctccctggttttatgaagtctgaaagaccaaaatctgtagccttaaggggcgagtcctccttttttgatttgaataggaagttctcaggtttcatgtcccgatgaaccaaaccatgcaggtggcactcagctgcaaccttgagcatctgtcggacaactactgcagcatctttctcgctgtaacgactatctttcttggctaatatccgatcaagtagctcgccaccctcacataattccatgactatataaacatagttgtcatcttcgaatgcattgtaaaagtgtacaacattttcgtgcccttgtaatgcctttaagattttaacttctctctttacgtcttcaacagcaacaggaaggaccatcttattcttgtcgatgcgcttgacggcgacgcgctcgggaacgaaagggatctccggtccccaggccccggctcctccccttccgattccaatctggtctcgccgggcctggcggcgagggagagatggggaagaaccaggcgtacaaggcgatgcagcgggcgcggttggggtcctcgtccggcgcgccgggcgccgccgacgcccccgaagacggcatgacggacggttcattccattctccagagtggcatgcggcgcgcctggccagccttaacaagacgcacaccctcacctgggaggagttcaagaagaagcagaaggaagaggaactgaaaaggggcgagctggaggctgacaaagacaaaatgatgagagagtatagagctcaactggatgctgaaagagctcaaaagctagcaaacggaagaaatcactcaaggtcaaactcaaaatcatcatcttccaagaaagagaggaaggataaggacgcaaagaaaagaagtaaaaagaggagaaagcacaaaagttcatcagagtcaagttccagctcatcttcagaatcttcaagcagcgacgatgaggataggggttcaaggaagtccagatcacggtcgagatcaaagagaacaaggaaggaaaagaagagccggtcaaggtccaagcgcagaggcagtgaaagcgaggaggaaggcccggtacgcctctctaaattcttcgggaagtaaggagtagacgccgctgtacccaagacgcctttttcattttgaaacgtagattggtgggtttggatgtatcattcaacacaaattacttctgaaggttgagcgagccgtttaccatggtgttctcaatatgatgctcagctgttaagagggtctggtcaagttgtgtggcttctaaaaactttgtaagcaactggtaagtcattgttaaatcgctgtaccttggaggatttgatgccatatatttgagacattgaactgctatatttatgttaagactttacat

SEQ ID NO: 80115 - DNA, 241 bp, Zea mays
  unsure (1)..(241): unsure at all n locations
  Clone ID: MRT4577_173087C.1
atataaaaaatactgttaatatatgaagaggccactagcgccacctatcagaaagacttgccctaaaccggtaaaccctcatgctgtccctagctagaaatctgtcatatccccagggctactttgatcttctgttgcaaccgggggcggngccacctatattccttattgacatactcacgaggggtacccaaatagaatcgactcccctttgctaactgtaatgtgtaccatgttttaa

SEQ ID NO: 80116 - DNA, 266 bp, Zea mays
  Clone ID: MRT4577_173088C.1
gcgagtcttggtgtccacgctcggtgtgctgctggctgctagcagtagagcagtagaggagagagcgtctacctagcgccgtgggacggatcggagctacctcaccgccgaccgcgcgcaaagaggtgggtggctcgtgctggtacgctgggtggtggagccgcggtcgtcgtcgctgatcgtcgtctgctgctgctgctcttcggaggcgcgcagccacagcgccaactcgaggcagccggcgctggcacccggcgtgtccttgg

SEQ ID NO: 80117 - DNA, 502 bp, Zea mays
  Clone ID: MRT4577_173089C.1
ctgtgcggcgctcgaggcggccgggtcgggtaacgtgataccatttgaacgccgagcgatcgagcacgttagagggtagaaccgtaggagtaatggcaacccgccgccgacaagccacagcggccgccactctcgcgctcctcctcctcctctcggtctcggccgcgtcgccgtcgtcctcgccgccggctctgctgacggcggcggcgacgtcgcgcaaggtgctgcactggaagcagctgggctaccccgccaccagactgttctgcccctgggacgcggtcaagttcggggcctgcgtcggcctgctgggcgccgcggggctgcagggcggcgcgcagctcgggagcaagtgctgcgacgtcgtgcaggggctcgcggcggccgaggtgggcgcctgcttctgcaccaccgtcaaggaggccgtgctgggcgtccccacggagtgggacgtcggcgttcgccgtcctcgccagcgcctgacagacggtgctgcccgacg

SEQ ID NO: 80118 - DNA, 337 bp, Zea mays
  Clone ID: MRT4577_17308C.1
atatagcggggcccttttaaacttcattggggatgtaagattcaaaatgcatactttggaaaaactcatgaatttacactgtgatgaggagactctttaacaggactgttactagggtaaccctacatttatgggaatgtaacataacatacttggtgttttttgtcattcactacgaggaaaacaagcctttaattttgcagagtcagggcccattaactgcggcctgtggaaaaacctatttatggaaaattgccttccaccgcttaagctgttccgttagaccccatcctcttgaattgccacgaagaaggtcccagaccttacgcgttccata

SEQ ID NO: 80119 - DNA, 446 bp, Zea mays
  Clone ID: MRT4577_173090C.1
agcagtggtaacaacgcagagtacttttttttttttttttttttttttttttgaacttcgcataagagtaccatacgccgccaaatgtggagaacaccagtccagacacattaaaagcatgaacttagacacctcccaacagaacagaaaccgagggtagtggatccgacaccctggagaactcctactatagacgtaggcaagagcagagttcacaatgcgggcaccaaaacaagggaggaccctaggcctgtgaccacaaggttaagggcagaaccatgcaaagatccataaacactaccctgccgatcgggggtacaagtacaggggacgaaccagcgtatatggcgcagggagcgaaatacaagctcgtcagtaatcacagcagcatctatggaatcgggaagatctcgcttgttggtaaaaacaagcagcacagcattacg

SEQ ID NO: 80120 - DNA, 309 bp, Zea mays
  Clone ID: MRT4577_173091C.1
atatgagtaggaattatacgatatcttattaggcctatcctgaagccaacggaaatgagatcggaattcctcggggaattccaactacacattttcaagaaataaggaggcaaaaatgttcatatatgaatcggaattatttgctttcttattatgcctatcctgaagccaaaggaaatgagatcggaattcctcgcagaattacaattacacattttcaagaaataaggacgcataaatgttcatatatgaatcgcaatcatttgatgtcttagtatgcctatcctgataccataggaaatgagatcg

SEQ ID NO: 80121 - DNA, 1150 bp, Zea mays
  Clone ID: MRT4577_173092C.1
ccaaagtttattgatgaactctttctaagtctctgcatcgtggcacaaacaagcagcacagttagaaatgcacggaatatgggaatgccacaaagttttgaagagttaatgcaagaaagtaatgatgagggatgtgctaacgtttactcatctggacctggtaatgtgtccaaagacagtgaagacgtccctcttcctgactcgcatgctttgctgcatgttaccaacagaagaaagccaaaggcaatgaaatcagatcaagagcaattcagggggagagctggtgaactattaataccccaggacccctgtgatgggaatgatgctctacgccacaaaaacactgtgccttgtgtagttagtagcttatcttctcgagaatctgaagccattcttgtcatcaaacaacttcaagatcagatcaagctgctggaggcagagaagagttctgttcaaactaatttggatgctgttcttgtgctggcaactcaacagaaggtttcatttaatgaggagtatgaagagcttcagcagatcactctagctgcagaagaacaagcaaaggttgctaatgagaacctgtccacactatctgctactgtaaaatccaaacaggaactagcatatgaattcctcggtaatttattgatggaaactcaaggaataaatgtggagatggatcagtggagaaactcggttgacagtgctctttcttttattgatgaactctttcagaatctctgcatcatggcacaaggcattcgtgaagtaaatcactctgctcatgaagatagtgcacggtcctgttctgtgatcagggactatgaaaaactatcaacctgtttgatggacaaagtttacaaacttgaattggagaagaaactattggaggaacagtcccaagaccaacaaaatgagatttataagctgaaggccaatctggaaagctgtgagaaggccatagatgactgtactcttcaacatgaattggagaaagatgccattcttttagagctcctaaacctccagaaagaagtatctatcttgtcatcatcttctttgatgaaagaaaaggaatctatccgaaaggaacttgatagaactaaatcaaagttaagagagacggaggacaaacttaagaattccattc

SEQ ID NO: 80122 - DNA, 430 bp, Zea mays
  unsure (1)..(430): unsure at all n locations
  Clone ID: MRT4577_173093C.1
accggaccggaatcaattcccgggccgacgatctccatagacggcggccgcccacaaaaaaagggggagggggtaaaataaaaaaacccacaccggcacacccaagcaaggaaaangggaaaagaaggcccaccaggcaggcaaacaagaaaagngaaccgaaagacaaccncacagaagccacagacgcaaggccaaaccaaccagccaagaacaagccgcaacgacaaaagagaaacgcaaggcgacccccggcacaagaaaacaacccacgagggcccgcagcaccaggggggcacgaacggcacaaaggcgaccacggcgccacaggacaccccgcgaacgaccaccnaaaacaccggcccagccaagggcaaacccgacaaaacgaagcccaaagggaagaacacccccaggcacgggcagaacc

SEQ ID NO: 80123 - DNA, 220 bp, Zea mays
  Clone ID: MRT4577_173094C.1
agtcagaatggcgtgttctgaacactgtttggggagactgtgcgactcgtgagatgcattttgtgtgcatgggtctggatcgtacaggactgtccagtgtcgaccgtgtgcgtgtgcgtgtgcgtgtgatgggtttatgtcgatttgtagcggtggtagcactaaaaattcgatattttagcctttttaacgggggctaaatgttatttaatatagagaa

SEQ ID NO: 80124 - DNA, 2764 bp, Zea mays
  unsure (1)..(2764): unsure at all n locations
  Clone ID: MRT4577_173095C.1
cccacgcgtccngagccttgaacaggnaaatcgatgctaagttggtaatggttgatgagctgcaggagaagtgcagttctataaattctgagaaagaagaagttgctgagaagctgtctattcatgagagaaagttagagcatttgacagaagaacactcaagaggtttggaactccgatctgtagttgaatctaggaatgaagaaattgagagtcaactgcgtgaagttcttgaaaaggtagcccaaaaagaagctgaagctacaggtttgacggccacgcgtccccaggccggcaggtgcggaagcgggcggccgtgacgctgcggtgcatgcaggcgctggtgcgggtgcaggcgcgcatcccggcgtgcagcatgcgcatctcgcccgagggcctggacgtgcaggagcggctcacgacaccccaccctgaaaggtgtgctccatccaacgcccgagatggcggtgagagaagctggctttgctcgaagctgagaatgaaaagttgactggtgtgaacgagacattaaaagacgaagtggatgctaagctggccatgtttgatgagcttcaggaacggattagctctactcatgctgagaaggaagaagttgcagagaaggtagctgttcatgagaggacaatctcacacctgacagaggaacacacaagaaccttggagctccattctgtagctgaatcaaagaacggagaaattgaagctcagctccgtgaggctcttgagacaatagcacagaaagaaggtgaagctaaagaattgtgtaagaagctggatgcccttgaaattgagttgggatattatgaggagcaggcaactgaagctgctgctgctgaagagaatcataaggttaaatttgatgaagcttcacagaagataaaaatcttggaggaacaacttgcagagacacagagcaagttggagcatttccttatagagaaggaaagcttgactcaaacaaatagtactttgaatgaggagttggaagtacatcagaacaagttgaacgatttacaacttgcacttgctgctgcagtagcagaaaaggaggaggcatctgaagagattcattcgctgcataaaacgctcgatggaatgatggagcacaaagcagaattagaaatacaggtatcttctactatacaagagcatgaagaactgaagagcaagtaccaaaatacaatggaagagaaacatgcgttgagtgataaatatgaaaccgcaaagaaagagctcgaggatgcaatagccaagttggaggaggaaatgaatgtagacaagtcagaaaaagagtctcacatctcaaaactggagcgacagattacattatctgagataaagtacatggaggagataaagaccatgcaagtggagacaactgaaaagaatgaagcactaacagccaagatgcagggtcacacagacctacagcatgagaaagatgagttggaacaacagttgctggaagtgaggaaggaattggatggaacctaccacaccatgccaaatcattaagaactggcttcctgtgagggagaccaggggggaggccttctgtatgtcctaatcggcgtgtttcttgggaagcggtactagcgctcaggtcgtgctgaaagggctcagccagcggcaagtttgaaaggattggtggccttgatggtaatggttcgacgacttactgggagaagggctcatcggcgtgtttctttttgccgtaattttcgcttttcgggttagggttcgggggcagtaggactttgatttttgatcattcatccaatttctgacacaggggttaacatcagctgatgcacactacaagcagaaggtgacagaagagagggacaaacttgttgaggtcaccaaagagttgagcgagttgacacaaaaagtaagcgagagtgttgaattggagaggaaggtgcaggaccttgagcagaagctgcagctagcttattccaagtgtgacgaacaggcagtggatactgtggagtcgagatcccgtgaattcagcctggattcatcaacgacttcaggcaagcagcaagacaaaactcaggctgtctcaccaaacccaaccctgcaaggagtgcaagaaccttccggcatcatggccttcaagttcatcctgggagttgccctgctgtctgtcctaatcggcgtgtttcttgggaagcggtactagcgctcaggtcgtgctgaaagggctcagccagcggcaagtttgaaaggattggtggccttgatggtaatggttcgacgactttctgggagaagggctcatcggcgtgtttctttttgccgtaattttcacttttcgggtaagggggggccaaggaatttgatttttgatcattcctaccctttcatgcaaatggccaactgcatgcgactggttttgcctacagcaagtttccgtatacatttcttgtccgtaaagatcacaagtccagcgacgaaacatgaagcatttgctactatatgtctgtctatatgctcgtatggagagagtgcaagttttgctaccttgtacagattccaccaatccagtgcttttgattattcagattatttacttttccagcaggcacttgcaaaaaaaaaaaaaaaaaaaaaaaaaaaaaaaaaaaaaaaaaaaaaaacgctcgatggaatgatcgagcacaaagcagaattagaaataaaggtagttacatgcttgtcaaattttcttcttaattgtagcttcaatatatgttctcat

SEQ ID NO: 80125 - DNA, 178 bp, Zea mays
  Clone ID: MRT4577_173096C.1
aaccgcacaccgcagcggcaagaaaccaccgatagcccaaccgcacaagcgggacagagagcagagatccagggacatccgccgggccccccgaagcaaccacgcaccccacggccgatctcgcctggcaccccgccgacgccgcctaaagctccctatgcccactcccccgcacaca

SEQ ID NO: 80126 - DNA, 1929 bp, Zea mays
  Clone ID: MRT4577_173097C.1
ggtccgcaattcccgggtcgacccacgcgtccgatgagtgttcaggcaactgaagctgctgctgctgaagaggatcataaggttaagtttgatgaagcttcacagaagataaaaatcttggaggaacaacttgcagagacacagagcaagttggagcatttccttatagagaaggaaagcttgactcaaacaaatagtactttgaatgaggagttggaattacatcagaacaagttgaacgatttacaacttgcacttgctgctgcagtagcagaaaaggaggaggcatctgaagagattcattcgcttcataaaacgctcgatggaatgatcgagcacaaagcagaattagaaatacaggtatcttctactatacaagagcacgaagaactgaagagcaagtaccaaaatacaatggaagagaaacagacgttgagtgataaatatgaaaccacaaagaaagagctcgaggatcgaatagccaagcgggaggaggaacggaaggtagacaagtcagaaaaagagtctcacatctcaaaactggagcgacagattacattatctgagataaagtacatggaggagataaagaccatgcaagtggagacaactgaaaagaatgaagcactaacagccaagatgcaggaacacacagacctacagcatgagaaagatgagttggaacaacagttgctggaagtgaggaaggaactggatggtgcctaccacaccatagcaaatcaggaagaacaggcttctgtgagggagataaagtgggacgcttttaggaagtacacggaggatcgtctggaagctgagcagcagcgtgctgaggagctggaactacaagtagcagctcttaaacaacagctccaagaagctgagatccattataagcaaaaggaagaacaagtttctctaagggaggttcaatgggaagcggatcaaaaccattcgctggatgagcttaacgctcagcgtcagtatgccacagacttggagaaacaaatcgaagatctgacacagaagttaacatcagctgatgcacactacaagcagaaggtgacagaagagagggacaaacttgttgaggtcaccaaagagttgagcgagttgacacaaaaagtaagcgagagtattgaattggagaggaaggtgcaggaccttgagcagaagctgcagctagcttattccaagtctgacgaacaggcagtggatactgtggagtcgagatcccgtgaattcagcctggattcatcaacgagttcaggcaagcagcaagacaaaactcaggctgtctcaccaaacccaaccctgcaaggagtgcaagaaccttccggcatcatggccttcaagttcatcctgggagttgccctgctgtctgtcctaatcggcgtgtttcttgggaagcggtactagcgctcaggtcgtgctgaaagggctcagccagcggcaagtttgaaaggattggtggccttgatggtaatggttcgacgacttcctgggagaagggctcatcggcgtgtttctttttgccgtaattttcacttttcgggtaagggtaggggggccaaggaatttgatttttgatcattcctaccctttcatgcaaatggccaactgcatgcgactggttttgcctacagcaagtttccgtatacatttcttgtccgtaaagatcacaagtccagcgacgaaacatgaagcatttgctactatatgtctgtctatatgctcgtatggagagagtgcaagttttgctaccttgtacagattccaccaatccagtgcttttgatgattcagattctttacttttgcacaaaacatcagggcacaacaactacaacaacttgtgctagcaaaccttgctgcctactttcagcaacagcaggtttttgcgtgtcaccaattagctgcattgaactct

SEQ ID NO: 80127 - DNA, 246 bp, Zea mays
  Clone ID: MRT4577_173098C.1
aaaaaaaaaaattagcccccaccggaaaaaaacaaggcccggcaaattgccaaaatgttcccacccagggttacccactccggaaaacctggaacgcaaacctttcccgggggacttaaaaaacccaacccatcagggaggccttacaggccccagatttaattaaaccccccccaacccagagagtgcggtttaaaaaaccccccccctaaaggagggccatattttaatccttgtttccaaccc

SEQ ID NO: 80128 - DNA, 374 bp, Zea mays
  Clone ID: MRT4577_173099C.1
aaaacccagggggcccttcgttaacaaaaaattttacaatccccaggggctgggaaaaacttttttttgccccaaggttttggcagccccaacccagaacccccaacgctccaaaaaagggccctttttgggaaccccaaagttgcccccccgataaaaaaccccagcccggatccctcggcagcggggaagccccccaaggcaataggggggttgccaaaccggttggccccaagggggtccaaacccttgacaacaatccccttgtggggacggaatcccccccttttttgcccccaagggggggccccaaaagccattttggctacacccttgggagggttttcccccccgacccttggatccacccattg

SEQ ID NO: 80129 - DNA, 275 bp, Zea mays
  Clone ID: MRT4577_17309C.1
attcggctcgagcgtaaggcgggcattttttttgatggagacgttattattgggggggggatgtttgtagagtatgggggggctctgccgaataacggaaggtccattcttggggactgcatgtacaagatcataaccgacgacggctttgaccccaacgggttcctgtagttggtggactctgttgagcgagcacaagatcgtggacctcaacgaccggatcgaggacttcgttggcatcaggcaccggaagatcagcaacaagctctactggg

SEQ ID NO: 80130 - DNA, 250 bp, Zea mays
  Clone ID: MRT4577_1730C.1
gttcttaagtatggtacgctcagggagactcgcgggaccgagaatgttgatgctccgtgaacctgaggcatcaaaacctggggcggactgctgcgcttaatggaggtcctgctgcatagccaccgtcaacctgcaacgcctcctgctgtgccaaaggctcgtgagtacataccgggtgcgtgcttatgcgacgctggaaaactgaacactaatacacacaaatcttcatgatggaagtgagaacgactaa

SEQ ID NO: 80131 - DNA, 623 bp, Zea mays
  unsure (1)..(623): unsure at all n locations
  Clone ID: MRT4577_173100C.1
agttcttcctctgaatatttaccttttcccttgtctgcttttcttgcaaaggagcgcggttattgcttagatggaatcatggaactcattgtcgatttagacccacaactagaattgctccacccaattagcagaagtacatgattactaggccaaattagtggaatgtgctcccgattgattctttacggtgaaatgagtgtgatttaaattgaaggtattggtagatgacgtatctaagctgttcagcctgttctcttcctacatggggctattttttaaatttgaggctgctgccattttccattgtagtaaagttttggtttctggacggaatgatacatcttgtattccatgattagattttctgttgagggtgggcttatgttgtgtttgatgttctcgaggcaatcctcagagtcttagcctcaatggtcaagggcttgcagttcctctccattttttgtaatatgttgcatacattgngtttattggagcatttgatgtttcagttgtgcactataaatttgatggtccttcttctcgaatgctatacaccaataacaaagcaacacaatcgttaatggataaggacccttcgtncttcgaaacattatttccct

SEQ ID NO: 80132 - DNA, 514 bp, Zea mays
  Clone ID: MRT4577_173101C.1
gttacgatcccaatgaaaggtttgacccccctgggcatagtacacacgcgaggccctggcatacagtttagacccccggaaaaagcaaatacggccggcaaaatcaaaggcggtggccatcatcgcaggactggggatcgtccggacgggcgaggcccgccctcacaggcgcgggggactacggggagcaccgggaagcacagggggcaggtgggggccaaagggagggtttacacggtggcttaggctgtgaccggggcctggacgaggaacgcaaccctggagaaatagggcaaacaggcggaacagagccaccccaccgtgacgaggcccctccacccgggggatgggggccggcccagggggtctaacggccccccggggggcaaagggcccaccagggccaaaccggtcctaaagggccagtcctcggggcatccgacaagaatcacctccgccaacaaggacaacctcagggtaaaggggacccaccagccgaaggggagacggcccc

SEQ ID NO: 80133 - DNA, 942 bp, Zea mays
  Clone ID: MRT4577_173102C.1
gaccctcgaggcctgccgggggaaaaatcccgccgcttggagctggccttctccctacgtttctctctctccctcatcttccttatctactacgcgcgccggattgaccgtatcacccaactcggctggtcgcggctctttctctggccgcgcgcgagctcctctgctgaacgctgctgttcggctccctgctgcgtctccctgccatggcgtgcccaggctccagctcgccctgcgctaagattccgtctccctctacgcatctctctctggtcgctcgctctcagtggagctcggtctccatctgcgtgcagccgtcgagctcccctgctcgctggtcgcccttccctctatccgcttgcgcgcagccgcgtccctgctctgctcgtcgggcgcgcaggtccttgctggtgctcagctccagtcgaccgcgcgcgctgctccctgcactcgcctggcgttcgcccctgccttcccatggccggaactcccagcgccgcggctacctttctctggtgcttggctagctcgccgtcgggctggctcaagccccatcgcggcactccagctcgcctagtctccgcgccgcgacactccctctggtccgcgcttccttcagctcggccatggcgagtccctcccgtctctgttctttccctgcttgcgtcgtgatctcccagctcctcaatacttgttcagtcgtctcggttcgctcggcctcaaattccagcgcctcgccgcctcgccctactctcgtggttcggcgacagccggcgcgagcctggccgtggcggtgttgtggtgtggggacgtcgtgcgcgtcgcgacagctgtcttggccgcgaagcagtccgcgccatagaattcgcccgaccgcgacattgctttacttctcgcgtcgttgctcgccaagtcctttctcagtccgcgccataaattcac

SEQ ID NO: 80134 - DNA, 375 bp, Zea mays
  Clone ID: MRT4577_173103C.1
gccgattttccccacctcgagcgccgccccccgcccgcgcccatggagagcacctgaggatacggtcagtgggctgtttctctgcgagagtcccacgagtccccacagaaacagcccgggggcatcagcgatcgattcggaacgccttggttcggtctgattgccggattggtggtttcgtctcggcctcggcttcctcaactagctagcttggaagccaagtctgggccttgcttcgtgtggattgcatctggggaggcggtagcgtgcacgggtgtgattctcggaccggcttcatgcgggacggcgcgccggctcctcgcgccggcgggggcttcttctcggcgcggtcgctctccaactgcatgaggatcg

SEQ ID NO: 80135 - DNA, 378 bp, Zea mays
  Clone ID: MRT4577_173104C.1
cttctatcagtaccatcaatcttctttcatcttagtagtataggcaccaaatgggatctgctacatcaattatgtaactccaaaaaccatgatgctggtgcttgtggttcttgctttcattgctttaatatcaagagtttcttgtacacagacaggcggctgctgctgtggtcaacatcattgccatgtgctgcttcatcatccacatcatcatcatcctctttatcatcttcatcttccacctccacttcatctcctgctgctgcttcaccaacaacaacatgttctcatgcttccactaaatacatctgcaacatcatgatgttcatgttcaacaacaacatcaactaccgctgctccttcttcttcttcttcttc

SEQ ID NO: 80136 - DNA, 404 bp, Zea mays
  Clone ID: MRT4577_173105C.1
aacctccgagctctccttctatcagcgaaaggtgttccgcgtcgctgagcacgctggggtcacgttcgccagcctgccgacgtcgcgtcctctcgcgcttcctctgcaatgagtgcatcaaccactccttcatctacgagacgccgctccccgtctccaggctcgctgacaagctgcaggcgtggctagacccggtgaacttgctgtcgggaaagtccagctactgtggtttctgtggcgagcctctgcagttcgtcctccaggtgttttctttgtgtgcaatgaagttgccacagtcgactgcttattgtttggatatcgacttggtcacagttaggcttggttgtgtttagatttatgcaccaactgaagataatgtagcagccttccaccgaacgcggttc

SEQ ID NO: 80137 - DNA, 325 bp, Zea mays
  Clone ID: MRT4577_173106C.1
cggtggaaagcataagacgcggggcaagaagcgaaaggatgagcttggccggcagcctggtgacaccaaactgtgtagcaataacacagtgaggaaggtccgcctccgttgatgcaacgtgaaaaggaaggctctcctactggatacacgttactactcctggggaagtggggctcttacccccaagatccacattctcgatgtggtctataatgcatcaaacaatgagcttgtgaaggctgagactcttgtgaagagcaccttgtacaagctgatgctggtcctctcaccagcggggcctcactcactatagagtggacatcgg

SEQ ID NO: 80138 - DNA, 213 bp, Zea mays
  Clone ID: MRT4577_173107C.1
cctaaaacaactcctttacttatgtctcatctctacgccaccaccccctaagcaggtggagctgcctttaaactccctatgtaatcataagacccataaccactttactacatcaaagcccatgattactactaatctctctcctcacacataatgactgcattcacatctaaaagattataacatacactccaacataacctttcattacaa

SEQ ID NO: 80139 - DNA, 1499 bp, Zea mays
  Clone ID: MRT4577_173108C.1
ttttcgagatctgcttcgctcgcccaaccgcgggggccaccgcctcccatggcaccgccggcgaggagcccgacagcggggcctcggcggcgcgccctcgtcgtcctcgccctcgccctcctcctgctgctgcccctgctgctgctcctccacctcatctcctcgccttcgcctcgacacctccccgcgccccgcacgccctcccagtctcaggcctgcgactactccgccggcgagtgggtgcgcgaccccttcgcgggctcctcgctccgctacgaccatacctgcaaggagatcttcaagggatggaactgcatcgccaatggcaagggtaacgcccgcgacttgctcagctggcggtggacgcccgcggggcccgggtgcgagctcccccgcctcgacccgcgccggttcctggagcgccacagggacaccagtatcggatttgtgggtgattcgttgaaccgcaacatgtttgcctcattagtctgcatgctcaggggagtcaatggtgaggttcgcaaatggcgtcctgctggggcagaccgtggcttcaccttcctacgctataacctcactgtggcataccacagaacaaatctcttggtacgctacggtggtcaaggaatccaaatggaggccctctagaatctcttggatataagcaaggttacagagttgatgtggatattcctgaccaaacatgggtagaggtggtgggcaccctcaaaatttgatccaatacggtcaccaatgctgttctttgagaaggggaggccaattgtacctcctttactgccaccggctggactggatctggctcttcaaaacatgatatccttcgcgaacaaagcaacaagaccaaacacagtgaaattcttccgcactcaatctcctagacatttcgaaggtggtgactggaatgaaggtggatcttgccaatgtaatcagcccttgtcgtcaaaagaggtggaagaaattttctctttggacaataacagcactaatgtagaagcacgcttggtaaaccaacacttggtgaaggctcttcaacagactagtttcagagttctggacatcactcgcatgagtgaattcagagctgatgcccacccttcaacaactggcgggaaaaaacacgatgattgcatgcattggtgtttgccaggaccaacggatacatggaacgatttgctagctttgagtctcgaggcacttgagagctagttgagagagctcaagagctcaccggagaaaatatccctaacttttttttcagggggaatatgagtatgaagcatgaatctactggtagaatagaattttgctgatagctggttttagggcttttgttgcagcttgtttcatataaaggccaggagcattttcccccacttgtttgaccctgtatgttttaatatcactgtagagttccactgacgaatgacgatatacgaatgctataatcggtcggatccattttcttgaccaccagatcc

SEQ ID NO: 80140 - DNA, 779 bp, Zea mays
  unsure (1)..(779): unsure at all n locations
  Clone ID: MRT4577_173109C.1
cattgggtacctcgaggccggccgggaccgcgcaatgcccgagatctgcttcgctcgcccaaccgcgcccgccaccgcctcccatggcaccgccggcgaggagcccgacagcggggcctcggcggcgcgccctcgtcgtcctcgccctcctcctgcttctgcccctgctgctgctcctccacctcacctcctcgccctcgcctcggcacctccccgcgccccgcacgccctcccagtctcaggcctgcgactactccgccggcgagtgggtgcgcgaccccttcgcgggctcctcgctccgctacgaccatacctgcaaggagatcttcaagggctggaactgcatcgccaatggcaagggtaacgcccgcgacttgctcagctggcggtggacgcccgcggggcctgggtgcgagctcccccgcctcgacccgcgccggttcctggagcgccacagggacaccagtatcggtaacttgtcaccccccgtttcgctgtctttgaaaaacacctcagaaatttgacatgcgatgcggcttggtggggacaatgtgctgtggtgtggtcgagtagttttcaaagcaaccgattcgggtgttagggttcccgggtatgtagaatgtgaccaggatgcgtcctgcaatggtcagcacgcgagtaatgtgngttggggatgggagtaaccttcgaaacattgatatgcatttattagttacttatacatctcaataaactaantttgcgtaggtgtatagaaaaaaaaaaaaaaaaaagcggcc

SEQ ID NO: 80141 - DNA, 352 bp, Zea mays
  unsure (1)..(352): unsure at all n locations
  Clone ID: MRT4577_17310C.1
ccttatgaacgacttttgagcagaaaacttacgctgtgctcccttgggaacgacttttgtgcagctttggatcatactttttggctctgcattcctttaggaacgacttttgagcagaaaacttacgctgcgctcccttaggaacaacttttttgcagcttcggatcatgatttttggctctgcattcctttaggaatgacttttgagcttcagaattttactccgctttcttagacatgtctttcaagcttcgtaaatccatgaggaagatatatttcactctgctgcaggcataattattacaaaaaattgaaattaagttcttcattacttgtttatcacttnnnaaaa

SEQ ID NO: 80142 - DNA, 289 bp, Zea mays
  unsure (1)..(289): unsure at all n locations
  Clone ID: MRT4577_173110C.1
caacaananggccgncacccncgaggggggggggccaaaagggcacnnngggacngnggnaggccagcnggagggacagaagacncnggagaaaacngcaacccnnaccangcnggnnnggcnnngaagganganggncnncggggggggggaccngngangcgnccaagaggnanggannngaaagaagggccacggggngcngcncncancgcaaaagnccaaggaaagaacgccggnancccggggcgcggaggcgccgccacgnccaaacccccacggaacgcac

SEQ ID NO: 80143 - DNA, 996 bp, Zea mays
  Clone ID: MRT4577_173111C.1
cagaccgtggcttcaccttcctacgctataacctcactgtggcataccacagaacaaatctcttggtacgctacggtaggtggtcaagggatccaaatggaggccctctagaatctcttggatataagcaaggttacagagttgatgtggatattcctgaccaaacatgggtagaggcatgtagcttccatgatgttcttattttcaacactgggcattggtggtgggcaccctcaaaatttgatccaatacggtcaccaatgctgttctttgagaaggggaggccaattgtacctcctttactgccaccggctggactggatttggctcttcaaaacatgatatccttcgcgaacaaagcaacaagaccaaacgcagtgaaattcttccgcactcaatctcctagacatttcgaaggtggtgactggaatgaaggtggatcttgccaacgtaatcagcccttgtcgtcaaaagaggtggaagaaattttctctttggacaataacagcactaatgtagaagcacgcttggtaaaccaacacttggtgaaggctcttcaacagtctagtttcagagttctggacatcactcgcatgagtgaattcagagctgatgctcacccttcaacaactggcgggaaaaaacacgatgattgcatgcattggtgtttgccaggaccaacggatacatggaacgatttgctagcattgagtctcgagtcacttgagagctagttgagagagctcaagagctcaccggagaaattatccctaactttttttttcagggggatatgagtatgaagcatgaatctactggtagaatagaattttgctgatagctggttttagggcttttgttgcagcttgtttcatataaagtggagcattttccccatttgtttgaccctgtatgttttaatgtcactgtagagttccactgactaatgacgatatactaatgctataatcggtcgaatccattttcttgaccaac

SEQ ID NO: 80144 - DNA, 773 bp, Zea mays
  Clone ID: MRT4577_173112C.1
gggcaccctcgaaattgatccatacgggcaccaatgctgttctttgagaaggggaggccaattgtgcctcctttactgccacctgctggactggatttggctcttcaaaacatgttaacgtttgcgaacaaagcaatgagaccaaacacagtgaaattcttccgcactcaatctgctagacatttcgaaggtggtgactggaatgaaggtggatcttgccaacgtaaccagcccttgtcgtcagaagaggtgggagaatttttctctttggacaataacagcaccaacgtagaggcacgcttggtaaaccaacacctggtgaaggctcttgaacagcagtctagttttagagttctggacatcactcgcatgagtgaattcagagcggatgctcacccttcaacaactggcggcaaaaagcacgatgattgcatgcattggtgtttgccaggaccaactgacacatggaacgatttgctagcgtccagtcttgaagtagttgagcgctagtctgagaataaaactcaagggctcacctgaggaagttacccctagcttcactttttcccccatgaatccacttgtagaatcgagttttgctgagagttggttctagggctttttgctgcagtttgttttatatgtagagtggagcatttccccggcttgtattcttgaccctgtatatatttgaccattgtagggtttcactgtataataataggtcgaattcattttttttgttcgaaaaaaaaaaaaaaaaaaggccccta

SEQ ID NO: 80145 - DNA, 262 bp, Zea mays
  Clone ID: MRT4577_173113C.1
agctatgtcttgccctgctttataatcccttttctcgcaacacatcagcaggtaaatttaggcgcggggtgatggcggctgctcccgcaaacctgaactgcaacgcacgggagctaaagctaggggagtacctcgagattctcagtgacatgattgggtacgaagctcacaaggacgacacggctgggtacacttccctgagcgtggcctactcgctcgaatatatcatcgtcggaaggtggttcaactacattgatgctct

SEQ ID NO: 80146 - DNA, 414 bp, Zea mays
  Clone ID: MRT4577_173114C.1
tggttgttaaaaaaaaaaaaaaaaaaaaaaaaaaaaaaaaaaaaaaaaaaaaaaaaaaaaaaaaaaggaaaggagcaaaaaaaaaaaacaaccttccataacacgaacaaagcaaagttaggggctccccctttaaaggaatcctaattccgttccctggccatgcggttgacatgcgttttactctgggggaaacccaaaattaaacccatttgtacgcatttttccattcatccgctttgggaaaacctggcgaggtaccaaaataagtgcgcttccaaccaatttccctttatttaagtggaatgaaaggcgaaaggccccccccctttaaccttccaaaaagtggggcagacttgctgggtaagggcaccactcccgatacacttaataacgccccagggggggggggtt

SEQ ID NO: 80147 - DNA, 444 bp, Zea mays
  Clone ID: MRT4577_173115C.1
ggagtgtgcagagctccaatcatacagcacttcgcagagtcgatagcggggtcgagcagcatcagaagtttcggcaaggaagaccagttcgtgtcgactaacagccgtctaacagatgcctactcccggcccaagttctacaacgccggagcgagggagtggctttgctttcgcctggacttgctgccctctcttgcgttcgccttctctctgatctttctgatcaacctaccgaccggtctcatcgatccaggttgtctggagcatgtgcactttggagaacaagatcatatcagtagagagaatcctacagtacatgggcgttcctgcagagcccccgcttgtcatgccagaaaacaagttggctcagagctggccatcgaatggagaaatccagcttcagaatctccatgtgaaatatgcgccgcagctgcccttcgttct

SEQ ID NO: 80148 - DNA, 345 bp, Zea mays
  Clone ID: MRT4577_173116C.1
caaaacccctggtttgggggggttttttttttttttttttggggccaagggggcttaaatggttttttttggcccaggggggggggggaaaaaccgacttcacaatttcaaggggggggggtcccttgggtttccattacaaataggtggggggctcccaaaaaggtgggacacgggggaacattccccaggtaaaaaattttaccctttttttttcagggagggggggcttgctggattttatataaattgcttggtgggtttttgatcagtaaacagtcctgcctttaccatccaggatcatttttttgaagggccccccccttggggttttagggaacaaat

SEQ ID NO: 80149 - DNA, 214 bp, Zea mays
  Clone ID: MRT4577_173117C.1
cccacgcgtccgaaaaaaaaaaaaaaaaaaattttaaaaaaaaaaaaaaaaaaaaaaaaagggaacaatcccttagggtttgggtccgctcgtggggtttttgtttgggggcggcctttttcggggttccatgcttccgtacgcgtgcttgttaggtcatcttttttctattgtgtggcctgaatttagttcacgggccgccggtttcaacctg

SEQ ID NO: 80150 - DNA, 599 bp, Zea mays
  unsure (1)..(599): unsure at all n locations
  Clone ID: MRT4577_173118C.1
atgcacgcgctacgctaatcttggnatcctctnatagcggccccgccctcttttttttgtgttttttttttttttttnttttttttttttttttttttttttttttttttttttttttttttttttttttttttaaggggccggggacccaatacaggtacttttttacctaaaagaacattaaccgggcccaaaaaacaaacgcggggggggctaccaccgggggaacccacctaaccggcctacttttggcctactgcaagaaggggacgagggcccctcgcatcgctcgcctaggagctagggaacttggggacgggtttggggccctcggaaaccgggtgcttggggagctcccccggaaggaccaggcggaccgaggtcttgatctcccgggacctaatggggggctttttgttgtaccccgccagtttggccccctccgccgcccggtttttaaaaatttcgttggtgaaggagttcatgatggacatggccttggaccaaatgccaatgtccgggggcacctggttcagcaccctgaaaattaaatcttggacgtttccaccgacttctttgccttttttttcccctttttt

SEQ ID NO: 80151 - DNA, 363 bp, Zea mays
  unsure (1)..(363): unsure at all n locations
  Clone ID: MRT4577_173119C.1
ctgagcacatccagttgactcaagccccatggctcgggtccatagtgggcggccgggtgtcacaggcaccacnagattctgcggggatggcgcggtggctggctcagctcctgctgcgctctggccaccttcgtcacactcggcatgatccttggatctttgcttcagttagcacttcttcatcgactagatggctattcagtgcatgcagatagtgatccagaggctgttcttcttcgccttggatatgagtgtgattacctaatggcaattgctagaccaagactccaaatatccactgtagtggatgttgcaacaggaaagggtgtaaaaagtgatgttcggacgagttctggtatgttt

SEQ ID NO: 80152 - DNA, 628 bp, Zea mays
  Clone ID: MRT4577_17311C.1
gggtgcgcgctttcctcagagcggaagcgcgtgggcgtcgaccagctcggcctcttctacaccgccgacaccatcatcggcaacaggggccaccacggcacgtcctcggcagcggcgacctgtacgcggtgtgtgctggtgatgcaagtggcggcgtgggcgtgggcgtgggcggcctatacgaggtcgtgtacaacaacgtcgttagtctatgtgtcaaggccattgggtggaggcccgagcggaggttcaagtggaagctcctcgacggctcgacggggagaagaggagcgcccacttccctatggtcctggtccagatgcccatgtataacgagctggaggtgcataagctgttagcggcagcatgtgagctgcagtggtcgaaggacaggataatagttcaagtggtggactattctactgatccctttatcaagacctgaagatgaaagaagagcaccggcccactttgcttcataggaccactatatggaatggtatgcagttggtggactctggcttttgtagcgtaacatagtggtccatggtgcacttagaaaggacaatctaatcatgatgcaatgacatcatatgtgattcatgatatagcatcgacatcatggttc

SEQ ID NO: 80153 - DNA, 409 bp, Zea mays
  Clone ID: MRT4577_173120C.1
gtgttctctcaaatacttttttttttatggggagctcattcaagtattgaggtatgaagctagtcagtattatagaccacatcatgattacttctctgacactgtaagttgaccatctctaagtttaaccttaagcgtggagggcagcgtgttgctacaatgcttatgtatttgacagatggcgttgtaggtggtgaaactcactttccgcaggcaggaaatggagagtgcgggtgtggaggaaacgtggtcaaaggattgtgggttaagccaaacaaaggggacgctgttctcttctggagcatgggattggatgggaacacagacccaaacagtattcacagcgggtggcctgttctgaaaggagagaaatgggccccgacgaaatggatgagggagaaaatgactt

SEQ ID NO: 80154 - DNA, 1891 bp, Zea mays
  Clone ID: MRT4577_173121C.1
cagctccagcattatgacacctaaactatagatgtcagacttaagggacattttgccatggtattggtattctggagcgcagtatcctagggataaaagccgttcattgctcatagtacgtgatacttcagccagccttgatagaccaaagtctgcaatctttggtaccatttgatcatgtactagtatgttggcaggtttaagatccatgtgaatgatgtcccttaagtctgacatctatagtttaggtgtcataatgctggagctggtgaccgggagcaaggaggagccggacattactaatgtacttcgacggtggagccataggtggaaaaaatcaggacagcgtacaccatcatttcaacgccatcaagtgagtaaatgcataggtttggctaagagatgcaaagaagtagaaccaacaagaaggccttctatatgtgatatacttgctgccctaggcaaaatggaagatatgaattgcagtgatcaacaagtggacgaggaagtcacttatctggaggacatgctaggaatcgagcctcttgatctgcatttcctagtcgaacctaccaagcagatatcctgctcagtccatctgaccaacgctacgaatgactgtttcgccttcattgttcagacgacgaacccgaagcagtactgcatacagccggacagaggcgtcgttccaccacgatctgagtgtagtgttgccatcgtattatcgcaagaaccgacgcataataagcgatgcagcatggaggacgagctaagcgtgcagagcaccagagtggatgagggtgtgacagctgcggatgtgagtgaagcgttgttcactggaaaggaagatagaacggtcgatcacgtgagcctgatggtcggtttcgacatgtcgccatcgccacctgaggaacaaacggaggacttcacgtttgcaccactggcgtcgttgtacgacgaggagccacagttaagcgcggcgaaggtatcagtatggacatccaatcagcgcgtttggggcgttctggtcgcttctctaagaagaagctagtgtctattctgaaatcctggcgagcaagattaaaggtatcatcccataagaaactcgagactccaaagcatgactgtgagattcctgaagctgtagagcatgaagaagttgccgcgcccaggtgtcccaaaggaccactgccacagcgcgatctttctccactgggcgaagcatgttctaggatgaacatgacggcgatccatgagatcctagtgaacagacattacagagatgatgacctagacccaaacgtgccgtcgctcgaggaatggacacagcagagcagggatatgttggatgataggaaacgtggggacttcacttttcgtgataaagatttccgagcagccatagactggtataccaagtgtatggatgtggggccaaagaaggcgtcaccaacagttctcgttcgacgcagttgctgccacctcatgtgcggcaacctggacgccgccctccgcgatgcaatgcaagcgcagcgtcagtatcccgactgcccaacctcactgtacatgcaagcagtggcactttcaaagctagggatgcatagtcaagccatgggcatgctgattgaggcgtcggagatggaagcgaatcagaaaaagacccgaaaagcagcttaagaagactcaacatgggcgaaacctatataccttcgttttgtttctgtaagctattcttgattgttgtatctgcttgccaaattgtctaggttggagtggaattgggaagctttacctcttggggataatgcatttcttgttgtattcccctctgaggatgaaatgctccgtatggctgatattgagtataagctcaagagtggaatttctattc

SEQ ID NO: 80155 - DNA, 1107 bp, Zea mays
  Clone ID: MRT4577_173122C.1
cgtgacgggctcgaggcggggccgggaagtctgcagcctgctgagcacagccagttgactcaagcgccatacctctgctccatagtgggcacccgtgtgtcacgggcacgacgagattcggcggggatggcgcggtggcgggcgcggcgcctgctgcctctggccaccttcgtcacactcggcatgatccttggatctttgcttcagttagcacttcttcatcgactagatggctattcagtgcatgcagatagtgatccagaggctgttcttcttcgccttggatatgtgaagcctgaagttatcagctggacgccaaggataattgttttccataattttcttagttcagaggagtgtgattacctaatggcaattgctagaccaagactccaaatatccactgtagtggatgttgcaacaggaaagggtgtaaaaagtgatgttcggacgagttctggtatgtttgtgaattctgaagaaagaaaatctccagtcgttcaggctatagagaagcgaatatctgtgttctctcaaatacctaaagaaaatggggagctcattcaagtattgaggtatgaagctagtcagtattatagaccacatcatgattacttctctgacacttttaaccttaagcgcggagggcagcgtgttgctacaatgcttatgtatttgacagatggcgttgtaggtggtgaaactcactttccgcaggcaggagatggagagtgcagctgtggaggaaacgtggtcaaaggattgtgtgttaagccaaacaaaggggacgctgttctcttctggagcatgggattggatggtaacacagacccaaacagtatccacagcgggtgccctgttctgaaaggagagaaatggtccgcgacgaaatggatgaggcagaagatgactttctgattagagctggtttggtgggtacagggagagttggtcccactccaggggcaacacctgcaagatgtctcattatagcaatgcatacagcaacacatggatttcgcagggtcagacctgtgcaatcgctgttaacgcttcgtcgttcaatcacagggttggcgaggtctttgatactgcccttcgattgcc

SEQ ID NO: 80156 - DNA, 432 bp, Zea mays
  unsure (1)..(432): unsure at all n locations
  Clone ID: MRT4577_173123C.1
aattttcacctccggtggtttggtaaaggtcaaggttctcttttgcagcacagaaaatgggcgtacatcttttgttcggcaactagaaccagattggcatattgacacaaatcctgaaatagtttctcagttagctaggttcatcaaatatcaacttcacgtttctcctaccaggcctgaaaggactgcgcctaatgtcttcagttgtccatccttggaacacttctttggatgcgtttgacgcgtgatccggtaaaaagatgcaaatatgtttaaaagttgttctttactaccctttggtcattatgtgcgaccctttacattttctttctttaggcacccttgtgctgatatgtcagntttttaggataatggagaagttatttgtttgaaatctgtgtagggttcacatttgaacttttttgaaaccgg

SEQ ID NO: 80157 - DNA, 243 bp, Zea mays
  Clone ID: MRT4577_173124C.1
ttatagatgtcctacttaagggacatcattcacatggatcttaaacctgccaacatactagtacatgatcaaatggtaccaaagattgcagactttggtctatcaaggctggctgaagtatcacgtactatgagcaatgaacggcttttatccctaggatactgcgctccagaataccaataccatggcaaaatgtcccttaagtctgacatctatagtttaggtgtcataatgctggagctg

SEQ ID NO: 80158 - DNA, 3020 bp, Zea mays
  Clone ID: MRT4577_173125C.1
aaaaaaataggccggattagcatctccaggcctaatccatatgaatagaaattccactcttgagcttatactcaatatcagccatacggagcatttcatcctcagaggggaatacaacaagaaatgcattatccccaagaggtaaagcttcccaattccactccaacctagacaatttggcaagcagatacaacaatcaagaatagcttacagaaacaaaacgaaggtatataggtttcgcccatgttgagtcttcttaagctgcttttcgggtctttttctgattcgcttccatctccgacgcctcaatcagcatgcccatggcttgactatgcatccctagctttgaaagtgccactgcttgcatgtacagtgaggttgggcagtcgggatactgacgctgcgcttgcattgcatcgcggagggcggcgtccaggttgccgcacatgaggtggcagcaactgcgtcgaacgagaactgttggtgacgccttctttggccccacatccatacacttggtataccagtctatggctgctcggaaatctttatcacgaaaagtgaagtccccacgtttcctatcatccaacatatccctgctctgctgtgtccattcctcgagcgacggcacgtttgggtctaggtcatcatctctgtaatgtctgttcactaggatctcatggatcgccgtcatgttcatcctagaacatgcttcgcccagtggagaaagatcgcgctgtggcagtggtcctttgggacacctgggcgcggcaacttcttcatgctctacagcttcaggaatctcacagtcatgctttggagtctcgagtttcttatgggatgatacctttaatcttgctcgccaggatttcagaatagacactagcttcttcttagagaagcgaccagaacgccccaactgtaaacgcgcactctgagagcgagtcatgcatgatccaatcaggcgaaggaatccagagcgagaaagcacacacacgcacctgattggatgtccatactgataccttcgccgcgcttaactgtggctcctcgtcgtacaacgacgccagtggtgcaaacgtgaagtcctccgtttgttcctcaggtggcgatggcgacatgtcgaaaccgaccatcaggctcacgtgatcgaccgttctatcttcctttccagtgaacaacgcttcactcacatccgcagctgtcacaccctcatccactctggtgctctgcacgcttagctcgtcctccatgctgcatcgcttattatgcgtcggttcttgcgataatacgatggcaacactacactcagatcgtggtggaacgacgcctctgtccggctgtatgcagtactgcttcgggttcgtcgtctgaacaatgaaggcgaaacagtcattcgtagcgttggtcagatggactgagcaggatatctgcttggtaggttcgactaggaaatgcagatcaagaggctcgattcctagcatgtcctccagataagtgacttcctcgtccacttgttgatcactgcaattcatatcttccattttgcctagggcagcaagtatatcacatatagaaggccttcttgttggttctacttctttgcatctcttagccaaacctatgcatttactcacttgatggcgttgaaatgatggtgtacgctgtcctgattttttccacctatggctccaccgtcgaagtaccttttcatgatgccatttaacaatgctgtgaacgcaactatttcagatttaagtgtagttctgaatagtgagacttacattagtaatgtccggctcctccttgctcccggtcaccagctccagcattatgacacctaaactatagatgtcagacttaagggacattttgccatggtattggtattctggagcgcagtatcctctgcatgacaatacgatgatgacgacgacgacaagggcaacattatggcataacgaagaatcaaatttcagtataagcaatgaactgtctatatctccctctctgtatattattatatatatgtttaacttacagggataaaagccgttcattgctcatagtacgtgatacttcagccagccttgatagaccaaagtctgcaatctttggtaccatttgatcatgtactagtatgttggcaggtttaagatccatgtgaatgatgtttttttccatgtgaagatgatgtaggccctcacaaattcccttaattattttataccgtgcgtgccattcaagccctcttagtccatctaatagtggaataaaaaatatgaactcttctttcactcgagtgtgctaatggtatacgtatgtatcatcaaatggagacaggcaataaacatacctgtaatgtggctgcggaggcttccgttgctgatatgctcgaaacagagcagcctttctcgcacctcgaccttaatatacttgccttcttttctcatcagttcatgctctgtgttagaacagtagccaataaaccgcactacgtttggatgcttcacctgcatcatgctctgaatctctcgatcaaattccttatcttcaacatttaggttgctgaagattttcttcacagcgacgcttccgttttgcaggatgccctgttcatcttgtaaacctctccgcacccaccataaccgattattcgctcgtgcgagaagtcatttgtgatgtgttttagaactgataaagatagcttcctcggctcttttctcccgtcaagtatttcctccaggacacctacttcttccttgtgcgtgctacccattgtagctaggatggacagtttgctcggtgtgattatagatagagtaagctatccgatcctgtaggcgaccgagtagcaagatgaccaggtaaccttaattagatgagcatcgcagatgggtccttcctcaaaacccagagaagaaccttggcctgctcgaggaatggattgatcgccatggatgaattgactgacatccggctatatggggtcacaaccctttgaagacatgcagaacaaa

SEQ ID NO: 80159 - DNA, 264 bp, Zea mays
  Clone ID: MRT4577_173126C.1
tcgtgctcccgtgctctccagatctaaaatcccctctaggctccggcctctactctcccagtctctcctgtcgatctgtcatgccgccgtcgcctcgccggaaagtcgctgatgtggggccacaacaagtcgctagtaagttgtcgtgttctggtaagtctcgtcgtcgatactcggtagcagaaaccctaaatttgtaataggctcaactagtcccctactgctgatggaagaagtactagtactgatactggtggtagaacc

SEQ ID NO: 80160 - DNA, 191 bp, Zea mays
  Clone ID: MRT4577_173127C.1
gtgtctgaacaataataagcgaagccgaactggctgccatacatagctattgtgccgtgtgtgcgatagagagatgatcagagttcttcagttggctatctctctctgcatgtttgccgtcagcctttgagctcatgtacgtacgtgcgtctacctgcatgctggttgatccgatagcatctgctgtaacc

SEQ ID NO: 80161 - DNA, 113 bp, Zea mays
  Clone ID: MRT4577_173128C.1
ttcacaaattcacataggtctaaatacataaattcgcaaattcacatagaggttcacatccataggtggcacatttttaggttcacaaattcacataagttcacatccaactt

SEQ ID NO: 80162 - DNA, 272 bp, Zea mays
  unsure (1)..(272): unsure at all n locations
  Clone ID: MRT4577_173129C.1
gaacgaaacattattggtcaagggtgaacctgtgagtgaagtgatgaacacttgccaacaccaactgcacatatactgagtccacagaccatgggggacagtgacacagtgtatagtgaacactcagcatattctacgttcggacaacgcaccagcttcttacgaggcctgggaagggctcataaaatggctgcaccctanttcgaagaacaggaaggtggcgaatccttccctccatgctagctcgagcttggccataccgaccatggcca

SEQ ID NO: 80163 - DNA, 1887 bp, Zea mays
  Clone ID: MRT4577_17312C.1
cgccaccttgtggttgttgctataatgaggagttgttgagagattcttgctccgctgtttctgtttatgggaggtatcataccatggaggaccacacggaggggcttgatgagtgtgttgcagaagctttcttgttcagactgaattcgttagttgatgctagcgaacagttagtggatttcaagaaaggagaggacgacggcttgaatcttagtgctctggagaaggaacttcaaatgcttactccgtacttggctgatgaagatgctcttgagagtactggacttgaagatgacgtcagaggaaataccaacctagatgtatgtatggtaacaaacgaggaaaatgctaatggcaaagaatttctaaaagatagctactgcatacttccttctcctgagagtgcagtcccttttgatgtttatggggtggaagacttcaagacagaagatacagatcttcaaaaccctaccgctcgcaaatttcaggaagatccaaaaattgatcctgcactctctaagtttcagcaggagtatgaagtatttgacctgaaaatattccaccggaagaacaggactggctttgaggaaaacaaagaattccctattgtcatggattccgttatagctggaagatatcgtatcaatgagtatcttggttctgctgcattcagcaaggttgtacgggcacacgaccttcgcactggagttgatgtatgccttaaaataattaaaaatgacaaggatttctttgaccagagtttggatgagataaagctcctcaagtttgtcaataagtatgatccacccacgcgtccgcatatacgtccgctctatgattatttttactatcaggaacatctctttattgtcactgagttactacgggcaaatctttatgagtttcagaaatataaccaggagtctggtgacgaggtgtacttttcactgcccagaatacaggctatagctcgacaatgcttggaggctttggtgtacttgcatcatttaaacatagttcactgtgatctgaaaccagagaatatccttctgaagagctacagcagatgtgaaatcaaagttattgatcttggaagcagctgcttcttgtcagataacttaaacttatatgtccaatcacgttcttaccgatctcctgaggtcatcttgggtttaccatatgatcagaaaattgacatttggtctcttggctgcatcttatctgaactgtacactggtgaagtactctttcctaatgaatcaatgccaatcattcttgctcgtatgattgggataattggtccaattgatatggaaatgcttgcatcaggacaggagacccagaagtacttcacagatgactatgaccttttccacacgaacgaggagacagatcagttggagtatttgatcccagagaaatcctctttgcggcgccacttgcagtgcccagacaagaaatttgttgactttttgtcttacctgctgcaaataaatcccagaaacagaccaacggccagcgaagcgttgcaacaccgatggctttcgttcaaatatagttcaacggccaatcagactcgttcctgacaagtaggcaacactttctgaagctactggctcctgaaacaacatgtttccttttgcagtaggatttggcttcgtggtttttttaggtcaacacttggcgttgaaaaacctgttttgcaaggtgaatcgatcgtgtatatgcgctggttcatgcatgtaaatatgagaaaagtggttcctttttttttctgtacagttgccatgtactacagtgttgatccaactcatggtatagcaaaatggaattcatagaattacctttgacatttaatctgatgcactttgtgtgttcagtgttcgc

SEQ ID NO: 80164 - DNA, 133 bp, Zea mays
  Clone ID: MRT4577_173130C.1
ggttggagtttgcgaaaccccagaaaggccctacgattggcacaaacatgccactaaaacgggaatccaagggttcaaaaccaaaaccttttggggtccaacacaaaaccttttgcaaagaaaatctttttgg

SEQ ID NO: 80165 - DNA, 269 bp, Zea mays
  Clone ID: MRT4577_173131C.1
ttttggtacaaccagaaaatagtgtgggatattgaattatgggaggctctgactgtctcgggtgtcagcttaacattccacagatggggggttagtttttatatcctataatacaaagcatattcaatggcaatatggagtcagtcctgcatttaatgtcttgaacattttaaattacttctattaccatgttgttttttagtagaattgtttcctaaagaaaaccactctttgatcatggctctctctgcaagatttgtgtgcactct

SEQ ID NO: 80166 - DNA, 328 bp, Zea mays
  Clone ID: MRT4577_173132C.1
gtacgtaagctcggaattcggctcgaggcgggggggaacaccattgatggtgcagacaggtccgctggcatgcgcatggcgtacatttgcagggccagaacctatatcaatgggacccgctacaggggtatatggagcgcggtcactgatccgcacgggaactaattcgctgagctgaccaaggtcaagtccaccctatggtctgggtccatggggctcaaggccctagcggtcatgtgccctagcaatatctaatggtttgcaggcgtactgatacattaaaaatggccatccgtgtatttatcactgattctctgaacttaatatg

SEQ ID NO: 80167 - DNA, 838 bp, Zea mays
  Clone ID: MRT4577_173133C.1
gatcgcacacaccaaaacaaaagtgaaaaaccacatcctccctccctccgagacgccgcccggcccgaccaatggctcccaggaagttcttcgtcggcggcaactggaaatgcaacgggaccggcgacgacgtgaagaagatcgtcaccttcctcaacgaggccgaggtgccctccgaggacgccgtcgaggtggtggtgagcccgccgttcgtgttcctgcagcaggcaaaggggctgctgcggcccgacttcgccgtcgccgcgcagaactgctgggtgcgcaagggcggcgccttcaccggcgagatcagtgctgagatgctggtgaacctgcaggtgccttgggtcattttggggcactctgagaggagagcactgttgaatgaatcaaatgatttcgttgctgataaagtggcttacgcactcgcccaaggactcaaggtaattgcttgcattggtgaaactcttgaacagagagaagcagggacgacaatggaagttgtttctgctcagactaaagctattgcagagaaaacatcagactggacaaacgttgtgctggcatatgaaccagtgtgggccattggaaccggcaaggttgcttcccctgctcaagcacaggaggttcatgatggtctgaggaagtggctccacgctaatgttggtcctgcagttgctgaatctaccaggattatctatggaggctctgtaaatggggcaaactgcaaagagcttgcagctcaacctgatcttgacgggttccttgggttggcggcgcttcactcaagccccgagtttgtggtcatcatcaagtctgccaccgtgaagtcttcttc

SEQ ID NO: 80168 - DNA, 1248 bp, Zea mays
  Clone ID: MRT4577_173134C.1
atgagatctacccgttgtatcaaaaagagatcagatgttgggacaaacattaatggaaacggtgaatttgtggtggattatgattacctgattgtcagtgttggggctagacctaatactttcaacacgcctggtgttactgagaattgccatttcctaaaggaagtagaggatgctcaaaagatcaggaagagtgtcatgaaatgttttgaaagagctgcccttccaaatctttctgaggaagaacgaaagaagaaccttcattttgttattattggtggtggcccaacaggggtagaatttgctgcagagttgcacgactttgtgaatgaagacttggcaaagttgtatcctgatgttaagaagcacgtaaacatttcagtaattgaagcaggaggtcatatccttacaatgtttgacaaaagaatcacccaatttgctgaagagaagttcaagagggatggcatagatttgaagacaaattttaaagtcgtgaaggtgtctaataaggatattctcatgaccaatcctgctacaggagaggtcgccgttccttatgggatggcagtttggtcaactggaattggaacccgtcccatcattatggattttatgaagcaagttggtcaggagaaccggcgtgtgctagctactgatgagtggcttagggttcaagggtgtgaggatgtatatgctcttggtgattgcgcaacgattgctcaaagaaaagttatggaagatgttgctgccatattccgagtagcagacaaggataactctggcactttaactgtgaagaaaataaaagatgttcttggagacatctatgagagatacccacaagtggaattgtatcttaaatccaaccaaatgaagggcttccatgatctacttaaagactcagatggtagctccaaggagttcaaagaactggacatcgaacagttcaaaagggcccttgctcaagtggactctcaagtcaagatgctcccagcaacagctcaggttgctgcacaagagggaagttacctagcggattgcttcaacagaatgaagatgtgtgaagaatatcctgaggggcctataaggatcagaggtacaagcatcttgggcaattcgctccactgggtggagagcaaactgcttaccaattgccaggtgactgggtacatgttggacacagcacccaatggctgtggtattctgtctatgcaagcaaacaattcagttggcgcacaaggatgctag

SEQ ID NO: 80169 - DNA, 2562 bp, Zea mays
  Clone ID: MRT4577_173135C.1
ttctctccggaaggcgagcaggcccctccgcacgagctcgccctcgcccccgtccgccgccgagtgtttgggaagcgagcaagccgctcctccccatccttgttctacgattgccccgcgcgcatcccattcccacgtcgaagcggccgaggtagtcccggctgttgccagcgagcgatggcgagcaacggcatgtcgcttgtgcatcgagccgccgaggcggtgcgccgcacgccgcgatggaagaagaggctcgtcttattcgccgtcggagctagcaccttaacttacgcttgtcaagacaatcgagttcttcaaatttgtgatgggactggaaacaagaagaaggtggttatccttggtacaggatgggcaggtgcaagtttcttgagaaatatcgacacatctttgtatgatgtccatgtggtatcacctcgcaattacttcaccttcactcctttgttgccaagtgtgacatgtggcacagttgaagcacgtagtattgtggagccaattcgcaatattgtgagaaagagaaatggttcatttcgattttgggaggctgaatgcatcaagattgatccaagaaacaaaaaagtccattgcagatcagatgttgggacaaacattaatggaaacggtgaatttgttgtggattatgattacctgattgtcagtattggggctagacctaatactttcaacacacctggtgttactgagaattgccatttcctaaaggaagtagaggatgctcaaaagatcaggaagagtgtcatgaaatgttttgaaagagctgcccttccaaatctttctgaggaagagcgaaagaagaaccttcattttgttgttattggtggtggcccaactggggtagaatttgctgcagagttgcacgattttgtgaatgcggacttggcaaagctgtatcctgatgtaaagaagtatgtaaacatttcagtaattgaagcaggaggtcatatccttacaatgtaagttcgttcgatgctttgtaacccattagatatctacttcggttaatctaattaaccgacagctatattgtggagacaccaaatgaaatggttagatgtgactttgctctcttctcttttttgcgaaaaacaaagtattatgtgatgtttcttatgtttatgcagctaatatgagaggttcgtgaaatatctcctgaatcagcttatatgtttaatacacctgttgccttctgatatcttagatctgttgcgatctttttataatattccatggtttatttaggtttgacaaaagaatcaccgaatttgctgaagagaagttcaagagggatggcatagatttgaaaacaaattttaaagtcgtgaaggtgtctgataaggatattaccatgaccaatcctgctacaggagaggtcgctgttccttatgggatggcagtttggtcaactggaattggaaccatgtacacaccaagttcaatatcaacatgacttttgcaggagaaccggcgtgtgctagctactgacgagtggcttagggttcaagggtgtgaggatgtatatgctcttggtgattgtgcaacgattgctcaaagaaaagttatggaagatgttgcttccatattccgagtagcagacaaggataactctggcactttaaccgtgaagaaaataaaagatgtccttggggacatatatgagagatacccacaagtggaattgtatcttaaatccaaccaaatgaagagcttccacgagctacttaaagactcagatggtaactccaaggagttgaaagaactgaacatcgaacagttcaaaaaggcccttgctcaagtggactctcaagtcaagatgctcccagcaacggctcaggttgctgcacaagagggaagttacctagccgactgcttcaacagaatgaagacgtgtgaacaatatcctgagggtcctataaggatcagaggtgcagggcgccatcggttcaaacctttcaggtacaggcatctcgggcaattcgctccactgggtggagagcaaactgcttatcaattgccaggtgactgggtgcatgttggacacagcacccaatggctgtggtattctgtctatgcaagcaaacaattcagttggcgcacgaggatgctagtcatatcagactgggggaggcggttcatctttggaagggactccagtagcatatgaattcaaatctcccgattttgtagttcacctgcgttctagatactacttgcatcagttttgctgtcccactatttccgaagcttagcctcgcaaggtttctgataccaaattttgaccttgccaaatgttttgttacctcgtcatgcacactgagtgattcagatgttatatacgtcttatcggatatttgcttttttatgtagggcactatgatttctagctataccgattctaattgtaagtttgagttattctggtcggtgcagggcgccatctgttcaaacctttcaggtacaagcatcttgggcaattcgctccactggggggagagcaaactgcttaccaattggcacgggactggg

SEQ ID NO: 80170 - DNA, 150 bp, Zea mays
  Clone ID: MRT4577_173136C.1
tccacacctactctctctcattttttaatttcccattcattatcactacctgggaccattgtaacatgttcccggatattgcactcctataccaccaatcatccttcctactcagcaatttcccattatcccttaatctcttatactccc

SEQ ID NO: 80171 - DNA, 293 bp, Zea mays
  Clone ID: MRT4577_173137C.1
ctgttggccaacacgggggttttgttcacccagggagcgttggaccccccatcattagagttaagacacgactatgggcacagacccttgcaagacagcccgcgtggccaatgtatactagccttaccaagtacgtaacagttctgaaaaggcaccagatcggtagggtttggggtggcaaagtgcacgtacattgtgcaggaggcgctctggagtaccggggggcacccgggccaacctgaggacgcgggaccaggacccgatgtatctccagatgatcctatcacagagca

SEQ ID NO: 80172 - DNA, 298 bp, Zea mays
  Clone ID: MRT4577_173138C.1
tcccggctggccccacgcgtccagcaacagcagctccgctcgtcgatcagctctcggctaaccactcatcgccagtgggtgcctgccgaccacgtctcgccgccgccaccgccgcggtagagaggggagggacagggggggaaacctggcccacatcgataggtacagcagggaggtgacacgcaatagagataggggaccggagggcagccggcccgggcccaacaccgaggggctcgtgcgcaggacgctgatgatgctcctgtccctcgtctccttcagctcccctgctggaccc

SEQ ID NO: 80173 - DNA, 1328 bp, Zea mays
  Clone ID: MRT4577_173139C.1
ggttgcagggttcatcaatctttgctttctatccctgcacagggtatgacaattcacttgtttatattatgtcagaatggtcacaactacaaggtgaaattcagggagcctaccagataaaggttacaacgactgcattagctcttctcatatcaactcgtcatcctgagctatccaaggttgaagttcaagggcatcttattaagactagtgcaggtataacgacacgttcaaaagctcgagtgactcctgatcaatggaccaagattcctctcccagttaagatcttctcattgctggcagatactttaactgaaattcaggaacaaattggtgctggtgatgacgatgactccgaagaggataatgactgggaagaagttcagaatggtgatgctagtatatcagatgatatcatacactcagcatcggttccttcaatgactaatccatcagttgaacatttaaatgcaatggccaaggtttttgatgaggatgatgatgatagttatgacgatgatctgacaaaaaacgaccctcttaatgaggtgaagttagcggacttcctaacaaacatctttgctaacttgtgggagaataatcgaccaatatttgagtatctttgccagggcctatcggattcacagagatcagctgttgaaaaggttttgaggaggtgaagcgttaacttgggatcctgtcttccacctttcgggatataatatatcttcatattagttatcgagtcctgtttgcattgctgtggactggttttcttgctcattatatgttcattggtgtaaactgatacatctctgaagccggtgttatgaggttttgttagtgtaggtttctttatgttctttgtatttaaaatctacaagatgtgagtatttgttgtaccgggtgtggtgatgttgggtattcatgtctgaagaattcccggcttgacttgttcttacgttgaattcctccggagggaccttgattccttggctttattcatcaatttcatgcatgcctatttggaggagcgccacctttggtgtttggcaggagcggttaagctcagggagttgggtcccggggttggagttccttagggctctactagtgtgtgcggtggtcaagtgttttctccttccttggtcaagtgtttgcctcggttcaacccctcactcttggtttggagtacgggtgtagtttttcttttgtaagaaccttcctttttattctatcttaatttaaagatgcagttcttctgtgtatccaagatttttttcatttatggactagttgagctccaaaaaaaaaaaaaaaaagcggcc

SEQ ID NO: 80174 - DNA, 419 bp, Zea mays
  Clone ID: MRT4577_17313C.1
aacgaacgaacgaacaaaaagcaacagagataaagcaaaaaaaagatgacaaaaaaacaagagaggacagaaaaaaaaaaaagcgaaagaaacaaaagagaacaaagcaaaaaaaaaaaacaaacaaaaaaaaaaaaaccacaaacaaaaagggggccccctccaaagggccccagggtcaactccccggccttccaacgctaaatgactaatagggggagcccaacgctcaatcccgggcccggggttcaacaacttcgtaccgggaaaaccccgggcgtcccccaagaaaaccccgtggcacaacacccccttttcgccagcggggatacaaccaaagggccccaacccaaacgcctttccaaaaatgtgcccccccaaaagggcaaacgggaccccccctgaacgggcccataaac

SEQ ID NO: 80175 - DNA, 285 bp, Zea mays
  unsure (1)..(285): unsure at all n locations
  Clone ID: MRT4577_173140C.1
gactcctatagggcgattgggatcctacgagccggccgggcaaaacccaataaaaaacacacgcgaacccaataatccagatcccacagaaactcntctcagtccgttacgatcgcatcgctagccgtcgtcgtttcgccaggacaccactcgagcactccaaagaccactgggcctcgcaatactcgggctcagtagcgtccacccgccgaccgcgagcgagccgtcgctgccgacgcaccgccttcgccctcgctcgcgtcacgcagtccgctctccttactc

SEQ ID NO: 80176 - DNA, 366 bp, Zea mays
  Clone ID: MRT4577_173141C.1
gggacgaatgcatttttaaatttggattcctttgatgcttctgttgttaagtgttaaatcctgctttttacaaccagtatttaggcccaggaagcaggaataaaacagtttacggccactagacaccctccacaacaacgggaagcaaaagccgcgggggggggttaccctttttaaaagatgaaaaagggggcacaccaaaacaaccctgggggcaatagccccctgaagaagaatgacacattgtggggggggccaccaagaaaactcaccagggcccttggtctaagaggaggctttacttgaaccccaagggggggagaaaccccttctatagaaaaaactggaacctggggagaatggtgc

SEQ ID NO: 80177 - DNA, 2499 bp, Zea mays
  Clone ID: MRT4577_173142C.1
atgaagcagtggcgggacgacgtcgaccgactactcagcatggcgcattctacctcgaccaggtcaaggccacggtcatctcggcgccaacatgaggtgtcagcatctatgtgttcacccccagtaaggggcgcacaaaccaacgacctccgggccgagctcaaccgcagacgcgtgggagaggacgcccagatctctttggaaagggcgtgcgagcgccgccaaaacatcgagggccgcaacctcgatcaagacttcgctgcggcagcaccacaggcaccaatggacacccggtcccaagtgggtgtccccctggccggcgtgggctgtgccgctctcgcggaccatctccgtgcagcgtcttggccgcccaagttcaggtcgcatctgccggaaagtacgacggaatgtcaaatccgtcggagttcctgcagtgagcgacgcgagcagccgtccaaggatgactccccgctccgtcgtcagcctggtaaggagagggtcgacgacggtaaagtagccgcgggagaacgagaactcgggtatcaatcacccgagggggacctcaaggacgtcctcaccgaagattctgactctagggatgacagcgaccgccgcaagaaattgggtcccgaaggctgcccccagcaacgatggaggagcaccaccatcttcttcggggcacccgactgcctcgacaacatggcaggggccagcatactgccactcatcaccgctcctgtcatcgccaacatgcgactgcaccatgtcctgattgacggcggagcaggcctcaacgtcatcagccatgctgcgtttaagcagctgcaaatcccgggatcccatctgggaccctcatgcccattctccggagtgggcccgcagctggtgtatcccctggggagtatcgcactcccagttacattcggaactgaggagaacttccgcatggagaacgtcgtctttgacgtggcggaagtcaacctccccttcaacgccatcattggcaggccgaccctgtaccggttcatggccattgcccattacgggtatttggtcctcaagatgccatccccaaccggggtcctcaccgtgcaaggtgaccgccactgcacttgcagccatagagaagttgcatgccatggcggcagagactgctcgcccagacgacggaaggagggacccctcgacctctggcaccaaggcgcccctcaaggcgccaaaggtataaccatccggaacggatgggaggtgatcgagcactgcctgaagattaaccccgacgccaagccagtaagccagaagcctcgcagacagtctgttgagcggcaggacttcatccgaaaggaggtccggaaactgctggacgctggcttcatcgaagaggttcatcatccaatatggctggccaacccagtcatcgtccccaaagcgaatggaaaacttcggttgtgtatcgactacaccagcctgaataaggcctgtcctaaggacccgtatccactgccacgtatagaccaaatcgtagattctacctccgggtgcgatctgttatcattcctagacgcttactctggtttccaccaaatccagatgtctagggaagatagaaaacatactgccttcgtgacagtggatgggctgtactgctatgttgtaatgtcatacggtctgaaaaacgccctgccaaccttagtgcgggcgatgagtaagactttcggggacctgattagggacaatgtagaggtctacgtcgatgacatcatggtcaagactaagaaagggtcgaccctagtggaagacttaaccctggtcttcgacaagctgcgggcaacccgcacgaagctgaacccggacaaatgcgtttttggcatttccgccgggaagttgcttggattcctggttttgtaccgaggcattgaagcgaacccggagaagatcagagcaatcgaggcaatgaggcccccaggccgagtcaaggatgtccagaagcttacaggatcgctagctgcccttagccgcttcatttcaaggaaactgcaccattatttccaagcgcacatgattgtggtggtggcctccttcccattaaggaccatcctccacaactccaacgccataggcaacatcgctaagtgggctgcggaactcgctgagttccacctggatttccgaccacgccacgccatcaagagtcaggtcctggctgacttcatcatagagtggacgccccccgcaagcgtccccaagggtctgggccctaattcggaccccacgcctgtggaacctaggggaccagtcttcaccgagccccactggacgctctacttcgacggatctgctcgccagcaagttggcgggatcggagtgatactcatcgatccaagcggagatcaagtgaagtacatggtgcaccttgagttcaaggccaccaacaacatggcagagtacgaggcactgatcttcggcttatcggcgaccctatccttggggattcgctag

SEQ ID NO: 80178 - DNA, 165 bp, Zea mays
  Clone ID: MRT4577_173143C.1
gctaagggaactttgacaacatgcgtacttgtgactaagctcttgaacggtgaggttggacccaagatcaatccataatccatctagggataagactttcagtttttagatgactgactatgagatacaagaatgaaaggtctgatactattatcctagctggtg

SEQ ID NO: 80179 - DNA, 605 bp, Zea mays
  unsure (1)..(605): unsure at all n locations
  Clone ID: MRT4577_173144C.1
cggcgaacgcggagagcacgccatgaaggcctcgggcacgctacgagagtacaaggtagtgggtcgctgcctgcccacccccaaatgccacacgccgcccctctaccgcatgcgaatctttgcgcctaatcatgtcgtcgccaagtcccgcttctggtactttgtatctcagttaaagaagatgaagaagtcttcaggggagattgtctactgtgggcaggtgtttgagaagtcccccctgcgggtgaagaacttcgggatctggctgcgctatgactcccggagcggcacccacaacatgtaccgggaataccgggacctgaccaccgcaggcgctgtcacccagtgctaccgagacatgggtgcccggcaccgcgcccgagcccactccattcagatcatgaaggtggaggagatcgcggccagcaagtgccgccggccggctgtcaagcagttccacgactccaagatcaagttcccgctgccccactgggtcctgcgccgtcagcacaagccacgcttcaccaccaagaggcccaacaccttcttctaggtgcagggccctcgtccgggtgtgccccaaataaactcnagaacgccccggt

SEQ ID NO: 80180 - DNA, 1942 bp, Zea mays
  Clone ID: MRT4577_173145C.1
ccatgcgttcgaccaagacggcccagagtttgattggtcaacttgagatgtcttgaagagtagtaaaggattcagctgtgtacgaccacttatgtaggcatggtagcggcgggtcggtgcctattgctcaagaatatgtttgatgcagctctggagatggctgctgatttcgatttggacatcagagatgaggttcaggaggaatgttccaagtttggtcaattaaaatttatttttgtagacaaatgtactgccggttttgtgtacctgcggttaaaaagctaattagtatagcagcgatatttggagtatatttatttattttttaattaattggtaacagagctacacatttgattactgacgtgctgaatggactattcctccataatttggtttttttgtggagctgcagagacttcatttcattttagaattccattatcttgcttgcttgtatgagtgccatcatttgtacccaaatctctcattattgacctctactatattatcgtcaggattcaaccaccactacagcaacactgtttccatatatatctagcttatcaaggtcgttctccatggacctcctccagttctttggtgtaaagtggtttggctgaaatattttgtttactgcagttctagtatttagtgccagttgcattgattgcaaatttcaggatggcgaattgatgatgtttgaaagtggacataagagaggaatcttgttacaatgcccttaccattttgatgcagatttcaatgattggctccataagaaacttgagttaaattttgttatagtagatgtacccttttatgtgtagcttactcactggacacgccaaccttttgtgttcctgcagtttgactggtgggacgggcattgctggtttgactactccagtggcaataccaactgtatctgtccttggtgctgccccagctgcagcccctcttctgcaccctacagtgcctggtcttgcaattcccggggcaactcttccaattactaccccatctattgatttggctccacctagtcaatgcctattgctcaagaatatgtttgatccagctttggagacagatcctgatttcgatttggacatcagagatgatgttcaggaggaatgttccaagtttggtcaattaaaacatatttttgtagacaaaagtactgccggttttgtgtacctgcggtttgatagtataacagccgctatgagcgcacagaaagcactccatggaagatggttcgcagggaagatgatcacagcaacttttatgaccccacaacagtatgaaatgaagttcccgagctagtgaacagatgcatgattaatatggacgtagttgcttgggctcggtgggtgctggcatttctatattttagcgttttgagcttgtgtcaacttattactggaggtaattataaaaaaaactagtggaggaaaatttagtggaagctagtgtatcgggaaatggctaacgaaaaatggtgaaagaaagagtttccttgccctgtgggttagtgctcgaattgaaactgtactgtgtaatggagtttctccctgaagtgctagtactaatacctaaaatgatggaagaaagagttgacttgcgttgcgcttgttgatttgattatactcgtccgtaccctttgcattattgtttggagatgcttgtcacagtttttaagtgatgtacattaattgtgtgtttggttgagtagagtagaatgaagcggctctacttctatcttttggatgtttgttttttaacaaaaaaaaaaggagcgggacggctactatagtttacatataaaaatttactataaatagttgaaatgctctcgcttcaccaaaatgattggatgcaagcgctatcttccctctcctcccttctaaactcatataatctagagatcgacctgcag

SEQ ID NO: 80181 - DNA, 1951 bp, Zea mays
  Clone ID: MRT4577_173146C.1
cggacgcgtgggtgggaattaaggagggcgcggcggtggcgagcagcttctgctcagcgaggcagctgcaccggcgagctagccgcggcctctatgctcgcggggatctgaactagccgctgctaccccatcgcgctgacgactggggcgccctctcctcatatcccattcccaacacaacactcattttctccattcccacgtaaaagagagaaaggggagcatcgcagtgcacacgcgcaatggaaggctcgccggtggcgcgcctcccggaggctaactctctccccgacggcttcgtccccgacagcgagagctcagacacggacgcggctcctccctcctccgcgcccatagttgacgatgcaatcgactccgatagtcccgacgccaccaaccctggtggtgaggaaaccctaggtgatccctcccttcctgcgtccaccgccgaagatgcctcctcaaccgccgctgctgaagcattggacacactttgtctggacgttgttgcggatccggagcgcgttctaggggagcatggacccaccagcgctgcaagaggtgaaggatccttgaaggaaaatcgtgcatcagagcaagtgggcgctccaagtgatcaaaaggtggtcaaggggagcggtgagccaaaacgcaaggtcatcaagcatagcaagcttgagaaggacaaagagttatttcaactagcccagcaataccacaaagtggttgcagaaagggatcaagccattgcagtcaaagatagactagaatctctttgtagggaatttcagcgtcaaaacaaaatgctaaaggaagagtgccaaagggtatcgacagagggacagaacatgcgtacggaattgtctgaaaaatttgatcatgccataaagggtgtcagtgccaaacttgaggagcagagagttgagcgcatttctcagctagaagagaacaatacgttgagaagtaaactgaaagaccttgctgatcaatataacattactcagcagaaatatgctcatcaattgaaagagaaaatgctggaacttgaacttgctgatctgagacttcaacaacatcaagagaaggctgctcaggaacatacacaaatgcagttgtatgctgaacaagtttctcagcttatgactactgagaagaacctgcggttgcaactagcttctgacggggaaagatttcagcactttcaggatgccttgtcaaaaagcaatgaagtctttgaaacttacaagcaggagatggaaaagatgatttcagtgataaagaatcttaagaaggagaacgaatttctgaagggaaaatgtgagaactcagatattgctattgtgaagctcattgaagagcgtgagctaacaaagaagcaaatagagaaattgaaaaatcaaagggagaagctcgaatccctgtgtcgaacactacaggcagaaaggaaacaaggcccctccgccagtattccagatgccccttctagccaagaagtgtcagcgacaagtcaagaatcttaacattccagttgccccttctagccaagatgtgtcagcaacaagtcaagaatcttggcagttgtgcttgtcaatataccgttggtgccagctacagcttgcggagatttctgaagcctgacattcagctgtcaacctaccgtccgtctcaggccttttgatattgtggctagagcctagtggtgcattcctactcggtgttgttaccaagcatataagctctcggctgattccatctcttgtttttgtttgagacaaagcctgctgcattggagataattggatttttgccaatcataatgttgtcttcttgttataattaccactgcgtctatgaattgtgggtccagctgggtctatgaaatgtgagcctgatggcaattttacaaacttgtttcttgctgatggcaaatatcagaatttcttgctgccgc

SEQ ID NO: 80182 - DNA, 389 bp, Zea mays
  Clone ID: MRT4577_173147C.1
aaagcatgaggggccacaagccccctcccccgggaaagggccatttctcaaagaaacagcccctgggtttccatcccacccgaagccaagcataacccccaatccaaatccgggcccaacactggccccaaaaaacagaacccaagcaaaaatattcactgggtgcaacaccccaaggtcatgcccgagccctcggtttacaaaaccaaaaggggggcaaactttggggccccaatgcccaaaacaggacctggccatacttttaaaaacccggctcaataagggaaccggcgagcctttccaccaccatctggcattgccctggagtcattggctcgggggggaccccaataatcaaggccatggcgggtttccagacagtaatgccc

SEQ ID NO: 80183 - DNA, 555 bp, Zea mays
  unsure (1)..(555): unsure at all n locations
  Clone ID: MRT4577_173148C.1
cctcgaggccggccgggaganaaaatgcacaaagcgagtgtctgctcactacttcttgcgcaagagctcgatcatcggagaaaaaaacgcgagaggcgataatggagggatgtgccgaggcaagagatagaggaactgtgctggtcacgtgggcgtgctgattggtacgactcctggctcgacatgatggtcctccggggctactacaccgtacgggcgaccgctgcgtgatcccggaacaaccttaagagagtccattgatggaccttcccggagcatcgcagcgcctgtgcatatgtaaagctacctggaagaggaaggcaacttccacaacaacatcaagggttgcaaccttatcttccactatcgccgcgcccatggactttctgctcaacgacactggtgatgaagtaatcaagccgcttgagtaccgcataatgactattatgactgcatgtgaagaagacggcacctacctccgcatcgacgtcgcttactccgccgatactgccaaactgaagaatggtgctaagaccgactactacgatgaaagct

SEQ ID NO: 80184 - DNA, 306 bp, Zea mays
  Clone ID: MRT4577_173149C.1
gaaaaagaacaaattttatttccttgttttaagaggtgaaaaaaaaccccacgcctacttatggtattggacagccaaaaattataaccggccctaaataatgagctgaaagaagcgcacaacacaatttttttccagttatttagcctgtgttaaatttcttttccggggccaaagggggcccgaaaagaaaatttttttgttgggggtgggcggaatatcggggatagactagggggggcggccggggggaactctcagaccgtgcttcttccaaacacacttcttgttgccatgggaaacggg

SEQ ID NO: 80185 - DNA, 374 bp, Zea mays
  Clone ID: MRT4577_17314C.1
tcttcctctcctcccctacgcacacatttttggggaattcgagctatgtgggctcgtcttctcatggcatatttcaagacaacaatcatcctagccctaattttttttatcttctcttcaacatttccttcctacaaaaccttacaaatcttcattttcttcttgtatcaacaactatatgctacaccattcgttgaccctcttattaactactctgaccacttcactacctctacattcgctttttaatgcctatcccccattcacaaaaccaaatcatcctacttcatacattatgtcaacaaattctaatttcttcttccctccattaaaacaaccaatctataacatccgttgtgtgatacactcaatta

SEQ ID NO: 80186 - DNA, 303 bp, Zea mays
  Clone ID: MRT4577_173150C.1
ccgcctccgacatcgtcccttttcgtcccacgagcaaccgataatccgccggcgttgagatgttggtttatcaggatctcctatctggcgacgagctcctgtcggattcattcacctacaaggagctcgagaacggcgtcctgtgggaggtcgagggaaagtgggtcacccaaggtcctgtggatgtgcagattgctcgacatcgaaccgcacgagcgagggcgtgtacgccggctcccctgcctccctgcgctgttggctctacagcagtgtcgttgcgcccggtggccctgctggcaatgc

SEQ ID NO: 80187 - DNA, 729 bp, Zea mays
  unsure (1)..(729): unsure at all n locations
  Clone ID: MRT4577_173151C.1
gaagatccagagccaataaccattaaccagctgagtagcagaggcattgacatagcaatggcagcccgccatggcagcaggagaacaagggcagatcaatggctgtttggtgggaagtggaggggaaccgtaaaggagacaaggcatcctccgcctgtccctgaggccaagcttccaaatcccgttcccgttcagaaggacgaaggcgtctgccttgagaagcctcgggtgcagagagaggtcgccgacgtcgcgcccggaaggagatctatgccggagatggagatcaacatgaaagaagtcgttgcggtgctcggggtgaaggtcatggctgcagacatgccgccgttcatgcagctgcatgccttccggtgcgctaagcggtcccatgacaacttggacaagttcagctcaaggcaactggcccatgatgtgaagaaggagttcgataaagtgtatgggcctacctggcactgcatcgttggtacgagctacggttcctttgtgacacattccagaggctgcttcctctacttctccatggacaaaatcatagctgatgctgttcaagacaagataaggaaagtgttagcatcctgagcagcctgtcctcatggaagggcgtggtcagtccagcttttctatgatactgacaattgtaaaatattgaaccttatagcttggagctgaagagtaacttgatcattcnttggctgtgagtgcactgct

SEQ ID NO: 80188 - DNA, 367 bp, Zea mays
  Clone ID: MRT4577_173152C.1
gctagccttcccgttcctgcatcgcgtcctagatgggcgcctacaccccgacgactcagacgttcactcattgcggctggtactcaaccgattctccgacctcaccaactactagtaccgcgccaactacctcggcgtcaagagcaggccacagaggcagagtacgctccatgacatgtacctaccccgcaacaactagcacatgccacaatccgtcgacttgcggtccaagggctccttccacgaaatccaagaccaatccatccacgttagacgctagcctgactgaactatagcggaccacgaacgcatcactacaacatggactatcgaccaaatctcctaaactcatcaccaacttactcac

SEQ ID NO: 80189 - DNA, 493 bp, Zea mays
  Clone ID: MRT4577_173153C.1
tgctggcgattcgaccgagaggacggacaaacggatcctcctctcctggccggaggagctgcctgcctgttcctggcacgaacgatctgcgcccgctgaagaactgatcaggcaagtgaattttttttatatactcagagctagtttagaaacctattttttcaagtgattttcttttttcctaaaaaatttgttatttttttttggaaaaatagtaatttcttaaaaaatagattttctaaactagccctcactactaataagaagcgagagagagagagagagagtgggggagaggtgtgtcgtgttcttgttcgctgccgtcgtcatcaaccatacgcggtaagaaaaggctaaaaagaccggacgagggtagcagcgaccgacttgcttggttggcaccggcagggggtgccgtggaacgctacgattgtgacgagaagcgccgccaccggaacacacacacacgggtgcctgatcttaaacacggaga

SEQ ID NO: 80190 - DNA, 721 bp, Zea mays
  Clone ID: MRT4577_173154C.1
tcgttgacttgtatgctgcaaccaaggccaagttgaccgtggtgaatttgaacaagaacagtgccctgcggcggtatgaacccttcagcactgacccccagttttatgtgtatggttatgaggatctggagctgcagcctggggagaacgccacagtcaccttcgttttcttgccaaagttgttaggctcttcatcagctcatctagttgtgcagacaaattttggcggatttattatacatgcaaagggcatggctgtcagttcaccctatcagatactgccattgacagggatagatgttcttataggtggacagctagagaggaacttatcgatatacaacccatatgacgatactctctatgttgaggaagcgtctgtttggatgtcttcattggagagcacaaggtattcttctcaccttgtctgccagctgggcccctttgatggagcattggagctatcctcttcacgtagcaactggtatacagcaagcagtgaagaatttggatggccagtggtcaatatcaggcctagtgaacaatgggaggtgcttccttcaaagaggaacactgtgattgagttaaagctgcaagctgtttctgaaggcaaggtgtttggtgctatctgcttgaaactgcgcaattgcactcttagtacgactcatgcttttgtgatacctattgagctagaggcgcatacacgaacttactatgattc

SEQ ID NO: 80191 - DNA, 549 bp, Zea mays
  Clone ID: MRT4577_173155C.1
gggtacctcgaggccggccgggacgcattcgcacggacgccatcgaggaaccctaacaagagcacatcacacggggcgacggtttggcgccgcgccaccggcgactggcggctggtgccccctctcggtccccactccccagcacggtgacggcctgctgcagcaggtgatctctgatgtctgattctcttctccagttctccccagtccccgtcttcccgacttcctgttcagtgttcaccgttgagtggcctgctgctctgctgtgctcatgtgatgtgctcgttttgaatcttggtccgatccgagccagtccccacccagttattaatgaaaatgagatccttgaagacgatgaagaatctgaggaaatgcaaatgaatgaggaagatggttctgcgccttctagctcatttgggactgacaatgcatttcaagtggaggaagatctactttagctagtacatcatttatcacttatcaagtggatcaaaatttgctcatttgtttcctgcttgactttgctgcagttgccctttgtactttttt

SEQ ID NO: 80192 - DNA, 848 bp, Zea mays
  Clone ID: MRT4577_173156C.1
ggagaaagtcgaccccgtgaagaagacgcacgaggagcagctctgcttttggatcaatatccacaatgctctggtcatgcatgcttttctggcctatgttctgcacgacaagcgcatgaagagcacggacatgattctgaaggctgcgtataatgttggcggccaatcagtaaatgcgcagactattcagaactcgattcttggatgccagtcccatcgtccatcactggtgcggctgtacacggcgaagaagatacagcagcagctggaggcggcgcggacggagttcatccggggcagcgtggcggtgcggaagcaggcgctgctgctgcccaaggtgctgcactactacgcccgggacgccgcgctggagctgcggcacctggtggagctggtgtgcgagagcttgtcggacgcgcagcagaagcagctgcagctgctgcagcggagggccgtcgacaagtgcgtcgagtggatgccgtacaagtcgtccttcagatacgttgtacatagggatctggctgacgactaggcgggcgccagccacgtacggtttgctctgtgtgattgattgcttgcttggttggttggtttacaaagtgtaaaagtagtgggggtgggggtgtacatgcatgcatgtaaatacaggtgtgcatgctcactacttttgagctagtgagctgtggcttgaaacactgtacatttctctttgtgggctttgcgttgaggaatttgggatttgagactgaccatgatttagaatgtttgattctattatgtataaaaaagcagcagcgtgctcactggctccacactacggtggtctgattgagatttgaagagttatt

SEQ ID NO: 80193 - DNA, 796 bp, Zea mays
  Clone ID: MRT4577_173157C.1
caatcacatgcccgatttggtattcaatccaattcagttccatcctcttcaatatcgacatccaaacggagagcaatgtgtcttactatgtgtgatattgactacgattatagagtcattgggacggcgattgatctacactgccttagcagtggacttcaataagagaatgtttgtttccacctaatctatatagatcagagtggattgggtgggttttagtaagtcaaaatgccttccaaaacatgtgagtacaaataaccgaacaagcgtgagaatggaatattccgtgagaaaaaacagaagacgcaagcctgctcatgtcgaccgcatgtgacgagttcacgctccggacaaaacaaaccttgatgagacccggggcgcgtgcacatcacagcagccatgctctctccttgacggtgagagatgatgatgacaggtgatcattgattgccgcacccgcaccgcacggccgccgcactcgttggcaggcagaagcagaacagacacggatggaggcgcgggtggaccacgacgaccaccggatgcatttccggctccggggccacgggccgcgggtaccatgcggccacgcctcaccagccagcactcgttgtttagtgccggcgccgctcgttcacagacagtcacgggctccgtccgcggtaaagctggaagcatccaagcgcatggccattcccggacgctccggacaagccccagtcgccaatcgccatgcccgtccgcccacaagacggtcaaaaccaacggccgcaggacggggtcaagttaggtt

SEQ ID NO: 80194 - DNA, 870 bp, Zea mays
  Clone ID: MRT4577_173158C.1
caatgctctggtcatgcatgtattgccctacactctcaaaagtttcatcagtctgaaatagtcccatggcttttctggcctatggtctccacgacaagcgcatgaagagcacggacatgattctgaaggctgcgtataatgttggcggccaatcagtaaatgcgcagactattcagaactcgattcttggatgccagtcccatcgtccatcattgtgggtccgcgcgctgttcacgccggcgaaaagatccgcggcgaggcacccgtatgcgctccagcacccagaacccgttgcgcatttcgcgctgtcgaccggagcgttttcggacccacctgtgcggctgtacacggcgaagaagatacagcagcagctggaggcggcgcggacggagttcatccggggcagcgtggcggtgcggaagcaggcgctgctgctgcccaaggtgctgcactgctacgcccgggacgccgcgctggagccgcggcacctggtggagctggtgtgcgagagcttgtcggacgcgcagcagaagcagctgcagctgctgcagcggagggccgtcgacaagtgcgtcgagtggatgccgtacaagtcgtccttcagatacgttgtacatagggatctggctgactaggcggtttgctctgtgtgtttgtttgcttgcttgcttgcttgccttggttggttggtttacaaagtgtaaaagtagtgggggtgggggtgtacatgcatgcatgtaaatacaggtgtgcatgctcactacttttgagatagtgagctgtggcttgaaacactgtacatttatctttgtgtctttgcgttgagggatttgggatttgagaccgaaaaaaaaaaaaaaaaaagcggcc

SEQ ID NO: 80195 - DNA, 401 bp, Zea mays
  Clone ID: MRT4577_173159C.1
agaaaaatgggggtttcggggtttttttcggaacaaagggattcattggcccaattaattttttatgaaaatggggaattgaaacataggaacagggacacatgggtcgtttgggccaaacgaaggggggggcgtttcacttgtcgttggggacgcggacgaacttttttccgacgtttcgaccgtggaaaaatcctttgagcgccttgggggcccttttaaaccccttggggacgtccttgacgtaggggaacgtgccctccctgatgtacgggaacccccaccccttgtactgggggtagaggggcttgtggtcgggctcgatgaacccttgcaggcggaggcgcttggaaattacgggggggaagttgcgcacggggttctttttcccgtcccccagg

SEQ ID NO: 80196 - DNA, 1047 bp, Zea mays
  unsure (1)..(1047): unsure at all n locations
  Clone ID: MRT4577_17315C.1
ngatgaatcaatgccaatcattcttgctcgtatgattgggataattggtccaattgatatggaaatgcttgcatcaggacaggagacccagaagtacttcacagatgactatgaccttttccacacgaacgaggtaattattggattatatgcaagattaccaacataactttgtttcagtatgcactatagttgacaacaaatcagtgatgttgttcgtgttgattttgaatgatgacctgaaaaccacatgactggtaattactggaacgaggtaccctaacagtttgttgtcaccatcacaccatgagatctttggcataagaattttagttgtttgttctttgtgcagtttccattcatcactggatacttactttttccattccatttcctgctaaaaaataggagacagatcagttggagtatttgatcccaaagaaatcctctttgcggcgccacttgcagtgcccagacaaaaaatttgttgactttttgtcttacctgctgcaaataaatcccagaaacagaccaacggccagcgaagcgttgcaacaccgatggctttcgttcaaatatagttcaacggccaatcagactcgttcctgacaagtaggcaactattcaggggtaacaacgcagagtaagcaacatgtttccttttgcagtaggatttggcttcgtggtttttttaggtcaacacttggcgttgaaaaacctgttttgcaaggtgaatcgatcgtgtatatgcgctggttcatgcatgtaaatatgagaaaagtggttcctttttttttctgtacagttgccatgtactacagtgttgatccaactcatggtatagcaaaatggaattcataaaaaaaaaaaaaaaaaaaaaaaaaaaaaaaaaaaaaaaaaaaaaaaaaaaaaaaaaaaaaaaaaaaaaaaaaaaaaaaaaaaaaaanaaaannnannnannnnnnnnnnnaaccactggttaagggcgaattttgnaaatttnnataaaactggngggcgnttgggcatgcatttaaaggggccaat

SEQ ID NO: 80197 - DNA, 615 bp, Zea mays
  Clone ID: MRT4577_173160C.1
gcggggtcgtcctgctggagcgtgccgcccggttgtctttgcacttccctgccctacgccatcaccatcctagttgcgggcgtgcttatcgcgctcaccttcggctcgctgggagactgaccgcgcggcatgcccagcttctttactcagctcggccagtacacgtggccctccgtgctgctcggcatggcgtgcaggcgtcgtgctcatgcggcgcgactctctgcatccatgacgcttggtcctgtgcgggcctctgcggtactgaggtcttcaccttcagcctggtgtgggtgataggctccacgctgaactgctttctggactgccgcatcatcgggtcacacattctgatccctggtgtgagactgtttcctgctatccgtccttcttggccccgctgtacattgctccaatgcagtgtgacagtgagcagaagctcggtgcctgcacgaatgcctacggactaggcacaagtgggactggggaaccaagcaaacaagccggagacagacatgcttccttagacttgtacgagagtgcaatctctggagtcccgcgacctgactaagctgaggcaggcgcctgcgagctcctcattgatgttgatgaacg

SEQ ID NO: 80198 - DNA, 581 bp, Zea mays
  Clone ID: MRT4577_173161C.1
ttttctcgttgcccgttgtgctctctctgtctattcttttgccggctcaccgcgaggcatgtgcgtctggttatgggttcggcgacgccgccgccggcgacggagttatgactcttcgaaacttgggaagggctgccccacgcccagttacccgagctgctccagtgaggaaccctgcacagccagaacggcaggctcctcctgcaggtcctgttcgagatgagggcgaatccatggttggaggaattgccgccagcattgctcaaggaatgacgaatgttacgggtagtgacatggcacatggggttgatgatgctgtattaagtgcccggaacattcacctatgagactgctgcctctaaaactgctgctgatgcccctgcccctccagagatgaatagctgacgcttgcagcatccattctaactgcttgtccaagattgtctcagcaactatggcagtgagatcaataagtgccagatctacctagacatgctgaacgaacgacgacgtgacgttgtggctgcctaaactgcctctggggttattcgtggattttatttcggaggtgctatctcatt

SEQ ID NO: 80199 - DNA, 646 bp, Zea mays
  Clone ID: MRT4577_173162C.1
gaaatgaatgaacagctctgctgatcaactgcactcgctgaaaaaggctcctcgaatctgggctgcctccagctcctcgcgccgccgcctagatcccacgcgtcgccgcagccggcgtcacgccccttccctccccgggttcgtcgccgaacttccccgccgcccgccgcagtctcctcccctacgacctcctgccaccaccaaccgccgccggctcctccccatcttcaactctaccgaccgcctcctcctcttccccatcttcaacggacgccaccgagcgtgcgctcctcctgcgcagccaccacccaagctaaaatatcgacccaggaatggcagtgtcttggacacgagtattgaagcgtggagttattccaagagacacagctcaattggttgggacaagaggctttgccgttgcggccaagggaaaggagggcggaaaaggtggcgcggctgatgctaaacctgtgctcagcaaagaaatgaagagcacaggtgtgtttggggcgaatatcctgaaggagggttctgacccgaagatccaaccagactctgagtaccctggctggctgtggcacatgatcgacaagcgtccggtgctgagcgagctacggaggaaagatgccaaggtgctgccctatga

SEQ ID NO: 80200 - DNA, 366 bp, Zea mays
  Clone ID: MRT4577_173163C.1
aagaccttttttttttttttttttttttttttttttttttttttttttttttttttttttccggaaaaaaaccttttttttattaataacatgcagtatgggcgggggtgcactgcactcccctcctgtttcccttgaaaaaaaaactatacctttcctgtttttgccctgcagtaccccagttgatcaatcgttttgggttttggccatttacaaacttgaccatggcagaaaaaaaaagtctgaacttttttgctaacaaacctcaaatagaaagctgatgagtaccccattcccccgcgggatcactttgggagctgctcctccttgctcgcttcctccagctccctgaggcccccaaccctt

SEQ ID NO: 80201 - DNA, 119 bp, Zea mays
  Clone ID: MRT4577_173164C.1
cggacgcttgggcgctacgtaatggttctccttgcctttgcagagggctgcgaacccccaccgtccattgtttaccccattgaggccagagacttactctagctcttgcagaagctcac

SEQ ID NO: 80202 - DNA, 264 bp, Zea mays
  unsure (1)..(264): unsure at all n locations
  Clone ID: MRT4577_173165C.1
ttcccgggtcgccgccctttttttttttttttttttttttttttttttttttaattttttttttttnnnnnnnnnaaccaaaaacggggggcaaatttattggccttttttaaacctccccaccaaaggtggggccggttgggtcaatacctggtggaaaaaaacattgggtggccaacccaatcaacccccttagtccaaccttcctttaatttttgacaaatttgggggttttgggccccccaaggaataaaaccaattttt

SEQ ID NO: 80203 - DNA, 310 bp, Zea mays
  Clone ID: MRT4577_173166C.1
tcttctttccaagaaaccaccgccgagcccaagctgacaatcgcgcgaggcagagcagagagagaggcggttagcaaaacaatggaggggaaagaggaggacgtgcgcctggtcgccaacaagttctcggagcgccagcccatcggagacggtgacgcagtgacgcacctgacgacaaggactacatggatccccgaacagctccatgttatagcccgctgagctcaactaatgatcatctaccgctcggtcatcaccaagttaatgagcaccttgctgtgcgtggcataaccatgctaacggccatggt

SEQ ID NO: 80204 - DNA, 139 bp, Zea mays
  Clone ID: MRT4577_173167C.1
gtctctcactgatgataacgctgtacgcaacacttggaactgcccttgcgctaatcaatagcgctccatcgagaacttgacaatttgcagcagaaggctgactgacatcgagcgcgatctgacggcatctaaacatgct

SEQ ID NO: 80205 - DNA, 293 bp, Zea mays
  Clone ID: MRT4577_173168C.1
accttcacccccattttgattttgcgttagcctacatttacattatcggtgcggttaaaaacttggattttcatgtttactgaaaagcacccccaccctattgatttattcatggactggtgttgccaacacccgcaacccaggcgcattcatgaaagaaagaaacaatatttgtaagccaaacagccaacgcaacgctacgttcataataattcaagaacggggattggcacaaccctgctttgtggaaaaaattacaacattatgttgggggctgcccgggcctttttaca

SEQ ID NO: 80206 - DNA, 185 bp, Zea mays
  unsure (1)..(185): unsure at all n locations
  Clone ID: MRT4577_173169C.1
catttcatttcctatactcacacccncgagcggtgtgatcatatttttttatcacccacccactcctcacatcagacacctactcaccatcacccaagacacttcccccatagctgaagcaaataacttctctatgtctttcgaacaacaccaacctgttgatacttttctaccttattacacac

SEQ ID NO: 80207 - DNA, 227 bp, Zea mays
  Clone ID: MRT4577_17316C.1
tccgggacgaggcgatcgcgtctgcggtccttcacccgcttcggttcgatcgcaccagcaagaatgaccccctgccctcgatgaacttgcgaaaaagaggagcttcccttcacaggaccagctcacagtgcagtcacacaaaggacggagcacacgactgcttccttgaaccacaacaacatggatgtcaccaaggaagttcctaacaattgcgcaacgaaaacctt

SEQ ID NO: 80208 - DNA, 212 bp, Zea mays
  unsure (1)..(212): unsure at all n locations
  Clone ID: MRT4577_173170C.1
acatccacccaatatatttagcccaaccgccnacccccagggggggtaaaaagagaaccgccccgcacccccaaaagaagaagggcggcagaaaccacaaaacccccccaaaaaaaaaaaaaaggcgcccaggaacaagcggcacgaccgcccaacaaggaaggctaaaggagcccccaccaacacaaggccaggcccgggaaccaagaggg

SEQ ID NO: 80209 - DNA, 538 bp, Zea mays
  unsure (1)..(538): unsure at all n locations
  Clone ID: MRT4577_173171C.1
aattcggcacgaggagagagagagagagagagagagagagagagagagagagagagagagagagagagagagagagagagagatatagagatagagagagagcgtgatcgttagagcgagagagcgatcgagtgctctcgttcttttccgttctcgtgccatagctttcgatgacgcggtcccgcttccgccccgtgcccttgcttgctcttcttccctccctctgtctcgatgtctcacctcttttttcttcgtccttcccactcctgtcctgtcctgttgtgttttctttcccttttccgctacctctctcttctatctctctttttttcccttctcctatgtatacactgagtctgtctttctttccgcgctcttttttttgtatctatatctatttatcccctcctgctctttcgtttgagtcatctacattctgtcactctctctcttttcccgngaccctacgttctctacttgatagactggcctctttcgctgtctgcgtctcctcccttcatacttatctctcccctct

SEQ ID NO: 80210 - DNA, 212 bp, Zea mays
  Clone ID: MRT4577_173172C.1
ccgccagcgacccgccctccgtgctccagccttccccatgatttcgccgacgaatctcctccggcgcggaagatcccctgctaaatggcgggcaggcggcgagccccttttcctggggcgacggccgggactcccttcaggcctcatctggctgtagagggaaggttcttggggggggggtgtaagataccttccctgcgaccctgaagtga

SEQ ID NO: 80211 - DNA, 181 bp, Zea mays
  unsure (1)..(181): unsure at all n locations
  Clone ID: MRT4577_173173C.1
ctaatctgcagtcatctgctccaccatcaccattaagcccaacaacagccagcctgcgctcacaactatgtgccgcagcacggcatctgtggccgtgcctccggtgtcagttcttgctccagctgtggtcatcgtntcataggtagcggaggtaaagaagaagatagtggcgtagagtggt

SEQ ID NO: 80212 - DNA, 403 bp, Zea mays
  Clone ID: MRT4577_173174C.1
ggggaaagtttttagcgttagcaatactgatccacaggaagtagaaaaggcaaagaaagcactgaaggagcaagaacagtcggtgattgacgccatagcaaggcttgctgaggcatcagatggtgaaagtggtaaatactaatccatttgtttcttagccataggtttatggaaatttgcaagatgctgcagaaaacactcatttctgcttccagtctagtaggatggttgccccaaacaagggtcaaggggagtggttttcagatatgttgtacaatgcatgatgtatatattacgcaatgttgtagcacaatggacatttgccctcgtaattatagtcaaccttaaatgagatatgcacgcggtcatcttttgcatggccacaagtggcatgaagtaaaca

SEQ ID NO: 80213 - DNA, 1839 bp, Zea mays
  Clone ID: MRT4577_173175C.1
cgaaagctcgaggactgtactcgctcgcaaaccctagccgccggaccggccggtgaccgtgcggcgctgaggcgcgcgctatataaacagagccatccattcctctcttaccgttcagtcccacctcgaccgcctcctctcccctcccccggctctgtctgttgacttaccccgtcgagctttctagtcagctgctcccgttgccatggggaaggagaaggttcacatcaacattgtggtcattggccatgtcgactccggcaagtccacaaccaccggccacctcatctacaagcttggaggcattgacaagcgtgtcatcgagaggtttgagaaggaggctgccgagatgaacaagaggtccttcaagtacgcctgggtccttgacaagctcaaggccgagcgcgagaggggcatcaccattgacattgccctgtggaagtttgagacaaccaagtactactgcaccgtgattgatgcccctgggcaccgtgacttcatcaagaacatgatcaccggcacctcccaggctgattgtgcggtgctcatcattgactccaccactggtggctttgaggctggtatctccaaggacggccagacccgtgagcatgcgctccttgctttcactcttggtgtgaggcagatgatctgctgctgcaacaagatggatgccactacccccaagtactccaaggctcggtacgacgagatcgtcaaggaagtgggttcctacctgaagaaggtggggtacaacccggacaagatccccttcgtgcccatctctgggttcgagggtgacaacatgatcgagaggtcgacgaacctggactggtacaagggccccaccccttctcgaggcgctggaccagatcaacgagcccaagcggccctcggacaagcccctgcggcttcctctgcaggacgtgtacaagatcggcggcatcggcaccgtcccggtgggccgcgtggaaactgggctcctgaagcccggcatggtggtcacctttgcgcccacgggcctgacgacggaggtcaagtcggtggagatgcaccacgagacgatgcaggaggcgctgcccggcgacaacgtcggcttcaacgtcaagaacgtggcggtcaaggacctgaagcgcggctacgtggcctccaactccaaggacgaccccgccaaggaggctgccagcttcaccgcgcaggtgatcatcatgaaccacccggggcagatcggcaacggctacgccccggtgctggactgccacacgtcccacatcgccgtgaagttctcggagctgctcaccaagattgaccggcggtcgggcaaggagctggagagcgcccccaagttcctcaagaacggtgacgccggcttcgtcaagatgatccccacgaagcccatggtggtggagactttctccgagtatcctccactggggcgcttcgcggttcgcgacatgaggcagacggttgcagtcggcgtgataaagagcgtggagaagaaggacccaacgggagccaaggtgaccaaggcggctgccaagaagaaatgatgatgattctgcatgtaatccatggttcctggtttctttgctggtcggagtattttgttgggtggtgctagtagtagttaacaaaagaataattttcatgggttcattgtgtaggtttggactgttgtgttcgtgattgcgtaccacactatatatattgggttttgcttctatagtaatattatcgatgaccatgatgctatgaggcttgtctacccagtcatgattgcttgccttttggctaataaacggcccagcagtcaaattaaattatagaagcatctccaac

SEQ ID NO: 80214 - DNA, 507 bp, Zea mays
  Clone ID: MRT4577_173176C.1
gggaatcaagcgaaacatagcatccgatgtggtagagggagaccaagatgagtgccgaagaggacaacgaggggagacggagaaccagaatcggcagctgactagtagccaaagccgggggcctagacaaagggaaccacagccgagttctcactgaccgacttaccttgcggcagtgcatcgcagatgagcgcacctggaggtctactacgctttatagatcgaactactccatagccgatgctagctagccttcgtgcatacgcgaaagagataaatgctctaggatactatgcgatcactggcgtgctcttgtgctggtggcatgcggaagacgagtcttagatatcgaggaagcttgtcagtagcatatgagctgatatgctcatgtcacacacggagacatataaaactgttcgcgctcccggtgtacagtacggcaatctcgatctctatcagatgttatacactaaacagagtatactctatttcacaccttcttgtgac

SEQ ID NO: 80215 - DNA, 362 bp, Zea mays
  Clone ID: MRT4577_173177C.1
atgaacaaagacgtgtataaagtaacccgcgaatagaatggcgactattccaatccatttgcacactcaaaagttgcaacaagtgacaaggataaaaagaggatccagactatgataactgaagagagagttcaccctaaaacaacttaaatggtgcaaggcacaactcctgctcaaggccaagactcatgatcctttctactgaatcaggatcatcatggtcatcaggaggaggttgtgcagatgatgcaggaggctcagcttcatgctggtgccgcatagtcatgtaaaaggaaactgtgcgaggcttaagagcaacagctgaaacaaagtgaaggttcggatcagcaggcaaattgctt

SEQ ID NO: 80216 - DNA, 293 bp, Zea mays
  unsure (1)..(293): unsure at all n locations
  Clone ID: MRT4577_173178C.1
cttcctttacgtagccagccagccatggagacggcctccttcctttagtggcgctggccctggcggccctcgtccccgtctcgctgctccttgtgaaccggctcctctacggcaagctgcccccggggccgcggcggcggcccgtggtgggcaacctgttcgacgngcagcccgngcggngccggngctaccaggagngggcgcgcggggaggggcgcatcatgacggtgnggctgggcacgtcgcccacagtggagggatccacggaggacacggtcaatgaggtgcttaaa

SEQ ID NO: 80217 - DNA, 663 bp, Zea mays
  unsure (1)..(663): unsure at all n locations
  Clone ID: MRT4577_173179C.1
ccggacacaataaccaagcacgacatccacatatgatatatctagtatgtaccgtgacaaggagaggggggttaaattaacgattcttattgcatggcgcagtgtgcaagttttggaaggccttggtgggccaaagtacttgaaagatctcactccaatgccctgatcgacatggtcagatccaaagtactctgcccaagaacgcctccgcctccgccgttgtcgtcgctgcttcgtctcgtcttttcctgccgttgctgcgtggaaactgcaggggcggcgacgggtggcgacagcgagagggaggtcgagaactcgcagctggtgtcgtctatgaagaagggcccgctggtctttctcttcttggccgacgccgtggtaggggacaagccgagctgtaggtccaacgtcgtcgtcgtcgcatcttgggcctccaccggcgacgatggccgccgcttgaggcacgcctcgtcctcctctgccggagtggctgtggaggcccttgttggttctacaacgcgcttcgaattctgccgctcgagttgatgcccatcgtcgatgacgacgggatccgacgacgatctttttgcgaccatggagctgctacccgggtagccgacgactacgtccctactgcttcccccgtgccgncatctgaacgga

SEQ ID NO: 80218 - DNA, 403 bp, Zea mays
  Clone ID: MRT4577_17317C.1
gaccagctatattgaccagttctttgagtgactcgaacattcacaatgtactcagaagctgactattgagtttgtgggggagaataacctgaggaccattagaacgacacacataatgtcttcttcagacccttaaattaggacgaatgggccgggagttggaatgtttgttttgcatgatgatgaaatggatcacctgaaagccgaggaagctacttatgaggcacttgaaagggcacagataggtgaatggcactcccttacctatggtgaaacatacacttacctaagtcaatcccttggaaacccagtatgatcatcaggatatctgatgaaaaaccacactacaccataggggattgtaccacggtcttgaaaaaagacactagccgtgatcacgact

SEQ ID NO: 80219 - DNA, 194 bp, Zea mays
  unsure (1)..(194): unsure at all n locations
  Clone ID: MRT4577_173180C.1
gtcctttccccccaaacaccggtccactctaaatcctactccccacgccagcgaggcatccccatgtccgattcgccacccaantcaaaaggatggaagctaaacccacaacaactcttaaggccgaccatcaacaactagacactcttcaagctgcacaaaccctaaccccataaccctagatccctcccaca

SEQ ID NO: 80220 - DNA, 2242 bp, Zea mays
  Clone ID: MRT4577_173181C.1
cattgggaccctcgaggccggccggaggaatgtttgttggagagggagggaaaaatctaggtcataggtttccgaacgggttggctttgatggagcaatagaacaagtgggctgaaagcttgaagtaatgaacggctcgagttgtgcagctttgccccgcattttgtttgaaaagtgcagcgttcctccgtttcgcttctcccgctcccttccgcaacggcgtactccctccgccgcccgccgaccgccgactcccgccgcaaaatcctgcgtcagaagcgccgattctcggacgtcctccggatctgagacaccgagcgcactacgagctgtagctgtagtgacctaaaaatgagtgagggggatgctactcagcttgcccttgagaaaggattaccgcaagtgtctaatgatgatggttcgagtagtcctgcaactatgcacaagttgaaagttgacacagaagatgctggaagcaaaattgaatcacccactccagagaagcttgaatctagaagcaaaggggttgttgtgagttcgttggcaaggaatttacttgcagagaggtacaaagatagatttgcaaatcagttcctggaagatgagggtgacatagatgatgaagactataatgacagtatttcgccaggcatgagccgatctcagagatcaagaagcattgaacttctggagaagcacaaggatttactgaatctttttaatagaatggagagttctataaggttgctacgcttacggaagaggatggctacatttaataatattgccacccaggtggaaatactcgcaaaaaggaagttatcgtactgtcatttggcccaaatgaagtatttgtttccagaagcaatccagattaagagggtacttctacatgacgagaaaagcctatgcatgtatgctgatatggaaatcatacttgtaatggatgttgtggaatacacaagtactgatcactctccatccatgacaatttgcgatgctttttactcgaagcttttgacatttttggatgctcatcataagggtacagacattccagaggcaatcttaccagaaccctttaacttgaggtcaaggggccagttaaatcttgaggcatcacataatggacatgctgctgagccacatctgcaaggcaccactaaggatggattctcaaatgcttcccacttcccacaatcttttcgaaagctaatgtcccagaaagtcattactgatggagctgaaaggactcaattgctacttgatccaacaaaactgagctctgtgagtgcttatgatacagaaggaacaaacagaagccctaaaaagcaagacaaacatgcttcagttacagtgaactctgaaatttctgctactccaagccgtcatttgatctctcgttgtcaagagggtacgccaaaacaagagaccttagaatcaccactgttggctcaaacaccagcaactcagacacccaaaaggcaattgcccactccacttgagaaacttgaggccacatgtggacacatttctgaaccacgttcagctagttctgcccgcagatcactaaatacatctttaaaatttgaagggggaagcccttcttatcatgatagaatggaacatgtggctacatctaaaattggaattctctcggaagattcatctagtttcaacaagtcattagaggagaatggtcctgtcttctttactgatagagacaaaatcaatctggcagacccagtgggtgtccaggaaaagatggcttcgttacgttccacatttggcatcgtctgcgatatttctcattctatcaagaattcgctaattacaaaacaggagcttttccataatattcttgccaacaacttggagatagaacagatgggagagatagaagagcagctacatattttagaggatctggctcccaattggatatctaaggtgataaatggaggagaaatattttacagctttgaaactatagcagatcagaattcagtgtgggaaaggcttgtagaagctgtgtgaggtgtggaatagctgggattggtttaaagctaaagaatcagccacatagtactatgtatgtaacgctaacggaacccatcaaacagccacattttctcatcatggaatcctcaggattgctcgtcttattcaattttaattttttcttctgttgcattgctaatgtgctaattacatgcttaatactgaaatttctacaagacat

SEQ ID NO: 80221 - DNA, 447 bp, Zea mays
  Clone ID: MRT4577_173182C.1
gggggcgagaagaaaaaaaaaccacccccgccattctgggggggaaaggggcaaccttgggaaaacaaaaaccccctggggaacaaaaggggtggggggggcaaaaacaaaccaggaaccctctaaagaggggggaaacgcgacagcttaatcgggttcgaaaaaaaccttgggccccaaccctttaaagcccccgggggggatccccccgacggggacaagggagaaaaagcccccctggggaaccccccaaagggtcctttggggggggaacccaaaaaaaaccctccgggggacgcccctgaaccccggggtccaaaaggggtgggggagcttcaaaaaaaacccgacccccggggggcccaaggccttttgggcaaacttcctgaactccttgaggggggggggggccctcttcttaaaagggcaacccgggaggcccttggg

SEQ ID NO: 80222 - DNA, 538 bp, Zea mays
  Clone ID: MRT4577_173183C.1
gccgaaaaaaaaaaaaaaaaaaaaaaaaaaagaaaaaaaaaaaaaaaaaaaaaaaaaaaaaaaaaaaaaaaaaaaaaaaaatctccgccaaccgccgccgccattcgccattttaacgtttggcccatcccgccattgttgttttccagagtccaggcgatccaggctgcgcggtcgctcggtgttgttagtcccgaccaccgccggccatggcatccaacggcatcgttcccagagatgtatgtgttgctggcgttgcacgcacccctttggggggtttccttggggccttgttttccttgcccgcaacaaagcttggttttatagcaattgaagctgttctgaaaagagcaaatggggatccggccctcgggcaggaggtcttttttggaaacgttttgagtgctaatttggaacaagctcctgcaaggcaggccgttctgggtgcagggataccaaacactgttgtttgcaccattgttaacaaagtttgggcatctgtcatgaaagctattattttcgccgcacagccaattca

SEQ ID NO: 80223 - DNA, 408 bp, Zea mays
  Clone ID: MRT4577_173184C.1
tcgagtttgaatttcgcggcgggttcgggcgaagtgttgaacgggtcttgtcgagtttgaatttcgcggcgggttcgggcgaagtgttgaacgggtcttggctgcttgccttctactttggtttccgcaacctgagagaatagctagagaaaagggaaccacacaccttttttgctccgcctccacccccttcgttcggcgatggccgacaaggcgaccgtcgttccaccgcgcgatccgtggcctttctccaccgtcatggtgggcgatctggaggccctcgtcgctgatggtttgctccgtcctctctccggtgacccgcagccggagtggatggccccctcgagcgaggccgacccggctccgccgccggggtatgtggtcagtttcgtctccttccacaagcgg

SEQ ID NO: 80224 - DNA, 133 bp, Zea mays
  unsure (1)..(133): unsure at all n locations
  Clone ID: MRT4577_173185C.1
acggntcgagatagctcatgttcgatttcagctcgacttctcctggatcagacctatgagctgggaatgcacctacctctgcatgatagctaaccgagacgcacgacgtatcattatatggactctggcatcc

SEQ ID NO: 80225 - DNA, 329 bp, Zea mays
  Clone ID: MRT4577_173186C.1
gctattaagacttcatgaccaggcaaacattgccatcatagattacttgttcacgcgacaactgcaaggatgtcaacaagacgagatattttaagcttccacgaggttaccactaagcctatactgttggacgtccgcacgtgttgtaaccgcaatggaaggcgagaccggccttgcccgataccttaacggctagggcctgtgcatgtcggcgtcgtctacatagaccctcttttactcactgtattgaaggtttgcttcgtgtattctatctctatgccactggttctttttgtatttgtttgtagtttttttttttatatgtcttt

SEQ ID NO: 80226 - DNA, 486 bp, Zea mays
  Clone ID: MRT4577_173187C.1
attgggggccaatcgcgcgtcccgtcacacgtgggcaccgacccatacgagttctaccagtatgtgcatttgtcggaggttggtaactgtgtcggatctggtattggtggtactactgccctacgaggcatgtacaaagaccgcttccttgacaggcctgtccagagggatattctgcaagagtctttcatcaacacaatgagcgcctgggtgaacatgttgctcatgtcgtccactggaccgatcaagactccagtcggagcttgtgccactgctgttgaatcgattgacatcggttatgacaccattgtggaaggcaaagcacgtgtctgcttcgttggtggtttcgacgacttccaagaggagggttcgttcgagttcgccaacatgaaggctaccagtaatgccgaggacgaatttgcgcacgggcgcacaccgcgagaaatgtccgccctaacacaaccaccaggaacggcttcatggaat

SEQ ID NO: 80227 - DNA, 182 bp, Zea mays
  unsure (1)..(182): unsure at all n locations
  Clone ID: MRT4577_173188C.1
gctggctgtctccttcccctcttntncaagtcctcctcgggttagggtgtccttagggtgtttgctggaggggcccgatggcggcnnggctgatgtggagtaccctgttgctgtcgtcggcgggactttgcgtctgggcccactcagcaaccgagtgcgtctgggagtaatgcgcttttcgc

SEQ ID NO: 80228 - DNA, 794 bp, Zea mays
  Clone ID: MRT4577_173189C.1
tgggacctcgagccggccgggaacatggtaccaaacgggcaccgcgacaatggtcatatcgacgaggcagcatggccggtgccgtcgtcttcgtggatcgacaaggtgctcttcctcggcacaggcaccagcggccaggttccagcgatccactgcgtcaccaagcccgactttggaggttgtgccgcctgcgaggacgccactcgcaatcctaccggcaagaatcgcagaggatgcacggctgctgctgttatcggtcgcgacgctcaggacaagcagcacagcaccatcttgatcgactgcggaaagaccttctattccaacgccgtcgtccactttccacgcaacggcgttcgctccattcgtgcagtactgttgacgcacgcgcatgcagatgcgatcctcgggctagacgatctcagagcatggacgatgggtggtgtgatacagcgctacgtagacatctacctcactcaagaaacaatgacggtggtcgagggcatgtttccgtaccttgtcgaccgttccaaatctactggtggtggagacgtccctactctccgatggaacatcatcgatcagaatgcacccttcaccatcccggcgtccgaaggccgcaaagaggttcgcatacagccgctcccggtgctccatggctacgttggccgagcatcgcccttctggtgcctcggcttccgcatcgactccttcagctacatcagcgactgccacgagatcccgactactacactagagcatatgcgaggcagccaagccgtcgtaatggacgctct

SEQ ID NO: 80229 - DNA, 1362 bp, Zea mays
  Clone ID: MRT4577_17318C.1
atggccgttacttcccagtgcaagatcgctcttcgccctggatccatattctactttgggaccatcttgtccgtagcagatgaaaagggaattttgcaccgcatagcggatccaccggagaagaaactttccttggaaatccccaggaagccagagcaagacagcggacaacgcaacctcctgtgccccagacgaagactacctcttgcaagccgagagccaggaattcacttgcccgaagaactccattgcccactttgcccacaaaggagtggacacggattacaagaaagaaagaagcaagcgttcctgcaaaagggacggaggcgttgggagaagaggcctcgtgaggtggtccacatcgccggaccacccgtcgctcgtgcccgagcggcaccccgtggaggcgagcggacactggatgacatcctcgatgcccagtgcccgtaccacaaggacatatgccacaccttacgaaactgcagggacttcaagcactccgtcggaaatggccgactgttccagcctctaccacctcccccaccacgaggagggcctggcgagcccaggaagcctcagcaaccagaagggggagggggtggagcattcccgcgcgttgatagggaagtcaacgtcatcttcgggggacgcgggtcgcaggagaacagaaggcagcaaaagctcaacgaccggcagccgagcggatcaatggctcaacttcgaccatcccggcaagtactcactcctcgtcgatccggtgatccgagagagcagggtaaagaaagtactagtgaacgggggaagtatcatcaacgttaccttccctcagacgctcctaggcttggggtcgcactccaagacctcaccgagtcagacacccctttcttcggcattgtgccgaccgaaggagagtacccactcgggcacatctacatgcccgtcacctttggaactccagaaaactacataaccgagttcctgaggttcgaggtggcgcatttcgactacgggtacaacgccatcatcggcaggccgggattggcgaaattcatggccattccacacttttcatacatgatattgaagatgccaggaccgcaaggaatcatcgccgtgcacgctgacttccaaggcaccgcggaatgctttcagggagccatccaggcggctcttactactagacctccgacgacttcctccacgcaggcggacgcaaagcctaaggaagacctcgcaatacccacgaacgaagctcaagccgtgacctctatacgaccaattgaggagaccaaaagaatcatcttgggatttgccgatgagcggaagactaccatcatcagttctagccttgatggcaaatag

SEQ ID NO: 80230 - DNA, 2152 bp, Zea mays
  Clone ID: MRT4577_173190C.1
cgggcgcggggcggcgtgctcccgaacagccccatagctcacccaaccctcacaccgtgttcgtcagcgtccattcctcatggccatcgtcgtcgtcgtcttccacaacccacgaggccggccggctgcacgcacgcatcctccgcctgccgcacccgccaccgcaagaagagggttcaaaatactcaagatggctccgccggcacggccgccacgtgttggggaggacttggaggagggcacaggcgagagctccccacctcctcggtcgccacgtgcgtccaaccccgactgccacgaggtgcagaggaagatctgcgagcgcctccgccagacggggcggcacgaccgtacgctcgccgaccccaccttcaacgcccgcttcgcccgccacctcgagaggttgccgcggaggtacctactcgacctcgacctggacgacaagctcgaggatgtcttgctgcactgggggattctcgacgagtgcgccgaccccaataagcgacccgtctttcgcgcgcggttcataaagtataagacagttcctagggaggatgacggcattggtcatgatcaagatcacgaggagccgtgtcaaaagttgttggaggacctcagtttggaaagaagaaagatcgcggacagaaatgattccctgtctatctcctctaggggcgatttgaaaactgtcctccttcatgagatcattttctcctccatcgacaagcccaagctcctaagtcggctaactgcgttgctctctgaggttggactgaatatccaggaagctcatgtgtactccacgaaggatggtttttgtttggatgtttttgttgttgatggctggaagacagaggagactgatgagctgatcgcggcgattaaggagacattaacacaaaaaaatgcatcaccatctaattcaacaaattcttcgacgccggagaaaatagttgacctacaacaacaggttggagattatgaaattgacttaagcatgctaactaggggggacaagatcgcatctggatcatccgcagacttatatcgaggaacttataaaggccatgatgttgctatcaagtgtctcagatctctatatctcaacaatccttcagaagttgagtttctgcaggaagtacttattctaagtggtgttaatcatgaaaatattctgcaattttatggggcatgcacaaaacatccaaactattgcattgtaacagaatacatgcctggagggaatatatatgactttcttcacaagcaaaataacttcttggacctccataaaattctaagatttgctatcgatatctcaaaaggaatggattatctgcaccagaataacattatacacagagatttgaagtctgcaaatcttctgctaggccatgaccaagttgttaagatcgcagactttggtgtggcgcgacatggaagtcagcaggggcagatgactgctgaaactggaacctaccgatggatggcaccagagataattaatcataagccgtatgaccacaaagcggatgtattcagctttgccattgttctttgggagctggcaacttcaatggtcccatatgacaacatgacacccttgcaagctgcattaggagtaagacagggattgcgcttggacattccgggcagcgtgcacccaagattgaccaagctgattcgacagtgctggaacgaagatcctgatgcgcgtctgacttttgcagagattactaaagaactccaagatagtctacaccatatcgaggcacccaagggagccagccgtcgatctagagcaaagatgcagaagaaataagagggcaaggtttcctacttttttttgggtgtgttacactagttgcagtatgagtgtttaaggtgtatgtcgcggttataaatattttaaggccaaggaagtgttaaaaaccgaccttagctcagttggtagagcggaggactgtagtggattgcagatgaaatccttaggtcgctggttcgaatccggcaggtcggagttgtttttaaaataacattttttgctcaacaatgttaggctactcgcctactcacctgtcgctactcggagttgtttttaaaataacatttttgctcaacaaaaaaaaaaaaaaaaaaggcccctagggcc

SEQ ID NO: 80231 - DNA, 1185 bp, Zea mays
  Clone ID: MRT4577_173191C.1
actgaaaggcgccaattcggcacgagggtgcgccgcttgccaccttccgcctttccatgaccacgccgctcctgctgtgtgatcctaggacgacgcgcctcccgactgccctcgcacgctaggagtggggaggggaggctgagcacgagcacgacacgagcgccgccaacgccaacgccaagacgagctcgcgaaggaccatgccgagatccaggggcaacgagccgccgctgcgggcgtcgcagcgcgcgccgctgcacctcaagacgacggcctgctccgaggcgaatggcgcgcaccaccgccccgtcgccgaccggagcagccccaaggtcggcgaccggcactcgccgcgcagccctctgcccgagaagaagcgtgcggccgggacgcgtgtggcggagctggaggcgaagctggggaaagtgcaggacgagctcaagaagctgcgggagcagctcgcgtccgctgaggccgccaagaaggacgcgcaggtcgcgctcgaggaggccaagaagcgcgtcggtaccaagggaagcccggcctcctcatccaccaccaccacttcgcctccctctcccccttcgccaggtgtcgaaagcgcgaagaagcccgaggagctgaagctgccgcagccggcggccgaggaggagagcagcgtaaacgcgccggcgaccgatgtgtttgaggtcgtccgggccgagtccggggacaaggagaaccatagcgcgacggccacgggcgctgaggactgcgaggttgtgagctgcggcgaggaggcggcgctggccgagaaggaggaggaagaggagacgaagaaaatgatcgaggaggacaacagcgcggcggcggaaaccgacggcgccgagaaggagagctgggaggtcctggagctgaaggcgaagctggcggagaaggacgcggagatcgccgccctcgcggcagaaaacgccgagctcaagaagcggtccggagaggccgcggaggcggcgaagatggtcgaagaggacgcggcggcgaaggcggcccaagccgagcgcgatctgaaggatggcgcggcgcgggaggcccggacgggcgagcagctgagggcgtcggaggccgcgcgggaggcgctggacgccgagctgcggcgcctgcgcgtgcagaccgagcagtggcgcaaggcggcggaggcggccggcc

SEQ ID NO: 80232 - DNA, 165 bp, Zea mays
  Clone ID: MRT4577_173192C.1
catcggcgccgccgggatgaagcgctccgccgacgcgatgactgagccggtgaagcctgtgttcctcaccaaggcggagcgggagcgcctcgcgcttgagcgccgccaggccgccgttttcgaccagcgccgtaccgagctcgacctaatccagtccctgtcctg

SEQ ID NO: 80233 - DNA, 790 bp, Zea mays
  unsure (1)..(790): unsure at all n locations
  Clone ID: MRT4577_173193C.1
ccggccggggcaaaaaaaaaaaaaactgtaatcacattataccctgataccccaacttttacgcatacccctacagctacaccagcttttcgctatcacctacacatacatctaatacatatacctccaacatgactcttggcgactctatccgcaagggcgtgggtatggtccacggagctggcgaggccatccgcggcaatgccatggccatagtcgatgacgcgagcggcgacaaggcgagcgcaaccaagaaccaggagatcgccaacaagggagtcgacgagtgggatcgaggctaccgaggccaccctgccgacgctggtgtcactcctgccgacactgatgcccaccgcgaacgcatgaacacgaccaacaccacagccacaaactacggctcgcacaactcaaacattggcaacaaggtcgaccccaggtacgactcggacatggaccacaggggaactgcgaccggctcaacaaatgctggaccgcactcgaccaacgttggtaacaagcttgacccgcgcttcggactcggatgttgaccatcgcgctgatcctacatcgaatgttggcggtacgggctacgagacacgtagataggcgatacactgcgcattttaacatcaatatacccttttcctcgtaccgattccnttcactttgttgctctcgctgacatgtcagctcttcttcgctcttcgcttcccacgacgcagactggatggtacaggtgagatttcacattctggactacacataccacgaatacttcataatactctcc

SEQ ID NO: 80234 - DNA, 405 bp, Zea mays
  Clone ID: MRT4577_173194C.1
attcggctcgagctcatctgcgattttttttcgcttaccataggtagctgtataaagcggacaggataaagccttactgacactaagattcaatggacccacgattaaaccgatcctacttcttgcatttctatacctatttggattaatgggcgggatcaaatatgacgctatgaaatcaacgttcatttgagggtgagtttggaggcatcttaaactctgaagtttgatccccaaggagctgagtgagcattaattgcgacttcccaagctatagtaacgagtgtcccccttgtatacgcttctcccgatggcaggacaaataactaacactgcttttatgtttgcggtccatcacctaaggactggatgcggcatcgtggtagctatcctgatttctattat

SEQ ID NO: 80235 - DNA, 1008 bp, Zea mays
  Clone ID: MRT4577_173195C.1
cccacgcgtccgtgttgctgcagcagggatggaggaagggcccctggacggcgctggaggacaggctgctcaccgagtacgtgcagcagcacggcgagggctgctggaactccgtcgccaagctcacagggctgcggcggagcgggaagagctgccggctgcggtgggtgaactacctccggccggacctcaagcggggcaagatcacccccgacgaggagaccgtcatcctccacctgcacgccatgctcggcaacaggtggtcggcgatcgcgcggtgcctgccggggaggacggacaacgagatcaagaactactggcggacgcacttcaagaaggtccggccgtcgcggcgcgcccgggcgcagctgctgcaccagtaccagctgcagcagcaggagcagcgccgccagtacctgcagctcctgcagccgcagcagctgcagcagcagcagctgggggtggtgaaacaacagcagctggagcagcagagcccgccggagcctcatcaccaggccatgatggacagcctgcaaagcacggcggcgtgctactgcagcccggtgccggaggaatgctgcccgctcccggccgacgacgacgcggtgctgtgggatagcctgtggaggctggtggacggggatggatgcggcgacggcgacggcgatggctccagcggaggcgactactagccggctagcacgtacgtgtgcgtgtgtatgccaggctgccagccagccagtgtaaagaaataaagcggaagaggaggttctcttcaggtttcagctgctgcaagccaaggatcctgctagtggtagtagagacatgctaattttcctacgagaatagacgatcatgcttcatgcttttttcccctttatccatgaaccatgagcaagtgacattgtgtatcgaagggccctctgtttatgttattatggcctgattacaaggttggaataccttcatgttccttttggtttcaagaatcaagatcatgttttagcc

SEQ ID NO: 80236 - DNA, 901 bp, Zea mays
  Clone ID: MRT4577_173196C.1
gccccgtgcgcccgctccgccgcgcgggggggggctggacccgctgacggcggcgagcatgttcgccggcgcgcggtgcatcggcgagaataaggtgaacggcgaggactgcttcatcctgaagctgagcgccgacccgcagacgctgagggcgcgcagcgagggcccggcggagatcatccggcacgtgctgttcggctacttcagccagcgcacggggctgctggtgcacctggaggactcgcacctgacccgcatccagtccgccgccggcggcgacgcggtgtactgggagacgaccatcagctcgtccgtggaggactaccgcgccgtggagggcgtgatggtggcgcacgcggggcggtccgccgtgaccctgttccggttcggcgaggcggccgtggggctgccacaccaagacgcgcatggaggaggcgtggagcatcgaggaggtggcgttcaacgtccccggcctctccgccgactgcttcatcccgcccgccgacgtcgggcccggctccgtcagcgaggcctgcgagctgccgcgtcccagtcgcgcgccaaggccgtccccgtgcccaattcgggggtggcccccgtggattgcgccactgcccccgccgccgcctgccgtggccggaaaaccccgtggaaagtggaagcgtgaggaggggcatgcgtcagttattagcccttttagcagcggcagagtttaatctgtccatactaaagtataattttggccagtccagtcatgaatcaaacaatcgaattgaatcgaatcccctaacctgttgcgtttagtagatttcggtaaataaaacgaagacgggtcctgggactggatgaatctttttatccctctgaccgcagaaattttagcccaattttcccctctttt

SEQ ID NO: 80237 - DNA, 309 bp, Zea mays
  Clone ID: MRT4577_173197C.1
ggggggggggtgttttttattttatttttttttattttttttttaaaaaaacctttttcccaattttttttgtgggggacctttatggggcctaacaggaccccgaaaccttttattttccgcccccttatttatcctcgaagggctttgtccttattttcacatatccaagcctccgggcacactgttttgcttcacaatttgccaaaggggtgaattttacccccgggcgatgtcctttggcagaaaaaaccggggtttttaatcccttttttttaccacaactttcccccccccaaaagctttttt

SEQ ID NO: 80238 - DNA, 308 bp, Zea mays
  Clone ID: MRT4577_173198C.1
ggggcccaaccccaaacccttttgtagaaaataggcctgggaggcataccccattgggcattatttttagcaactataggcggtgtttggcatgcccatgggccaagaaaaaggtttggtcactcaaactaaccctggtgggtttacaacacaacactggcttcaaaaaactttaaaacccccctttctggaacaaggggtggccaaaaatgccttttgttttaaacctgaccaaaaatggggccccgattggccttgggaaaagaagaacccactttgttattttgccccctgaggtaaacccggga

SEQ ID NO: 80239 - DNA, 825 bp, Zea mays
  Clone ID: MRT4577_173199C.1
aagccgccgcctcctcctctcgttcgtgaagcctcctctccctcgcgcacggtactgccacccaccacctccacctcgcactcgcgcacccaccgtcgcccgccaccccgctcttcctcaccccctcctctgcctcgcgcaaagcacaccctactacaggcggcaggaccgcacaacttgccccagatccgaaacggtctcctgtctcctcaactcacgcatgacgacctcctcagctcccccatccgcatctcgcgaaggtacgcctatgcactcgcacaagggggtagtgctggcagctgaccgcctggccgtaaccagacggcgctctgcacgatctgtccctagttggtgtggtagctagtgtacctcagcatggaattgggagcaggtttctcttccaattccactgcgaaattgagattctaggctcttggtgtggaagatcaaggtgatggaggtggtccaacaacagtttctaacccaagtggacctcacagctttggtagctgagcacgcagcggatgggcggacgttgttgtttcgccacatggaggagacgggccgggcggtggctaaactgcgaccggaggagatggggaaggcgctgggggagtcgtcggaggattctgatggcaaagagagtaatcgctctcattgttgagttccgtggcatccaggaggacaagaggagcaccatcggtggggaaatcaccaaggtgttcaacagatggttgctagaatcacgtatgtccgcaatgggatcacgcactctcatcaagtaggagtattgcctaaggtgttcaacagatggtgctagtttag

SEQ ID NO: 80240 - DNA, 426 bp, Zea mays
  Clone ID: MRT4577_17319C.1
acgaagcagcagcaaagtcatcagcaacccacgatcggtcgatcgatcgggtacctgctagcgaattcgatcggtcgggtacctgctgctagcgatatatagcagcagcagcagccagcagatcgtcgccggcacgatggccagctcgtcgtcgtcgtcgtcagctctggtcgtcctcgtggtggttctagccgcggcggtggcgtgctccgcgacgcgccccgtccccgcgcggcagcgggcggcggcggcggaggaggaggacgacacctgggtgcccaaccccggcttcgaggtccccaaccccttccgccccggcgcggccactccatgaacacgtacgagtacgaccccgcaacgccgcgctgaataccgtctcgcgccgcgctgaataacgcttcactagctacctactagtcgcctagt

SEQ ID NO: 80241 - DNA, 847 bp, Zea mays
  Clone ID: MRT4577_1731C.1
tcggccggggggacacttgctcgcacgccacatccacagaatccatctccagatgtcagcctccggcgaccccctggacgtcctcccggcggcggtcctcgccgacgtcctgggccgtgtagctgacgccggagacatcgcggcttgccgcctggcctcgcggacgcttctcgccgcgtcctacatctgcccccgcgttcgcctctgcgccgccgaccgcgcccgccgccggcgcgagggcggtggtggttcccccgctttccgcgcgaccactgcaaacctcgcctcgcttctcgggcctcacctccggtccctgtcgctcgacacggccggcggtcagggttcccccgatgacgcgatgtgggtggaggagggagagttcgatgaggccgacggcctgcatctcacctgcggcgaggccgtggcggcctgggcgacgacctccgccggaacggtcctccgggagcttgatatcgccgactactggccgcaagcgtgctggcggaaggccgaggcgctccccctcatctcacactactgtatgcgagcttttttttaaggagattacctctggttatacgcaagttctacagatactactgcatgcaaggtttcactctgagagtgtcattttcgtttggtgtgtctgtcttcggttatgccatgcttgattgatgtaaacatatagctgaatatccggcacactaactctccgtagacatttgatgattagttcaaaatcatatcaagcagtggtgagagggggaggaggggtcatgtactcctgttcatagggaacttcccctaatcgatataatttaggtgttgtgtaacgcaacagcctccc

SEQ ID NO: 80242 - DNA, 245 bp, Zea mays
  Clone ID: MRT4577_173200C.1
aggagtccctggaacatctggagaccttcaagcgggagaacaaaaacctgcaggaggagatctccgacttgactgagcagttgggttccagcggaaagactatccatgagctggagaaggtccgaaagcagctggaggccgagaagatggagctgcagtcagccctggaggaggccgaggcctccctggagcacgaggagggcaagatcctccgggcgccactggaattcaaccagatcaaggca

SEQ ID NO: 80243 - DNA, 282 bp, Zea mays
  Clone ID: MRT4577_173201C.1
ctacaactgacgtgaatcgggacatctgactagcgcacgcagctgatgcacgagtgactacaggtacggcatgaacgcgtggaggtgccagatatggagtcagtggcggctggaggtacggagtaggtggaggcggcggcttcggcggaggaagctgctacagctgtggagagtctgggcattttgccagagattgcccatcaagtgctcgttgaatttactgttagggttgtttatgttttgcggattgttttaagtttttactttaatatgtcttaggga

SEQ ID NO: 80244 - DNA, 545 bp, Zea mays
  Clone ID: MRT4577_173202C.1
ggaccggcgccccccctcgagttttttttttttttttttttttttttttttttttttttttttttttttttttttttttttttttttttttttttttttttttttttgggggggaaattcaccctggacctcctttttaagttaaaaaggcccacggttcccctttgttaaaatgggcccccaaatagtccccgccggggaaaaaaaaaactttggggctttgggttgggaaaaattaaaaaaagtttttcccaattccaacggggaggggggaaaatggggggggaacccaaacccggggcccttgccgaagtaaaaacccttgttagctgacacccctgccggtgaacaaggggggaaagcaaaaacccctaaggccgggggttttaaaggttaaccccctggggggcttccctaaacccaggcccccttttggggcccagttgttccgggaaggggtcccccccttttgaatccttacccacccttgccacacagagaggctcaaaagggaaccgaaaatggttggcccccccttttttttt

SEQ ID NO: 80245 - DNA, 608 bp, Zea mays
  Clone ID: MRT4577_173203C.1
ctccccctctctctgccttctctagtacggcgatccgatccatggttagggcctgctaactatgttcctgtttgcgttagattcgtgcatggacgcgatctgtacacaccagacgcgttctgattgctagctaactcgccagtacctgggaatcctgggatggctgtagccggccccgcacgcagacggggccgatttcatgattctctatctttttttttgtttcgttgcctagggtttcgttcgatcgatccgcgttcttctttatttccatatattctggtacgatgttgatacggttcgaccgtgctgcttacgttctgtgcgcttgtttgttgggtcatttttatcatgcttttttgtatggtttggctgtggcgatgtggtctggtccggctgtcgttctagatcggagtagagtactgtttcaaactgtctagcggatctattagatttggatctgcatgtgtgacatatatcttcgtagttaagatgatgcatctgtatgtgtgacatgcggatctattagatttggatctgtatgtgtgacatatatatcttcgtagttaagatgatgcatctgtatgtgatgacatatatcttcgtag

SEQ ID NO: 80246 - DNA, 421 bp, Zea mays
  Clone ID: MRT4577_173204C.1
tttgagatcgaagggggggcgggctcacaacaaaacagaaacagcagtgacgagcactactgagccacctagacatggtgaaccctgcccgcctacttgcaagagcagatggtagcagccaacacacttggctccagcgaacggagacgcaaaacacttttttttaacagcggggggggtcccgcgccaccgctcaaccaaaccatacaaaggcacccctgccggctacgtacaacaaaccacaactgctgtgacccaccccgctcgatgggggcaatgcacctacatacctaaaacaacaattgatgcaacataacgcacccgcgcagaatcaactagctgaggcaaaaccctgtgcccactagcaacaggtgacaacacataaacaaaagactccgaccaacaatggtgggagacccac

SEQ ID NO: 80247 - DNA, 526 bp, Zea mays
  Clone ID: MRT4577_173205C.1
agcagggttatagcatcgccacctctaagtttgtagatgaaccccaataaaagagtccatggaaaggccacgtgcacacagcggcacagagcaatatacaaaaccaactgaagaaagatgggggtttcaggggagcagagatagaggctcttttggtggcaacagaatttcagagaggtcgtccgcaggacagaggtggtgagactataggggtcagatttttttttgccatcgtttcttcgaaactgcagaagaataagttatgttcctcttgctacttgactcccattttgtttggcttggaagaatggagagcatcgtgggcaatacagattacattgcacgaacctgttaattaccacctttatatggtgtttttcttccatttcctctttttttgtgtgtgcgtaatttttcttttgccctcctcttccatgtcaaaactggtgctttgagcctttcatacaggctagctattgctattgattcctgcataacaacattcaaaaaaaaggcccctagggcc

SEQ ID NO: 80248 - DNA, 221 bp, Zea mays
  Clone ID: MRT4577_173206C.1
accaccaccaccagctccaacgctagcaacgcctcccccccttgtgctgccacatccaatacaaattaggacacgtaagggcctcaaaaagaaggcttacacctgcaattcttcatctttgaacgtttgtgagccttgcggcagaacataatttcattaacatgatgcccacaattttttctcaaccactgcataaacagctgcaaggggaaaaaaccaaa

SEQ ID NO: 80249 - DNA, 349 bp, Zea mays
  Clone ID: MRT4577_173207C.1
gtatcccctttggttcctcagcgttgcatgtagcatgccaaactgtgttccttgccgtccgatccatttcgaaccattcctctcaaagttgcatcaagcggcggctttgccttcttttagatatcttctgtacctccgtgcccttgttcatgtccctggagcatgcccaggattgctctagtctcctccatgtattctccgtaaaggacttcgtgtatcagagatctgcaaatgctcaaacctgaatatggtttgcttgtccaatgcacttcatgtcatccagacctggagttcagaattggccaaacatctatcaattagctatctggttcattcataggccagtatt

SEQ ID NO: 80250 - DNA, 1083 bp, Zea mays
  Clone ID: MRT4577_173208C.1
ggtgctgcccaactcctgttgattcaggctgtgatggaggtatataacatgtacagaggacagttatcagcacagaacacagtaatcctcttcgaagccttgcatactgttgccgcacatgctcacaaaataaacagtgatagtgatttgcgttccaagttgcaagagttgggctcgatgacacagatgcaggacccgccattgttacgccttgagaatgagtcgtaccagctgtgcctcagtatccttcagaacatatttctggacagctctcctgatcatggaagcacagaggtggtggagagtcaccttattggcttgtgcaaggaggtccttgaggtatacttgagcacagcaagaccttctcagccttccagtggcacacagccgctaggccattggcttatccctgttggttcatcgaagcgaagggaacttgcggcaagagcacctcttgttgtctcaaccctgcaagctatcagcggactaggtgactcagctttcgagaagaaccttcgccagttctttcctcttctcgctgggctcataagctgcgagcatggttctagtgaagtacaggtggccctgagtgatatgttcagcacttgggttggcccactcgttctccagtcctgctgatgctgaacatcatgttatacatagtagtatacatcccattgtgttcctcctttcctccattatgttatgttaatcttttagtcgctgggagttcatattgttgtgctgaactgatcatgcagatcaaattttcgttgacgttattttcttgttcgtatcgggaggagtgtatgtcactatagagaactgaattatgtacggtagtttagctaaaattgtgcccattctgttccaaaaaaaatgatttcaagatttttaggcatgttttacatgcttttgctcagtagcgtttctcctttctggaattctggaatgtggtagggttggattataattcttgcgagttgggtgtgttaggctatctccttttatcttaccttctatcttaaactctattatgtaatcagtgcaatttatagtataaaactgtgttttgcccgtccc

SEQ ID NO: 80251 - DNA, 7016 bp, Zea mays
  Clone ID: MRT4577_173209C.1
caagatcagatttttgcaaagacctggttctggagcaggcagggttatagcatcgccacctactaattttgtagatgaaccccaaataaaagagtccatggaaaggccacgagcacacagcagcacagagcaatatacaaaaccgacccgcgcctcgtcgagatcttctcccccttcctcgagaagctcataaaaaatgcctcgtggcgcaacaaggcgcactccaagctctcgcacaccgccaagtccatcctcgaccgcctccagaagcccccgaccccgcccgctgccgaggcgcaggcgccgcccacgccgacctcctccccctcgacgccgacctcctcttccgcacagcctggtccgttgcgcagcctgtcgctcgcggactcggagctgctcctcgcccctgtgatctcggcactcggcgcgggcagcgccaggctcgccgaggccgcgctggagctccttcacaggctgatcgcacactcctacatccatggcgaggccgacccatctgctgatccctcagcacagctcgtcgcctcactcctggacgccgcctgcaatgcgcttggccttgatgacgagcacattgagctcctcctcctcaagacactcctctcggcggtcacctctacgtctgtacgcctccacggcgattgccttctacgtgccgtgcgcgcatgttatgatatgtacctcgggagccgtagtgccgtcaatcaagccactgccaaggcttcgcttgtccagatggtggggattgtggtccgccgattggactctgactgatcatcaggtcatatactagcaatagtcgtgcccaatgtgatccagctttctgacataatttcgtgctaatcttctagtgctgaccccaacatagtagttggattcaattcgacgagcataggaaatttcgatggtacattcacacctctgtcaagaacgatgggggtttcaggggaacagagatacaggctcttttggtggcaacagaatttcagagaggtcgtccgcaggacagaggtggtgagactataggggtcagatttttttttgccatcgtttcttcgaaactgcagaagaataagttatgttcctcttgctacttgactcccattttgtttggcttggaagaatggagagcatcgtgggcaatacagattacattgcacgaacctgttaattaccacctttatatggtatgctttcttagttttccgggattaatataagaattcccttaggacaccacccaaggatgcaccagcagatcccatagtatgcggggaaagatccttgtcttgagcttctcaagatcttgctctcgatgacacagatgcaggacccgcccagtgagagcttagtggcaagattcagaccaggattgaaggcagagattggtgtattctttcccatgatcatcttgagagtgttggaaaatattgctcaaccaaattatcaggcaaagatgattgttcttcgttttttggaaaagctctgtggtgattctcaaatcctagttgatattttccttaattatgattgtgatgtccactcatcaaacatatttgagaggatggtaaatggtctactaaagacagctcaaggacctcctgctggtgtccctaccacattggtaccacctcaggacaccacaatgaaaagtgaagcaatgaaatgcttagttgctattctgaggtccatgggagattggatgaataagcagctacgaattccagatcctgcttctcctaatgtagaatcagagaagaacgacaatgatgatggcaatgagcttccgcaggcagataacaatggagatgagtctagtgaagcatctgattcacattctgagttatcgaatggaatttcagaggcagcatcattggaacaacgtcgagcttacaagatagagcttcaggagggtatctatttgtttaatcggaagccgaagaaggggattgagttccttgttaatgcaagcaaggtgggggagacaccagaggagatagctgcgttcctaaaaagtgcttctggcttgaacaagactatgattggtgattatttaggtgaaagggaagatttatcgctgaaagtcatgcatgcatatgtggactcatttgattttcaaagactggagtttgatgaagcaattagagctttcctccaaggcttcaggttgcctggagaagctcagaagattgatcggattatggaaaagtttgcagagcgttactgcaaatgtaatccaaaggccttttccagtgcagatacagcttatgttctggcttattcagtcataatgcttaacactgatgcacataacccaatggtcaaaaataagatgtcaccagaagatttcattagaaacaatcgtggtatcgatgatgggaaggacctacctgaagaatttatgagatcattgtatgaaaggatttggaaaaaggagattaagatgaaagaagatgaatttgttccacagcagcaacaatcaacaagttctaacaaaattcttgggttggataacattcttaacattgttgtacgcaagcgaggttcatctatggagacaagtgatgacctcattaagcatatgcaggagcaatttaaagaaaaggcccgcatgtctgagtctgtattttatccagccacagatgtagttgttttgaagttcatggttgaggtttgctgggctcctatgcttgcagcattcagtgttccacttgaccagagtgatgatgaaattgttgtatcccagtgccttgaaggatttcgctctgcaatccatgttactgcagccatgtcaatgaagactcaaagagatgcatttatcacttcacttgccaagtttacatcacttcactctgctgctgatattaagcagaaaaatgttgaagccattaaggcaattctattaattgcagatgaagatggaaattacttgcaagaagcatgggagcatatattgacatgtgtttctcgttttgaaatatcacatcttgttggagagggagcacctccagatgccactttctttgcgctgcagcagccggaccttgataaatcaaaacaggctaagtcatcgattcttcctgttctgaaaaagaaggctcctaatgctacttcagcttctaaaagaggctcttatgatagcgctggtgtcggtggcaaagcttctggtgtggatcaaatgaataatgaggtgacaagcctcttggagcaagttgggatggctgaaatgaaccgtgtatttgtaagaagtcaaaaactcaacagcgagggtataattgattttgtgaaggctctctgtaaggtttcaatggaggaattacgttcggcttctgatccacgagtttttagtctgacaaagatagtcgagatagcgcattacaatatgaaccgcatcagacttgtttggtcaagtatatggcatgtcttgtctgatttttttgtcaccattggctgctcagaaaatctttcaatcgcaatatttgctatggactccttgcggcagttatctatgaagttcctggagcgtgaggagctcacaaactacaatttccaaaatgaatttatgaagccttttgttgttgtaatgaggaagagccgagctgttgagatcagagaacttatcattaggtgtgtctctcaaatggtattggcccgtgttagtcatgtgaagtcagggtggaagagtatgtttatggtctttgcgacagcgtcatatgatgatcacaaaaatattgtactattggcctttgaaattatagaaaagattttgcgggaatactttccatacattactgagactgagacaacgactttcaacgattgtgtgaattgtcttatcgcgtttactaacagcaggtttaacaaggatataagtcttaatgcaattggatttcttcgattctgcgcagcaaagttggccgaaggtgatattggatcctcaaggttgaaggacaatccttcaaacagtaatccaccctcgcctcatttgactaatgatggaaagcaggaatgcacagttcttgttgacaaggaagaccatatacacttttggtttcctttactagcgggactgtctgaacttacctttgacttaagaccagaaatcaggaaaagtgctttgcaagtgttatttgatacattaagaaaccatggccatcttttctctctgcctttatgggagaaggtgtttgattcagtgcttttccccatatttgattatgtacgtcatgctattgatccatctggtaatcctccacaaggacaaagcgtggaaaatgatcctgcagaacttgatcaagatgcttggttatacgagacatgcactttggcacttcagttggttgtagatctctttgttaagttctatgatacagtcaatcctcttctaaagaaggttctgctgctcttgacaagtttcataaagcgtccccatcagagtcttgctggtataggtattgctgcatttgttcgtttgatgagcagtgctggatctatgttcgtggatgaaaaatggctagaggttgtattgtcattgaaagaagctgccactgagacacttcctgatttcacttatgtttcatctggagcctacctggaaaatgtgccaacagaaaatggagtctctgctgacaatagagaggacgaatctgaaccagtagcggatgacaatgaagaatcctctagatcaaggaatctatactttacaattggtgatgccaaatgtcgagctgctgtacaactcctgttgattcaggctgtgatggaggtatataacatgtacagaggacagttatcagcacagaacacagtaatcctcttcgaagccttgcacactgttgccgcacatgctcacaaaataaacagtgatagtgatttgcgttccaagttgcaagagttgggctcgatgacacagatgcaggacccgccattgttacgccttgagaatgagtcgtaccagctgtgcctcagtatccttcagaacatatttctggacagctctcctgatcatggaagcacagaggtggtggagagtcaccttattggcttgtgcaaggaggtccttgaggtatacttgagcacagcaagaccttctcagccttccagtggcacacagccgctaggccattggcttatccctgttggttcatcgaagcgaagggaacttgcggcaagagcacctcttgttgtctcaaccctgcagctatcagcggactagagcgactcgcccgtctcgaccgactcctccgatcgctggtcccgtgccgtttttttcctctttttatttttcttttgccctccatgtcaaaaggtgcttctttcattagctactattctattgattccttgactcgtctttcgagaagaacgttcgccagttctttcctcttctcgctgggctcataagctgcgagcatggttctagtgaagtacaggtggccctgagtgatatgttcagcacttgggttggcccactcgttctccagtcctgctgatgctgaacatcatgttatacatagtagtatacatcccattgtgttcctcctttcctccattatgttatgttaatcttttagtcgctgggagttcatattgttgtgctgaactgatcatgcagatcaaattttcgttgacgttattttcttgttcgtatcgggaggagtgtatgtcactatagagaactgaattatgtacggtagtttagctaaaattgtgcccattctgttcctaatgtgctgatttctagatttttaggcatgttttacatgcttctgctcagtagcgtttctcctttctggaattctggaatgtggtagggttggattataattcttgcgagttgggtgtgttaggctatctccttttatcttaccttctatcttaaactctattatgtaatcagtgcaatttatagtataaaactgtgttttgcacgtcaaaaaaaaaaaaaaaaaaaaaaaaaaaaaaaaaaaaaaaaaaccaaaaaaaaaaaaaaaaaggcagcctgatttagcgttccaagttgcaagagttgggctcgatgacacagatgcaggacccgtcattgttacgccttgagaatgagtcgtaccagctgtgcctcagtatccttcagaacatatttctggacagctctcctgatcatggaagcacagaggtggtggagagtcaccttattggcttgtgcaaggaggtccttgaggtatacttgagcacagcaagaccttctcagccttccagtggcacacagccgctaggccattggcttatccctgttggttcatcgaagcgaagggaacttgcggcaagagcacctcttgttgtctcaaccctgcaagctatcagcggactaggtgactcagctttcgagaagaaccttcgccagttctttcctcttctcgctgggctcataagctgcgagcatggttctagtgaagtacaggtggccctgagtgatatgttcagcacttgggttggcccactcgttctccagtcttgctgatgctgaacatcatgttatacatagtagtatacatcccatcgtgttcctcctttcctccattatgttatgttaatcttttagtcgctgggagttcatattgttgtgctgaactgatcatgcagatcaatttttccttgacgttattttcttgttcgtatcgggaggagtgtatgtcactatagagaactgaattatgtacggtagtttagctaaaattgtgcccattctgttcctaatgtgctgatttctagatttttaggcatgttttacatgcttttgctcagtagcgtttctcctttctggaattctggaatgtggtagggttggattataattcttgcgagttgggtgtgttaggctatctccttttatcttaccttctatcttaaactctattatgtaatcagtgcaatttatagtataaaactgtgttttgcacgtccatttacactggctgttggagatggccatagcggatatataaatttccatatattcc

SEQ ID NO: 80252 - DNA, 777 bp, Zea mays
  Clone ID: MRT4577_17320C.1
gtggccggccgggtcgggacggcagtcgtcacaccacgcgaaagcagcagcaaagtcaccagcaaccagcagatcccgtcgccggcacgatggccagctcgtcgtcgtcgtcgtcagctctggtcgtcctcgtggtggttctagccgcggcggtggcgtgctccgcgacgcgccccgtccccgcgcggcagcgggcggcggcggcggcggaggaggtgaggcggccggacacgctgcacgagggcacggtgctgatcccggggatggggcgctacgagatcggcagccactacatcccggacatcggcgggctggaccacagcgtccccgccgccacccacgggcagtacatccccggcgccgacgacacctgggtgcccaaccccggcttcgaggtccccaaccccttccgccccggcgcggccactccatgaacacgtacgatcgagtacgaccccgcaacgccggagaactcgatcgatcgatcatatcgtctcgcgccgcgctgaataacgctacactagccgtgcttgtgcttgtgcttggctgctgaatgcaagcatgtcctttgttgtgtggtttaatttgtcccacgtacgtctgtgcagtgtttttgcagtttgtgctccagtgaagaagtgtgcacgcgcgatgcgtagaaagcgcatcagaactttgcatggcccggttggtagcagcagcttgtttctcggtcactactgttacaaataaaatttgctggagacacatcaaaaaaaaaaaaaaaaaaggccccta

SEQ ID NO: 80253 - DNA, 216 bp, Zea mays
  unsure (1)..(216): unsure at all n locations
  Clone ID: MRT4577_173210C.1
cgacccacgcgttcggccatgcgccgncgacgtcgtttattttgaggtgtgggcaggactgatgggctggccggtgggggacgggaaagagctgtttgcacgcgggctgctgggtgtcgagctcggccccgatgacgttccgccgtttgcagcaaagctatactcgtgccttgagtcaattcgggcatcactgtgacattttgaggttctggagga

SEQ ID NO: 80254 - DNA, 297 bp, Zea mays
  Clone ID: MRT4577_173211C.1
aaaaaaaaaaaaaaaaaaaaaaaaaaaaaaaaaaaaaaaaaaaaataaaaaaaataatgagaataaaacaaatatgacaagttgtcaaataacgaataaataaagatcatacgtcagtaaatctaatggggcggtcctttttaaggttcacatatttcctccccactgccttttacactatactttttgtttgggggcccccaatttaaatcctccgcccgtgtggttacaccgctggaccagggaaaccccctggggcccctaactaaaggcgtcttggaggacaacccctttttc

SEQ ID NO: 80255 - DNA, 160 bp, Zea mays
  Clone ID: MRT4577_173212C.1
ctgcaggccgactctagagcctgcactaaaccttctacatcgagtgtattgtgcacctccaggggcgctgacgatccatgaccgtggctgcaagccaaccaaagcaggctacaaaaggaaagaaccaacagaattcgcaggggctaataatgaaacgggg

SEQ ID NO: 80256 - DNA, 420 bp, Zea mays
  Clone ID: MRT4577_173213C.1
acagtatcgaaacctctcgaggtgggttgcaattttggttatatacattcagagagtaaaggaaaaagaaaaatagatattcatatcctcatcaacttcattcgcccaagaagttccttctttaaccgaagagagcatcgcccaggcggtagtggacggtcttgacctgagtgtagttgtccaaggcgtaggagccgagctcacggcccagaccggactccttgaaaccaccgaagggagcctggtaggagatcatgttgtagttgttgatccagacggtaccggccttgagggcgttggagacacggatggcggtgtttgacgtctttggtgtggacggcaagcggcgagaccgaggctggtgctgttaccaatcttaatagcctcagcctcgtccttgagcttggtgacggcaatgac

SEQ ID NO: 80257 - DNA, 377 bp, Zea mays
  unsure (1)..(377): unsure at all n locations
  Clone ID: MRT4577_173214C.1
ggaaacctagtttccgagngnngncaccgcccgcccgccctccgccgngngtcggacggggccgagggaannagganatgaggggggagaagggctggttctgttcctctancatttaccccgnnnatggaatnnantncgtccgcaacgacgccaaggtcttccgcttttgncggtcacaatgacataaaaactaaaagatgaaaaagaaaccactaaaggttaaatgaaccaaagaataaaggaattagaatgaaaaggacatgaanaaaaaaaaaacaaattgaaatagaaaggaaaaagaaaaggncngagagntaagacangaatttgaanaaaaaaaataataaaagatatnccgaataattgaaaagatt

SEQ ID NO: 80258 - DNA, 451 bp, Zea mays
  Clone ID: MRT4577_173215C.1
aaaaaaaaggaagggttcatagcaaaagaaaaatacattcgttaaaagggacggaatgggccaagagggggggtacggtgggagtaaaaaaatgggaacaacacgaaaggggacaccgaacttattggggggcggttggcctagggaccaaaagggtttaaaaaaaaaaagcccttccctaaaatgttatggggggggaacttctcctggggctgggaattctccttggggggaggggggtcctgggactggtgggactccaaaaagagggggttaatggtggttttgggcttggggaaatcaattttgtccatgcccttgcccgggtaccaagggaagaaagacttttttctgaaaatgggaaggaaatggttggtaacccttcgaaacaatttttggatggagggggagttgcccataaaggggggccccatggaaagggccctggggg

SEQ ID NO: 80259 - DNA, 329 bp, Zea mays
  Clone ID: MRT4577_173216C.1
gacggactaccccaatgaggagaacgtttttttcggacccactgtcctcgaattagactgccgctttcgtatcactcacatctttacatcctccactgacaccttcattcatgtcactgatttgtctgggaggtaaactttgttccagatcactggtctcatgaaaaataaaactcatcgatatgagaccgttccttattcagctatgctagctgctcaacatagtatacatccttacaacgacactccatatcaccctcctgcgcattaagcttcgtgcgactggacgcaacaagaccaagacccctggacctgtgtctcactctgct

SEQ ID NO: 80260 - DNA, 412 bp, Zea mays
  unsure (1)..(412): unsure at all n locations
  Clone ID: MRT4577_173217C.1
gtgtactcaacgagcaacatataaagtggaatccagtatcaacaatagagcatcaatggagactatgtatatttccctccttatgctccttgctctntctacatgtgttgcgggcgcgtcttttttccctcaatgctcacaagctccatagcctnccttttccccataccttcataatatagcttagttgtgaaaccactttaacattagctaacagcatccgagacatcttatgctgtggtcatgcagccattgtcatatgcaaatagcccattttactgttttataattttgaattttcatttaacattttattttttctttgttttttctttttttttttgttttttttttatttttttttttttttattttattttttttttttatttttttttgttttttatttttt

SEQ ID NO: 80261 - DNA, 849 bp, Zea mays
  unsure (1)..(849): unsure at all n locations
  Clone ID: MRT4577_173218C.1
cctcgaggccggccgggccggattttgcaagcctactcgacgccttccttcactcccccccaggtcaggccccaggcggtccagcgccgccgccggaatggagccggattccgatcagccaaaggctgccgcccgtgggggccaccgcaagcacctggccatgctcgagcgcctctccaagcgctcctcctcctcggtcggcgccccaccctcggactcctctgatgcctcccccgtcgaagccttcctctcccgcttcgccgacgccaagctcgccgcggagtcagcactctccgcctgccgctcctcctcccccgaagacgacgcggccgcatctctggcggctgctgcggccgccatcgatgacatcgatcgcctcatcgccgaggcgtcccatgcactgcccccctacgagctccgcgccgccctcgccaccgccgccgacctccgcgcggcacacagtgttgccgcctctgagctccgtcccaagaagtccttctccttcaggaacaagagcaggaatccgaggaacccgcctcaggatcgtgtcaccgcatcaccaccgcagccacctcctccggagcagccgaaacctagtcttgacgcgatcctaccagggttcgggttccggggcaggaacggcgccaccttcgtgaaggatctgcgagtctccaacgacaaggatggggatttcacgctcgcggatttggtttcctgcgaggtctatctcaagggcaaatgccgggcgctgtacatccataagctgagagattgccgtgtgttcgtcggggctgnntcttggttctggtcttatagaagacgtagatggctgcatatttgtgatggcag

SEQ ID NO: 80262 - DNA, 118 bp, Zea mays
  unsure (1)..(118): unsure at all n locations
  Clone ID: MRT4577_173219C.1
gttgcttaacagtaaagagacgagccgaggatggtgtaccgaagcctcgtggtgggcctgctcctctggcggaggggccgtgctggcgctgngcgcgcggaccttacgcacgacaact

SEQ ID NO: 80263 - DNA, 884 bp, Zea mays
  Clone ID: MRT4577_17321C.1
gccggccgggccgggacggcagtcgtcacaccacgaaagcagcagcaaagtcatcagcaacccacgatcggtcgatcgatcgggtacctgctagcgaattcgatcggtcgggtacctgctgctagcgatatatagcagcagcagcagccagcagatcccgtcgtcgccggcacgatggccagcccgtcgtcgtcgtcgtcgtcagctctggtcgtcctcgtggtggttctagccgcggcggtggcgtgctccgcgacgcgccccgtccccacgcggcagcgggcggcggcggaggagggcgtgaggcggccggacacgctgcacgagggcacggtgctgatcccggggatggggcgctacgagatcggcagccactacatcccggacatcggcgggctggaccacagcgtccccgccgccacccacgggcagttcatccccggcgccgacgacacctgggtgcccaaccccggcttcgaggtccccaaccccttccgccccggcgcggccactccatgaacacgtacgagtacgaccccgcaacgccgcgctgaataccgtctcgcgccgcgctgaataacgctacactagctacgtactagtcgcctagtcggtcggcttgccgtgcttgtgcttggctgctgaatgcaagcatgtcctttgttgtgtggtttaatttgtcccacgtacgtctgtgcagtgtttttgcagtttgtgctccagtgaagaagtgtgcacgcgcgatgcgtagaaagcgcatcagaactttgcatggcccggttggtagcagctgcttgtttctcggtcactactgttacaaataaaatttgctggactggacacatagctatcatcatgaaaaaaaaaaaaaaaaaaggccccta

SEQ ID NO: 80264 - DNA, 120 bp, Zea mays
  Clone ID: MRT4577_173220C.1
agccagtgatgctggctgctggaaaaggagaaatcaatgaatcatagattgaatcacagaacttcggagaggaaactaggttgattgcttgatcataacccacagatggctaatccttta

SEQ ID NO: 80265 - DNA, 108 bp, Zea mays
  Clone ID: MRT4577_173221C.1
aattggctatctacgaaatactatcccatcaagatcaccttgttcacgggagccatacctgaaggactactttttttaatggagaactacaagcttagaagcttacac

SEQ ID NO: 80266 - DNA, 1337 bp, Zea mays
  Clone ID: MRT4577_173222C.1
gcgttcggctccggttccctcctccccctcctctcccacctcagcgtcttcctccaccgtgccggccagcccagacgtacacgacggatacgacgtaacagccttctccccactcccccgaccggtctcgtcgcagcggagcaccgcggggttgattccgtacgctcgccgatgaccacctcgtcctccgggagcatcgaagcaccggcgaactcgaggcccggctcgttcgcgttcgcgagcacgagcacgagcacgagcacgagcttcacggacatgctgggaggatccacggacgcggccggtggggcgtcgaggtacaaggccatgaccccgccgtccctgcccctgtcgccgtcgtccttcttcagtaacaaccccggcggcctcaaccccgccgacttcctcgactcgccggccctcttcagctccagtatcttcacctcgccgacgacgaacgcattcgcctcgcagcagttcagctggttggcgacgtcgggcgcggagcaaagcggcaaggacgagaggaggccgtcgtcgtacccggacttctcgttccagacagcgccgacgaccgaagaggccgtgcggacgacgacaaccttccagccaccgattccagcggcctcactgggtgaagaggcgtatagaagtcagcagcagcagccatgggcctaccagcagcagcaacctggcatggacgccggatccagtcagcaggctgctccctacggcgagccgttccaggctgcctcgtcggacgccgccacgatggcgccgcacgtgccggcgagcggcgggtacagccaccaagcgcagcagtcgcaaaggcagtcgtcggacgacgggtacaactggcgcaagtacgggcagaagcagatgaaggggagcgagaacccgcgcagctactacaagtgcacggacgcgtgggcccgggctgccccaccaagaagaaggtggagcagtcgccggacggccaggtcacggagatcgtgtacaagggcacgcacaaccacccgaagccgcagagtacgcgccggggcgccagctcggcgccggcgtcgtacgtggtgcagagcgccagcgacgcggtgatgcccgagcattcctggggcgcgctgtccggaacacccgtggtgacgccggagaactcgtccgggtccttcggcggcgacggcgacgaggtcaacggcatgagctcgcggctgggcggtagcttcggcgccgacgatctcgacgacgatgaacccgacttcaagagatggtgagtcactcaactttttgaaccaaaagcagaaggctttactctacatgaatgtcaatgacgtgtgttacgc

SEQ ID NO: 80267 - DNA, 272 bp, Zea mays
  Clone ID: MRT4577_173223C.1
tcttgctcagcttcttccccacccacccccaatctattccctaaccctagtcgccatggaccgcgacggtggcccggcgttccaccggaacgaggctatctccgccgtgcaggacgtcgaccagtactacggcgaggacgacgatttcgacgagctctacaacgacgtcaacgtcggcaacggcttcctccgcaatgcccatccgccgccgccgcccgcgcagagtaatcaccaccaccagcagcagctccctccaacgctcgcgcagagaa

SEQ ID NO: 80268 - DNA, 241 bp, Zea mays
  Clone ID: MRT4577_173224C.1
gacccaaaaaaaggctttgcattcattgactggcttgtgagctgaaaatacaggcttatacaaaaaaaaatgcctttaacatggaccttaacggcaaaaatatacaactgggcccagggtcggggttacaatttgaccactcaaggagtttgcccttaaaaaaactacctccaccaacctagggtcaaactacatggaaaggtacaatgtcgcaccaaaatggggaggggaaaataatttt

SEQ ID NO: 80269 - DNA, 811 bp, Zea mays
  unsure (1)..(811): unsure at all n locations
  Clone ID: MRT4577_173225C.1
gtgggggggggggggggtttttttttcatgacgttaatttatggaattaaaatgatatgaaaaatcatatatttctaacagctccctgggtcattaatcgtcccaatgatcggagccttgtatcacacacacacacgctgacgctccagagcaggcacggggggttctgttttgccatgtccacggagacgccgtcgccggcgagtcggcggcggcggcagtgcgtggcagtagtggcagccacggctgcggcttgcctcgcgcccctggtcgtgttcctggccgtgctcgtccttgcgccgtccctcatcccgcggctgctcctccggccgcaccacgtcgtcccgtacatcgcgtcgggcgagctccgcgccctggcattcgacgccgcggcctcggccatcacgtacaacctctccgccgtgctgcggttcgacggcgcgccgagcctgcacgcgagccggtacacggggatcagggccgcaccgttctgcgccgggcaggagctaggcgccgccgtggcgctgccggggttcacacagcgcatcggcgggggcgccgcactgcccgtgccgtgggccggcgtgcaacgcgtgccgaaagaacggcgcgcgccccctgcccgcggcgctcgctcgggacggcgcggcgagcgtcttcgcgtgcgtgatgagcctcccggtgcctcgcaggcgcgacgggggcggccgtggcgccgcaccaggcgcgttccatggcggcagttgcattgacgccgtacccgccgagttcctagacgccgcatcacaccacgntatgcagcccgacgatg

SEQ ID NO: 80270 - DNA, 2136 bp, Zea mays
  Clone ID: MRT4577_173226C.1
atgtctcaaggcaataaggttgctactgagacgaagctgaatgaaaaggagaaggtttttgaggagaagactgtagattcttatattgctggatttgtcgagtcgatggcaaaaacaaatacagagaagattactaaaaagatactggagggcttgtccaaagatactggtgacagcgacagctatgatgtggaaagtggggacaaagattctgaggatcggccctggaggccaagtcattcaatcttcggaaaatcgaccatcaaacagagtcacctcgaaaacatgaggggaagcagagacaacaacgttcctgcccctgaggagaatgaagttgtgattttccggagcttcttcaaggcagggcttcggttccctttgacaagaagccaggggttagaaccaagcgcaaagtgcttctgcaatatgcatgaattgctatatgagacgaaggccatgggtaaagaacagtaccaaaacaacttcggttgttatggatttatcgcccgccccaacgcaagccacccagtaccaacatttcggaagagaaggcccggagcttggatggaagaatggttttatatgaaaaatgatttgaaagcaagagaagacattaaggaagtcattatgcgccccatctggtcccgcttcggcctccgaaagccgaaggttgattttgatgacaccaccgaagcgtgtcagagggccttcagtacagtctgctcctttattagtacaagagatttaattcaagagcatatagcattcatagtatggccgcttgtagaatgctgggaaatgccgaaggagaccatcactaactctagcgaaggtgatttggtccggctgaagtatacattcaggtttggggataaggggaagaagagaaaggctgctgcttcggccgccccagttgagcctatgccgaagggcaaaaagatgaaggttcttacccaccggtcgcgttacattgaaccggccgtggtgcctgagtttggtggggaggcctcttcagctgctaaaacaagagtgactgctccgattgcgcagaacactgaagagccgattgtaatgccgaagttaccttcagttaagttggttgagactaaggctgataaggataaggctgaagggtcgaaaattgaaaaaataacaaaaatgccagaaattttgagcccgccaacagagataacagtgtcaaaagcacaaaaggtttctgctgcaactcctaagaggagaaggatggcaaatgtgttagatgttgtgttggaaacaacaaaaaccttgagtcctgctccttcaagaaaaattgttgaagcttccaaagctctacccgaggctgaaacgaagcaagcagaagccgaagctgcaaaaattcaagctgaaaccgaagctgggccttcagagcccaatgagacagagcccgccgtagttgaagaaaaagcggcagagcaaattgcgtctgaaaagaagggggcattagtgtttaatggcagtgggcaagaagattttctgtactgtttcctggataataaagagatatccgtctgccgggagataggtagaagcatcggattcccgaagctagaagatggcctttcaatattatcaaaggatgagctttctgatagtttggcgtataatagcataaagggcttaattcttagcaatgcccttagagcacagaaaaacattgaagatgaaggatatacaatggctctgaacaaccttcgttcagaggtcatcgaactaaggaatgaagaaaaaacatttgaagaactttgcgcatccaaagaaagatgctttgaaaaatcattgggatgcatggagaaaataaaggctagctttgccaacgtgggcgcctattctaacgaagacaacttcatacgaggcgaccctgaaggtgttatcaaatggataagtggagaagtcgaagctttcgaagaaattttaagtgatcgtggggatgtctgcgcgttctccgatgcaaggggaatttcagctatcctggagaaggcgcggtgtgaccatgtcaagactatggcccaggccgaagctgccttctccctagatgatacaaaggatccctcagatgaagcaagtttaatgggcggaaacttttataatgacatctag

SEQ ID NO: 80271 - DNA, 3415 bp, Zea mays
  Clone ID: MRT4577_173227C.1
gggaaattgatcatgggcttcaggaaggcaactaacaattctttcgaacaggagcaagctacaaagcctgccaatggcgccctagcaacttcagaagcaaatggtaaagtttctgccccagattccagtccaaatgctgcagtttcccgtcaaaacaagctcaacacagagaccacaagatctggtcctgtggaacaagccactgcattgaaaatggacaaggatggattaacacataaggaagggcctggaactggtagttcttccccaggttctgtcaagagaaaaacaactattcttggtcaaaagaataaaagattacggatggataatgaggaatcaatggagttgaagataacatgggaggaagctcaagaattgcttcgccctcctcctaaggccccatccattgttattgttgatggccatgagtttgaggaatatgaggagccaccggtacttggaaggaagacttattttgtagcagataaatcaggttcgaaccatcaatgggcccaatgtgaagattgttccaaatggaggaaacttccaatagatgctctgttgccctccaaatggacctgctctgacaacaaatgggatccagagaggtgttcttgcgaatctgcacaggaaataagtatagaggagcttgcagaattcattcctataaaacctgccaaaaagcccaaattgaagatagaatctgatgctatcgatgcttcagatgggctggacacgcttgcaaaccttgcgattcttggtgaaggtgaagctctcccttcacagccaacaacaaaacatccccgccatcgtccgggctgctcatgcatcgtctgcatccaaccaccaagcgggaagggtccaaagcacaagcaaacttgcacctgtaacgtttgtatgacggttcgccgccgtttcaggacactcatgcttcgacgcgagaagaaggcgacaaaggatctgtctcgcaagaaagagacgggccaatccagtgagaaggccacacaacaagctgtgtccggacctccaggagccaatgccactgcaaccagatctgcccagaaagcagatggaaacaccgatggacctgaagacatggccgtcgatcacaaggtgacaacatcctctcccgtcaagaaccatattgacctgaacatccaacctgaacgggacgatgagcagtcaccgaaatctggtgcggctggtttgttgagccgagacaatgcaacttagagagtggatagcgtggattgattgatcataccataccaatgagtggacatagataaccgatcgaacatatccttccgaatgtctatacccttgtttttttttttaagatagatgtggcgtgaggcgtggggccttgtagtgtagctgttaccttcccataccatagagccggtttccttttaccctgagactccagtggtaatgttatcgtgtataccatagggcaggacacccgtaggtgttgcgtggggacttgcataaccatgtatattgcaagaccagctcgtttcggctgaatgtgaaccgtaagttgctactgttcccatctcccaacctgaacggctccctttaaaggttcaggatgccagtggtaaagaatggatattccaattccgtttctggccaaataataatagcaggatgtatgtattggagggtgtcacaccttgcattcagtcaatgcagttacaagcaggcgacacagtaacctttagtcgaatagacccagaagggaaattgatcatgggcttcaggaaggcaactaacaattctttcgaacaggagcaagctacaaagcctgccaatggcgccctagcaacttcagaagcaaatggtaaagtttctgccccagattccagtccaaatgctgcagtttcccgtcaaaacaagctcaacacagagaccaaaagttctagtcctgtggaacaagccactgcattgaaaatggacaaggatggattaacacagaaggaagggcctggaactggtagttcttccccaggttctgtcaagagaaaaacaactattcttggtcaaaagaataaaagattacggatggataatgaggaatcaatggagttgaagataacatgggaggaagctcaagaattgcttcgccctcctcctaaggccccatccattgttattgttgatggccatgagtttgaggaatatgaggagccgccggtacttggaaggaagacttattttgtagcagataaatcaggttcgaaccatcaatgggcccaatgtgaagattgttccaaatggaggaaacttccaatagatgctctgttgccctccaaatggacctgctctgacaacaaatgggatccagagaggtgttcttgcgaatctgcacaggaaataagtatagaggagcttgcagaattcattcctataaaacctgccaaaaagcccaaattgaagatagaatctgatgctatcgatgcttcagatgggctggacacgcttgcaaaccttgcgattcttggtgaaggtgaagctctcccttcacagccaacaacaaaacatccccgccatcgtcccggctgctcatgcatcgtctgcatccaaccaccaagcgggaagggtccaaagcacaagcaaacttgcacctgtaacgtttgtatgacggttcgccgccgtttcaggacactcatgcttcgacgcgagaagaaggcgacaagagattcgtctcgcaagaaagagacaggccaatccagtgagaaggccacacaacaagctgtgtccggtcctccaggagccaatgccactgcaaccagatctgcccagaaagcagatggaaacgccgatggacctgaagacatggccgtcgatcacaaggtgacaacatcctctcccgtcaagaaccatattgacctgaacatccaacctgaacgggacgatgagcagtcaccgaaatctggtgcggctggtttgttgagccgagacaatgcaacttagagagtggatagcgttgtttgattgatcataccaatgagtggacatagataaccgatcgaacatatccttccgaatgtctatacccttgttttttttaagatagatgtggcgtgaggcgtggggtcttgtagtgtagctgttaccttcccataccatagagccggtttccttttaccctgagactccagtggtaatgttatcgtgtataccaaagggcaggacacccgtaggtgttgcgtggggacttgcataaccctgtatgcatgtatattgcaagaccagctcgttttggctgaatgtgaaccgtaagttgctactgtacccctgaacatatttcccccgaaaaaaaaaaaaacgccaaaaaaaaaaaaaaaaaaaaaaaaaaaaaaaaaaaaaaaaaaaaaaaaaaaactcgaggaggggggccggtacc

SEQ ID NO: 80272 - DNA, 1848 bp, Zea mays
  Clone ID: MRT4577_173228C.1
accatatcagaattgcaccaactcagcagcaagcacaaatggcttcctccccattgcagaaacaattctattctcacactgtaactggttataatgaattccaagcacaaatgcgcaatggaagacccagaatggattcaaaggcgagatcacagttacttccccgctattggcctagaataacagatcaagagctacaacacttatcaagcgattcaaattctgttattactcctttgtttgaaaaaatgttaagtgctagtgatgctgggcggattggtcgtttagttttgccaaagaagtgtgctgaggcatacttccctccgatctcccaacctgaagggctccctttaaaagttcaggatgccggtggtaaagaatggatattccaattccgtttctggccaaataataatagcagaatgtatgtattggagggtgtcacaccttgcattcagtcaatgcagttacaagcaggcgacacagtaaccttcagtcgaatagatcctgaagggaaattgatcatgggctttcggaaggcaactaataattcttttgaacaggagcaagctacaaagcctgtcaatggtgcaccagcaacttcagaagtaaatggtaaagtttctgccccagattccagtccaaatgctgcagtttcccgtcagaacatggtcaagacagagaccaaaagttctagccctgtggaacaagccactgtatcaaaaatggataaggacagattaacacagaaggaaggacctggaattgctagttcttccccaggttctttaaagagaaaaacaactaatcttggtcaaaagaataaaagattacggatggataatgaggaatcaatggagttgaagataacatgggaggaagctcaagaattgcttcgccctcctcctaaggtcccatccattgttattgttgatggccatgagtttgaggaatatgaggagccacctatacttggaaggaagacttattttgtagcagataaatcaggtttgaaccatcaatgggtccagtgtgaagattgttccaaatggagaaaacttccaatagatgccctgttgccctccaaatggacctgctttgacaataaatgggatccagaaaggtcttcttgcgaacctgcacaggaaataagtttggaggagcttgcagaactcattcctataaaacctggaaaaaagcccagattgaagatagaatctgatgctattgatgcttcagatgggctggacacgcttgcaaaccttgcaattcttggcgaaggtgaagcgctcccttcgcagccaacaacaaaacatccccgccaccgtcccggctgctcatgcatcgtctgcatccaaccaccaagtgggaagggcccaaagcacaagcagacatgcacctgtaacgtttgtatgacggttcgccgccgttttaggacactcatgcttcgacgcgagaagaaggtgacaagagattcctctcgcaagaaagagacgggccaatccagtgagaaggtcacacaacaagccgtgtccggtccgccaggagccaatggcagtacaaccagctccccccagaaagcagatggaaatgctgatgcgcccgaaaacatggccgtcgatcacaaggtggcatcctctcccgtcaagaaccacattgacctgaacatccaacctgaacgggacgacgagcagtcaccgaaatctggtgcggctggtttgttgacccgagacaatccaacttagcccttgttgttattcctgtcccatatggattggatcccatatggaattatggattggatgagattggaaaacattatgaaaaattttgacttgtttagaattt

SEQ ID NO: 80273 - DNA, 271 bp, Zea mays
  Clone ID: MRT4577_173229C.1
gttgaaacgaacaagccctaaacgtgggcttacaagtattcctacttgtgctgtcctgctgataccctgagtctagggtattgaatgaacaattttctgaatgttgtgttttttacaaaatttatactcactccattccaaactgtagttcactttagctttgttctaagtcaaactttgatcaagtttttaaaaaaatatgacaacatctacaagttctgccctattaagacataattcatggtaattgttttttctaaatgctggcaag

SEQ ID NO: 80274 - DNA, 308 bp, Zea mays
  Clone ID: MRT4577_17322C.1
acactcagatgatatggttcctttgaagcagggctcataccaccaccaccattctgaaacatagaatcgccaggacgaaatatacgatcttacaaaaacatactcttaacaagagtttaactcaataaaaccttcattccaaaacctatcttacttcactaaatatcagacttataacaccctgtttggctttccaatggtgcttctatacttcaatcatctcacattatgtcatattcttcttataatggtaatcatggatggtagacgcttattttactttcctacttaatcttctatttctccat

SEQ ID NO: 80275 - DNA, 510 bp, Zea mays
  Clone ID: MRT4577_173230C.1
atttctagattaaaaaaaaaaaaaaaaaaaaaaaaaaaaaaaaaaaaaaaaaaaaaaaaaaaaaaaaaaaaaaaaaaaaaaaaaaaaaaaaaaaaaaaaaaaaaaaaaaaaaaaaaaggtttttccttccccgggcggccttttaaaggggcaaattttccaaatttccataacattgggggccctttgaccttgcttttaagggccccaattccccttttagggagccttttaaaaattaattggccggggttttaaaaccttttaattggaaaaaccttgggtttccccaattaaatccctttgcaaaaaatccccttttccccagttgggttaaaagcaaaaaggccccccccaatcccctttcccaaaatttgcccaccttaaatggaaaatggcccccccttttaccgcctcattaaccccggggggggggggggttccccccagggtaaccgttacatttgccaggcccttaacccccgctcttttccttttattcccttcttt

SEQ ID NO: 80276 - DNA, 316 bp, Zea mays
  Clone ID: MRT4577_173231C.1
ggcctggtaatttttttttttttttttttttttttttttttttttttttttttttttttttttttttggcaacaaaatcaacctcttcgatgaacattaaccaaagagcccccccccgaaggaaggcaggaacaggtgctttttggccaatcttgtcccaccgcgggactttgggggatggcaaccacgggagtttttttctctacaaccaatccaatcccatgccatgatcctaggggggggggggctacccccgaccacacaccaatttcagggaaccaatggcccccaaaaaacaattttttgaacccccctt

SEQ ID NO: 80277 - DNA, 408 bp, Zea mays
  Clone ID: MRT4577_173232C.1
cttccaaacgccggcgcacactctcgcccgagcccgacagatcttcaatctccccattccgcccaccgatcgaccttcacgccactcctcggtctcttcccaaggcgccccgcgcgctcgtttcacaggacaggacgcagatgaggcagtgcatctccctccacctcgctcaggccgccatacaagtcggccccccgccgctgccaactttactgcctccagcacggcctccaccctgatgcccaagtgcctggacacaagacccccccccaccacgatgatgacttccgccccttcttcaaccacactgcccctaggcaaccaccccccccgtgccacctaccctgagccaaaaccacctgcgccctacgccgcgtcccctgcaccgcaccctcccctcttccaccc

SEQ ID NO: 80278 - DNA, 404 bp, Zea mays
  Clone ID: MRT4577_173233C.1
gggtacctcgaggccggccggaagcagactccccacttcgtggtgcactatggttctctccaatactgttgcttgccgcttcactgttatttgctcatatgctgttccgctgctgaggtcatatctgcatgccagtcgccacgactgagagtctgatcacggtctctgtaccaaacatgctagagccgtagtgtactaaggtaactcacctcacatgccattccgatcacggtccgatttagaacccacatgcctacaaagtcatccgcaatccatgagaggtcacagaccggagactacaagatcagcgacctgtcatggcatccgtccgaagactacctgactctatgcgccgattgtttcttctgcggcgacgactatcagtgtccgtctgactctgcaac

SEQ ID NO: 80279 - DNA, 124 bp, Zea mays
  Clone ID: MRT4577_173234C.1
ctcggggctcgaggaagcagggaggtttgcaaaagcactggcttgcctattttacatggtgagtgtttctaaatctaggtgcaagagcttaaacactcccatatgagaacagaagaccgaacac

SEQ ID NO: 80280 - DNA, 2795 bp, Zea mays
  unsure (1)..(2795): unsure at all n locations
  Clone ID: MRT4577_173235C.1
caaaattctcaaaatatggatcttttgcggataatgacattgggtcagatggatacggggaaacaaatggttttttgcaccaaaatctggggaaagactgcagctcagacattacatggcgtggttcgttctggacatgtagcaagcagcttcggcactatcaagctttttgtcgcaatggaaccacaatatctacccacacttttgtgctggtcttgtcagaggaacaaaaccgctatcttgcatacttggaagacatgtatgaagataagaagggacagaagaagatcaaagtgcgatggtttcatcaaaaccaggaaattgcttgcgctatacctcctccgcctcatccttgcgaaagattcatcactcctttcacacaagtaatcagtgaagactccaatgatgatattgctacttgtttaactcctgatcattatgaaaaatgctcccatgcaatgtcaatttctcctagtcttcttattttgctgggccagtatagtaaaaataagttcaagtattttgatttaagaacgttgcgtggatattttagtcaagcagttgttaggtccatgaaatttccagctgagtcagaaaaggacagtgaatattgtacacctgggaaagctaaatttccaaagcaattagagaggctttattcaaaatgtttgggcactaaaatttgtcgaagcccccaggcagactccataccatcttatcaaatattaagtaacgagcagcctcctgggaagcatctctcaatcaagtttatagtgccccagaatcaactaaagccgacatataatactggtgacagattagagatcttatctcaagacagtggcattattggttgctggttcaggtgcactgttctgaagtcatgcactaatcataacagattgaaggttcagtatgatgatctccaaaatgctgatgatagtgggagattggaggagatggtacctgcctctgcattggctcttcctgataaactgggactgagacgccaagaccggctaagaatcaggccacgtcctcaagaaaatagttttgttgatggggctgctcttttacctggaactgctgttgatgtctggcaatttagtggttggtgggaaggagttgttgtcagtttggacaacattgtggcagatagccttcaagtatattttccaggagagaactttttccgtgcgtgccagctaaggaacattagaatctctaaagattgggtcaagaaccgatgggttgatattgaaacaaagtcagatgtgttgtcacagataccttcagatagtatccaagcaaagcaaactgataatcatgcactgtctgttggtgtgacgggctccagcagttctgcaatgcctgagcaagagcttgcagctacccaagcaaactccaatggagatgcagcggtacctaagcaagagcttacagttacccaagcaaactccaatggagatcaacctgtgcctaagcaagagcttgcagctacccaagcaaactccaatggagataaacctgtgcctgaccaagagcttgcagctatccaagcaaactccagtggagataaacctgtgcctaagcaagagcttgctgctacccgagcaaactccaatggagataaacctgtgcctgaccaagagcttgcagctatccaagcaaactccagtggagataaacccgcatctgagcaagagcttgcagctacccaagcaaactccaatggagataaaccagtgcctgaacaagagcttccagctacccaagcaaactccgatggagataaaccagtgcctgagcaagagcttccagcaacccaagcaaactccgatggagataaaccagtgcctgagcaagagcttccagctacccaagcaaactccagtggagataaaccagtacctaagatagagctaatgcggccccaagcaaattctaatggagataaacctgtgcctgagtttacagctacccaagcaacctccaatggaaataacagacaaatagaagcaagcaagcaatccgaagttagtatgacagatgaagcctctcctttggcggaggatgacaagcgaacaattctagggaagcgtcccagggatgttagtatgactgatgaagggtcagctttggcggaggatgacaagcgaacaattatagggaagcatcccagggatgaaggtaatgctgaacagagatgcaacggggaagtaggtgtagtcgttagcaagacatgatgtttgggacgcccaaactcattagactcgtgtacatagctatagatatggtgattgaaacctccaatggcgcggggttttttgctacgctgctcgtatcaagagcgtattgccgcttctttggcatacctctcctagtcttcttattttgctggtagtttgtgtttatgttaagggacacatggattgcaagctgaatggtacccttcccagttcccagaaaaaaaaaaaaaaaataaaaaaaaaaaaaaaaaaaaaaaaaaaaaaaaaaaaaaaaaaaaaaaaaaaaaaaaaaaaagaaaaaaaaaaaggtnaaaaaaaaaaaaaaaaaaaaaaaaaaaaaaaaagggttccctgccgggggggccgttaaaaggggcaaattttgcaaatttccatcaaattgggggccgttcgaccttgcttttagagggcccatttccccttatagggggccgatttacaattcatgggccggggtttaacaccgtggggacgggaaaaacccgggggttcccaaatttaatggctttgaagaacatccccttt

SEQ ID NO: 80281 - DNA, 577 bp, Zea mays
  Clone ID: MRT4577_173236C.1
ccttaggcaacagggctttctaagacatgatgggctgcgcgccttgcctgactccgtgaactccatccatgacaagcgtggctccatgcgggatccaaaggccacctacatcaagatgttgggcttgcgcctaatttgcacatattgaacaggagtctctcaagatgcttgaagacaacatgaaggacaacctgtctaaaatagaagagatgccttaacctgatgcgtcatgacacagctcctaatgatatctcggacagctgctaagaagatcatacacaaggctctcactacactaacaatgatactgaaaggctataccgtatgctgcacaaatgaatgagtcctttcaaagcttaatgaatttatcgctaagaagaacattctttcaatatctatcttccgtgaagataatgatccacgagacacgggctgccagtgacttgagactgataagcgaaccatcactctacagaaaacagaacaaactggttgatgccagagaaagtgctacctaaatgcagtcgtggcagatctacttcatgcacatagatctctctagcattttctgactaca

SEQ ID NO: 80282 - DNA, 2446 bp, Zea mays
  Clone ID: MRT4577_173237C.1
gccggccgggctcgagtactcccctagcctgcctcggtgcgccgccgccacacctccaccatggctgcgaccacgccggccaccgacccgccggatgccttgcttgcagtaacagctgatgctcccactcctgctcgtcccaccccggcggagctggtagcccgcgccgtcgcccccgtcaagcccgccttcctctgcccgcctcccgtccgtgaggcacccaaggaggagggtaaagccgccggcggcggggccgtcgtaaaggtggagaagaagtccaagcgccagctcaagcgcgagcggcagcaggaacaaaaatctacttctcacctttgtatcgaagtagggaaaagtggaaatgtggactcatgcaaatatggtacttcttgtcgtttcagccatgacataaatgcttatttgtctcagaaaccagctgaccttgaaggcacatgcccatttactgcactgggacatttgtgtccatatggactaacttgtcgattccttagtacacataaggataaccttgctcctcaaaatcatccagagggaaattgtgagagaaatcctttgagcaaagaaattcaaaagctcttatggaagagcaaatataaatttcccaaggccagtgcccagatcaaacttcttggtcttaaggatggaaacaagaataaagcagaagcagtaaatgatgataatccagatgaaacatgtaacctaaatggtgatgacaaaacacttctttctagcattcctgaaaatgttgaacctgatcccacgttgtgcaaagaaatagataattcagggggagaacctttagttgttgactcagttgaatctgtggagccaagggcatcaaagaaatcaaaggttgaagttgatgaaactcgggataatgaaatcaaaggtcctaccactggtattcatgacaatgaggctgaatctgaagttaattcaatcagtggagtaaaagtttcctcaaataaccaaagttcctgcaaagttgatctgatcacgatacctcatttacgtgaaaagaaaattatagattttcgagagaagctgtaccttgctcccttaaccactgttggtaatcttccttttcggaggctctgtaaaaccttgggagctgatgttacttgtggagaaatggctatgtgcacaaatcttttgcaggggcaagcttcagagtgggctttgctgcgacggcatccatcagaggatttgtttggggtgcaaatttgtggaccgtatccagatactgtagcacgaacagttgaacttgtggataacgaatgttcagttgatttcatagacataaatatgggctgcccaattgatatagttgtcaacaagggtgctggatcatcattgctcacaaagcctatgaggattaggagtattgttcaagcggcatcaactgttactgaaaaaccgttaactgttaaggtaaggacagctttctttgagggcaggaatcgtgctgattctttagtttcagatatctacaactggggtgcttcagctataacaatacatggtcgatcacggcaacaacgctacagcaaacttgctgattgggactatatctaccagtgtgcacagaaggctcctgactatttgcatgttattggaaatggcgatgtattctcctttactgactggaacaagcatgtttcagactgctccaaaatttccacttgcatgattgctagaggtgcacttatcaagccttggttatttactgagataaaagaacaaaggcactgggatatcacatctggcgagagattaaatattcttaaagattttgtgcgttttggtctggaacattggggctccgatttcaaaggagttgagacaacacgccatttcctcctagaatggcttagttacacctgccgctacattccggtgggtctgctggatgtgattccacaacgattgaactggaggcctccaagctactatgggcgtgatgacctcgaaaccctgatggtctcagattcagcagctgactggataaggatctcagagatgttgcttggcaaagttccagaagggtttaccttcgcaccgaagcacaagtccaatgcctatgaccgagcagaaaacggttaaacctttgttccgttgttcgtcagggcaggaactcagcaacaccagtggtgggttctcttgaggatcagagacaactactgaggtccatgctgcttgaacccatcatgttgtgtaacatgattttatatttagccaaatggtgattgtaccaatagtttaagtatagactatagagcacctgataattgaattgctcaattctcctctattcatgctagctctagcatcttacttatccatatacctatatttaaacttactctatgaacaatgcagtttacagtgcaaaacattggtttgagtggctaaaaaaaaaaaaaaaaaa

SEQ ID NO: 80283 - DNA, 198 bp, Zea mays
  Clone ID: MRT4577_173238C.1
gcggcagaaggaggagctcaccaaactgccccccaacacattgtattagctccagcccatcatgactcggggcgcagaacacatacgacacatacttcaaggagcccgctccttctccgtttttccaacccgggtagctcaaatcttgctccttctaccctgctagcatcgcctagtttttattcaacgtattttcac

SEQ ID NO: 80284 - DNA, 1835 bp, Zea mays
  Clone ID: MRT4577_173239C.1
cattgggtacctcgagggccggccgggagctggcaatccatagagagaaaaaaagggttttagcggcagcggcagcggcagccggagatgggggagcgggcgaaggaatggctcctcgcagcaggcgccggcgccgccgtcggcgcgctctctgccgccgctgtcatggatcttctctcgagatccaagcgcagagagaggtacgcgcgggacctgctggagtccaatgcaatgacgactggtacgcgtgcagggaacactcggtccagcaagcacctgggctctgttgctagctcggctcttctctctgatgaagtggtctctgaacagcttacaaggaatatacaattttttggcatggactctcagaagaaagtgactgaatcctatgttgtggttattggtcttggaggggttggcagtcatgcagcatcaatgctcctgagatctggtgttggcaggttgcttcttgtggattttgatcaggtatcactctcatcactaaatcggcatgctgtggcaaccagagatgacgttggaacttcaaaagcgttgtgcctcaagaagcatttttcaatgatatacccagagtgccaaatagatgcaaaagtgcaattgtatgatgcatcgtctgaggaggaaattctttctggacagcctgactttgttcttgattgcatagataacattgataccaaggtgtcactccttgcagcttgcgtgcgcagaggtttgaaggtactttctgcaatgggggctggagctcgagctgatcccaccagaattcgtgtcgcatatttgagagaatcaagcaatgaccccctctctcgatcggtgaggtacaggctcaagaaagaacatggaattgagggtggaataccagtagtcttttcattggaaaagccaaaggcaaagcttcttccttttcaagcttcaaaagaagagattcggctccatgattaccagattgtgccaggattcagggttcgcattataccagtattgggaaccatccctgcaatatttggtcaagttatggcctcctatgtggtcactcagcttgctggattagattttcaaactgaaccggttgttaacctggatttggatcattaccgtatacttcatcagcgtcttattgagcatgaggaactgatgtatggcacagccgagcaagttctggtagatgctgaagaggtaatgtacattgtcaaagaattgtggcgtggtcgaagtgctagagaccaaagccaggacactggccggaagatgtggagatctgtgaacgaactaatgcttgttcggtgggacaaatcaaaggctgctggcatctcaaacttaatacttgtcaagttcagtgaggctgacgcccatgaatccaccacactcgaccgaataaaagaacaagaacctgagttctactctatggtttcacgtgtcctgaaacgagctgagatggagtttgccttatgacctgatgagtagcgagggttgatcctgttggactcccacagttgctattcagtgatggtcttggatcagcattcagtttggcgggaatcacacttggggtacctgattggtgtgctatggtgaaaatgatgtgcaaagtttcttcttgcggccggaatcacacttgctctacctgattggtgtgctatggtgaaaatgtgatgtgcaaagtttcttcttgaggccgctgaaacatcagctctgtgttatcactgagttgtgcacttgtggccatctatgtatgttttttttttctgcacgccaaatctgaaattttgtttctagtctgattgtctgatgtaaaaaaaaaaaaaaaaaaaaaa

SEQ ID NO: 80285 - DNA, 406 bp, Zea mays
  Clone ID: MRT4577_17323C.1
tccacgcatgcgggagtccagggcaaaatactcgcacgcaagaacacacgcgagaacatcgttatttatctgggaatgtgcctgggaatgcaaatggtggcgatctagttggccaagttgctgatgaagatacgaggggccaatagcacagataccgatccaccttcgacgatactctgggcaatggtcatgccagagggctcagaaaccaaaatgggagtcacgatgaggcttgcctagaggcagacctattgccatgaaagtggctggatatacgggaaggtgagctgtagcgacagatgtgtagatgacagacaccaggacagatacgaggtgaaccctgacatggagacagactttgtgaaggtcgggctccaggatgagagcaaagaagagagtgggaaac

SEQ ID NO: 80286 - DNA, 856 bp, Zea mays
  Clone ID: MRT4577_173240C.1
gggtacctcgaggccggccgggatcccgcccgcggccggacctcgccccgcatcccgccgccctcccgcgctccttccatcctccgccctcatcctgccgccctctccttccattttgagctttgacggcgcggatccccaacgctcgcttccatcctcgtggatccccacccacgaatcccgcgctcccttccatcctcgtggcttccttcaacagcgcggatcccccaccctcgaatcccattgccgcaatggaaggtcgtctgtaccacgccgtggatccgccacccagtaccgcgccgtggatggcagacctcccaaccctaccgtctgcggattccgatgaaggcgcgaacccgtgacatggttgtatctctgctcgccgctcgatactccggttccggtaaaacctagcagccgccacttcgtcggactcggacctcagtgacacgcgcagcgtggcgccggcgttgcgcatccggatccggccagcagccagccacgcagtgtcgcggtcgtcggtcgtcgacgcaactccaccttctcaggcgccgatgcagcacccggcagctggctgctcgtcttgggtatgtggcctcgacccccaactaacctgattcaatgggtgctcgatctggcgctgcagtccaacggcaagcctggcggcatcttcgacaccgccgaggagcgctcccaggagggaggtcaagaatcctaagaagccgccgtcgcgcgtggcctcgcggggcgtgcttccggccgacggtgacggcagcggctcgaccaagggcagctacgttcatgatgcagaagagacagatatctgaatgctagcattccggagcttggggatcat

SEQ ID NO: 80287 - DNA, 600 bp, Zea mays
  Clone ID: MRT4577_173241C.1
ccccccagtcgtccggcaatcaatgaatccttcctctaatcctctccgatggcgcttctccgtccgtcctctagagcctagcttggccgcccacatgcatgcatgcatgcatgagtcaagcacaagcatcgtcttcccatgctactcgcgtgaatatgaatcgatgcttatctcgcatcaatcaatcgacgctcttccgtctcttctatcaatcaacgttctctagtgaaagaaccggcccttgagtggtatatgtattgttgcggcctgcgacgagttgagcagctaagttatgttgctatcttttgtttttatcttcggagatcttttattagctatgacaactggacaagtggttgtttgtttgtgctgcagatgctggtgttctaggatgcagtttgattcactagacctgatcccctagactagacggtctggtcttaaggcggtgctcccttcaaaccaataaacggtcgatctgatgggtggtacagctgctcgttcatggttcccactgtcctatctcatcagagagagagagagagatgcttgagatgggcttgtggtttgcatgaaccgagagctgcatcgtccccttcg

SEQ ID NO: 80288 - DNA, 211 bp, Zea mays
  Clone ID: MRT4577_173242C.1
ttattatactaccaaccatctcgtggtgcggctattctattcgggtgggggggcccaccctcagacctcgataccaataggtgcgtggccacccttcgtgacctacctctgatcatgatgtaaaggctgacgcgctccctgctgtacattccggttctcgatgcttactttatttctgcctggacctccatcctcacctctgttcctacca

SEQ ID NO: 80289 - DNA, 218 bp, Zea mays
  Clone ID: MRT4577_173243C.1
ggactagcaccagcactcgactacatctgctagaatcacacgtaccaaaggaatcattacggtccaaacacggcggtcgccaccttggacttgacgacactgatgtgcggcctacatttgcatgacccaacatcactggactgggaagagcctaatgagaagtatctgcactgatgaatttgaagacgattctaaagttaatcctggctaccatgacc

SEQ ID NO: 80290 - DNA, 255 bp, Zea mays
  Clone ID: MRT4577_173244C.1
acgacatgaatacgttcgacccgtggccggtcttcttccgccgggagtggaagcgcaactggcccttcctcacgggtttcgccatcaccggattcatcatcacgaatatgacggccaacttcaccgaggaggatctcaagaactccaagttcgtccaggaacacaagaagaagcactgactaaccatgtgaaggagttgtcataaacccatgtttggccagccagactcttgttatgcctttgaatgaaaaattt

SEQ ID NO: 80291 - DNA, 546 bp, Zea mays
  unsure (1)..(546): unsure at all n locations
  Clone ID: MRT4577_173245C.1
ttcccaccaggctttgccaatgccggtgatactgctgtggttgttgctgagaacacagcagttaaggtaatttcagaatgtgttgctgtgatacaatgtgttatctccaatttgcttaatcctagcataaaatttatgattnnnnnnnnnnnnnnnnnnnnnnnnnnnnnnnnntctatcactcatgttttagacctctgttttccccaccaatacaaacatctcttatnnnnnnnnnnnnnnnnnnnnnnnnnacgtgttaggtttggagcttttctgttttatcgtcattgttttccttgtgaatttatgtattgcagttcaggcaggctaaaacagaaatcgtgaatgccagtagagtagcatacagatttatggcaggcctgacttccnnnnntcaagcctcacctgagtctccgggtaacaatcaaaatagaggcagccctagtttccagggagcttggttcaagaacatcgtctcagctggtgcaaagccttcatcgagtggatcgacacgcacacattttcaggacgctgatgatggaa

SEQ ID NO: 80292 - DNA, 793 bp, Zea mays
  Clone ID: MRT4577_173246C.1
cgcagcgctggagctgaacagggtgccgcagccaccaccgcagccagagccgcagccaccagacttggcgtggttggccttgaagccttcgatagccatgccgctaccacagccgccgccgccgccacacccggagccgcacccgccgccgccgcagccagccgacttattgtgcaggccctctccggcagcagtgctagcgttgaacagggcgccgcaaccaccgccgcaaccggagccacagccgccggacatggcgttgttggccttggagccttcgttaaccatgccgctgccgcaaccaccaccgcaaccagagccacagccgccggcagtcgccgtcatcgatcgatcgccggaaaactaacccctaacgatgtctggagccggcgaggaggacaagaagcccgcggagggcggcgcccacatcaaccttaaggtcaagggacaggatggcaatgaggtgttctttcgcataaagaggtccacccagctgaagaagctgatgaacgcttattgtgaccgcctgtctgtggacatgaatgccattgcgttcctgtttgatggccgcaggcttcgcggcgagcagacccctgatgaggtgatccaattcggctttagatcccagcattgagtggaatccttgatcgatagttcttttgcctgtgcagctggagatggaggacggcgacgagatcgatgccatgcttcaccagaccggaggcagcgttcctagcaccacctaaagcatcagtcgcggagcttcgttttgctctccgccctgcgtagtagt

SEQ ID NO: 80293 - DNA, 380 bp, Zea mays
  Clone ID: MRT4577_173247C.1
cccccgttacggcccccgcgggctggcactcgcccttgccggcggcccccccgccgccccccgagccgccccccggcctccttctctgcgaatccatggggatgggagaaaaattccgaccgaagcaggaatagtagagccaaaaaccccccgcgagccccaaccgcccccttcgaagggttagttacggaccccctaccccccggaatgttccgcgttcgcctcccgatgacccgatcatcctcgcctatctttccggagggatccggtctcgttccatacccatcctgaggggcgctagggtcaaccgggaaataagtcgctatcattccagcaaaggtcgcataatttatagacctccccatagggagtcgaagcgt

SEQ ID NO: 80294 - DNA, 592 bp, Zea mays
  Clone ID: MRT4577_173248C.1
aaaaaaccccaccgcagcacagcgccggcaaccgccgccatcgatcgatcgcccggaaactgacctctaccgatgcctggagccggcgaggaggataagaagcccgcggagggcggcgcccacatcaaccttaaggtcaagggacaggatggcaatgaggtgttctttcgcataaagaggtccacccagctgaagaagctgatgaacgcctattgcgaccgccagtctgtggacatgaatgccattgcattcctgtttgatggccgcaggcttcgcggcgagcagacccctgatgaggtgacccaattcggctttagatcccagcattgagtggaatcattgatcgatatttattatggctgtgcagctggagatggaggacggcgacgagatcgacgccatgcttcaccagaccggaggcagcgttcctagcaccacctaaaagcagcagctgcggagcctcgttttgctctccgccctgcgtagtactaaacaaaagggaaaaagtctttttaaggaacttgtgatggtctggctccttgtgccattgctgaaggacatccttagcccttatttagtggtatgggttggc

SEQ ID NO: 80295 - DNA, 738 bp, Zea mays
  unsure (1)..(738): unsure at all n locations
  Clone ID: MRT4577_173249C.1
tcgaggcnncggccgggaaaaaaaaaaaaaaaaaaaaagaccgaagagaaaatattaaaacaaagaaaaagaaaaatattatttaaaaataatctattatattaaaaccccaccgcagcacagcgccggcaaccgccgccatcgatcgatcgcccggaaactgacccctaccgatgtctggagccggcgaggaggataagaagcccgcggagggcggcgcccacatcaaccttaaggtcaagggacaggatggcaatgaggtgttctttcgcataaagaggtccacccagctgaagaagctgatgaacgcctattgcgaccgccagtctgtggacatgaatgccattgcgttcctgtttgatggccgcaggcttcgcggcgagcagacccctgatgagctggagatggaggacggcgacgagatcgacgccatgcttcaccagaccggaggcagcgttcctagcaccacctaaaagcagcagctgcggagcctcgttttgctctccgccctgcgtagtagtaaacaaaagggaaaaagtctttttaaggaacttgtgatgctctggctccttgtgccattgctgagggacatccttagcctttgtttagtagtatggtttggtactttgttctgtcatcactcgtttatctatccctaatacatgccgccatgattgtactcccaatgacgcgcagatcatttgctttgttttgtcaaaaaaaaaaaaaaaaaagcgg

SEQ ID NO: 80296 - DNA, 335 bp, Zea mays
  Clone ID: MRT4577_17324C.1
attaaacaatcatgggatctttcgggttttttttattttttccgttcatcttatctatctttttttatttcttttgtcagcctgcatccaccccgtcaaaagccgggcctttattcaaacgcgcgctcctttttacaaggccttttactaaacaggcaaccattcatgaaaaactgcctctcaggcaacaaatggacagaatagccaaacatccaccagattctagccccttatacacccccagctgggtggcaccccatggcatagcctactgcacctgcataaaaaaactcccttcttgcttgctaaaacccacaacgttctttaatacttcc

SEQ ID NO: 80297 - DNA, 404 bp, Zea mays
  Clone ID: MRT4577_173250C.1
cctgtatgtttaccatttttaaataaaaaaagtcatataaaaaaagatttaaaaatggggatacctggttttggttcgaacccaaaaaaaaattacgggggggaagccatgctacttggggggggggtgaaaccacgtgttgccgaggacctagggggggcccacaaaagggttggcccgggccccggggagggccaaaggccaccccaacctttttttttttttggggaaaaccccgggggcaaaacactttaaccccccccaaaaaaacccgcttttttccgggttggaaaacttccagccgtcccaacccaaggggaccaactttttcccaaatttggggatccaattgaccaccccgggggagtccccccaagggcgggccaaaaaaatttggcccccct

SEQ ID NO: 80298 - DNA, 445 bp, Zea mays
  Clone ID: MRT4577_173251C.1
aacctttgggctgatttatgtgcttgtgtcatcttcacgtagaaaaggcctccaccctagcagaactcgaaatctagggtaaccggcgttatgagcacagaaaatcaaaggtgaaggctgagataacataaaaacgctaaaagtattctacgggagaggactccgaaatgccgaactctaaagagtcctagtaatcagagtagtagtcggagagcctatcgaaatacactagaattaggaagagttagtccacgtctgagctaaccctggagtcttaatggaaggagaagctgtcgtaggaggagaataaggcctcgtagaaggagtctgtggagaagtagaaagtttagtggaagtaagcgtaacggggttaaatttaatagtagattagcctgctccttctgcgtcctacgacaagggaagtcgttttaataataaacaaccc

SEQ ID NO: 80299 - DNA, 1008 bp, Zea mays
  unsure (1)..(1008): unsure at all n locations
  Clone ID: MRT4577_173252C.1
gcaacccgccgccatcgnatcgatcgcgccggnaaactgnannnctctaccgnatgtctggnagccccggcgaggnagggataagnnaagcccgcggnagggggcggcgcccacnnatcaaccttaagggtcaagggnacaggnatgnngcaatgagnngtgttcnntttcgcataaaaaggggtccacccnnagctgaagaaaagctgatggaagcgcctnnattgcgaccgccagnntctgtggacatgnannatgccattgcannttcctgnnnttgatggcnncgcaggctcggccgggaaccccaccacaacccagcgccggcagtcgccgtcatcgatcgatcgccggaaaactaacccctaacgatgtctggagccggcgaggaggacaagaagcccgcggagggcggcgcccacatcaaccttaaggtcaagggacaggatggccatgaggtgttctttcgcataaagaggtccacccagctgaagaagctgatgaacgcttattgtgaccgccagtctgtggacatgaatgccattgcgttcctgtttgatggccgcaggcttcgcggcgagcagacccctgatgaggtgacccaattcggctttagatcccagcattgagtggaatacttgatcgatagatcttttgcctgtgcagctggagatggaggacggcgacgagatcgacgccatgcttcaccagaccggaggcagcgttcctagccccacctaaaagcctcgttttgctctccgtcctgcgtagtagtaaacaaaagggaaaaagtctttttaaggaacttgtgatgctctggctccttgtgccattgctgagggacatccttagcctttgtttagtagtatggtttggtactttgttctgtcatcactcgtttatctatccctaatacatgccgccatgattgtactcccaatgacgcgcagatcattttggctttgtttgtctgctcgaaccctcgaagtcgtctatgcttttcagatg

SEQ ID NO: 80300 - DNA, 859 bp, Zea mays
  Clone ID: MRT4577_173253C.1
gcggtgcctttacctcgttctccggttctccgtcccattccgtccaccgcgtccagacacaatcttaccggcgacgcctcgcgacctcctcagctcctctcccccttcgccgccgctgccaccacggggacccgctctgatcccgtcagttgtagaagtaactgattagcctgatggctatggtcgatgagcctctctatccaattgccgtgctgatagatgagcttaaaaatgaagatattcaattgcgcctgaactccatcagaagactttccactattgcacgggcacttggagaagaaagaaccaggaaggaactgattcctttcctcagcgaaaacaatgatgatgaagatgaggtgcttcttgcaatggctgaagaattgggtgtgttcattccttatgttgggggtgtagagcatgctcatgttttgctcccaccattggagacattgtctacggtggaggaaacctgtgtccgagacaaagcagttgagtcgttgtgccgtattggtgcacagatgaaagaaaatgacattgttgactatttcattgcagtagtaaagaggctagcggctggtgagtggtttacagctcgagtatcatcctgtggtcttttccatatagcctatccaagtgccaccgatccgttgaaaacagaactgaggactatttatggccagttatgccaagatgacatgcctatggtcagaagggcagctgcatcaaatctttgggaagtttgctgccactgttgaacagagccatttgaagacagaaatcatgtcgatctttgatgatcttacccaagatgatcaagattcagtacgtttattggcagttgaaggctgggctgctc

SEQ ID NO: 80301 - DNA, 961 bp, Zea mays
  Clone ID: MRT4577_173254C.1
ggttcggccgggataattgatgtagtagtgtagtggtagaggaaggtatgcgcgagagagaggttgcgagtttgaatctcaccattcacaaaacatgtaaatttgatccaaaatactagtgaaaaatgataaggcgatgggtatggtaatgtggtgggtagtggttggagagttattcatataatttaaaaaatgtttaaccccaccacaacccagcgccggcagtcgccgtcatcgatcgatcgccggaaaactaacccctaacgatgtctggagccggcgaggaggacaagaagcccgcggagggcggcgcccacatcaaccttaaggtcaagggacaggatggcaatgaggtgttctttcgcataaagaggtccacccagctgaagaagctgatgaacgcttattgtgaccgccagtctgtggacatgaatgccattgcgttcctgtttgatggccgcaggcttcgcggcgagcagacccctgatgagctggagatggaggacggcgacgagatcgacgccatgcttcaccagaccggaggcagcgttcctagcaccacctaaaagcctcgttttgctctccgtcctgcgtagtactaaacaaaagggaaaaagtctttttaaggaacttgtgatgctctggctccttgtgccattgctgagggacatccttagcctttgtttagtagtatggtttggtactttgttctgtcatcactcgtttatctatccctaatacatgccgccatgattgtactcccaaaaaaaaaaaaaaaatgtgaatgtaatttgattctgacatgtatgtttgaatatgccggtgacaactagacctatcggatcttagttatgatcagtagggcttgaggtgctgttcaaactgctttcagttggactatgttgtcattctattgaatgtgaggaatatcagatttccttgaaacagtttctcttgcctt

SEQ ID NO: 80302 - DNA, 1733 bp, Zea mays
  unsure (1)..(1733): unsure at all n locations
  Clone ID: MRT4577_173255C.1
ttggtgagagtggcaagctacaccaggagccctcgaggccggccgggagggaagaggtcaaccaagactcgatccggacgcgaaggtccttggtgctcttccctcttcgcatatgggcagccgtcctataagaggcgtcgagtccgccggcggaccaacccagcgccggcagtcgccgtcatcgatcgatcgccggaaaactaacccctaacgatgtctggagccggcgaggaggacaagaagcccgcggagggcggcgcccacatcaaccttaaggtcaagggacaggatggcaatggggggaaccccaccgcagcacagcgccggcaaccgccgccatcgatcgatcgcccggaaactgacctctaccgatgtctggagccggcgaggaggataagaagcccgcggagggcggcgcccacatcaaccttaaggtcaagggacaggatggcaatgaggtgttctttcgcataaagaggtccacccagctgaagaagctgatgaacgcctattgcgaccgccagtctgtggacatgaatgccattgcattcctgtttgatggccgcaggcttcgcggcgagcagacccctgatgagctggagatggaggacggcgacgagatcgacgccatgcttcaccagaccggaggcagcgttcctagcaccacctaaaagcagcagctgcggagcctcgttttgctctccgccctgcgtagtactaaacaaaagggaaaaagtctttttaaggaacttgtgatgctctggctccttgtgccattgctgagggacatccttagcctttatttagtggtatggtttggtactttgttctgtcatcactcgtttatctatccctaatacatgccgccatgtttgtacttccaaaaaaaaaaaaaaaaaaatcccgatagcctcgttcctggatgttctgcgccgcggggggggggggggatcccgcctcacaccgccgcaaggactcgcgacggacggagcaacggaggaagcaactacgcggcagccatggtgaacgttccgaaaaccaagaagacctactgtaagaacaaggaatgcaggaagcacaccctgcacaaggttacccagtacaagaaaggtaaggatagcctttcagctcaagggaagcgacgttatgaccgcaaacagtctggatatggtggtcagacaaagcctgttttccacaagaaggcaaaaacaacaaagaagattgtgctgaagctgcagtgccagagctgcaagcactactctcaacacccgatcaagaggtgcaagcactttgagatcggtggtgacaagaaaggcaagggaacctctctgttctaagcgtatcataaacttgctcagggtctcaagtatctgtcagaatttaccattacaaacaccctgtgcttagcttctgcatatgttcttttgtcacatctttttggtacgttgtagtttgtatgagaccaagctattgtttcgtgttattattatatttcatgaaattgtcaacatgaccgtttgcttgactgtaaacatagttctgagctttgggcaaacagtagtttaatttatcgtatccatcttgagactgttgtttgttcgaaatataatggtggaatgacgtcgttaagcgcaaaaaaaaaaaaaaaaaagggttatcacttatcatccccatccgcacctctctccatctccctgctcctcgcctccttcttgatcagncnagccagggat

SEQ ID NO: 80303 - DNA, 1322 bp, Zea mays
  Clone ID: MRT4577_173256C.1
aatttcaaaaaagaaaaaaaaaaaaaaaaaaaaaataaaaaaaaaaaaaaaaaaaaccagggcgattgggtacctcgcggccggggaggcggcgcatcgttggtgacctcgaggccggccgggaaccccaccacaacccagcgccggcagtcgccgtcatcgatcgatcgccggaaaactaacccctaacgatgtctggagccggcgaggaggacaagaagcccgcggagggcggcgcccacatcaaccttaaggtcaagggacaggatggcaatgaggtgttctttcgcataaagaggtccacccagctgaagaagctgatgaacgcttattgtgaccgccagtctgtggacatgaatgccattgcgttcctgtttgatggccgcaggcttcgcggcgagcagacccctgatgagctggagatggaggacggcgacgagatcgatgccatgcttcaccagaccggaggcagcgttcctagcaccacctaaaagcatcagtcgcggagcttcgttttgctctccgccctgcgtagtagtaaacaaaagggaaaaagtctttttaaggaacttgtgatgctctggctccttgtgccattgctgagggacatccttagcctttgtttagtagtatggtttggtactttgttctgtcatcactcgtttatctatccctaatacatgccgccatgattgtactcccaatgacgcgcagatcatttgctttgttttgtctgctcaaacctcgaagtcgtctatgcttttcagaccatccctttgggcatgtttggttgtctcctgatccatacgttgtcagccgtaccatagtcacattgtgctgctcttgcaattgaggaacgatgataatggagggaaaatgtttttgtaagaaaaaaaaaaaaaaaaaaaaaaaaaaaaaaaaaaaaaaaaaaaaaaaaaaagcggcctatttagccggtgattaattaagttgatgaatcttgttcagtttgtataattcggccgatgattttgcaggtgaattgcagctgcacgccaaacacgcagcctttgtttgttcgggattgatcttccgagatttaaaattaagttttattaaaataagcaactggacaatgaatacgcgaggattcgtgaacgtctagaataaggtgcacaatgtggtctctagcttaaacgatgtggatttctggaagaatttattttgcttagatgatgaaagaatttattttgcttagatgatgaggacttttggatggagggagtataattggggaaattataatggcatcttaaagtctccgaaaaaaagaacaaatctct

SEQ ID NO: 80304 - DNA, 229 bp, Zea mays
  Clone ID: MRT4577_173257C.1
attcggaggttccgaggctacgacgtcacgctgacgcaggaagctataagctagccaagacaggaataataatggcggtgtcgactgaggcgagcctctctgatccatggacgacaactaccttagctgctcgaagcgaagccaacgtggtgatcgtcgaacaaaggagggcagtcgcctggcgcgtcaagttggtacccgcagttgaccgccaaggtgatgcaaaagc

SEQ ID NO: 80305 - DNA, 322 bp, Zea mays
  unsure (1)..(322): unsure at all n locations
  Clone ID: MRT4577_173258C.1
gcngnncggtttcgggtgtgtgataactaaacctttcgataatctctctctggacactagctagctagctcggcaatgtgtggtaattaaattaacagctgtgctatgatttattaccaccattaccaaccacaacagggtgaccaagcatcgatcgtgggtggcgcgatcaactacgtgagggagctggagcagctgctccagtcgctggaggtccaaaagagcctgaagcagagccgggggcggcggccagcaggcggcggcgccagctgctcccccccgnncgccggctncntcngcttcccgcagnacnccnccgcct

SEQ ID NO: 80306 - DNA, 199 bp, Zea mays
  Clone ID: MRT4577_173259C.1
ggcttcctcggcagcgtgcgcgcgcgcagagtctcagggagatcccctgagtaccagaccgcaaagaccgcggggggcggggcatggacggacgtgatgcgcccgaagatcgcctgaaaagagatcatggcggaggcgatgcccgccgcgctcgaactctacgggctcctccgctgcggcgtaatgcacgcgacgcatc

SEQ ID NO: 80307 - DNA, 376 bp, Zea mays
  Clone ID: MRT4577_17325C.1
tcgtgtaaacacacgcaaatataaaagtggtggctgtggacaggccaaaaaaaaaaaaaaaaaaaaaaaaaaaaaaaaaaaaaaaaaaaaaaaaaaaaaaaaaaaaaaaaaaaaaaaaaaaaaaaaaaaaaaaaaaaaaaaaaaaaaaaaaaaaaaaaaaaaaaaaaaaaaaaaggggggggccgttttaggggatcaaagtttacttccgggggatgggaaggtaatagtttttttttgggggcactaaaattaaattaatgggcgcgggttttaaaacaggtggggatgggaaaaacctgtggggtaaccaaatttaatggcttggaaaaaaatccctttttggcaagtgtggggtaaaaaaaaaagggcccga

SEQ ID NO: 80308 - DNA, 578 bp, Zea mays
  Clone ID: MRT4577_173260C.1
ttcagcctcaagtaaatctcttactagattagcaattggcactagggggaagtcaacagtacaacatgtatatgattaatttatatgtttccttcaagcagtcagcagatatttgataattggaaagattcaccagagacaatgctgccatcaatcaagaaactcatttcaagtggacgagaatatggctgtacaggtacatatgttcagatttatgtgtgtcaaaataccttgctcggtgcgctacatcataacatgacttaaactatgcccttgtgtaccagtggtgatatggatgcagtgtgctcattcatttcaacacaatatgtgctggacaatcttgggcttcctatagaagcagcttggcgtccatggcgcgtcgacaatgaggtacatagcccactgttcatcagatgaaagatggaatatcagcattcatgccaccagaatcctttggatcaagttgtatatgtgttccctcggagaatggatagcggcacggcacgagcccgcgacggacgacgagggatggcgaccgtggaacggcgcgtcgccgacgccgaccccgtctcgactgt

SEQ ID NO: 80309 - DNA, 765 bp, Zea mays
  Clone ID: MRT4577_173261C.1
ccccccctcgggtcggcttctcgtccgctcacgccgtctttctcatgtcttcctggtcgccggctgccgccgccgccgccgccgccgccgtagcgaaggcggctaagccactgcaccggagcgtgtcctcaactcctgtatcccccaacctctctatgtcctcttctcaccgcactccacctctcgcgatggcggccggtggaagcggcgcggtggccccttcctcacttctcgtcgccgaccagggccaccgcgagtccgtgctgcttgctgcacgcgcctccatggggaactgcctcggagagacccgcctcgacctctcggtgtcagggctccgccttgctgccaagggcaaggtgagggacgtgtacgagagcgggcagcacctggtgctggtgaccaccgacaggcagagcgcgttcgatcgcgtgcttgcctccatcccgtttaaagggcaggttcttaatgagacaagcctttggtggttcaatcagacacggcacattactccaaatgcagtagtgtcttctcctgataagaatgtaacaatcgccaaaagatgcacagtttttccagttgaatttgttgttaggggatttgttacaggaagcactgatacatctttatggacagtttataataagggtgtaagaaattattgtgcgaaatgctccttcctgacggtatggtaaacaatgagaaactatcttcaaatatattgaccccacctactaaagctgcagaacatgatggtccctgtcactc

SEQ ID NO: 80310 - DNA, 591 bp, Zea mays
  Clone ID: MRT4577_173262C.1
ccggccggggtcccagtgtcctccccgcgtctcgctgttgtggatgtcatagcatctccagcattcggtgcaccaaggcgttaccgaccaggcggcgaggcgctgcctcatgaggctcgtcaacagagtcgagagcggcgacatgggaaccgtcgccaccatccccgtgcaagcgacgtacgtctccgtcgtgttccccatcaacatgtccaccgactgcaacaagatcagctaagatacgacgaccatgctaataaacctaccgaacgtacacgtacgtaccgtacgatgcacgaatgatgaattcagggaagaaatagaataaagccgctgtatgggcaagagcagcatgcagcatcgatctatatatatactgaactgtagtactctatattatgtatgtgaggcctgcagcgggagatgcttcaatccacctacttgttcagacaggatagtgtattttggcgacatgatatccactgaaaaagacctgctcctcaagttccacttttagttcgcgttagtgaagaatacttgcacgctagctgcaatcgtgcacatatttgtttcctgggagaaattgacatacgg

SEQ ID NO: 80311 - DNA, 1199 bp, Zea mays
  Clone ID: MRT4577_173263C.1
gtcactcgaggccggccgtcaatggtcattgcttcgttggttaaaccttgagagcaccggttcaggcgttcagcaatcgcagagcggcgatggacggcggcggggtcgatacggccacgacggcggcctggatggagaagcaccggcagatgtacgagcgggccacccggcacccgttcaccgtctccatccgcgacggtaccgtcgacatgtctgccttcaagcgctggctgagccaggactatctgtttgtaagggaatttgttgcattcatagcaagtgtactgctcaaatgctgcaagcaagaagacagctcggacatggaaatcatcctgggtggagtagcgtctatcagcgacgagatctcttggttcaagaacgaagctaccgtatggggcgtcgatctagcaagtgtttcccccttaaaagccaatctagagtaccacaggtttctccggagccttactgagccagaggttagctatgctgttgctgtaactaccttctggacgatcgaaaccgtgtaccaggacagctttggtttctgcatacaagacggcaacaagacgccgccggagctcctgggcacctgccagagatggggcagcgccgggttcagacagtactgccagtctctgcagagcatcgtggatcgttgcttggctaacgcaccggctgatgctgtccagagtgctgaagaggccttcgtccgggtactcgagctggaaattggtttctgggatatgagctcttctcggtcctaattaccagcgtgttctctgagtccaaacatctacgcaaataatcgaacgaaataaatggtgcttcgggctcagacccaggttttccccatgtcaccttattcctatctttggttttcgcgtgacagtactttccgctaggcctgggcaaaaagaaccggaaccgaggaaccgaaccgaaataaccgagaaccggaaccgaactaaccgaaccgaaggaaccgttatgaatttcggttctggttttttgagaaccgaaataaatgagatattttcggttctgcactccaaagaaccgaaagaaccgaaagaaccgaaaaacccaaaagtattagattcaatttgttacatgtgtttgtaacttcggatgttgtgttatcgacttatgttgaacctctaaccatccatgtattatctatgaaattatagtcattgtgc

SEQ ID NO: 80312 - DNA, 282 bp, Zea mays
  Clone ID: MRT4577_173264C.1
gctctccatccaggaaatggtagaatgggagttcaagagcaaggaagacgggaagatgcatgcgtgcggccatgacgcccacgtggcgatgcttcttggagcagctaggttgcttcagtctcggagggacgatttaaagggtacagtgaagctcgtcttccagccagccgaggagggacacgccggcgcataccacgtcctcaaggaaggcgtcctggacaatgtgcaggccatcttcggcgtgcacgtggacacggcgttgccggtggggctcgtcgggtc

SEQ ID NO: 80313 - DNA, 322 bp, Zea mays
  Clone ID: MRT4577_173265C.1
tgttccaaggccgtctaagttgatagacaggagattttgacaacgcccgggtctatgacccccactcgtctataactgctgaaccagcgacagaacgactatctacgttgtgtaaagctgacggtgggcctgacatgctagcaaacatttggatggctgatgaagtggagttgggaagcagtacatgacacgaagtgactactaaaacactagaactggtgtacatcgtgtccttggaaaaactgacgaaacatggtggagatattaggcactaagctggtagaatctgttagaagaactggtgggggaaggaaccctgatg

SEQ ID NO: 80314 - DNA, 278 bp, Zea mays
  Clone ID: MRT4577_173266C.1
ggttgggacaaaccatttcccttggctttataaaacattgggcccttacctttcgagccaacgggtgggggggggccacccaaaatgtttcaagtttcccccgggccctggagaccaaaaccaaaccaaatggaagcctgctttatacaggcacaggggggggtttattcaagggaacaacccccggaaggccctttcctttcaacaattccagggttgcgcccccccccggggaaatgggggtcataacgcgaggaacccccacctttttgaggggg

SEQ ID NO: 80315 - DNA, 246 bp, Zea mays
  Clone ID: MRT4577_173267C.1
acaaacgcacacaaccgtactggattcaactgcagaactgttccagattcttcaccagttcactgcatcattcactcaaaatgacaggccaagaagaaagcgcggcaagaattcaacccgatgagaaaaagcttgtcccaacgtaatccagcagatggacctaattaatcaatgcacacggatcgccattgatgagaaacttggtggtgtcgcggcaggcgggaccgctccaaacttgccacgcgc

SEQ ID NO: 80316 - DNA, 668 bp, Zea mays
  Clone ID: MRT4577_173268C.1
ataataacagattgtatagagataaatgtcacaaaacatcagagtatttattacatagcggaagacttattacaaaataaaataataaagataaaacgaactaaggatcgtcggcgccaatgtcaactgagaaacgccacctagatcagatcatactcctcgctttgtggctcctcctgaaccacctgctcttctcctggcacttgagattccaggtaccaacttgcttttcagatgacacgtgtccacgcgccaagacagagatggcgccaggggagctgtccacggtgagctgcggctccactgcggagttggactctggcgagaaattcgcagggatctggacaccaatcgcgcccgccgaggaaaccacgagcaccagagcaccctgacgaaggttcccaaccgcaagccgagaccggagcgacatccaggtcgtgaatccacggcggcggcattcttcttcggtgtgcagtcccagctatgcccgccatggtgccacgattcgattaccctacgcagtcgatgggacacggttcggagtggggcggggaagaaggagcccacggcgacccgcgagtttcacggcggggagcagcccatggcgacggtggcactggaagttctccacgaacaatgttgaggcacccaggacccagcctcgagcc

SEQ ID NO: 80317 - DNA, 169 bp, Zea mays
  unsure (1)..(169): unsure at all n locations
  Clone ID: MRT4577_173269C.1
acaccacaggggcacccgggacaacacgcaccacacgcgaggaagacacaaggnccgccagccacccaacgcagccgggaaccggaaggccacaccagccgcagacaggngncccacccaagcagcnggcngacccaacgcagaccggggggcaagcagcacnggcaaa

SEQ ID NO: 80318 - DNA, 528 bp, Zea mays
  Clone ID: MRT4577_17326C.1
aattcggcacgagggtttaactggaggacggcagtttacctggaccttaaaaaaaaaaaaaaaaaaaaaaaaaaaaaaaaaaaataaaggaaaaaaaaaaaaatcaagggggagaacaaaaaacaaaaaaaaaacctatagcgaggtggattaccgaaccctaacttgaccaactgttaacaaccgtagagactggaaaaacacctggctttaccaaacttaatcgttttgcaaaatatccccttttcgaaaattgccgtaataacaaaaatgcccaaccttatcgcattttcaaagagtaaagcaacctgaatggcaaatggtaatcaccctgtaccggcccattaagctacaccgagtgtgaccgttacactcaccataaccgtaacacttgcaagtgccctaccgcccgctcctttcatttccttcccttcctttttccccacgttagccggatttccccgtcaacctttaaaccggggactcactttatgattgcaatttaatgcttaacggctcctttacctg

SEQ ID NO: 80319 - DNA, 313 bp, Zea mays
  Clone ID: MRT4577_173270C.1
aatttctaatgatggtgtcgatgcgactactgaacatcattctactgtagataattaccagacaagttaaaatggggctgaatgggttgagctattggtcagggagatgactaatgcttatgacatagataatgctcgggctaatgcgtccagagcgttctaggctttggcgatatcaatcgtatagcgttcaggatctgaatctacacataacctttatatggtaatcatgattctcaaagagctgctgactgttgaactgcgagagaacgctttactgaagcggtcggttgccattaaccatgagcttcta

SEQ ID NO: 80320 - DNA, 653 bp, Zea mays
  Clone ID: MRT4577_173271C.1
ttttttttttttttttcgagcaagacgaatcttgtattaaaagtcgcacactaatgaatcgaagcaacacctgaagatgaaatcgtacaggacctctagttccaacaagtatcatacggtaagatctaattgtcgaggagtctcaggcatgtcctcaaaggctgcgaatccaagccttctcctgcccccagacgccacattggatacccgaagggactgcggaaagctcaaccttacacaaggttgctgatggcaacgcaaggaagagcggcgttgacaagaccaccagcggcggttccggggctgtcctggcagcaagcagcgttggcctggcactccttgttgaggaggttgtcggcaatggcgatgacattgacgtcgaccttggagcactggctgaagaggctgagaccgttggcaatgccggcgccgtcgccaacggagttgccagcacgcttgttggaagtcttgttacagcagttaacgctctggccgttggcacaagagttggcagcctgctgaacggtaaggccggagatagatggaccgttgccggcggcggcgacggatgcggccaggaaagcgatgacagtgtaggcatacattttgaaggatgtagtgttggaagtgttggttgaagtgttggttgaagt

SEQ ID NO: 80321 - DNA, 459 bp, Zea mays
  Clone ID: MRT4577_173272C.1
ttttttttttttttttaaacaatatgaaacgcccgctggtactgttctaatgtgtcactgacattttcacttaaactcttcccttcttccttacacgaccaggcctccgaccacggacggcggcgtgattactccggcgaacctacataggccgccatacttcataatacatgctcaaatttgctcttacccctaattccactcttggcgccacaccagggatcgaaaatcaggcatgaactgaatccaagagctcagtctatgagcacctggactcaaggacgatggtcaggaagacgagtgaaaggatagagcggtgagtcaacggagggagtgtccacggcggcgttccatggtggcgacacagtgttccggggttccggctcagagagctttatccacggcgagacgtctcgcaacggcgcggatgaccgatttggggggattttcgaattcccg

SEQ ID NO: 80322 - DNA, 387 bp, Zea mays
  Clone ID: MRT4577_173273C.1
ggaattctaaataaaaggaaggctccacaaaatcacccaacaaacaagaataaatagatggatgctcgggtataaggcaacaaaaaaacccctctaggggtttattttactaggctatcacctatataaaacaaaataactctccgttttttcgaaaaaggggcaaaaaaaaagggaaaaaagagggtaacacctgaatttgggggatatcaaaaaaaaaattttatacccccaaattcaggggggtacactactggtcccctttccctgggaaaaagccttccttttaatctcgcctagctaagcacgtttgggttcaacagctatagccttgtccaaaagcctctggaaagaaggggagggatgaaataccagttggtactgaag

SEQ ID NO: 80323 - DNA, 738 bp, Zea mays
  Clone ID: MRT4577_173274C.1
ccggccgggatgtcttctttctcccttaagcgtcgtgtcttcccatcttccaagcccccggatggggggtatccgccgcctttccgcctcctcgtcggaggaacgcaactccatgggagttggtacctctcagccatcgttcggcttcaaggattttcatcacgcagcctggttgctcccttccgccggtggccacccaagacggtgacctccagctcctggatggggagaggcaaaccaggctgtgatcccgccctcagcatcgggtgtgttcgtcatcctcgctggggcgggggtcgaggcgagccggggctctacctcgcgcgcgggtcggcgaaccacctcctcttccaacttctggcggtggcaatcgtcctcccgcgccacgacggagtcgtcctccagtcatgccggggaaggcgaactgttgctgtccagctaggatgcaacgttccgtcttccccctcgcattcggggcgaggacggcagcgaggatctaccggagcgcttgggagcggcccgctctttggctttgatggcttgttcgcatcccttgagtgggaccgcgaacaagagccttccggtgactgcgttcacctggggccatggctgccgctgcagaggccgttgccccgcaggcccgaggtcgcttgtatcctcggggacggaaccggagtctcgtttgcaatggcacttcgaatgccagtgagttcgttcattgtggctgtcgaggcctga

SEQ ID NO: 80324 - DNA, 292 bp, Zea mays
  Clone ID: MRT4577_173275C.1
atatgatgtttataattaaagaagggtacaaaaatactttttgaggttgtcacccaaaatgaacatttaccgattccattacaacaaaattattcaccctcccaaatacggtttaacacaatctaccaaagaattcttaggcacgcaccttctagaactttaccatctttaaaaacatataacatcccccgtttaaaaaaacatagataaataccttttatgggacatttaccacccaaaaaaaaaggcttccaaaatctttccgaatttatttttataaaaataacgaaaa

SEQ ID NO: 80325 - DNA, 149 bp, Zea mays
  Clone ID: MRT4577_173276C.1
tcttatcgtcatcctcgctcgctcctcatagccagcgccttctcctcctcctgcttgtttcccaccgctgccgacatggctgcgcaagaggagaaaaccgctgttgcttgtgctgccgccgatgtcgcgacagaggagcctgcgccggc

SEQ ID NO: 80326 - DNA, 471 bp, Zea mays
  Clone ID: MRT4577_173277C.1
gcccaaaaacccattttttttttcaataaaaaaaatgctcgggaaaaacaggggccttcattcttgacaggttggcccggacaaaaacttccaccattctttgttcccccattttacttacatacacatgggacaaaaaaaacttttttttttttgaaacacgggcccctggggcccatggggggtccaattaggggggttaattacaattgggggcaacaacttattaaggggggggttttgcaaacaacccattttttttttttatattttgggccccaaggaatggggggtttggttttcaaggggggggatctaatgggggtttttactggggccctacattgaactgaactggtggggttgggacaaaacatacaccggtttggcccgttggcttttataaggggctttctttcctttatttacaccgggggagcccccttagggttcctggtttttcaccccggg

SEQ ID NO: 80327 - DNA, 198 bp, Zea mays
  Clone ID: MRT4577_173278C.1
tttcctccgtcacgcagcatctcaacccatggccaagatcaagatcgggatctttcggttcggcaggatacggaagcttgtggccaaggtggccctgcagagtgacgatgtccagctcgtcgccgtggacgaccctctcatagcacgactacatgaccttcatgttcaatacgacactgtgcacggacagtggaagca

SEQ ID NO: 80328 - DNA, 634 bp, Zea mays
  unsure (1)..(634): unsure at all n locations
  Clone ID: MRT4577_173279C.1
attgccccgcgaatcctagctcccgtaactgccgtcgtcactcccgcgctcgcagacatgacgtcgcagctcgacccgtcgcaggtgatgtaggtgatcatccgtgtgaccggtggagaggtcccagcaccgccgtcactggtgccctagatcgggccgctcggtctttcccccaataggatcccagaggacatcggcaaggagacggacgaggactgtagagggactccgcgtctcgcgtctagactcaccgaccagaaccgtacactgcccaggtctccgtcgacccctccgccgcgcagctcgtcatcaatgcgctcgagtgatgcatgagagggaccgcctgatggtcatgaacatgatgcacagcggtcacatcagactcgacgacgtcttctggatcgcgatgaccatgtcgaacttgtgcatgcgcacggaattggtcggctccgccaaggagatcctcggtacctgggtctcttgccttagcaccgacgtaggatgatgacccccctgacctgcagcaagagattggctacggtcatgtgaagattccgtccgctatacactgctagctgtccacgactggantatctttgctgctgaaaccattctctgcctacattttctcata

SEQ ID NO: 80329 - DNA, 393 bp, Zea mays
  Clone ID: MRT4577_17327C.1
gaacccagccggttcttttggggaagaaaaacaaggcaaatgaacacccttcccttgggaatattacctgccagaagaatgccttcctttgaataaaatcaaaccagggaagaccaggggggcttatattatttggtgggttattattaggaatcattccggaccaaagggggggaccaaaattgcaaatttgcaacatttttttggctggaaacttatgcctttggttcaaggttctggaaaaaaggctttttaatccaatcaaaagggttgaccaaggaaaaggccgcggggcccgcgaaaacttcccaagaaggaacggccaccaatgcaatggaccggggaccgcttgggggggagaccaaaccgaaaaaggccgaacttgacccccgg

SEQ ID NO: 80330 - DNA, 434 bp, Zea mays
  Clone ID: MRT4577_173280C.1
gggcggacccacccttccgcggacccttggggccgcgtccaaggagattttctttaggctcggcggcctctcaaagaagaacttcaaggtgttcgccagttccagaatcggggccaccagcagcctgcctgacaagatcctcgccgaaggcccaaacttttgaactaaagcattggttccggttgattaaaacattggcttccttccttggttcctttttaaaatgtttccgccgccgccgccaaaaaaaaaggggtgggttcgatgggccaccttagtattagtttagctgggtttggccatgggggcgtctggggtggttatctataaggctgcctgccttcctaaagcagttataatatccaatttaaaattctatccgggaagcggtggtgtcaaaacaatgctttacacacccatttgcacagcctttc

SEQ ID NO: 80331 - DNA, 1923 bp, Zea mays
  Clone ID: MRT4577_173281C.1
ggagaactgaaaccatctataacttcggaggactgaaacatttgattcctacagatgaataatacattgggttcaaacagagacaaaaattggtgggttatttagtggggagggaaatggatgaagctctattggggcttgaaaaccatgggcctccattatttttgcacccatgtttgcctcggctttttttgctcccatgtcttacggcgcaggattttgaattcgttgagactgaaacacatgggcaagtatcgtgggcggatctcaccatggagtcctccatgaacttcttctcgcggcctatagcttggcaagccagagattcaggacagacctcaatagcttcaggtggttttcttggcttgaaccttaggagcttggcatactcagttaagaggtgaaacatgtaatcatatacatattccatgctgagctctttttgaataaagttgcttccttgctttcctatcctctgtgccttctgcttgtgagagttgccccaatcaacagcaaactttatggagctacacttattgtcatcccaaattggccaataatgttgcatgggcatcagcacccttgaataaaaatcatagtattttggtgtaaccgctagtgtcatggaatcacaagtctgaatatacttctcactgactgaccatgctgatccttcaatataaatcttgtacctatgagtgcattgactagccaaatctgactgtttgtatcctgccttgatctctttgagccaatcctgtttgtaaatccttgcattccattcatgcttactggagacgttacacttaacaagctcctgccttgtaactgcaacatctggattccctttccaataagcataaggttctctagccaaccatttcaccctcttgtttccaccattcaattccttctgcagagcatcccacggttttatgttgatctcaggccagccccagaatgaccagtctgggaagacaacatctagcgtctcgttgtcgccgcagtacctgaagagcggcggcaatagcgtggcgttctccccctggtactggtcggcgtgcacgacgggccagtcgacgcagtcaaacatgaggtcgaggtcagggacgcggccggggtagcgccggagcagctgcagaatgccccagatggtgaagaggtcgcgcgtctggaatgccggcgcgatgcgctcgatgtacgcgcggccccggatgacgacgaggcggaagttggcggtggcgcgcgcgcggtcgaccatggcgcgggtgatgcccccagcggcgcgccatgggtggaggtcctcgtggatgaagcggaagtaggcagggcaggtggaggaggcgttggagttggcagggagcggcggggggtcgggaaaggcggcgcaagtggaggcggaggaggcgttgggggagagcacgaggtcgagggtctgggagatgttgctggggatggtcgggtcacggtgaagcggcggcgccgggcaggagagggagtaggtcggccgaggcggcggcggtgccgcggggatggccgggatggaggaggtggtgtgcgtcgcggttaagatagccagctttgagctccactgatccagattggtggtcgacagatgagtcgtggtggtgatccagcgggcggacacgaggacgccgaccacgacaacgaagaagaagaggaaaatggccgtcgtcaccggcgacgacgaggagcccggacctttgctccatcgccggccgtccgggatcaccgctgcagccgccgaagccatctgccccttgtccagcgcttcggtctgagagatctggaccgggccgggtattccccctcctttctccctctgtaggcgcgtcaggctccggtcctggacactcctcgcccctcggggaagaacgcggccgtccctcgagggtccaaatg

SEQ ID NO: 80332 - DNA, 328 bp, Zea mays
  Clone ID: MRT4577_173282C.1
aacaatagagcaacaatggggaccaggatatttgccatcgttatgggccttgccacttgcacatgcgtcgctaacgcgacaatgttcccacactgctcacagactgctatagcgtctccttctttgcacataccatccatcaattatagctacacaatgagaaaacccagatcttcaaccatataggctacaacaagcaatcgcagcaagcaacatacctgtatcgcccttgtagtatcaacaatcacacaccatatctactgggcacgcattggtacaaaccatcacggcacaacagctcgcacaactcatgctacctgcgatcaac

SEQ ID NO: 80333 - DNA, 297 bp, Zea mays
  Clone ID: MRT4577_173283C.1
agagaaacaaggtttttttttagccattacaaaaagctacgggcagcttgcttgagggcacacacatacacaagcacattccatctatctacagccgacgaattatcgcatactggactcaagggcctgataagacatgagatcactccagacaggcagattattccttcttgagtgacttgggggacttcatgggcgactttaccttcttggtactcacagtggactcctactacgacgtgttcttgggcaagacaacattggttgacactggggagcgcacctacccgagcgata

SEQ ID NO: 80334 - DNA, 277 bp, Zea mays
  Clone ID: MRT4577_173284C.1
agcaacattcttattcctttttaaatttgacaattagggaaggccagaaagggaacacaccaatatgaagaccaattccccaggagctacacccccaaccaacgaaagcccaagttcagacagaatacgaacatggacaatgtaaacggggaaacgggaaaaaaaaacacgggaaaaaaaaaatggaaaacacctataaggtaaactcggaaaacgtagaagacgccgagggtgaccaccaccagggaaaccgctaacccgaaggcaacaaacccaa

SEQ ID NO: 80335 - DNA, 339 bp, Zea mays
  Clone ID: MRT4577_173285C.1
gttctgggaaactagaaacacaactagtgcatcagcgttgaaacaccctatggtcagtgtgctcgtggttctttttgcttcttgatcttcttgcgctttgagcgggcgcaaaatatgcggacatggtgccacagtgttcattttatcatcgttccattcttccacggtgtcttccagtagttacttgaatggacttcaaacaggcaggtgcgcaagggtattggctacagcaagggatcgttgatagcgttttgtaccaacccattgatcaattgtaccaccaatgcttggtacagttaacatttcaaaccatcgcatcgtaacacaaccaccacttcc

SEQ ID NO: 80336 - DNA, 682 bp, Zea mays
  Clone ID: MRT4577_173286C.1
catgtcaatccatggactggtgatgctgcctccccttgcagtagcaatccaatgaaaaagggactgcgggagtcgaatatttctgggctgtgacaacaagcccctttccaggcaagaaataatggatgctgttaacaatagtggaaaatttgacacgaagtttggaggctttattggtactgacggtccattggggaagagaatggagaattcaaaaactcgggctgagatcggttgggaaccaaagtatccaagcttcaccgaattccttgtatttgagctgtgaaccagacagatgccaccccatcccactggacaatatatactgtcacgtgagtggatttctcgatcatgaacctacatggctacatatggtgtaccctaccgactaccgcgctgcaaattgatttcaacaaactgaaattattccagagaattgacagtcaactaccgaacaaacgaataatcaaccaaatgcgaacgcgtgtagacttgttctttagcacagtatccggcagtttattcatagtcattcaaaacactattttgtactatccatagtcatttaaaacactattttgtattgtaaactgcactgtttataaagtggagtttaaatatgagaacaaaaaaaaaaaaaaaaaaaaaaaaaaaaaaaaaaactcgaaagggggccggtacc

SEQ ID NO: 80337 - DNA, 425 bp, Zea mays
  unsure (1)..(425): unsure at all n locations
  Clone ID: MRT4577_173287C.1
tcttccttgaactcttcttgtaggtggccagaaagttgctgtggtgtattttagagctggctatgcaccaaatgattgtccttcagaagcagtatgaatacattggcctttgcctttcgttgaagtctttgttttcagctatgaagactaattgcccaaatataaaattctttcagacatttcagttttttctttaacatatttgagttgttctgagaagggtgggcctgcagtggtgaatcagcctctccgtatttgtggagaaaaggcttgtctcggtttatccctttccttgacccacttatatgggagcctttggcactgaatctgccctttttttgtatttgggtggtttagcatttccttgttacacgttaactntattttctatcttgcaagttgaaacataaaagtcaaattacttt

SEQ ID NO: 80338 - DNA, 1001 bp, Zea mays
  unsure (1)..(1001): unsure at all n locations
  Clone ID: MRT4577_173288C.1
aaggaagatgatggcggttcaagcaagtcgcatggcaagagcggaaaccgaaaagaagcacctgaagaacaacaagaagaggaagaggcattagccctggactcacactcctggtatcacttcanacatacttgagtgtgtgacatgatgctgcctcccttgcagtagcaatcatgaaaaagggactgcggagtcgaatatttctgggctgtgacaacaagcccctttccaggcaagaaataatggatgctgttaacaatagtggaaaatttgacacgaagtttggaggctttattggtactgacggtccattggggaagagaatggagaattcaaaaactcgggctgagatcggttgggaaccaaagtatccaagcttcaccgaattccttggtatcagcagttaacatccttgcatactgttcagttagtctgactcagctgagttgcaaccgtgattagattgtacatcgtttgaatttttatatggtctgaactggtgatggtgtacatctcagcctaattttttattctcacagtatttgagctgtgaaccagacagatgccaccccatcccactggacaatatatactgtcacgtgagtggatttctcgatcctatatgcagtggaagaacattccatgcaccaagtgagatttcattctaggcatagtagttgttgcaagcaatctgaatacaggaagatgagatcaggccaattttgattacaacatgactactcttgcaaatagaatgttgatattagtaaactattgtatgttatgcaaggatcaaatattgtaacgcaacacctgaagttgcctcctttctcccctagcattaatgtgtatctgcctttcgaatgtagattatgacatgcttttgtgtaataattttttttgaaaacagcaaatgtaccaaatatttattatctttgaacaattgtaattcttgattctatgaagtatgatgtaagaaaaatcacccaatgagatgttcc

SEQ ID NO: 80339 - DNA, 178 bp, Zea mays
  Clone ID: MRT4577_173289C.1
gggccaagaagcagggcatcaacttatttgcgcccaagcccaaaaaaaagtttccaaattcaaaatccagacttgcttaatttcgaaatacttttttgcactggtgggcatttttaagcattagcttttgacctcactgaaaacctaatttgggcaaccaaaacattcagcttttttt

SEQ ID NO: 80340 - DNA, 251 bp, Zea mays
  Clone ID: MRT4577_17328C.1
accatgaccaagaagctagatgtggaagagccagacagcgccaactctcgttctacagcacgcggtctgctcctgcttcccaggctagcctgcgagccacctcctctactcagtctctagctcgcctgggttctcccgattatggcaactcagccctgctcagcttgcctggctaccgccccaccactcgcagttctgctcgtcgttcccaggccggggtgtacagtggggcccctccaggatagaacagc

SEQ ID NO: 80341 - DNA, 545 bp, Zea mays
  Clone ID: MRT4577_173290C.1
gatcgagaaaccactcacgtgacagtatatattgtccagtgggatggggtggcatctgtctggttcacagctcaaatactgtgagaataaaaaataggctgagatgtacaccatcaccagttcagaccatataaaaattcaaacgatgtacaatctaatcacggttgcaactcagctgagtcagactaactgaacagtatgcaaggatgttaactgctgataccaaggaattcggtgaagcttggatactttggttcccaaccgatctcagcccgagtttttgaattctccattctcttccccaatggaccgtcagtaccaataaagcctccaaacttcgtgtcaaattttccactattgttaacagcatccattatttcttgcctggaaaggggcttgttgtcacagcccagaaatattcgactccgcagtccctttttcatgattgctactgcaagggaggcagcatcctcttcctcttcttgttgttcttcaggtgcttctttcggtttccgctcttgccatgcgacttgcttgaaccgccc

SEQ ID NO: 80342 - DNA, 1740 bp, Zea mays
  Clone ID: MRT4577_173291C.1
cttagatcatgcttcatagaatcaagaattacaattgctcaaagataatatatttttggtccatatgctgttttcaaaaataaatattacacaaaagcatgtcataatccacatttgaaaagcagatacacattaatgctaggggagaaaggaggcaacttcaggtgttgcattacaatatttgatccttgcataacatacaattgtgtactattatcaacattctatttgcatgagtagtcattggttgattattcgtttattcggtagttgactgtcaattctctgcaacaatttcagtttgttgaaatctatgtagccacgtaggttcatgatcgacaaatccactcacgtgacaatatatattatccgatgggatggggtggcatctgtctggttcatagctcaaatagtgtgaaaatcaaaaatactggggacaggcccaaagtaggctgagatgtacaccatcaccagttcaggccataaaaattcaaacgatggtacaatctaatcacggttgctactcagctgagtcagactaactgaacagtatgcaaggatgttaactgctgataccaaggaattcggtgaagcttggatactttggttcccaaccgatctcagcccgagtttttgaattctccattctcttccccaatggaccgtcagtaccagtaaagcctccaaacttcgtgtcaaattttccactattgttaacagcatccattatttcttgcctggaaaggggcttgttgtcacaacccagaaatattcgactccgcagtccctttttcatgattgctacagcaagggaggcagcatcctcataatgaatctggttgatgatatgatctggtcgtgtgtctaaagttcctttcctcaaccagaaaacatgtgcacctctgtctatcttataaagtccagccagcctgagaacacagcctcctgcctcaagaacaacattttccacttttagaagaatatcagtacgagggctcctgccaattggcactgacagacaatcctcgttgcacatgctgttgtcactgcaatcatacagagctgtacttgatgtaaacaggaaagatccttcaccagtccaatttgatgctgccaatctgacatccctagggtaatcatctgaaccagacgggggagcgcagaaaataacatgtggaaccttctgatgaatagtggtgcctttcaatgaggggatgatgccaagatctgttaactcgttgtgatgatttttgcttgcggtctggccataaactttgcaacttggatgctcctttttccacttctcagctatgattcgcccaagaacaccagggcccacaatcagtaaatcattctgtccaacaacattggggtcagaaatgtcgaaccctttatcatgagatatcccgagagaggcgcagacaagaggcgcccggccggcgagcgagcggaggcgaggtggccgagcagtcggcgcaggcttcagggaacaggactctgtggtgcagccgcggcgatgggccggtttcgtggcgggtgccagatggaaggaggccgcagcggcggctctcatctcgtcggcccgcgggtcgcggcagcggcgatgtgatggtgaggaaagagtaaacggagagcgcggaccggccggtgggcggacgcttgtgcggacgcgtgtggcaacaatattatatgtataatcacaactaataatatagtgttggttgaggaacaagctatact

SEQ ID NO: 80343 - DNA, 585 bp, Zea mays
  Clone ID: MRT4577_173292C.1
ggccgcttttttttttttttttttattggggtttttttttttttttttttttttttttttttttttttttttttttttttttttggaaccgggaaagggaccctttaatttcgggggggccccaacccacacccaaaaacctttattggggaatcccccctaaaaagcacccaaaaaggggccccccccgggggtgggtgggggggagggggctggggggtttgccaaagcaggggggccaaagggccacaattgggggggttgaaaaagggggggggggaaacccccaacccggggggaaaaaggcaacaactggggcggggaaaaaaaggaagcccggtttgccgcaactagcggccaaaagggcaagagttttggcggcggaaaaaaagcagggggggacagggcggccaatgggtaaaagggaaaaagttgttgttgctgaaaaaaggcaaaacctagccggctgaagggaaaaaggtggggctgaaaataagccccccggtacaagggaaacaggggggtcaaaggaaaaaattggttttgttgaaaaaagggaaaaaggtttcccaaacccccttgggt

SEQ ID NO: 80344 - DNA, 356 bp, Zea mays
  unsure (1)..(356): unsure at all n locations
  Clone ID: MRT4577_173293C.1
accanaaaagcanngccagcccaaacacggagannnnacaagnncgcacgcacacaaacaaaancanncccacncccaaaaccancttttaattttttaaccagaaagtttaaaaanccnctcaacagntgcaaacaacanntaccaancaccacaananaatgcatctcaagaaccctnctatatcatcccatatcctatantnatcaaanttctancttaaataaaantcttncantttaacctcanacaaatataanncctaacaattccnnncatctnntacatnctatattcacatcttnaacccaaatacatacaantccccaaattcttcnntctccnnaacaaaataa

SEQ ID NO: 80345 - DNA, 1273 bp, Zea mays
  unsure (1)..(1273): unsure at all n locations
  Clone ID: MRT4577_173294C.1
gatcgacaaatccactcacgtgacagtatatattgtccggtgggatggggtggcatctgtctggttcacaactcaaatattgtgagaataaaaaattaggctgagatgtacaccatcaccagttcagaccatataaaaattcaaatgatgtataatctaatcacggttgcaactcagctgagtcagactaactgaacagtatgcaaggatgttaactgctgataccaaggaattcggtgaagcttggatactttggttcccaaccgatctcagtccgagtttttgaattctccattctcttccccaatggaccgtcaataccagtaaagcctccaaacttcatgtcaaattttccactattgttaacagcatccattatttcttgcctggaaaggggcttgttgtcacagcccagaaatattataggatgggcttcatctttagtgattgctctcccactaactgccccttcagagagcaatctttgacaattccttatctgcgaactaagctcccatgcaagctgaagatatcatgctcttttgcaaggatgacatacgcctttgctaaagtcatctgatccgctaattggcgagcaaatgatgtgctgctcaaaagctcttctgagaaattcactttctcacgagggacttcctccatctctgaaccattatccacgacgggcggccggaactgctcctttgngttgtggtgaaggacgaagagcatgagcccgacaaggaggaagatcccgagaagccaccagatccacccgggcagacgccgccgcgacgagcgcagtgcccgcctccgcgcatccccgccgccgtgccccgttccacgaagcatctccgggctagtccaacgcaagaactaaaccagagccctgcctcaccgccgaatcgccaaaccctcctgcatgggcccggagaacctacaaaggcggtgcctttgcggcggatccgggatccggatggatcaggagccgataaacatccggcgaacccagcccccggaggcggcgccggcggggtcgagtccagccacgggtgacccagcagcagcttacaggatagcggacgaggtgaggcaagaacgacggcgaagaggaagctgccggatcgcgagagcgagcggcggaatgcgaggacggcgaggtgggcagcaggattcagagagatgaagggaaggagggagcgggagatctgagaatatgagagagggagggaaagaagtagttcttcgctcgctgacgtcaaaggaaagacgcagc

SEQ ID NO: 80346 - DNA, 589 bp, Zea mays
  Clone ID: MRT4577_173295C.1
gaaccttctctagccttcgcggccggcttacagtttctggatgctactatgcttcctctcggatacatggttttctgtggtgttcttgtcttcctgctataaaaaaagcctttgaaatttacttacgttttactttttcatcgcgtgatgtatttcctttgatatgaaattataacttttttattgtccacatgtgcgtccacatatgcgtcagattatatctagatacctatattacaatagatacaccaaaaatgtacaaccaatttataatgcttacattggatagagcactatatattctttatttctacgatatatattgtatgatagatataagaaataattcaactgatctctatttcttgcaaacaaatactgtaccagcgtactaccaggccgtatacccatccacatccacatccaggcatccagtatccaggccgtctatagtggtccgcaggccgcatccaagcctgcggcgtctcaggtgtggtctagcgcccggtaggaagtagcctagggtagactagctagcgctgcccagaacttgatctcattgatctactattgatgagcattcccaatt

SEQ ID NO: 80347 - DNA, 342 bp, Zea mays
  Clone ID: MRT4577_173296C.1
ggccgtccttcttttttttttttgggggtgtttttttgtttttttttccctttttccccctttcttttttttttttttttttttatgggggaaaaactggtgttattatttgaaccgggaacgggtcttttggcgggctcatttgaacaaaccaaaggccgaaattacgggggccttggttacccattttttagctttcctttagggttgcttggggggggccttccccagcccctctttggggggtgggaaaatttttttggcccccgggggggttttgttttttgggggatgggaaaaaacccccatggggcttaaaagctttccggggagctcctttgg

SEQ ID NO: 80348 - DNA, 278 bp, Zea mays
  Clone ID: MRT4577_173297C.1
ctacaatgagctgagtgtagcacctgaagagcaccccaccctgctcacagaggctcccctaaatcccaaggccaacagggagaagatgacccagatcatgtatgaacccttcaatgtccctgccatgtacgacgcattcaagctgtgctctccctctatgcctctggccgcacgacatgcatcgtcctggattcaggtgatggctcatttaggaagttcccatctatgacagctatgactgcgccatgccatcatgcgcctggacttggctggtcgtg

SEQ ID NO: 80349 - DNA, 234 bp, Zea mays
  Clone ID: MRT4577_173298C.1
gttggggttcttaaatttttgcctttaggtccagagattataagaaagaactgagcctataatacatgacataaaacatatagcatatgacacgcgagctggccattaccataaactttctgactgaaagaatgccaacatcaacagatgttacacaaacggaacagcatagatacaaagtacatgtgttctgtcaaattacgatggactagcctaactttgttttaatgtaaa

SEQ ID NO: 80350 - DNA, 285 bp, Zea mays
  Clone ID: MRT4577_173299C.1
agcagtggtaacaacgcagagtacgcggggtcctcaattgcgatagtttcagagccatcagtgaccataggttctgatttcaaccagcaccttgttccattgacctcaggtaagggaagcagacagccaagggtgacgatcagaagccctccaaataagacttcagaaactaacaacaccatttttggttctgttagcaaattggctataaggaaaaaaaaaaaaaaaaaaaaaaaaaaaagtactctgcgttgttaccactgcttaaggaggaatcccagcaca

SEQ ID NO: 80351 - DNA, 611 bp, Zea mays
  Clone ID: MRT4577_17329C.1
gggaggtgggggagaaaagatgggcggtctcgggatggagaagggcgagggcatgggtagcgccgtcgctgattctggcgagagcaggggaagagtatgatgatgactattcgtgacagtgaattcctgggaggtgggggagaaaaggattgcgttctgtggaggttgttgtgcttgtgagaaggatttgttctctcccacctcaaggggatggacgacgagaagaggatgggcggtctcgggatggagaagggcgagggcatgggtagcgccgtcgctgattctggcgagagcaggggaagagtatgatgatgactattcgtgacagtgaattcctgggaggtgggggagaaaaggattgcgttctgtggaggttgttgtgcttgtgagaaggatttgttctctctcttttttctttcttgtttctttggccgtgtttcagtgacactgttgatggatcccagtgctttgcccgtttgatgcatcatggtggtggtggtgatgatggatgacatagtggtagggggtgtgtgctagttgttaatgtgttatttattcttttgcttgcaagacaattgtaactgatgatcgttagatcatatggttcttcc

SEQ ID NO: 80352 - DNA, 315 bp, Zea mays
  Clone ID: MRT4577_1732C.1
ttctaacttagatcgcacggccgttctttattattttttttcgccacagataactgtcttatgaaagacacacataatgctcattatggaaaccgtgctatcaagatttaaacaagatgacttacatagcagtcttttattagaaagtacttaactactcatcaaaaagagcatagacacggctacgaagagcgctgcccatgctcttcacagaatcatgaagccatattattctttaggcgaggataatacaaataatatcgtcgggaccagttttataccctagcatcctgcgcaatccttagaaccaagata

SEQ ID NO: 80353 - DNA, 348 bp, Zea mays
  unsure (1)..(348): unsure at all n locations
  Clone ID: MRT4577_173300C.1
ctcacgagctggcagtgcatcgtgaccacgccgacctgccagatgcatccgggcacgccgttgacggagctcaagaggaaatgctgccgcgagccgagggacatgccgaattactgccggagcacggggctgaagatcctcatggactgtacgatgccgtccagccccgacgcccagcccgagggcctcctacaggacctgacgatgctcaccgccgagcgccagaggggatccgncatgcccctcagcacggaggccgagtgcatcctggccaccatcaacgggaggcgcggacgcatgccgaatgtccgggggggcacgaaccaccggaagttactgagaagagca

SEQ ID NO: 80354 - DNA, 2060 bp, Zea mays
  Clone ID: MRT4577_173301C.1
cattgggaccctcgaggccggccgggacgacgatggtatttcgcatcacacttccgtctggccaccgcaaagcaccccctctccccccgtcgccatggcgagcgataaccgcgcgtcgctcctccccttcgccgccgccgtccttgtggtgctcctcgctggcggcgccgcggcggacgacgcctccagcgacgacgacgctgggacttcacggacacccggctgctccaacaagttccagctggtcaaggtgaagaattgggtgaatgggactgaaggtacaacttttgttggcctaagtgcaaaatttggagctcccttgccaagagatattcatgaagcaaaaaagtcatttgctgtcctctcaaatccaattgactgttgctccaacttgacatcaaagttaacaagttcagttgctatagcaacacgtggggaatgtgctttcacggaaaaagcaaatattgctcaggccagtggttcgaccggtttactagttatcaatgataatgaagagctttacaagatggtttgcggtgagaatgacacctccattaatgtgacaatacctgttgtcatgataccacagtcagcaggaaagaagctgaagaacttattgcatcatggagcaagtgtggaagtgcagctatattcaccaaatcgaccaactgtggacctttcagcatgcttcttatggataatggctgtaggcaccatagtctgtgcttcactctggactgaatttgttacatgtgaacaggttgatgagcgttataatcagctgaccagaaaggatggacctgacacgggaacaaactacagagaagataaagaggtcttcgagatcagcgcgaagggtgcttttatttttattatagtagcttcagttttcctcctcctcctgttctacttcatgtcatcttggttcgtttgggtgctaattgtactattctgcattggtggtattgagggtatgcatgcttgcttggtcacgcttctagctaggatttttaaggactgtggacaaaagactgtacaactccctgttttgggggaggtcttgatcttatctgttggaattgtaccattttgtgcggtgtttgcaattctctgggctgtgtatcgccatgcttcatttgcttggataggccaagacgttctgggtatctgtttgatgataactgtgcttcagatggcacgtttaccaaatatcaaggttgcatcggcacttcttagtgctgcatttgtgtatgacatcttttgggtgttcatttcacctcttatattccatgaaagcgtcatgattgcagttgctcgtggtgataacactggggaatcaattcctatgctcctaaggataccccgcttctttgatccatggggtggttatgatatgataggctttggtgacattatcttccctggattgcttgttggattcagctatagatttgacagagcaaacagaaagggtgtcttgagtggatattttctctggctaattgtgggatatgcagttggccttttcattacgtatcttgcgctgttcttgatggacgggcatggtcaacctgcgttgttgtaccttgtgccatgtacattgggggttattgttattcttggttggttaagaggtgagctttatgaattatggaacttcggaaaaagtccagcagaaaattttgtcaatgaaccatgacaacaaaatccagggaagatgtattcttcagcgtagtagatagcttgaggatgtttattaggaggcaccgtgtattgcaagatgttatgtttagcattatttcaaagaaggatgctattgtgtttgaaaaaaaaatgataatacatgtaagatgcaagcatgtactcccacagtcgtaaaataacccaatataagtgccgctatatagttccaaaaaaaaaaaaaaaaaaaggcccctagggccggggggggggggggggggggggcggccctagggttggaaaccagtttagcctgacttggctcgggcaatttggaaatgtttggttgcctggtctagggcccgacccggccccttttt

SEQ ID NO: 80355 - DNA, 172 bp, Zea mays
  Clone ID: MRT4577_173302C.1
tcgaggatatcgcaccgccgcggccacccatgatatctagaccatgacataggtgcggatcacagcgcaatcaaaccatgcggccctaggcgtgctataactatgcagatgggcagtgtacttaacctagaggtaaaagcctgtataatcccagtgcggagaggcaatgcag

SEQ ID NO: 80356 - DNA, 458 bp, Zea mays
  Clone ID: MRT4577_173303C.1
caaggaaggggaaggggtcccaaaaaaatattctatcattacaagaatatgatataaaacaacccttaaacaaaggcggatccgaaattaaaatcagcttacacctttaaacagtggaaaaaaaagggggcaaaaggaaaaaaacactagcatttttttccggcaaatggaatttttaaaacttccaaaactccctgggacagggccacccccccagtaaccaaaagctgccccaaaaaaaacagaaagggacccctttgggtttacaggaaacaaaaccttaaaaggattaataagctcctaggggcataaacccttttttgaaaacttaaaagaaattgcccgaccagcaacccacaaggtataaacggaaagtcgccatttgaatcccaaacaccccaaaaatttgccctttttttgggaaaagggctttctttttaaaaaacaaaaggtttgaa

SEQ ID NO: 80357 - DNA, 405 bp, Zea mays
  Clone ID: MRT4577_173304C.1
tggaacctttgggctgatttatgtgcttgcgaaggtatacggcgataagagtagagatcacataaccttagtcggtgcaacttaaggggcgtgatggggcgcataagtcatacgtctcgggcggtaaggcaatgcctaagtagtcggggtacacgtcgttctatttggcgttttcctgtaaagttatggcgttaacggatacgcgtagaatcggaactttggtaatctagctcacgttttacttctaggattaggaatacacttaggttagacgcatctactctttctatagcacgtagtgctagggggtcatttcaacattttacttatcgtcctggtatatcacgtactactaaggggtcccttcaatattctcatcctagtctccttcggcgtcgtcatata

SEQ ID NO: 80358 - DNA, 181 bp, Zea mays
  Clone ID: MRT4577_173305C.1
cagggtacgacgacccacccggtgagtttgacccctcgtcagttcgtcagtggccaaccgagcagccgagcagaaacagcatgcggcgccgtatataaaccagagcgcacgagtagaggaggaaaagcagtatgagccgaggaaagacgggtccgggaaagtcgcggaaggagcaatggca

SEQ ID NO: 80359 - DNA, 335 bp, Zea mays
  Clone ID: MRT4577_173306C.1
ctatctatcttgttagatttccaagagatctttgttttggcactgtccagaccaccattgagattactcgttgttcgaaggcattgacttcaactacaccatcacactaccaggtttaaagagctgaacaaaaacctgaacaggtagagcatggagcctgtagagaagtaaccaagggatgccaagttggacaagagcagcaaccataatgttgtccttgatagaggctccactaggatccccatggtgcagcatctgctccaggacttttttaacgacaaggagctgtccaagaacatcaatactgattaggccggtgcctatggtgctgacgt

SEQ ID NO: 80360 - DNA, 1764 bp, Zea mays
  Clone ID: MRT4577_173307C.1
ttttcaaaaaaaaaaaaaaaaaaaaaaaaaaatttaaaaaaaaaaaaaaaaaaaaaaaaaaggaggccagcaccaatccgcgcgcctttgcacgagagctaaactacaaccaactagctgctggtaaaacttactactaccagcacactgcagccccaagatcgatcgagcgtccacagccccaaggaacatagtataacatggccccagccatttccaagcctctccttaccgatctcgttgcacagatcgggaaggtcccatcgagccacatcaggcctgtcggagaccgcccggacctcgccaatgtcgacaacgagtccggcgccgggatcccgctcatcgacctcaagaagctcaacggcccggagcgccgtaaggtggtggaggccatcggcaaggcctgcgaatccgacggcttcttcatggtgacgaaccacggcatcccggcggcggtcgtggagggcatgctgcgcgtggcgcgggagttcttccacctgccggagtcggagcggctcaagtgctactccgacgaccccaacaaggcgatccggctgtccaccagcttcaacgtgcgcacggagaaggtcagcaactggcgcgacttcctgcgcctgcattgctaccccctccagagcttcgtcgaccagtggccgtcaaacccgccgtccttcaggcaagtggtgggcacctacgcgacggaggccagggcgctggcgctgaggctgctggaggccatatcggagagcctgggcctggagcggagccacatggtggcggccatggggaggcacgcgcagcacatggcggtgaactactacccgccgtgcccgcagccggagctcacctacgggctgccgggccacaaggaccccaatgccatcacgctgctgctgcaggacggcgtctccggcctccaggtgcagcgtggcagccgctgggtggccgtcaaccccgtgcccaacgcgctggtcatcaacatcggagaccagatgcaggtaacgcgcatgcacttccagtcgcaactgagattcttgctgtcgtcgtaatctgggctcgctgaacaaagtcgtcgcctattgtatccgatgcatgcatggatgcaggcactgagcaacgaccggtacaagagcgtgctccaccgcgtgatcgtcaacagcgagagcgagcggatctcggtgccgacgttctactgcccgtccccggacgcggtgatcgcgccggccgacgcgctggtggacgacggccaccctctggcctaccgccccttcacttaccaggagtactacgacgcgttctggaacatgggcctccagtcggccagctgcctcgaccggtttaggcccggaggatcgttggagtgagtgaactacgccggccacgacagggaaaaaaaatgaagacctttttgtattcttgagcatctgccaataactggatctttgaaatcctcctctggactggagtcttggattcccttcgggtcccacctaacattacgttgggtccaccctgaagatgcagacaaggtttaggttgacaaattccgatgtaaggatgattttgtccaacttattactatttccttgtgctaattacaaagtacagatgtaagcttccacaaaacattgcttttgatagatgttgatccatccattacaaattccaagttaattagacttttttgagaataaaaagtatataacttttgttatgtacctaaatatattctattaacagatatctatcaatcgccaaatgttt

SEQ ID NO: 80361 - DNA, 550 bp, Zea mays
  Clone ID: MRT4577_173308C.1
gcttcgctgttcttgtagtaaaggccggcagcaagcggtggcacagcgagaggtggagaacatgaagatcagcacgtctgttggcgatcctagttctccaggcccttctggtctctgtggccgtggacaaaggacctgcaggcccgacgacgaacaacctctgctggtgcggctagtgcaccagctgctcgggtgtgtggacctgcgacgacctcctcaccaggtgcgccgccacctgcaagaactgcggccccgtgtcctcggacaaggggttcatcaagtactggtgccgctacttcctccccgaaaactgcgtgctgagagatccactagagactcctccgattccaccatggacgcgcggcacatgtcggcacagccgatggatacttccatgttcctccgaccgtccgccttgctactggtgggcagccacaccaataagctaggtctggatgctgttgtgaatgctagattgcgagtcccttcccagtgcgagatggaatatgataatgcgtcgggcgccactaaaccatcaaattaagaggcc

SEQ ID NO: 80362 - DNA, 253 bp, Zea mays
  Clone ID: MRT4577_173309C.1
gaaaaaccggagcgacccacgcgtacgctcatcacaaataaaaagagaacccacttttttttaactgaacaaacacaaacaatctgttgggtttctatcacattacccaacaacaacctttttgttttagatgaaaaaaaacatgcccgaacgcttctatcaaattttgtttgaccaaaccctccatgctattcctcttattacaaaaataaatacatgatcatatggtaaaacacatctctatcagacataa

SEQ ID NO: 80363 - DNA, 575 bp, Zea mays
  unsure (1)..(575): unsure at all n locations
  Clone ID: MRT4577_17330C.1
ttgttgcctttccacctatccgctcccggggggggggcggcgccgctctccacccgattgggtgccgtgcctgccgccccaccgattcactccgcgcccgcgcgacccctgccgtccatgaacctctccgaggattggcgcttttttttcctggtttgtgccgncttcgctgctctgttggggggggggctgcctgccgccgccgcctcccgcggtcctctggggggggggggtctcccgccgcgcacccagatgctctccctcccctaccccatcccattgccgcgctcctccacccgcggactgaaccgcttcctccgctcttttgtccgaggcacctccttcctcccgcgctccgactttgactacctcgctgacacactcatcccccaaccggcttcattttctccggcttccaatctgctcgccgtcctccggctctcgtgctctctcattctctttttcccctacggcgagaatgcggagcatgttgcctttgttactctggatgccaccactgncactgggtccacgcctctcttgccgggcggtcaaagggatggggtttatgcacc

SEQ ID NO: 80364 - DNA, 298 bp, Zea mays
  unsure (1)..(298): unsure at all n locations
  Clone ID: MRT4577_173310C.1
gaagctcttggacaacatctctcgttctccttccccatttccactgtatatttctcattggattgccttcagggattcactgtccccaacaggaatttttaaaccacaacaccccaacttggcagctttttctgtggaggacagacggccggtcggacctctgagcacatagtgtcctgcccaccctataagctcctccagtcctgccgggcacatgccgangggacgcctgccctgccaacgtggtctcctggccggtctcagctctgatagactttgtgaatctgaactgcactac

SEQ ID NO: 80365 - DNA, 907 bp, Zea mays
  Clone ID: MRT4577_173311C.1
agcagcgccagcggcggtcagcgtcagcgtcagcgcccgaccaaatttcccccctcacctccccctctcccgtcgtcggcatggccaccgacgtgctgcgcgcgcgcaacatcctcttgccggcgccgccgcagaggatccgggcggcggcggcggcgcgccggagggcagctggtagcgacagccaccaccccggcgccaccgccaccaggaggaggtcgccggcggccgggacatcgtcccccgcggcggggcgaagacaccccggcggcaggagggcgaggcctgcggcggaggtgtacgccggcccatcgttctcgacgtcccccgacccgagcttgctgccgctaccgcagtttgctgccaggaaggccgtggccgtggccatgacgaccgccgtcgatgccgccgccgcgacgcgcgacctcaggcttatcctgcggctggagtagccatcaggacacatagctcgtctgctagctctaacgctggcttcgatttctcttattaattcttccttctttattagctcctactcctagtccttgtcgacgcatcatcgatcgagctgcatgttagttctggctgctctcctggtatgggtcctcccacgctgccgcggcgaggcttccggctcagttttattgtgtggtcggcggcgaggcacgcggcggccatgggatcccaccgcgacggcggtgtagaatgatagcagctgtaatacactactctgtactgtgacgtgcaagtagatagtactagttactagttagccagtgtagggttcctccgtgtaacaagtcatcagcgtgtgatcctcttcgtctgttcatcaatatacacatttctatatgtttcaacaattactgatttgaattagtaaaagtcaaattgtctgccgccccta

SEQ ID NO: 80366 - DNA, 159 bp, Zea mays
  Clone ID: MRT4577_173312C.1
ggatgatcgtcaagtggaagtcgtctaacaaacactaacatagtgttacccagggtgatgatgtagaaggccgatgaaccgaagctacatttgaagccttggagtagtcttcttaggatcgtgcctgatttctgtaaaaatactttggaaattcttttg

SEQ ID NO: 80367 - DNA, 924 bp, Zea mays
  Clone ID: MRT4577_173313C.1
cctcgaggccggccgggccggatcgaccgccttcctcccagcccaagtggatgttcgtgcctatatcacagcatcagaaattcagaatcgatccgatctccgcttgcgctgagctccatcagattcaattctctgcaggtgcaggaccgcgaacacgaggaggcaggggagcagcatccacaaccacaagccatggcggggaggaccaacatccccactaacaactccgccctcatcgcaatcatcgccgacgaggacaccgtcactggcttcttgatggccggcgttggcaatgttgatctgcgcaagaaaaccaattacctcctcgtcgacaacaagacgacagttaaacaaatcgaggacgcgttcaaagaatttactacaagggaggatattgctattgtgctcatcagtcagtatattgccaacatgataagatttctggtggatagctacaacaagccagtccctgctattctggagatcccatccaaggaccatccatatgatccagcgcacgactcggtgctgtctcgagtgaagtatctcttctctgcggaatcggtggcgtctgataggcgatgaaggcatccttgtgtagtagtaccctttggtgtatctgttttgttatgtattgaaaagaagtggcatgcgtccgagcgagacagcaaacaataataatggttgtggaaccaaaccaacaccttttttttctttcataaaaggttggaatgctattttgttgctttgtactacctccgttcttgaatatttgtcgctcgctagttcatttttgaactaaatggtaacaaataaaaaagaacggagagagtattggattggttattagagagtaataaaatgcgattgtcatgttgcacagtactgtttaagggaaagggaacattgtgcagtgtattttgc

SEQ ID NO: 80368 - DNA, 264 bp, Zea mays
  Clone ID: MRT4577_173314C.1
acgaccacacatacacccacacatcatcctatgcttcaaaacctatttccaaaccaccaacagcggctattacaacaacttgttgccgactacttagtctactacaccatatagaaccctgcaccactacgtacaacaacaacaactagctattatctagcaccaatacgagattaacaaatgcacctacatacctacaacaacaattgcagcaacataatgtaccatatctaacctaactagacatgacaaaacctgatgcct

SEQ ID NO: 80369 - DNA, 187 bp, Zea mays
  Clone ID: MRT4577_173315C.1
ttcttccgccgcctgccgtcgcgcgcggacagcatgctttgaacccccgagaatagaatgctacggattctcttcttcagtcgagaatgtttgcttcgttttccactttatattttgtctttgagcgtgcgtgtatgctgctaatcttggggtgccttgagatttgatgaagttacggtgtttataa

SEQ ID NO: 80370 - DNA, 1265 bp, Zea mays
  Clone ID: MRT4577_173316C.1
ggccgcaaattttttttttttttttttcggcggagtaaaaaagcgacagcccgaatttgcattaacaagtacattacatacacgattcctcctctgctctccaaagttttccatggtatacatacaccttcccaagatccatgacggcggtcggacacctagcagttagacactcgaatcactcgagctgagcgtaccagaccccctggatcttgacatccttgggcgccttggccccgaggtcggtgtcggacggctgcacgctctcgaagacgccgatgacctcgccggtctccgggttgctcttggtgacgctcaacgtgatgttgccggtggaggaggcggcgttcttgatgttctccttctggagctcctcctcgtcacctctgcccccggcggggagcgcgacggcgttgtcgtagccggtggagccgccgcggcccttggggtcgaggaaggaggagccgcggtagctgggcacgaggaagggcccgccgaagctctcgggcttgccggtggcgacgagccttcctcccaacccaagtggatgtgcaggaccgcgaacacgaggaggcaggggagcagcatccacaaccacaagccatggcggggaggactaacatccccactaacaactccgccctcatcgcaatcatcgccgacgaggacaccgtcactggcttcttgatggccggcgttggcaatgttgatctgcgcaagaaaaccaattacctcctcgtcgacaacaagacgacagttaaacaaatcgaggacgcgttcaaagaatttactgcaagggaggatattgctattgtgctcatcagtcagtatattgccaacatgataagatttctggtggatagctacaacaagccagtccctgctattctggagatcccatccaaggaccatccatatgatccagcgcacgactcggtgctgtctcgagtgaagtatctcttctctgcggaatcggtggcgtctgataggcgatgaaggcatccttgtgtagtagtaccctttggtgtatctgttttgttatgtattgaaaagaagtggcatgcgtccgagcgagacagcaaacaataataatggttgtggaaccaaaccaacacctttttttctttcataaaaggttggaatgctattttgttgctttgtactgtatttggttggttaatagagagtaataaaatgcgattgtcatgttgcaaaaaaaaaaaaaaccaaccaaaaaaaaagcaaaaaaaaaaaaaaaaaagaga

SEQ ID NO: 80371 - DNA, 272 bp, Zea mays
  Clone ID: MRT4577_173317C.1
cttgttaactttttctttttctcgtttttttataattctcaccttatttgggaaaagcaaattctccatttttttttgattggggggtcgtgctgttaaccattcctaaagctgccacagaaaacaacaatgttgggttaaataaaaaacccatgcctagttgcctccttgtttttctgaacctacacatttacaagaaagcccttttgaaaaacccagcatggtgcgcaaagggatctttccccaacgtggcgcataaataacaccagggg

SEQ ID NO: 80372 - DNA, 213 bp, Zea mays
  Clone ID: MRT4577_173318C.1
tcctttcaaccttgaagagccagccctcacggggaggggcctaaaagaactttgaggtcaacacctccgcgctgttcctgatgattgcaaacacaacatttcaggtatgctctgacgacaacaacacgaaagacactaacgacgctgtcgacggaaaggttgcatacgctgctcataaggcagagcctgccaagaacaactagaacatcacgg

SEQ ID NO: 80373 - DNA, 325 bp, Zea mays
  unsure (1)..(325): unsure at all n locations
  Clone ID: MRT4577_173319C.1
ttttttttttttnnnnnnnnnnnnnnnnnnnnnnnnnnnnnnnnnnnnnnnnnnnnnnnnnnnnnnnnntttttttttttaaaaaaagaaaagaaacactgtccactatgcctaaggacggagcggcggcaggccaaatacggcccgcctggccttggtatactccaaaagcctgtccacgtccgggatcgcccttttcaccctccagcgcgcagaaccgctccgcccacgccgccagcagcggcttcctgccggcgtcgagggccttcacctcgcacatggcctcggtggtgtacagccacccaacaaggtcgccgatcacgac

SEQ ID NO: 80374 - DNA, 550 bp, Zea mays
  unsure (1)..(550): unsure at all n locations
  Clone ID: MRT4577_17331C.1
tcctccacctgccgcctcgtcgacgnngttgagagagagctagaaagcgggagagatgagctcgcatcaaggagactgctcggaagtccgacgggagggaaggctcccaggtaagcatgttgccgccgagggtgcccgtaagtctgcccccaccactggtggagggaagaagcctcaccggtaccgccctggaagtgttgccctccgcgagatccgcaaggatcatagagagacggaggtgttgatcaggaagctgccctgtccgaagcctcccccgggaatttgcagaggacttcagaactgattggcgtttccagaggcatgcgaggatgcccctccagggggtggtgaggcacaccgtggtctgctgtgaggagaacaacgagatgtggcgcatggcctgcgtctggggtgatcatgatggcgaaggacatttatctgaggaaggaggatccgcggacagaatacctaatcgctccgtcagacgtggggacaaagaagatgaagccctgcgggtattgttaatcccctggcgttgtagggacatatg

SEQ ID NO: 80375 - DNA, 648 bp, Zea mays
  Clone ID: MRT4577_173320C.1
ggccgcttttttttttttttttttagaaatgtgaagtgctatttttcccttgaagaaacataatcattaattcagcccaacgcttagctgggcttcaaatgtgtcatggagtgtgcactgtctgctatttcaccccaaaaagcactcttgcaatgcacgaaatctaggtggaatgacttacatgctccatttttagttgttcttccaaaaccaatgtactaagatcacaggtgaatatacggcacaagcatgtgtatgatgtatgcctctgcaagcgcgttcccatgcataagatctgaatacttgtttcagagctgcgtctgaaagatggtgacatggcccaggcgctgcaccatgtcggccacggagcccacggcggcgagcagcgaaaccaggagcgcgcccacattgagcgcctgcagcgccacccacttgcggctgccggcgttgaagaagggcagcatcagcgacaccaccgtcgtggcggccacgaacgccgtgcgcagcaccagcttgcacatcgtgaaccgcaccgcgcagccgggcaggcgcaccgcgtactcgtggtggaagaaggccgagtccggccaccgggacccagccacttctcgtacacgcgaagatcgctgcgcgtcacctgatatgccc

SEQ ID NO: 80376 - DNA, 264 bp, Zea mays
  Clone ID: MRT4577_173321C.1
gttctagatcgcgagcgcgccctttttatttcattttctctctgtttttgatttctggtctattcgggttattttttacgtgctcttggcaaaaaccctcttttaaaaaaggtgcctcacgattgagcactgaacatcaacccctagtccacctgtctatgcacacccttacactaatcaacttctcatatacattaaaccttattgctaaatctctaaaagatctcctgtaaaccaaaaggaaatttctccttcatacacacc

SEQ ID NO: 80377 - DNA, 801 bp, Zea mays
  Clone ID: MRT4577_173323C.1
tacctcgaggccggccgggacaacacagaacaaaaacaaagaaaaaaaaaaacccttagccaacacaaccatcatggccacctctgctattcagcaatcagcattcgctggtcaaactgctctgaagcagctcaatgagttggtccgcaagaccggtggcgccggcaaaggtcgcactaacatgcgccgcaccgtcaagagtgctcctcagagcatttggtatggccctgaccgtcccaagtacttgggtccattctcggagcagattccgtcatacctgaccggagaattccccggtgactacggatgggacattgctggattatcagctgacccggaaaccttcgccaggaaccgggagctggaggtgattcacagcagatgggcaatgcttggtgcacttggctgcaccttcccagagatccttgagaagaatggtgtgaaattcggcgaggccgtgtggttcaaggctggtgcacagatcttctcggagggaggacttgactacttgggcaacccaaacctgatccatgctcaaagcatccttgccatctgggctgttcaggttgtgctcatgggttttgttgaaggttacagagttggtggaggaccacttggtgaaggacttgaccctatctaccctggtggtgcatttgaccctcttggtctggctgatgaccctgatgcattcgctgagttgaaggtcaaggaactcaagaacggtcgcttggctatgctctccatgtttggtttctttggtcaggctattgtcactggcaagggccctattcagaaccttta

SEQ ID NO: 80378 - DNA, 596 bp, Zea mays
  Clone ID: MRT4577_173324C.1
ggccgcttttttttttttttttttcttttttttttttttttttttttttttttttttttttttttttttttttttttttttttttttttttttaaaaaaaagttgggaggcaatttcgggggcaaaaagtccccccctttccaaagggaaaaattttccaataattttaaaaccctaaaccccccggttctggaaaaaaccaaaacccccccaaaaaatttcaaataacggggaaaaaaattggccacccaaaattggatggttttgggggggtccacccccccccgggaaaggccccactttttcaaaggttccaagaaacttgccccccccgttattcaggggaattttgggggaacccactggaaatttcctggggaaaaacgggttttggggccaaattttttcccctggggtaaccgccacccccctggaggggaagggccccccagaaccccctggccaaggggttggcccccccaaaaatttaaaaatcccggtggcccttcggctgggaaagaaaacccccaccccccgggggaaccgggaaaaacccaaaaaaataaaggttttgaaaaaaaatattgggccccccc

SEQ ID NO: 80379 - DNA, 1190 bp, Zea mays
  Clone ID: MRT4577_173325C.1
gccggccgggccgggaactgcagccgtcggatactcccacaggagcgttccgaagccctaatgctcgcccttcccataagtactctcctctgaccacgccgcctccatttccttcctcctcccacctcggcggccggcctcctcttctcttcacccacacgctggtcatagagatgtcggctgcagaggcgaaggcggcggcggtcccggagtctgtgctgcggaagcgcaagcgggaggagcaatgggcagcggacaagaaggagaaggcgctcgcggacaggaagaaggcgctcgagagccgcaagatcatcttcgcccgcgccaagcagtacgccgaggagtaccacgcccaggagaaggagcttgtgcagctcaagcgtgaggcccggttgaagggtgggttctatgtgagcccagaggccaagcttctgtttgtggttcgcatccgtggtatcaatgccatgcaccccaagacccgcaagatcttgcagctcctgcgattgaggcagatcttcaacggtgtcttcctcaaggttaacaaggcaaccattaacatgctgcgcagggtggagccatatgttgcgtacggataccccaacctgaagagcgttagggagttaatctacaagagaggttacgggaagctgaacaagcagaggattccacttagcaacaacagtgtcatagaggagggcctcgggaagcacaatatcatctgcattgaggaccttgtccacgagatcatgacggtcggcccgcacttcaaggaggccaacaacttcctctggccgttcaagctgaaggcacccctcggcggcctcaagaagaagaggaaccactacgtggagggcggtgacgccggaaaccgtgagaactacatcaacgagctcatcaagaggatgaactaggctctctcttgtatcctgtgagaatgcttttctgtgtcagcgtggttgtttttgctctagtaagttgacggataatgatggatatgcaattatttttttggtgttccatggctctaatacagccagacttcactaggaactgtgtcgctgtttatgttggcagttgcttctggaggtttttgtgtacttttgttatttttattttcttttgtatatgttgcttggaccttgtcaattggctgatgctgcctaccgagccaacataggccctgtttgttt

SEQ ID NO: 80380 - DNA, 737 bp, Zea mays
  Clone ID: MRT4577_173326C.1
cattgggtacctcgaggccggccgggcactatcccgatcccgtcgaccctgccacatacagcctcgtttgagctctagactcgagagaggcggatagggagaggcagcaccgcagggagcagtgacagagaggccgagcgagagagagagatggacgtggagaggaaggtggtggaggcggacgacgacggccgcgtcagaacagggacggtgtggacggcgacgacgcacgccatcaccgccgtgataggctccggcgtgctggcgctgccctggagcgtggcgcagatgggctgggtcctcggccccgtcgccctcgtcggctgcgcctacatcacctacttcaccgccgtcctcctgtccgactgctaccgcacgccggaccccgtccacggcaaacggaaccgcacctacatggacgtcgtccgctcatgcctcggtatccgcaccatgcgtgtggctttttttttctgaatttccatgggcaacgagtcaacgacagtagtagcgtgttctgatcgtgatgggcatggcaatgacaaggatgttctctctaaaaaaaaaaaaaaaaagcggccgcctagagatgtggtggtgtgtggactcgcacagtacgcgatcctctgggggacaatggtgggctacaccatcaccactgccacgagcatcatgtaagctctaaaattcctgttcagtggcgcacaagacaccgcacaaaaaaaaaaaaaaaagcgggc

SEQ ID NO: 80381 - DNA, 261 bp, Zea mays
  Clone ID: MRT4577_173327C.1
caccaatccacagcgagacacgcccgagcgagtgatccccgacccagccgccgccatgaggccgtcgcagctgaagtccacggccgagcaccaccgccgcagccgcggctacacgtccacagccaatccggagcggaaggtggccatcctgggcgcggcgggcggcatcgggcagccgctctcgcacctcatgaagctcaacccgctcgtatccaccctctccctctacgatatcaccggcacacccggcgtcgcggccga

SEQ ID NO: 80382 - DNA, 885 bp, Zea mays
  Clone ID: MRT4577_173328C.1
gggccgggatttcgcattggcattgcccatgaacttaggacactgtgaaggcaccgccatcagagaacgtgacgatgaagagggccagcttctacggcatcagcgtgacgaccatcttctacgtgtcgctcgggtgcatcggctacgcggccttcggcaacgccgcgccggggaacgtgcttaccggcttcgacgagccgttctggctcgtcgacgtcgccaacatcgccgtggtcgtccacttggttggggcatatcaggtgtacgcgcagccgatcttcgcatgctacgagaagtggctggggtctcggtggccggactcggccttcttccaccacgagtacgcggtgcgcctgcccggctgcgcggtgcggttcacgatgtgcaagctggtgctgcgcacggcgttcgtggccgccacgacggtggtgtcgctgatgctgcccttcttcaacgccgtgctcgggctgctgggcgccatcgccttctggccgctgacggtgtacttcccggtgaccatgtacatcgcgcaggccaaggtggcgccaggcagccgcaagtgggtggcgctgcaggcgctcaacgtgggcgcgctcctggtttcgctgctcgccgccgtgggctccgtggccgacatggtgcagcgcctgggccatgtcaccatctttcagacgcagctctaaaaaaagtattcagatcttatgcttggggacgcgcttgcagaggcatgcatcatacatatgcttgtgccgtatattcacctgtgatcttagtacattggttttggaagaacaactaaatatggagcatgtaagtcattccacctagatttcgtgcattgcaagagtgctttttggggggaaaaaaaaaaaaaaaaaagcggcc

SEQ ID NO: 80383 - DNA, 1208 bp, Zea mays
  Clone ID: MRT4577_173329C.1
actcctatgggcgattgggtgcctcgaggccggccgggactgtggggggtgggctggccgattggcgcatcgcttgtccgcctattccctgggtccttcgtcgggcgctaggcacggaacggaactcatcccgctgtgcgcttcgtttcgtggcggcgaacggccggtcgagcgccgccgcccttggctgggtcttcactcagtccttcgccggcgacgagcgtccacctggtgtctactgaactgagcagacagtagcaagagccactatgctgttcttctcctacttcaaggagctcgtggggaaggaggtgacggtggaactcaagaatgacctggcgatccgcgggacgctccactcggtagaccagtacctcaacatcaagctggaaaacacccgcgttgtcgaccaggacaagtatccccacatgctgtcagtgcggaactgcttcatccggggctcggtggtgcggtacgtgctgctcccgcaggacggcgtggacgtggacatcctgcacgacgccaccaggagggaggcgcgcggaggctgatcggcatcggcatcggcccccctcacctgtgctgcttctcccccggggaggagattgatctgccttgccctgatctcgtctggttgtacgaaacatatgctgatctgagtggccccaactcccccagcacacacttgatccaccacccacccagctccctgcctggtacttgcatgttccttgctgtgtgtgtgtgtgttcagcacacacttgatccaccacccacccagctccctgcctggtacttgcatgttccttgctgtgtgtgtgtgtgttcagcacacacttgatccaccacccacccagctccctgcctggtacttgcatgttccttgctgtttgtgtgtgtgtctgtcagtcagtaatgctgtttgaccaagagggttagcgtaaccgaacaagccctaacggagtaacggacgctgtagcggttgatgaatcacaagagtcccaatgtaagcggggttgaatcacaagaatcccaagggatgtcaatggcgaattacccgtcaggggatggctcaaaacttcactctatataacatggcctgaacatgatgctggaaaacacccgcgttgtcgaccaggacaagtatccccacatgctgtcagtgcggaactgcttcatccggggctcggtggtgcagtacgtgctgc

SEQ ID NO: 80384 - DNA, 255 bp, Zea mays
  Clone ID: MRT4577_17332C.1
ctcaaactatcttggacgtatcctactggttgattgaacattaatggatcatcttgggtcaggtctatctgtcgcaccgaaacttttaatcaaatcacatcactctttaaaaaaaaaaaaaacaaaaaaagaaaaacctaaacaaaggaaaacaaacaactaatactaaatatagataataacactaagggcatccgtactacagtatccaactttacctacccgtacatgcaaagtcactactgattgatacaa

SEQ ID NO: 80385 - DNA, 380 bp, Zea mays
  Clone ID: MRT4577_173330C.1
aaaaaaaaacaaaaacaaaaaaaaaaaaaaaaaaaaaaaaaaaaaaaaaaaaaaaaaacaaaaaaaaaaaaaaaataaaaaagaataaaaaaaaaaaaaaaaaaacaaaaaaaaaaaaacaaaaaaaaaaaaaaaggggggcccctcaaaaggttcaaatattcctttctcttgcatgcaacttcaaacccctcccaaattttccccaaatttcattccacggggcgtttttttacaactccgtcctgggaaaaccccggtcctttcacattttactccccttggagaaaatccccttttccccatttgggttaatatgaaaagggcccgcaccatttccctttccaaaaatttcccacccttaaatggcaaatggaacc

SEQ ID NO: 80386 - DNA, 296 bp, Zea mays
  Clone ID: MRT4577_173331C.1
ggggaaaacaaacaggggcccgggcttaaacccaaaatttttcattttaaaacccccgggtaacccccacctttttagggggttttggtgggctcctgaaaattcgcctttggctgggaatccattttttagaaaggggaaattttgccccccttttgggggccccccagttccccgttactgtttttaaaagacttctttttgttctccccaatggcgggggggggccttttttttaactggaaaacccttttttttaccgaaaactcgggggtttgttgttcccacccccaaaa

SEQ ID NO: 80387 - DNA, 244 bp, Zea mays
  Clone ID: MRT4577_173332C.1
agactgaaagcgtaaatttagatcaataaaaatagaggtgagcacacaaatgtgatttggttgctacttgctactgatggagttactaggacgtgctggggcgggtgtccactgcaagatgtgtagaaaattgggcacagctgtgtgtgataaattcgagcggataactgggtgtgggtgccaaactagcgtgccatctatcccggggggaacgggggggcatggcactgatccctcgcgtccg

SEQ ID NO: 80388 - DNA, 384 bp, Zea mays
  Clone ID: MRT4577_173333C.1
cgacgatgacttgcggcgcataccgacggggcctaaccctgtgcacaacagatagctagctgatcgtgcatgcagcccagcaagatccatcaatcctataagacgagaggagcaagcaacgagaaatgcaatgcaagccaagccaccagagttcagggctttcttggtacttacgagcgagctcatcatcatctcctaccaccctctgttctgttctgttcaccacggacatggaccagaagacacgatagcgatcggcagtagtggttgagcttcaggagttgcgaaaactctctggacgctgtcgtccattaatttcctcctcttcttttttttgttcttcccgagcttttcgtctgccagcaccgggtgtatattcttcct

SEQ ID NO: 80389 - DNA, 828 bp, Zea mays
  Clone ID: MRT4577_173334C.1
ggccgggagtcaaacatttcccaccagcacaactccaccctaggcagcgccctgccccgtcccttcctctgcacactccccagactgcccactcgtccgccacccaacgcgacgcgtcgccaactcgccatggcgctccgtcttctgctcctcctcgtcactgtttctaccgccgccgacgcgctcacgccggacgggcaggcgctgctggcgttcaaggcggccgtcctccaagatcccacgggggcgctcgccaactgggtcgccaccgccgcggacccctgctcatggaacggggtcacctgctcctcccctgaccccggctccgcgcagcaccgccgcgtcgttgcgctctccctccctaagaagcgcctcgtcgcggagctccctagggccccgctcccgtcctcgcttcgccacctcaacctccgcagcaaccgcctcttcgggcccatcccacccgcgctcgtcgctggcgcacccgcgctccagagcctcgtcctctacgggaacgcgctcgacggccagctccccgaggacctcggtgacctggccttcctccagatcctcgacctctcctccaacgccatcaacggctccctcccggcctcgatcctcaaatgccgcaggctccgcgctcttgcgctcgcgcggaacaatctcacaggctcgctccccgctgggttcggcgcccgcctcggggcgctggaacggctcgacctctcccttcaccggcttctacggcaccatcccgggagacatcgggaacctgtccaggctccaggggaccggtcgacctctcgcacaaccacttctcgggcccatccc

SEQ ID NO: 80390 - DNA, 121 bp, Zea mays
  Clone ID: MRT4577_173335C.1
cgtaagctcgaattcggctcggggaatagcaccccctggtggtggtgaaactttctggtggataagagggacttttaaaaagattagagatctaaggacccagaggccattggagaaatga

SEQ ID NO: 80391 - DNA, 268 bp, Zea mays
  unsure (1)..(268): unsure at all n locations
  Clone ID: MRT4577_173336C.1
cttctttccctttttataaactcaacaaattccttcattattccacaattctcactttctcctaataccatttttccacanttcctcccaacaattacttcaatnnncttcnaacacctanctnttcaatccaacattcaacaacaatctctatctactaacttcttacaacaaccaattacccaatttcaacaacaatccttaccacatctaacaatacaatccatcacaactcaacatcaacaacaattcctaccatcactttacc

SEQ ID NO: 80392 - DNA, 562 bp, Zea mays
  unsure (1)..(562): unsure at all n locations
  Clone ID: MRT4577_173337C.1
gctgggctcggggccgcttgtggttntttttttttttgggtgcgtttttttttttttttttttttttttgtgtgtttttttttttttttttttgtgtttttttttttgtttttttttttttgttgtttttttttgctttgggggggggggggccgcgggccctttttttttttggccgcgcggggggggtggggggggggcccacccctttttttgagccccacggggcgggggacgagggggggggctctccgggggaggagggggggggccctcggcaaaggggggggccggatggcgcggcagcactggggttcctggggcacgggggcgctgaccgaataatgccaaggggggttaaggggggaaccccgacggggtcggaccagggaaaggggttcatttttgccgggccctgtttttttctttgggggcagagtctcctggggcacacccaagcgttgagcctgctaggcccccgggcacaagggtgaggaaaccgtcggacttttgggcggccccggccgggggccggagagaaagccgggcgcgggatttgggg

SEQ ID NO: 80393 - DNA, 141 bp, Zea mays
  Clone ID: MRT4577_173338C.1
gatacacataaatggccacaccgagcaacttgctttaatgatagtacaaagtaaatgttatcatgttacatgatctacattgttaaataaaagctcgtgctgattccaaggatgaacaatcttaacaacggcttactattg

SEQ ID NO: 80394 - DNA, 467 bp, Zea mays
  Clone ID: MRT4577_173339C.1
atagcaacttggcaagcacaagccattgatttccatggttacaaaagcaacacagttgggatatatacatttgcaacctaaattttcttctggacgaatatgtttgcctgtgccaaatccccctcattcctttcctttattttccatcgcacatacagcattgtataaacacaggcttttttagataattatacatttttctttagagaacattaaattacacataaggatagggtgtcaggatatgttatatgctatgccataccaagcaaccaaattttaaaattgactctccagctgtgcttatcttgctctggaaagctgtatggcttgttgatcaatgagtagactcatcattgcaaacaaattggtgagtcatgagtgagaattcttgattcctagccttgtcaagttgctgccagtcagaccatctatctgccaagccaactccctgcgaattttcacca

SEQ ID NO: 80395 - DNA, 409 bp, Zea mays
  Clone ID: MRT4577_17333C.1
gtccacgcgtccggatactggaggcacctgatgctttaaaaaatattatgcagggtctcaacatcgtggtccgtgtgtgattttaacacactttaccctcaacagccgtaatcctgctatgatattgttattatgttttactagcgtattcctcaggcgttcattatcttctacgctctgtccactttcttcgttggcggggcaacatttggtgcccgttaataataggtgtctcctgagggccagtgctttagcaactactactcacgagatgtaacgccttcttcgtcgtcgtcctttctttcttcacctgtctctcacgagcacgaaatcttacgtaatttcctcacgactgcttcacccatctttagctttcaagccctctttcctttcttcatcttcttctgca

SEQ ID NO: 80396 - DNA, 833 bp, Zea mays
  Clone ID: MRT4577_173340C.1
cggtattaataaaagtgaaacattataagaaaatgaaactgaattggtagaacaaggtttactaaaaaactatctggttaaattattaataaagggtaatgaaatgattattccaaaacatgggtcgtgaattcggaattaaatgatatacgtaattggaactcaatttaatgcaccaaagttagattgtgtaactcatatcatagcatgcatatatcagatgaagaaaacaatacacaagaatggccaatggagttatatgatatgtgtaaatgactctaaagtaggatacctgaactaacaatttcactcatagctatgggaaaaagtgttggcacttccattttcattctagctaggtgtctcaccaaacatttgtcgcaacatctgtccagggtaaaaatttaaaaaaacgtccccacaattaaaactaaatgaagaatatgcacatcttagtcattggtgccatgaatttgtaataatccgcatcggatctctctagatcggcgttccaataatgcctttggtggcaaagaacaatgtcggatcacttcacaccacggctgcatcgctaactatgcctgcttaggaacaagaagtgaacgaataaaatatattagcatgtagctagtgcctaagaaggcaagaaattttcaagtaggaaaccaagaagtccgagaatcaacacaaacattgtgcgtcctttgcgcatggcattcgtaagtaacgtctacttaagaaagccaaggggaaactcgattgtgctctcgatcgatcgtacatccgagacatttagacccttgttcgggttccgtctggatcaagagggatta

SEQ ID NO: 80397 - DNA, 398 bp, Zea mays
  Clone ID: MRT4577_173341C.1
ttttttttttttttttttatgtgtctagcctgttgctagtatatagtggattccaaaccccaggaaagttgataaaacaaaattcccaagtggatcccaaacccacgtgcatcatatataatgtggctttccaactatggagatactctcctggagaacgaaacatcccttatcctcttcaccataccattatctacccaatttgctgcctgtgatagtaccaccaccaagaggaggagatccatgactatcaatggttgaaagctgatgttctttcacatttggaactgagaacgctgggcgttaaccagggagcgacattgagacttccagttttgccccttcctttctcgtggctctcttcttcttttcccagggcattgagacttccaaagtag

SEQ ID NO: 80398 - DNA, 460 bp, Zea mays
  Clone ID: MRT4577_173342C.1
gccggccgggtcttgatctcttctgcctccgtctcatctcagaccggtcaccccatctccccgacacatcacgagtcttccgcgccgcgatgggccgctcctcacgcaaaccctcacgtagccgtgcgctcctcctcctccactacggcgatgcggttccgccgggctggcacgaaggatgagagtgagatggatctggcgagaagagatggtctcgcagggtccctctcggccctggggaggggcggatgcggcgcggagaggctccagggtcatggtgcgccgcgccgaggccgattggctactcttcgggccgggagggagcttctgggtgagccagatgcgtggccgggacgagagccgcgagcttgttggtggcatctggagtgaagctgggaccgaaggaggagcccgagccggtggcggcgcggccagatcctgggagatcaacgcagccatg

SEQ ID NO: 80399 - DNA, 789 bp, Zea mays
  unsure (1)..(789): unsure at all n locations
  Clone ID: MRT4577_173343C.1
ggccgcttttttttttttttttttagtggaatctgccacattttagtagctactgattgcaaaaaggtaggagtgactctggttttcagtactaacaagacacaagcaaagtagtttcctacagaaaggaatggcaacatccagttcgtcgttaagacaagaaaccagactactcgtcctcctggctgcggagcctagcaagcttgttcgtgaccacaatgtcgagctgcgcagcacgctccacgatctccttgcgcttcttagtggacacgttgtgagcaatttcagcgcagtaggtcctgttgtgcatcatgagcaactccagctcagaaacgttgtggaccacaaacttcttgaacttgttggggaggtagtgcctggtcgacttgtcagaaccataaccaatgttgggcatcaaggtgcatcccttgaacttcctcctgacacgggagtcaataccctttggcctgcgccagcttggctgtacaaagaatcaacaagtcagaacttagaattactctatggagggaaataaatacaaagaaatggtataagaaaaacaagctcaatagatgtctgcaagtaattggcatacatagaaataaacaaattgaaaaatgagggaattctagataccacaactaatccaatccacaatgttctaccaaaatctattcagtgtttcctctatttggctaaccatgcataagaagcatatgcaaagggttctatcaacaagaacctcgtgttagtataagagtatgataatatgcanacccaacttcaaat

SEQ ID NO: 80400 - DNA, 275 bp, Zea mays
  Clone ID: MRT4577_173344C.1
gcgctgcgctgcaacttggttgattaaacgaacaatgggggactattgcaagaatccagcactctaaatttgggacagccacgcaggtacatttttggtttcctttcctttctcaggtacatatttggaatccaggggaagaggatttgggggttaatgccagccagtctgcgacgactgggggcgggcgtcgacgacgtgctttttcatttcgatcggcggcgtcgatgtgcttttactgatcggcggcggcggccgagtcccactgtttgagc

SEQ ID NO: 80401 - DNA, 380 bp, Zea mays
  Clone ID: MRT4577_173345C.1
cccacgcttacgaccacgcgtctaaagatctcgatataaaccacaagtcttggggctctgtcgcacttcctacctgcttacattcattgcgcacttataaactctaacgtagaaaaattcatacattgcttcctccgacatatggcttgtacctgtgaactaataatccttcatcactacattgttaacttgcttgtattgtacgggacactaatgatggacttctgattgactctaattgacgaaagacaccacactcactcaatttccattaggacaactcctttgatacgtcattgaacccatactgcatcacattcgtcacggggaaccaatacatgacgttcagggtctgcatactcctcattatcttcacatca

SEQ ID NO: 80402 - DNA, 196 bp, Zea mays
  Clone ID: MRT4577_173346C.1
gagcaagtacctgggcaagctgttccagatcaaggagttcccgggcaacaccaacgacgccaggatggccatcggcctccagggccacttctccgtgcccagcatcccctacatccgcgccgcgctcgacaccatgtccagggccaacgcgcccatctggctcaccgaggtcgacgtcgcgcccggggcccaacca

SEQ ID NO: 80403 - DNA, 210 bp, Zea mays
  unsure (1)..(210): unsure at all n locations
  Clone ID: MRT4577_173347C.1
aaggaagaaaaagaagggcccgttncttttgctggggcccaaagtacttttttcaacatgggccaacattgcccaagccaaatgttgccggggttttgttcgcccacactattggactggtngaacatcctgacctaggaactttttttttttccatgggaagagctagttcctggaaccggagggggcgacccaaacctttttttgggg

SEQ ID NO: 80404 - DNA, 272 bp, Zea mays
  Clone ID: MRT4577_173348C.1
cttgtcctgataagctgtgagtggcttccggagactatacacaagcataaggttcccgaaatggacaccaaagcattcaaagccctgtcgtcaaaagagggctattgcgatccacctcgcaagaagaagagcttgctccagaacaggccttggatatcaaccctgctaccttactgctttttcagtcttcatgacacagcatatagtgagatactttccttatgggctgtgagcgaccggaagtatggcggccttagcttctcgactgaaga

SEQ ID NO: 80405 - DNA, 430 bp, Zea mays
  Clone ID: MRT4577_173349C.1
aaaagccatggagacgtaacagtgttctaaaagaggacctcatatagctgcacgctgaaacatgcatgctcacacacagttaccaaccgagcgacaaacgaaacaatgaagtgattgagacgtagtcattcatagcagcagaagtgcagcgcgcacacatggtattaactgcatgcacggactccatacctaatagtggtgcgtgcgaatgcatatggactgtgcatggcgcgcctgtcctcctgataaaaggcagtattaagagaaacacgatacacacgcgccgggaaagtgaccactcgcccctgtatgggtaccaaactccacctgatagttgagaaaatctactatcgggaaggagtccaagacttagacagtatcctgaccatacgaggaccctatgacaattactgacaccataaaatccgtg

SEQ ID NO: 80406 - DNA, 270 bp, Zea mays
  Clone ID: MRT4577_17334C.1
tcccactccagtgtggccgttcgttcccctctgatccgcgccggcgcgccgaccaactctgagcgatggaaggcaccgtgctgtgcgcggacaaccacgcgccggtgacgcccatcagcttcctcgagcgcaccgagctcgtctaccccgaccgccccgccgtcggagacgacggacacgccgacgagccgccgccgcgcacctggcggctgacccgggaccgctgcctccgactcgacgcggtgctcgggaggatcgccaatatcgcgc

SEQ ID NO: 80407 - DNA, 474 bp, Zea mays
  Clone ID: MRT4577_173350C.1
ggaaaaaggggggggtttttttttaaaaaaaaaaacagggggaaaccgccccaaaactttaaggggaaaacttttttacaaaaaggggaacctttttttgacccccacaaaaaaaaaaggttggaagggggggaaccccaaatttgggttaaaaaacccggcccttaaaaaacgggccaacccatggggcccccccacggccagggtttttttttcccgggatcccccggccccaaaaaaccccttttgcctgggggggttaacagggacggaaaaaattggggggggcaaaaaaattttgatttatcaggccatcccccaaaatttttttcactatatggggaaaaatttttaacccgagaccccttggggggcccataaaaaccctcctcaacaggggaaacttggggggtttgaattcccaggccggccaaaaaattttccccgccccatgggccccccaagggcggttta

SEQ ID NO: 80408 - DNA, 497 bp, Zea mays
  Clone ID: MRT4577_173351C.1
aaaaaccggcggacccatccccccggttaaaacctatggcccccccggaatccccaaaaaccacccggataacccccccccaccgggccccccccatggggcccaaaaacccgggcccaaaggggcgggggaattctttgggaggcccaaagaccccaaaatggggtttcacccatagacccccccccgcaaaaaaaccccctaggggcctatagaaaaaaccaaaacccttcaagggcccccccaaaggtaagcccccaggacccccaaaaatctttgcaaaagttgggaaaaaggccgccaaaacagcccccgatcccatcccgggaccagcagggaccttgcccccctttttgccctggcccccaaaaaaaccctctttatccccccccccgggggggggcggggccccccccccccaaaaacccccccggcccggggggggggtgggattaaaccggtccccccaaaatccccagggggccaggggaaaaccc

SEQ ID NO: 80409 - DNA, 282 bp, Zea mays
  Clone ID: MRT4577_173352C.1
attgactcatcaaacagcagaattccaattgaaatggcaccactgtatgtttagtgtgcaaaagatgctcattctagttgtgcatgatatctctttacttaaatggtcagcctaatcacttcttccagtcacaagcagcagattgctctggggtgcatgatttgcattcctctaatgggcagcttaaacactaccaatcacaagcagcagatgtatctggtatgaatgctaatgcattcctctaatgggcattctaaacactactctcaagtaacaagcagc

SEQ ID NO: 80410 - DNA, 231 bp, Zea mays
  Clone ID: MRT4577_173353C.1
ggaacaccttctttcggcgatggaggcgtttggcgtcgacaactgccgtatcgaggttagcggcggggatgaggtgccagcgattgagtgtcaatgggtttctacattcctggatgataatatatactcaagcaagattgcgcctgcaagaactttctgtatatttgaagaggttgaaaaaatgcgtggtggtggactcattatatgagggacactaaaaaatgctatgga

SEQ ID NO: 80411 - DNA, 561 bp, Zea mays
  Clone ID: MRT4577_173354C.1
atgctttggttttcatacgaaatataggcctctgatgtttcacttgccctgcagttgctgattcttgtatccatccatgcctttgctagacattcatcaatgtcctaacattacctgacgaactagatgaccaattgagcagcatgctcaactcaaatctcatattttagctttacttccacctttaaatctttataatctcatcttctggaacatataggtgctttttggttgtgaaatttgaaaaggtaacgtcaacgctatctgataacactgtaaatggaaaaaaagtaagctattacttggattgtttggtccagctctggcattccatcacactttgatgggggaggggtattggataacgctctattttatatcccattgcagggtaagagattacgttgtggcttaaacaaacacggtgcaacgcaatcagttactattgtaatcaaatcacgttacattctcccaaaccaaacagcgccataggccttgtgcaaatttgttttctggtagtgaatggtgatgccatatgtcatctgcggttgttattatccc

SEQ ID NO: 80412 - DNA, 747 bp, Zea mays
  Clone ID: MRT4577_173355C.1
ccggccgggaaaaaaaaacacttggatccaaaccctgacgacggacggctccccctcgcccctacgacaattcgtcccgttccgttcgtcgcagatacaccggccggcagcaaccgccctatggatacgtcggcggcgatgacgatggaccaccaccgcgcggcgccgtcgctgtccacggaagagaagcggcggatcgagcgggtagcgcggtgcgtggcgcgggaccgggacggcggggacctcacggagaagctgctgctgcggctgctcggcctcacgcgcaacgcccgccgctggggcttcctcgcgccggaccacccgctccacccctactacctccagcacaaggtctccgagcgctgccggatcctccgcccgcgccacgccgccgccgaccggcggtgatcccatgcatatgcatgcggacgtgcagcggatcgaccattgataggactcgatcggccattaaaaaaaaactatgcgcgcaccacctggtctccttctcttttatgacatgagtaattggtaatccaacaatcatgcaacggattcggaaatacattgatgtgcctaattgcagcatcaattatatgatagcagttggccattgatatttttcagatttgagatcgaaatgtttacgtgccgatctctttctctctatgcataaataggaggcaactagtagaaaggaaaatatattatcatctatagctgaaaaaaaaaaaaaaaaaatttgcggcc

SEQ ID NO: 80413 - DNA, 617 bp, Zea mays
  Clone ID: MRT4577_173356C.1
tcctgaagcccggaggatccatgagctttatagagcacgtgtccctacggggcattttttttttttacttttgaggcaatcataattttgattaaatcaactgtgtaaactgtgtccatcacggctaacatgtactgcaaagggagcgattgcctggtggaaagagttcatgatgctattcccgatgcgaccaacgaggtagtgaaccccatgtagagcaagcgcaccggagacccgccacggggaaccagcatgtgtggtgcaacgcatgaagggcaccggcaacaacctctacatgtggccgtacctgccctagcagaatctgcacatagcccaaccctcgtggcttctactacaacaaggggtccgctctattcgtccacagcgagccgaaggacatgccgaaccccggctggccagatgaccattgcatgaagatgctcaagacaactagataaaaacctgctgagacgtgtatctccttatccttttcacttgctgcgcaccgatcggacatccctgagcgtgccatcatgtgacgaacaggccagcttatgattattaatagtgaaaaggccatgtatcatgcgtttttccgtatgttccccccccctgaa

SEQ ID NO: 80414 - DNA, 283 bp, Zea mays
  Clone ID: MRT4577_173357C.1
ctgttccatcaagtatttaactaatcatcatttgttgcagttggtataggtcttgtgttctttttttttttgccgtcgtttttcattgaggatgttgccaaaattaaaacctgtgtcaaacagttatgtagtcttgtcttggttaatcttacagacgccgtaatttctcaaaaaaaaaaaaaaaaaaaaaaaaaaaaaaaaaaaaaaaaaaaaaaaaaaaaaaaaaaaaaaaaaaaaaaaaaaaaaaaaaaaagaaaaaaataataaaaaaaaaaaattaaaa

SEQ ID NO: 80415 - DNA, 3158 bp, Zea mays
  Clone ID: MRT4577_173358C.1
ggacaggcccaatcgcgccgcgcggcggcacccgctacctacctggtcgcccaacctactgcctatacgaggggagggggatagggagtagcagtagccaataggcagcgtagcactgcggctcctactaccaagtaccaaccacacctccaacccccgccgtataccaatccgccggaggtctctattcagtccacttgcctttttccctcaccggtcactgcatcgagctatcggttcgtttccccctttccctcaggagtggtagatctgccggtgcggtccccagtttggatcttgatgatttggtgacttgagtggccgattttcttcgagcaaactggtttttgggaagtgcggtttcctcaatgtctatttgaaccacagcatactgaactgaatcaagtgataattgtgttctggtcatacactaagatatacctgaaacttctgcttcatatgttcacacatcataaatattccaacaaaagttcaggtgaacagcgaaaggaatgtgaagatcatatcaggtcgtgatgggcaaaagaagggaaattcacagcatgaccaaattgtacacatgccaaaggacatggtcacaacagtcaatggaaacgtagatggaaaatttgaagataaagttaagagtttgaagaatgataagttccaaagacaacgagagtcttggggtggggaaaggatgcatgtccacaagggctcaaaaccatggcctggtcgaaaggtaactactgttgatgaacatgtggaaaatatgatcaaggttctggcatatctacaaggaaaagaaacttctgtgagctttcaagacaaaaagctacgtcttggcattcttggccttggattgagaggtggaagtcaggaggagcttgtgactgtggtggatgggatgaatgttgcatgctgagtgtcctcactgatgcggccgcaaaaaacgatgccgttcatgctaaccaggcaaaggatggcagccagcgatttgaactttctatgctcagggtggagcacgagaagataggcatgccttcagtatgacttcattcaaagaggggctttatacagtggaattcagatcatccattgcattacttcaagcttttgcaatgtgtatagtgatgctacatgggaggtaccctgacaggctgcaagttggttcgcaagcagcgcaggagcatgacctccttgctggtcatgaggtcaaggccatggtagccagtcaaggaagagctccgaccagctatgtgccccaccgtccacctctttctcctgtgggccgagcctagcttatcgcgattaaatgtatgttctttctgtgtctgtgtcctctttctccttcagtcgcgtagtgctggtgggattgatataccatggtcctcaggcccatatgcaatacgcatattgaaagtgacaatctcagaacaatcaatcggctttagaggtagctacctgtacatgttgtgatgttgatgttgtatgactgtactatgatgcggctgcaaggcccatctcggtgattactcacccgttatatgttctcttaaaaaaaaataaaaaaaaaaaaaaaaaatttgatcacggagtggtcacccgtagtgagtattctagcgtggcttgcctttattcatgctgtcttatggcgcattctgatatcctggcagccactgttagaaggaagggcatctctgaaaaggatgatctggaaagcacatatgctgtatgctctagcctcaaggagtcaccacatgctcgacaacccaatgtagttcctcctgttgataagacaggagatcggtcatcacccaacagcaaagtcaataccaccaagcaatctctggacttagggggatcagtgccacagaatatgcagcgaagccacctcgtgtgctattgaacagtgcaagatacatccagaaagaaaaggattcaacaacaacaagacaagcatttctgcagctagcatggaagaatggcttgcctttattcatgctgtcttatggcgattctgatatcctggcagccactgttagaaggaagggcatctctgaaaaggatgatctggaaagcacatatgctgtattcactgttgaagaacctaagaaaaaaagtggagcttggatcaaggcagggggcaagaacaagaaacaccaccttttgtctagcatagttggggaaataaaggttgcacgtcgaaaatcaagatgtcaccatacagcagatgttcatgtatacagggaatttgtgttgcttggttccggatttctaccatcatctgaagaatcgggtgattcacatgttagtggagagtttgcggcttttattagtgcacttcctcagcaagaagcagaaacttcgaatcaatcatcttcacagaataccagacaaaaaaatttagcaccaactggctgtggttgccccccactgggaaacttccagcctagttctgcttcagccaatgttattgcagtacttcctgatggcttccatggcaaatcaacgtctgggcagccgttgcctttgattgagaggtggaagtcaggaggagcttgtgactgtggcggatgggatgaaggttgcatgctgagtgtcctcactgatgcggccgaagaaaatgatgccgttcaggctaaccaggcaaaggatggcagccagcgatttgaacttctagctcagggtggatcacgagaagataggcatgccttcagtatgacttcattcaaagaggggctttatacagtggaattcagatcatccattgcattacttcaagcttttgcaatgtgtatagtgatgctacatgggaggtaccctgacaggctgcaagttggttcgcaagcagcgcaggagcatgacctccttgctggtcatgaggtcaaggccatgtagcttcgcgtagtgctggtgggattgatataccatggtcctcaggcccatatgtaatacgcatgtcgaaagtgacaatctcagcgcaatcaatcggctttagaggtagctccctgtacatgctgtgatgttgttgatggtgtatgactgtaccagtaccgtgatgtggctgcaaggtccatatcagtgcttagttatcctttatatgtccgcttatctgttgcttctgtatatgctgaaatgcgcctgcaatctgttgc

SEQ ID NO: 80416 - DNA, 1101 bp, Zea mays
  Clone ID: MRT4577_173359C.1
agcatagttggggaaataaaggttgcacgtcgaaaatcaagatgtcaccatacagcagatgttcatgtatacagggaatttgtgttgcttggttccggatttctaccatcatctgaagaatcgggtgattcacatgttagtggagagtttgcggcttttattagtgcacttcctcagcaagaagcagaaacttcgaatcaatcatcttcacagaataccagacaaaaaaatttagcactaactggctgtggttgccccccactgggaaacttccagcctagttctgcttcagccaatgttattgcagtacttcctgatggcttccatggcaaatcaacgtctgggcagccgttgcctttgattgagaggtggaagtcaggaggagcttgtgactgtggcggatgggatgaaggttgcatgctgagtgtcctcactgatgcggccgaagaaaatgatgccgttcaggctaaccaggcaaaggatggcagccagcgatttgaacttctagctcagggtggatcacgagaagataggcatgccttcagtatgacttcattcaaagaggggctttatacagtggaattcagatcatccattgcattacttcaggcttttgcaatgtgtatagtgatgctccatgggaggtacccaagcagaacgcaagttggctcgcaagcagagcaggagcatgatctccttgctggtcatgagctcaaggccatggcagccagtcaaggaagaagacctccgaccagctatgtgccccaccggccacctctttctcctgtaggccgagcctagcttatcacgatttagtgtatgttctttctgtgtctgtcctctttcttcagctgcgtagtgccggtgggattgatataccatggtcctctggtccatatgtaatacgcatgtccaaagtgacaatctctgcgcaagtctttagagatagctccctgtacatgctgtgatgttgttgatggtgtatgactgtaccagtaccgtgatgtggctgcaaggtccatctcagtgcttagttacccgttatatgttctcttatcagttaaaaaaaaaaaaaaaaaaaaaaaaaaaaaaaaaaaaaaa

SEQ ID NO: 80417 - DNA, 570 bp, Zea mays
  Clone ID: MRT4577_17335C.1
cttctgacctacccaagctccagtccaccgccgctgtgccctagaactgccgccgcgcccgccctcgtcgctggcgccctccctgtctcgtagcgtccctgctctcttccccccacgcgcaatcttgaacttcggttttgagatccgcccctgctgtcggttgcaggtttgcagagggctcgtcgacatgtcttgggcgccaatcgagaatgaccctggtgtttttacggagctgttgcaacagttgcaattgaagggtctccaagttgatgaactctactcacttgatcttgatgccctcaatgatcttcagccaatttatgggcttatagttctgtacaaatggcgacctccagaaaaagatgagcgccctgttatcaaggatgcagtcccaaatctgttctttgctaatcagataattaacagtgcatgtgcaacccaagctattgtttctgttctgttgaactcttctggcatcacccttagcgaggacctaaaaaagctcaaggagtttgcaaaggacatgccgccagagctcaaaggattggctatagtgaattgtgaaagcat

SEQ ID NO: 80418 - DNA, 387 bp, Zea mays
  Clone ID: MRT4577_173360C.1
ggccttcaggctgcggctcaagacgcgggagcggaagctctacaccaacaactacggcggctgcggcgggccggacgcgcacgagatgctgtggtcgtcgcacccgttcgcgcacccgtccacgttcgacacgctcgccgtcgacccggcgctccgcgacggcatccgctccgacctgctccgcttcgtgcgccggcgggaccactacgcgcgcgccggccgcgcctggaagcgcggctacctgctgcacggtccgccggggaccggcaagaccagcctcatcgcggccatcggcaacttcctcgagttcgacatctacgacctggagctcaccggggtgcagtgcaacaccgacctgcggaggctactcggctgcacgcgccccat

SEQ ID NO: 80419 - DNA, 607 bp, Zea mays
  Clone ID: MRT4577_173361C.1
acaagctttttttttttttttttttttttttttttttttttttttttttttttttttttttttggacctagcaaccggcaaggggcccaccaaacacgaaaagggaagaccacacacggaaagggggcccgcccaacgggagggggggggggggggggggggggggggggaacagggagagggccgagggggggggggggggggggagggcggagggggggggggggggggcggggggggggggggggcgggggccaccggggcccggcgggcgccccccccgcccccggggcgggggcccaacacccggccccggccggcgccccccaaccggcggggggaaggcgccaggggccaggcccaggcgacggggggccgggacccgggcacccggggcgggggccaaggggggggggcccggggaaaagggtgggcgctggcggaacccgacacccgcccacccggccacaaaaaatacaaacccggggccgaagggggaaagcccggggccccaaaagagggagccagcgcacggccagcgggcagggcccaaagcccgatgggcaagcgggaaaccggaatggccaaatgaaaaaagaaagggggc

SEQ ID NO: 80420 - DNA, 276 bp, Zea mays
  Clone ID: MRT4577_173362C.1
ttggtggtttttataaaaggatacaagcgtcacagttaatttatacaactactaataatatgcaattacccagataccaatggcatccaacgaaaaaccaaacacttgatgcgaaacgaacaaaatatatctcaacataacaaaaacaggagagggccaattgttcaaaacaaacgtcaataatttccgttggacaattatcaaaaacctccaaagggacatcaaaaacaaagaacctgctaaaaccattttaactgtcatgaaagccctaactga

SEQ ID NO: 80421 - DNA, 711 bp, Zea mays
  unsure (1)..(711): unsure at all n locations
  Clone ID: MRT4577_173363C.1
caaaatattccaaggtttttggnagccaaaagccaggttacagacgagcatttttccctcttttatagctaacaaatatgtgggccctacagcatattgacaccaatatacttcttgttgggggcagtgtctcggctactcttctcagcttttccctttcaacaagctcagaagcctgcttctcctcgtcttgcatggcttggcttccgtagaacatccggagctaccatccttaacttttgtatagcacctagagctgctgatatatcaatcccaccggcactacgcagctgaagaaagaggacagacacagaaagaacatacactaaatcgtgataagctaggctcggcctacaggagaaagaggtggccggtggggcacatagctggtcggaggccttcttccttgactggctgccatggccttgagctcatgaccagcaaggagatcatgctcctgcactgcttgcgagccaacttgcattcttcttgggtaccttccatgaagcatcactacacacattgcaaaagcctgaagtaatgcaatggatgatctgaattccactgtataaagcccctctttgaaggaagtcatactgaaggcatgcctctcttctcgtgatcgaccctgatccagaagctcaaatctctggctgccatcctttgcctggttagcctgaatggcatcttttcaaaacgctgggtcaaccg

SEQ ID NO: 80422 - DNA, 2682 bp, Zea mays
  Clone ID: MRT4577_173364C.1
aattcggcacgagggccaagttatacctgaaacttctgcttcatatgttcacccatcataaagatgccaacaaaagttcaggttagcagcgaaaggaatgtgaagatcatatcaggtcgagatgggcaaaagaagggaaattcacagcatgaccaaattgtacgcgtgccaaaggacatggtcacaccagtcaatggaaatgtagatggaaaatttgaagataaagttagagttgtgaagaatgataagttccgaagacaacgagagtcttggggtggggaaagggctgcatgcatgaagggctcaaaaccatggcctggtcgaaaggcaactactgttgatgaacttgtcaaacatatgtcaaatgttccttcatatttacagcgtaaagaaacttctgagcatcttcaagacaaggcgctgaatgttggagttcttgagtggggtcttcttgctaactggtctcagcaacaaaagcatgagctcgctagaagccatggagcatctccatccaatactagcaggtctgtactattctcatctccatcacattcttctgcaagccccagcagcagatctcttgagagcaatcaatctaccccaatgagtggccatcatcattcatccatcagagctcagcagaataggctcacagataaacaccatgggagggccagatgtccacctagcccaaattctgcagtactgagcttattgtcaggtcatggcacacatccctgtccagagaacggtcataattatgttgggttgggtctcagcaatgtttctttagcctcagactctctaggttcttcctctagaagttgtggaagacatgaaatggttggagatgaagagactagacggaagcctgaagacgttgtccatcattgttctcgtaggctttttacagacagtgataacattgggaaacatttcttcacatcaaataacaaagattccatgtgtaatgatcctgaacagagcagtggcttggattgtgaaaattttgagtcactaatatctgatgctgtgatggatacagctagaaatggcagtaggtcacctgattgtttcttggaggatattgagacatcccgtgaatttcctcgaatcccatattcatgtccacttcccatcatagattcagcagctaaagagattggcaccactagtactgaggctggagataattttattggtacagctgcaaaagtaagtaagaattctagcctaaaccaatctgccctgaatgccactgagaatcctccccgatattctgcaaagtttagtgataggatgcctgatcgccatcaaggttctgtgatgaatcgagtgagccgcagctctagcctcaaggagtcaccacatgctcgacaacccaatgtagttcctcctgttgataagacaggagatcggtcatcacccaacagcaaaggtaggcgaagcccattgaggaggatgttagatccaatattaaagccaagacattctagtccaatacgaccttcatttgttccaaaatgtcatcttccagtcaataccaccaagcaatctctggacttagggggatcagtgccacagaatatgcagcgaaggtcagttgatttggtagtcaattcgaattatcgaattgaagcaaatacaaatcagccacctcgtgtgctattgaacagtgcaagatacatccagaaagaaaaggattcaacaacaacaagacaagcatttctgcagctagcatggaagaatggcttgcctttattcatgctgtcttatggcgattctgatatcctggcagccactgttagaaggaagggcatctctgaaaaggatgatctggaaagcacatatgctgtattcactgttgaagaacctaagaaaaaaagtggagcttggatcaaggcagggggcaagaacaagaaacaccaccttttgtctagcatagttggggaaataaaggttgcacgtcgaaaatcaagatgtcaccatacagcagatgttcatgtatacagggaatttgtgttgcttggttccggatttctaccatcatctgaagaatcgggtgattcacatgttagtggagagtttgcggcttttattagtgcacttcctcagcaagaagcagaaacttcgaatcaatcatcttcacagaataccagacaaaaaaatttagcaccaactggctgtggttgccccccactgggaaacttccagcctagttctgcttcagccaatgttattgcagtacttcctgatggcttccatggcaaatcaacgtctgggcagccgttgcctttgattgagagatggtagccagtcaaggaagagctccgaccagctatgtgccccaccgtccacctctttctcctgtgggccgagcctagcttatcgcgattaaatgtatgttctttctgtgtctgtgtcctctttctccttcagtcgcgtagtgctggtgggattgatataccatggtcctcaggcccatatgcaatacgcatattgaaagtgacaatctcagaacaatcaatcggctttagaggtagctacctgtacatgttgtgatgttgatgttgtatgactgtactatgatgcggctgcaaggcccatctcggtgattactcacccgttatatgttctcttatcagttgcttctgtatatgttgaaatatgtgattactgatt

SEQ ID NO: 80423 - DNA, 304 bp, Zea mays
  Clone ID: MRT4577_173365C.1
atgggttatgagctatctgaatatatgaatcctagttccatatgtgaatcaccttccatgtcaattaggctgttagttagatgccagcacactttaggccgatagctcaagactcagaaggattttggctatgacaccttgtgtcttgttaatctctctgacactttgcttagaagtctattttgatgtattacatttgaacagccaacttctcagacttctcaatagtttctatgagtctgtatgagcaaacatggtacatggcgcatgggcaccttaaattttttgtggttgacagtccaat

SEQ ID NO: 80424 - DNA, 1141 bp, Zea mays
  Clone ID: MRT4577_173366C.1
aacaaaaaaatcaccttttatctagcatagttggggaaataaagttgcgcgtcggaaaatcaagatgccaccatacaaccgatgttcatgtacacagggaatttgtgttggttggttccaaatttctaccatcgtctgaagaatcaggtgattcaaatgttagtggagagcttgcagcttttatcagcacacttcctcagcaagaagcagaaacctcgaagcaatcatcttcacagaataccaggcaaagaaattcagtgccaattggctgtggttgccccccactgggaaatttccatcctagcacgagaagtgctaattctgcttcagccaatgttgttgcagtacttcctgatggcttccatggcacaacaacatctggacagccattgcctttgattgagaggtggaggtcaggaggagcttgtgactgtggcggatgggatgaaggttgtatgctaagcgtcctcactgatgcggccgaagaaaatgatgccattcaggctaaccaggcaaaggatggcagccagagatttgagcttctagctcagggtggatcacgagaagataggcatgccttcagtatgacttcattcaaagaggggctttatacagtggaattcagatcatccattgcattacttcaagcttttgcaatgtgtatagtgatgctacatgggaggtaccctgacaggctgcaagttggttcgcaagcagcgcaggagcatgacctccttgctggtcatgaggtcaaggccatggtagccagtcaaggaagagctccgaccagctatgtgcccccccgtccacctctttttcctgtgggccgagcctagcttatcgcgattaaatgtatgttctttctgtgtctgtgtcctctttctccttcagtcgcgtagtgctggtgggattgatataccatggtcctcaggcccaaatgcaatacgcatattgaaagtgccaatctcagaacaatcggctttagaggtagctacctgtacatgttgtgatgttgatgttgtatgactgtactatgatgcggctgcaaggcccatctcggtgattactcacccgtcatatgtctcttatatcagttgcttctgtatatgtttaatatgtgattactgattagtcacccgtt

SEQ ID NO: 80425 - DNA, 498 bp, Zea mays
  Clone ID: MRT4577_173367C.1
ttgacatattgatttttattttttccttttctttacacatcttttttttttcgttttggtttggggtattgcgcgcacggacaccgggccgggggggatcaacacccgacgaacactcatggggcggaggaaaaaaacaggcgggaccggacacgtccaggcaacagtcactgggggccacaaacggggggacaaacgacacacacacacacacacacagagagacacccggaccgaaacgcactgagaagaaaaaacccgtgtgagactgccttgtacgcgcgcgagatactacccctccaagaaacaccccgatcccatggggcccgggccctggccgccgacaccgcgtgctcacggacaaactcctggactcggggctaaaaagagcagagcccccgccccggaggacggatactggggaccagcaagaccaggagcaggagccccccgctcccccgcggtgagcaaatcgggagcagaaaccaacgcctcccc

SEQ ID NO: 80426 - DNA, 779 bp, Zea mays
  Clone ID: MRT4577_173368C.1
cctcgaggccggccgggaaaaaaatgcgcatttgacatcccaaattcactaaacatagaagaatatccatcaaccatgcgcccccaaatactccccctcctcctcgcaggcacatcagcagtcctcgcccaaaacgcttcttcctcaccaggctacaccggctacccagaccccatcgcctccacagtatcgtctaacacctccctctccttcggcaaccactacgccgtcctaaacctcgacctcatcaacggcctcgtcgcccccctcgcttccaccccagcaggctcatccttcatctccagcaccacaacctggatcaacgccgttcacgcccaaaacccccctcccctctcaatcttcacgcggatttacttcagcaacgcccgcaaaccagaggtcaaaccgggctctgggtttgcgggtgtgagtgcggcgctggggacggcaaatgagactgcggcgcagatttatcctgcttttggggttgatgaggctgctggggatgtggtgttgcagaagacgaggtattatgctgggacggggaatgcgcttgaggagattctaagggcgcaaagcatcgacaccgtcatcctgagcggtgtccgtacttcgggagtcattctcagcacgacttataggttgtttgatttggattataaagtgtatgtcatctcgaacaacaccattgaaactcctcctgatacgcctgggatcaatgctgcgattctggagggtgtgattccgaagttgccggcgcaggttattaatggtgagca

SEQ ID NO: 80427 - DNA, 223 bp, Zea mays
  Clone ID: MRT4577_173369C.1
gatgcagcgtacgtagctcgattcgctcactggtacacatgttttacaggcagacgattggataattagttctgcacggtgtgaatcacataggttatgaggtagaatcgctatggctgtgacgtggcatttaatgctgttgagttcttgcaaagcaatgcggactgaatgcaaggacaacgaagggcaacggcactcactacgctgctgttgtgaagagaga

SEQ ID NO: 80428 - DNA, 252 bp, Zea mays
  Clone ID: MRT4577_173370C.1
cgcgctggcaggcagaaccctgacgcgtaaggtacgagcccccgccagcagacgcttcttttttttgtcaacaacaagaacacccccggggggggggggcgtccttttattcttcagcacctgctgtcgcggacaggagaagggcggcacgatcagtgccttcgagactaaccataacaacaactggggcaacaacggcggggcctgcagcgacggcgccttcggagaggacagctggtgcgagcacaactg

SEQ ID NO: 80429 - DNA, 244 bp, Zea mays
  Clone ID: MRT4577_173371C.1
aagacctccaacaatttgtaaccggcaatctttcctttactgaaggctccaaggtttgagaaagcctggccaagactcatgccaccgacaattgcagaaaagatcgcggtaaaagcctttcctccatcggactgcccattcctgatgaagaccccggcataccaaaataccagtgcccatgacatgcaagctatcccataagtacatccaattccaagacctttggccatcccagctttgtaac

SEQ ID NO: 80430 - DNA, 218 bp, Zea mays
  Clone ID: MRT4577_173372C.1
gaacgctgaaacgcagcagctgctgggtatcgtactgctcgaacgaataccctggcatgtatggatgaacgcatgatggcgcaccgtgcggatggtaagctgtctgaacccaacgccaggtgcgagctcaacctgagcaggtgatagcggtgtcacgatacggaacatgaactggctgcgtactgcctctgggctcgcgacttgtgtgggcttcatct

SEQ ID NO: 80431 - DNA, 348 bp, Zea mays
  Clone ID: MRT4577_173373C.1
ggcccattcttaaaaatgctataacacaaacagggctttgattttcaaaattccccaatttaaaatttttgtctgaattatgtaaacgattgcgacgacaaatcccttttattaactacaaaagaacccccttctttatgacaacaaaaaatttataaaagctggtggtgaataaaacttttttccttctcaaaaaagagctttttttatggggccttggcaggccccaatcatactttttttttaactccagggcccaagggatggcacattttcttggccttgccatttgggggggaaggggtccacgggtttagtttattccaggcctcaatccaagggaccatg

SEQ ID NO: 80432 - DNA, 116 bp, Zea mays
  Clone ID: MRT4577_173374C.1
gtctctcttacgcctgcgctatgatatccaacaccggtcttattttatcgatagtgtagttctacattgctttaatagatggtgccagtcaaagaatatgacattagacagacaat

SEQ ID NO: 80433 - DNA, 686 bp, Zea mays
  Clone ID: MRT4577_173375C.1
aattcggcacgaggcttcgtagccattgttgcctagttagacagctcgccgcacgtctcgttgttttcatccatgtacgcggcgccgacggcagcaacgacgatgccgccagccgtgacccacgacgacctgtccctgcgcaaggcgcaggagcggcgcgccacgcggtccagcggccaggtcgccgtgtccctcgtcgcgctctccgtgctctgcggcctcgttgccttcatcctctgcctcgccgccgaggggtcgcgctcagaggtgtcgcactacctcatgagcgtgggcggtagcaaggaccagctggacgtgtgcgtctacaacagcagcggccgcctcgcgctcgcgtacgccgtcggcgccttcatcctcctcgccgtcgccatgttcgccgagcacgcctacatgctggtcgccgtcgccgccccggagtccgcctccgccggcatggccgtcgcccaggaccacccgcgcgtcgcgtccaccgccgccgcgctcacctggcagacgggctgcctcttcttcctcacgtggatttgcttcgggcttgccgaggtgatgctcatgatcggcatcgccgtggagtccggccacatgagcgactggcggaagccgcggcccgtgtgccaccgggtgcgcccgggggatgttcgcggcagcggggatcctggggctcatca

SEQ ID NO: 80434 - DNA, 360 bp, Zea mays
  Clone ID: MRT4577_173376C.1
cccatatgcgctcccctatctctccagcatcttccgtctgcggcgtctcgtctctgctcctcacctcgccgccagccatgggcaagatcaagatcggaataacggtttgggaaggatcgtgaggctcgtggccagggtcgccctgcagagcgaggatgtggagctcgtcgccgtgaacgaccccttcatgaccacgggtggcatgacctacatgttcaaggacgacaccgtgcacggtcaatggaagcacagtgacatgaccctgaaggactgcaagacgcttgtcttcggggagaagccggtcagccgtttttgccattaggaaccccggagagatccgggggtgtgaggcgtgcggct

SEQ ID NO: 80435 - DNA, 595 bp, Zea mays
  Clone ID: MRT4577_173377C.1
gaaatcaagttgttatatttatataaattatcttcaaaaggttgatgcatccatacaccatacataattacacagagcttacaaaataaacacccagaacttcaaagagtgttgatggtagaagtcgacattcagttttgggaatatttctgggtaggttcttcttggatgtgcacgggttcttccttgaacctattggtcagttatgaaaaaacagtgagctattatatatattttactcatgaattaattagctagacggcctgtctcatgagctttgtatttaagtatttccacgcgaggggccaacctatagagtccattggaaaataggttagtaagcggtcagcaatgtctgtaaataattttgcaaaggaaaatgtatgtgttgaaatgtatcgaggaaatgaactgttgtacatatgaatcaatgaaatgcaaataaaatagggatagggtagacgtggtaattaaacctgatggtagcttgcagaattggagttgaacctgatttggtgcatataaagagaaatctactgagttagttgctattagtggcatttctctaacacaccggaatcagactgtgctgggg

SEQ ID NO: 80436 - DNA, 285 bp, Zea mays
  Clone ID: MRT4577_173378C.1
acaagcttttttttttttttttttttttttttcttttttttttttttttttttttttttttttttttttttttttttttttgattcatgaaaaccaaaactttattatggccatgcctattttattggtcataccaaacatgataatggggggcggcttacggggtttttccatatataaatagaaagagatgggtcggggagatttcccaaatttcataaatcattattcgggcggaatggcagcggaaaccccacaggggttggggcgggggctgggcacatg

SEQ ID NO: 80437 - DNA, 183 bp, Zea mays
  Clone ID: MRT4577_173379C.1
tcgtcacgcgttcggccacgcgttcgggggaacctggcaatgatttttaatttcaagggcgggattgattttgctaaccgaacgctgcacatcctttattccgaacatcgcggtgattattttcctcgaggcccatgtcacgatgcacaagacggcgaccaaagcaaacccgacttacatctc

SEQ ID NO: 80438 - DNA, 237 bp, Zea mays
  Clone ID: MRT4577_17337C.1
atggcgggcgcaatttctagaaaacaggggggctctttaagaaaatgcgcgggcgaaggggtatcgggcgcctacagccgttggatctcagatcggcggctaggattagatcctgcgggcgggcgcgcgggcgcgcggcggcgggagcggctgacaggcggggccgggcggacagcgcgggcgcgggcgactggcaagcgggaccgggcggacagcgcgggcgcgcgggcgagctga

SEQ ID NO: 80439 - DNA, 320 bp, Zea mays
  Clone ID: MRT4577_173380C.1
ggattgggtacttcgaggccggccgggagccaacgcgtgagatcttccgccgtggtgctcgataactatgctacagcgccggatgacctagtgccttttcaccgtcggtgtggctctggcggtccttccgttccgccgcgagatgcatcacggcaagggaagacgatgatggcccctctatactcctatgcctccccggggcacgggtactacccagggccgtaccagggcccgacggtgaaggcgtccccggcctacccaccctcggctacctcagaggaagctgtgcatcctgaaaaggtggacgccccctcggacct

SEQ ID NO: 80440 - DNA, 1126 bp, Zea mays
  Clone ID: MRT4577_173381C.1
gtcagtccctcccaacctccattccttcctcctttgccaatgcagctctgatctctcctacctgagaatgtcagtgtgagtggccattccatctgcacaacatcctcctccacgcacgcaaaacatacaaaaaggcagaagcggaggagatgaaggcaatggccgggccaaagctgctcgtcgtccacgcgtcgtcgaacaaggccctgaacgggatggcgcccacgtcgccggcgtcgcccggctggtcgcggtgcctgtggctggtggtgttcctggccttgttcacctgcgtgtccctcctgaccgtgcaacctgctggtgttcgggctgggcgcggagacgccgctgtggcgcgcgctcaaccacggcgggcgcaccgtgttcctcgacgagaaccagtactacgtgtcccacctggagggtcgccacccggggctggaggcctacgacgtcgcctacaccaccaccgtccgcgagttcccggacctgcttgactccgcccgcgccgcgcggggcgccgagtgccggcccgtccagaacctcctcttctccgactgccgcctcgccatcaacgacctccccaaccagctctacgacgtctcctgggacgtcatcctcgtcgacggcccgcgcgggtacacggcttcgtcgccgggcaggatgtcggcgatattcacggcgggggtgctggcgcggacgcgggccggggagggcgtgaagacggacgtcctggtgcacgactacgagcgggaggtggagcgggcgtgctccagggagttcctgtgcgaggagaaccgcgtcgtcgagaccagcacgcggtcgctcgcccacttcgtcgtgcgcggcggtagttctgcccgccgggacgccttctgctccggcacggcggcggcccactagcttcactcttccccgtcactcacctcacctcacctgttcttctactttttttttcttaaaaaaaacctctctcgatctcgatcacggttaatgatgatgatgcttgtcatgtgaatgggggaaaaaagatgaaaaagagagcggtgaagcctgtaaaaattgggtgtgacgaaaagaaagaagcagaggaatgtatctctgtccttgacgactccacgccaag

SEQ ID NO: 80441 - DNA, 337 bp, Zea mays
  unsure (1)..(337): unsure at all n locations
  Clone ID: MRT4577_173382C.1
acagggtgagtattcggttatcacttgtggaaaccactgcccgatgggggtgaatgtacattcaatanacttggggggtggtctcctcagttttttatctttcttttctccttttcccgcgtattccgtaccgtttcctcccggcattcttgtttttcccattccattaaactttttaaaataaaaactcggggggggggggactttttcccccccactttttcccttttccccttttcctttctccatcctctttttccttttttccctcctttttcttttttactttttttttcccccctttttttcccttttcccttttcccttttttctcctt

SEQ ID NO: 80442 - DNA, 762 bp, Zea mays
  Clone ID: MRT4577_173383C.1
tcttttctctaagaagccatttccagtgtttcgggaattagctggattttacaggaggatgttcttattgaggaaccaaaggcgggggtgaattttgaagcctgcccatacaattatacgtgatgagtgcaccaaatccttccttgttttgatccgagggactcatagcatgaaagatactctgactgctgctactggggctgtagtgccatttcacctctcacttttggatgaaggcgatgtgagcaaattagtgttaggttatgcacactgtgggatggttgcagcagcccgctggattgcaagaggtgtaacaccatgcctccgtgaagcagtcagacaatgcccagagtaccaaatcaagattgttggccattcattgggtggtggtactgctgcattgctaacctacatccttagagaacacaaagagttttcttcaacaacttgtgttgcatttgcacctgcttcttgcatgacatgggaattagcagaatcaggcaagcattttgtgacaacggttgtcaatggagctgatctggttcccactgtatcaactgcatctattgatgatctccgttctgaggttgtgatgaaacaagcacagaatgtcgcacaggctgttgctagaagtcggtctgcattttcctcatggtcatgcatgggtgcacgtcgtcgaggtggtagtgtagttactgcatgttctaaagatgatatgagagtggaaacccatgtaacatcaacagttgagtcaaagtctgt

SEQ ID NO: 80443 - DNA, 207 bp, Zea mays
  Clone ID: MRT4577_173384C.1
ggcgaacacgccgcggtcctcgtcgtgtgaagtaagaactctgctagagaggaaatcgctggttcatcatcatcctcctcagctggtggggtcagtagaagttctgtcactggatctggtttcagtgtctcagaccttgccccaccacggaaagcccttttcacctaccccataggagctggagagatgttagaagatggctctgag

SEQ ID NO: 80444 - DNA, 1887 bp, Zea mays
  unsure (1)..(1887): unsure at all n locations
  Clone ID: MRT4577_173385C.1
gccagtgtatatgctggnagtgattgcnattgaactgnaaaggnacctcaaatcatggnaaaagctgattgttctacggcggttgattgacctgtgctttcttttctctaagaagccatttccagtgtttcgggaattagctggattttcacaggaggatgttcttattgaggaaccaaagcggggattttgaagcctgcccatacaattatacgtgatgagtgcaccaaatccttccttgttttgatccgagggactcatagcatgaaagatactctgactgctgctactggggctgtagtgccatttcacctctcacttttggatgaaggcgatgtgagcaaattagtgttaggttatgcacactgtgggatggttgcagcagcccgctggattgcaagaggtgtaacaccatgcctccgtgaagcagtcagacaatgcccagagtaccaaatcaagattgttggccattcattgggcggtggtactgctgcattgctaacctacatccttagagaacacaaagagttttattcaacaacttgtgttgcatttgcacctgcttcttgcatgacatgggaattagcagaatcaggcaagcattttgtgacaacggttgtcaatggagctgatctggttcccactgtatcaactgcatctattgatgatctccgttctgaggtaacagcttcatcatggttaaatgatctgagggatcaaatacaacagacacgcttcctaaatgtcgtttaccggtcagccactgctttaggaactcgcctgcagtctttttctggtgcgagagagagggttgcaggtgctggagcatttctacgtcctgtttcaaacaaaacccaggttgtgatgaaacaagcacagaatgtcgcacaggctgttgctagaagtcggtctgcattttcctcatggtcatgcatgggtgcacgtcgtcgaggtgtaggtgtagttactgcatgttctaaagatgatatgagagtggaaacccatgtaacatcaacagttgagtcaaagtctgtccttgtagaacattgtggcgccaagaccatagaagaactgcagtatactgcagctagtgtttctgttcatgatgcagcagaggaagaagaggctcttttgagtgaacatgaaacctccagggagaatgccgaagaagaaacaacagagggtgagttgtggtatgagtttgagaaggacttggatcgacaagctgaaatggaggcacgaacaagggaggaagaggcagctgcagccaaagaaataatggaagaggaaagtgctgtgctaaaaggtgtagatgacaggcagtccttcacaccagatagcttggagaggcagcaattctacccccctggtagaatcatgcacatggttgcaatgcctcccacagacgctgacccagatgatccggttgctgctgacgagtgctgtgttggaatatatgagacccctagagatctttacagcaagattcgactctcaaataccatgatcaatgaccactacatgccaatgtataagaaaatgatggaaacattgattgagaagttcgcgagggatgaggactgctattgtacaggttctactgcagaataacatggaagcatgaatgacctatgtacatcgataactgtacaatactccgtgttagctgttattagcctatctgacattgcaatatacaagaggtgatgtcctcctgacccgtgaaaaaaggattttagttagggtcatgtgagtgtgtgatgtgtaaatgtaaaagaaaccagaatcagcaatttaataccttttccagtcaaaaaaaaaaaaaaaaaaaaagcatgaaaaacatgaatcttgaaaaaaaaaaaaaaaaaaaaaaaagaaaagaag

SEQ ID NO: 80445 - DNA, 287 bp, Zea mays
  Clone ID: MRT4577_173386C.1
ggatgcatgcagaggaacgagaggagagcaaggataagcgccgggacagtgcgccctatggggagtacggcagctggtacaaagcctgtaaagttgacagtcccacagtcaacaccactctgcgaacttcgggcgccctgtaccggcgccagggcaagctggaagctgcacacacactggaagactgtgccagccgcagccgcaaacagggcctggatcctgccagccagaccaaggtggtgacactgctaaaagatggtagtggtggacgacgagaccgccgtggc

SEQ ID NO: 80446 - DNA, 280 bp, Zea mays
  Clone ID: MRT4577_173387C.1
agaatctggaaaagaaatttcttatttatgggaagccacatacatgatacaaaaaactttactattgaaggacaactgataacaaatctaaaagagggcaccaccaaagatgtgatgttgcgccgacactgctgggtttgtcaaagaaaggtttacaaaaagaaaacattgttgtagttgaaaaaaggtggcggggttagccgcaaactgcttgcaaaaaggcagccactgttgctgtgttaagaaagaagaagggctttctgcagctagctcgctaaat

SEQ ID NO: 80447 - DNA, 502 bp, Zea mays
  unsure (1)..(502): unsure at all n locations
  Clone ID: MRT4577_173388C.1
aaagatataataattaataagaaaatctgagtatttttttgttttttgttttgagtagggttgatccttaaaaatactaaaaccatccgtacacaacaacaacatcaaagggaaagagaactaaggagaggagttaaaaaagagctgccacaagttaacacctatggggagtcacagtcacagtcacattttaccattcacctttttttatcactagtgaaagtaaggaggaggaggaggagcctggtactgatagcagttcgcgtagaagttcccatgtgcaggagcaggattgaacgtgtaagtctgaggaggaggaggtggtggagagtttgtgctgccatgattggaccgctaaggaacggtctgttggcatagacatactgcggatacctttcagggatgactctaccgtatcctgtcttggtgttgntgatgttgntggtgttggcagtgactcggggttgagcaccacgtgggcgttttggctgagggttcatgg

SEQ ID NO: 80448 - DNA, 294 bp, Zea mays
  Clone ID: MRT4577_173389C.1
attcaatcaagctacactgcaagtcttacttccatcctaaccgtgcaacagcttgatacttctataagaggactcaatgacctgaaaaatagtgattatcctattggtttccaagttggttcttttgtcgaagaatacatgatcaaggaactgaatatctcacagtcgaggctaaaagctcttggttctcctgaagagtatgctgaaaacctcaagctaggtcccaagaaaggaggtgttatggctattgttgatgagcgccctatgttgagtggttttgtcacttactgaaga

SEQ ID NO: 80449 - DNA, 572 bp, Zea mays
  Clone ID: MRT4577_17338C.1
tcggcggcggtcggtcgtgaagaccggcggcggctaggcggaagcgagagttacggggatcgtaacctttgataccatgaaagcaagtgatttggggaatacttgatgatagaatagtgattgacagcgtttacatataggcatgaggggagcctagtatggcaggcctccatgccggaatacttttcaacactcatgttttagaattatatatgtaatcttaaaaatgtttaagatcttttgagctcttaaattgaaatagttccttgactgatatgaccgcttatatgtgagtgttgtataggaccggcccaacacgattagatagtatagtgttgtgtctaagtcaatagttagacacttatgttatgacacgattattaatagtgtcagtatcagtttgtttggtcatctataagcgcccgagggcgcgtgactaggtatatggggagaaaaccgtagagacggagagcacgataccatctgccaagtctcgtcaggttcggggtggcgcgcgcccatacaccctgtcgttacccccgtcaggctttatcctaagttaatcttcaagg

SEQ ID NO: 80450 - DNA, 832 bp, Zea mays
  Clone ID: MRT4577_173390C.1
tggctggccgtttgcttgacgatcacacgtatcaaaaagggttctcaagtattattggtaaagtatcacaattagatatagcggccaacaggtttagatttgccgcgcttttattagatagattcttagggatctttgatttccactctccaggactccagggtttgccgttggggtgacgatcaaacatataaattaatgatctctagttttaaaggttgatgctatgctccaagaattagaaaaggagattgatgatgtggatgcacaaattggaaatcgttggcaactgcttgataaggaccatgatggcaaagtgacccctgaagaggtggcggcggcgacagcttatctcaaggacaccatagggaaagaaggcgtgcaagagctcatcagcaacctttctaaagacacagaaggaaaaaatccttgttgaagatattgtgaagctagcatcccaaatagagaacaatgaagaggaagaggaagcacggtagatgggagagtatatggaaacatcacactcgttcagcagtcaaaactcatgtattgaaaggcaatacatccatttcttgtgtctcttgactgactttgatagtgacttccaattagcaaggtagattttctgtagaaaggctcatgctgacatgcatttagttagccgtcgtgttgtgatttggtaggtaaattgcaaccaaaatttagaccggttgcatggacgtggataatacagatcaattgtatttgttatgctactatgcaatcccgaaatattggatctgtttcaaattctcaagtaatcattgatggatgctatttattgaccatataa

SEQ ID NO: 80451 - DNA, 616 bp, Zea mays
  Clone ID: MRT4577_173391C.1
aaaaaaccataagcggatgttgttgcttgatactgggggtgtctacaaagagattcggaaaccccgcgaatttttataaccaccccccagggaaaaaaaacgcatgcatatttttttttttaccgaacagggccgcacctttttcttatgaggagaagggtgttccttgatgaatacggatggtttttatgattttcatcattcacccttgtgttccctgaatattatttttagccgcgccccccccagttttttttttttcttcctgggctcgtgttcaaaaaaacaacggtggggggccgcgcccccctcttcttttcaaaagaatgaggataaggaggtgtggcccctctggagcatcttttttttttgttccttcttggggggcgcttttttgtcctcggcgcttgtggagtaatatctggagctgttccccgagaagttttagtccccccccgctgtggttgagcagaggacaaccacagcaccactcttgtggttttttgaacaccccgcgggggagggaggcctctaataatcccctttttttttcccgggctcctccttttgtgggggtttttttaacaacaggggccgcttctccctcccccctctt

SEQ ID NO: 80452 - DNA, 528 bp, Zea mays
  Clone ID: MRT4577_173392C.1
aaaacaaccgtccattttcattcaaagacgttaattagatcactaacatatcgaaaaacataacacgacttattcttaatcaccccttaatacaataataatgcaaaaacacacagtttctttagttaatcacatgacaactcttcctgatctcaccattaaaaccagtaagaggctgaatgtttcccatgttaaccatcgactttgcgaattgttggaagaaaagtctctcgtcttcggcataagctttcactaatgcaccagtcttgcctacattgccagtgagaagcacttcatctgatgtcaataagcctttgccccatagaaggagcttgaagtatgtgttgtcgaatcttgcaggagaggctaagtctagaggtgaaatattgttgtcaccgcctgttggtggacaaattgacctgagaccatagtagtaagacctctctagcgtctcgtctgggtggttattaccgctttgattgtatagactttgtttaaacgttgtgcacctcgctactccaatcgtat

SEQ ID NO: 80453 - DNA, 604 bp, Zea mays
  Clone ID: MRT4577_173393C.1
aataatacctctgtcgaaactagtagcagcagcacaaagaatgaaattgatgacaaggaaagcagcagcaccaagaacagcggcaatgtaaggagcaccaaacagaaggaaattgactacgtatacagaagcattgaaaagaaagttaaagttttcggtcgagacaaggtccatgaagatataaggtgcttcataatggaccggctaccgatgcaccaagctccgactccagtaaaccttattctgtgattggcatatatggaattacaggttctgggaagactactctggcacaatatgtttgtgagtatgagaagggtgaggtttcaatcctatcatgttcatccatgtgggaactacattcagtgccggtgaaatattttgtgatatgctgtaccaccgtacgcaacagcgggccgctgatgccaacggtcctaaaagcctaaaaacagagttaaaagatctaacactacagcaaacgccaaaatatacagctactcttgttgactgtccaaattcaaaatacacagcttataagcaaggctgtatatgtttgctactaactcatacctataggcagctaagaccggtgttatgccaagtg

SEQ ID NO: 80454 - DNA, 639 bp, Zea mays
  Clone ID: MRT4577_173394C.1
tacacgatgacccagaaatgctaggttaccttgagcagaccggtgatgttgctcaggagggagacgttcttatctcaccaatggagattctggcatacaagttggacctacaaccaccatcatcgcaggaagagtagttttagtttgtgaaaacagtacatgcatattgaacagtcctacatgacagtgaagatggatcttcccgaaatacttgatagcggcagttagatagtactggaacagcaatgctgcaatgctgcatgtatacgtgtcattttcttggcatacagttagtgcttgaacctctagaatttgctggcagttgcagccttgtcatccacgaaggtacatacacttgttcttggtattatgctcaacagatcggaagatttggggcacattgaagcagagctaacttgattacggtaaaaatgtgtgttaacacaactgtgttgctccggccaacgataacttgtatcagagcaagttttgtataattctgttttgcttgcatcctttttgtagtgccatcatcctactgtcaaaaacctgagatagtttagatacatggttcttgctttcgagatctttatattgtatgtacacaattctgcttctatgcatgcggggattgctggg

SEQ ID NO: 80455 - DNA, 164 bp, Zea mays
  Clone ID: MRT4577_173395C.1
gtcgtccgcgaagcgaaactgggccttcattgctagcgctagggtagcccgattccaccctttctagaaaataggccggcgctgccatagtacgctctgtctagttaaagcatgcgattgggaacaaattttgggggggacaggtcacacgagggtcctacgcg

SEQ ID NO: 80456 - DNA, 2320 bp, Zea mays
  Clone ID: MRT4577_173396C.1
gaaatatatgtatgggttggacgggtaacgcaaatggaggatagaaaatctgccactaaagcagttgatgaattcctcattaatcaaaagcgtccaaagacaacgagggtaactcaagtgattcaaggttatgagagtcatgctttcaagtccaagtttgaatcgtggccagtgggtaatgctgctgggaaccctggcacagaggaagggcggggaaaagttgccgctttattgaagcaacaacgcgttgatcccaagggagctgcaaaaagcaccactccagtaaatgaggaagttcctcctttgcttgatggcggtgggaagcttgaggtatggtgcgttgatgggaacactaagactgccctgccaaaagaggacatcggaaagttttacagtggagactgttatatcattctctatacacatcactcgggcgacaagaaagaagagtactatctcagctactggattgggaaggatagcttggtggacgatcaagtgtcggcatctcaaataatcaatacaatgtggaattcattgaaaggacggccagttctgggccgtatataccaagggaaggagccaccacaatttgttgctcttttccagcccatggttatcttgaagggtggaatcggatctggatacaagaagctcatagaagaaaaaggtgctatgggtgagacttatactactgaaggcatagctctaattcgagtatctgagacatctatctacaacaacaagactcttcaagtagatgcggtagcaacgtctttaagctcaacggagtctttcgtactgcaatctggaaatgctatgtttacatggtttggcaattctagcacatatgagcaacagcagtgggcagcaaaagttgctgaatttttgaagcctggcgttgcagtgaagcactgcaaggaggggacagagagttctgctttctggtttgctcttggagggaaacagagttacacaaataaaaacactcctcaggatattattactagagagcctcacttgtatgcattctcattcaagaacgggagactggaggttactgagatcttcaacttttctcaagatgatttgttaactgaagacatgatggtacttgacacacatggtgaagttttcatttggattggtcagtatgtggaatcaaaagagaaacagaaggcatttgacattggccagaaatacgtggagcatgcaaattctattgaagatctttctccacatgtaccactatataaagtcatggaagggaatgagccatgcttcttcaagacgtacttttcttgggataacacaaaatctttggttcatggaaattccttccagaagaaactctcgctgctttttggattgcgttctgagggtgcacctaggagctctggtaatggtgggccaactcagagggcatctgcattagcagctctatcatccgcattcaatccatcatctcaacaaaggctgtctaatgagaggcctaaaagcacaggcgatggacccacgcaacgtgcctcagcactggctgccttatctaatgcattcaacccatccttaaaacccaaaacatcacctccatctcgctcaggtcctctgtgctgactgctgagcaatctggatcttcagaatttctacgatccaaagctagcaacacagcatataagactgatgtcgaccggattgtcataactccagctggcccatcaggcccatcttctcctcagtctgaagctggggagtccaatgtgtttcaccaggaaaaagatgctgcagcagatggggcaccgcctgacactgatggagcagtggctgaggccggagaggaagaaacaacggaaaatgttggtgaagcgacatttagctatgaccgcttgatatccaaatccaccgatccagttcgtgggatagattacaaacgcagagaggcatacttatcagatagtgaattccaaactgtttttggcatgaccaaggatgcattctaccgacagccaaattggaagcaagaactacagaagcgaaaagcagatcttttctaaagagaacaagctttgttaccagtggtctgctacagtatgcaatcctcttgtcgtgaatggtcggtcccatgagagttggtgtattaatatattgttggtcgtttctgaggacggtctactggtggctttgcacggttgtttcttttttggcaaccaattttataggtcaattcttttatttgtatatggcctgggttgtgctgcttgcgaggtcctaagatgcttctttgttcttctttgtgaatgtccatatgtgtatatcattttct

SEQ ID NO: 80457 - DNA, 1046 bp, Zea mays
  Clone ID: MRT4577_173397C.1
ccgggcgtggagcctgcaaattctatttgatgatctttctccatatgcaccactatataaagttatggaagggaatgagccatgcttcttcaagacatatttctcttgggataacacaaaatctttggttcatggaaattccttccagaagaaactctcactgctttttggattgcgttctgagggtgcatctaggagctctggtaatggtggaccaactcaaagggcatctgcattagcagctctatcatctgcattcaatccatcgtctcaacaaaggctctctaatgagaggcctaaaagcacaggcgatggacccactcaacgcgcctcagcactggctgccctatctaatgcattcaattcatccttaaaacccaaaacaccacctccatctcgctcaggtcaaggttcccaaagagcagctgccgtagctgcactatcctctgtgctgactgctgagcaatctggatcttcagaaaatctacgagccaaagctagcagcacaggagataagactggcatacttatctgatagtgagttccaaagtgtttttggcatgaccaaggatgcattctaccgacagccaaattggaagcaagaactacagaagcgaaaagcagatctcttctaaagagacacgccttgtctcaagcgcctgctacaacatgtaatcctcttgtcgtgaatggtcggtcccatgagagttggtgtattaatatattgttggtcgtttctgaggacggtctactggtggctttgcacggttgtttcttttttggcaaccaattttataggtcaattcttttatttgtataaaaaaaaaaaaaaaaaaaaaaaaaaaaaaaaaaaaaaaaaaaaaaaaaaaaaaaaaaaaaaagggcggtcaatataaaaaaatggggggcccgttctaaggaacccagatttcttaccccttctttccaaagaaaaaattttttttcagtggccctaaatttaaatcactgggcctgggtttacaacgccgtaaccggaaaaaaccggggggtacccaatttaattt

SEQ ID NO: 80458 - DNA, 548 bp, Zea mays
  Clone ID: MRT4577_173398C.1
actctcaagcacacctctctcttctagtcttcttcctcctccgtctcgcgttgcctcctctccttcacttcacaaaaccgaagcggcaagatggccggcgccctggacgaggccaagatcatcgactacttcaggaacaagagcgtgctcatcaccggagccacgggcttccttggcaagatcatggtggaaaagatcctgcgggtccagccggacgtgaagcggatctacctgccggtgcgggcggccgacgccgccgcggccaggcgccgggtggagaccgaggtggtggggaaggagctgttcggggtgctgcgggagcggcacggcgccgggttcgacgccttcgtcgcggacaaggtggtggggctggccggcgacgtcatgcgcgagggcttcggcgtcgacgccgccacgctgcgggacctccggctcgccgacgagctcaacgtcatcgtcaacggcgccgccaccaccaacttttacgaaaggtacgacgtggccctggacgtgaacgcggtggcggtgaagaacctgggccaaatccc

SEQ ID NO: 80459 - DNA, 790 bp, Zea mays
  unsure (1)..(790): unsure at all n locations
  Clone ID: MRT4577_173399C.1
ctagnaggccttcggctgccctttttttttttttttttttttttttttggcactcaaaaacaccagtctcatcaaattatccaaaccctaggaacatcacactcacacatacagattttgcagaaactcgcagacttgaagcccagcttgagcttcttctactgttaaactagagagaatccagtactcagcagcctcccgacgtcccatccctacaagctaaaggcccggcagcttttcatcttcccgctgcagaaaccatgtgagtgacagagtgagaccccgcctgcgactgccattgtcgtcgtctacaaggctctaagccatgccggcggtgtcggtggccaacgaccagcagtacgtggtagtggcggcggtcatcaccgtgcttgtggacccgcactcgctgtcgtgcaccgacgcgctccagcggtcgagcctggcgccccaggggcacgccgcgggcgcgctggcctgcgacgggcaccgctgcacgcgcgcgggaccgtaacggggcgcctgcccgcgcggggccggcgtcgcctgcgcctgcgcctctagagacgccctgcgccgcccgctgggctgccaggccgcctcggcggcggccgacgacactgacagccgctgccttggcgcgctctgggaccgcgccttggctcgcgacgactccgtgttcgccatgtagctgggcacgagcagcgcgtactccgccgagggcttgtcgtcgtgctgttgctgctgctgctgctgcctcgacggcgcgtagcggtacgcctcgtgccgaatt

SEQ ID NO: 80460 - DNA, 351 bp, Zea mays
  Clone ID: MRT4577_17339C.1
atgagatgaactaagctaattttctcctactagtatgaaggctttacagaagggcaacatcctgcctgcactaacacaactctgaaaaccagctgcacacagatctgacaaacggatactacaaatctacggctggctacgaagcattgtgcggcatgtactgctgatgagactggtttacacccagcagggattccgggggatctcatggcatggaggatgataaacaagaagaaccctggccctccacgggaaagaacacaccatcaccatggtcgagaatgagcggggtccttctggactcatgggatagcgcaaacacatgtcgagatgccgtctccgtcgtcaagc

SEQ ID NO: 80461 - DNA, 410 bp, Zea mays
  Clone ID: MRT4577_1733C.1
cctgctcacgcgggcgcaaagggggagaaggcggggtgtcacacagtaggcttgctgacatccacaagcactgtggacgaggaaacgctgtgaggatcaaatgtttgggcgtgccaacccttgacatggacacaatcagcttccatcccatcggacaaaacaggaggcaacacccgtatcccgaaggataaacatcattgttccgagcccaagccggaataaggaccctaacaagagggctggaagaccattggcgctaagagaaccgcgagcaacgatgtatgcctaaggtagggcaaaacatcactgaatgaccgagtttaagggaaacaggagcgtggaggcacacagtattgagagatccaccacttaccaaagtgactaggaacgtgtgtatatgctaatgttgt

SEQ ID NO: 80462 - DNA, 648 bp, Zea mays
  Clone ID: MRT4577_173400C.1
gtatccttctccagtttgtcattatttatgcattttgagttctctgatctgtattcctcgtttcttcggaatgttttctttatgtagtcttcaccttttttccctttgcaaatgtagccctggaagattagaatcatgtttatttgattttgttggtacacctttgccttttttatagtcatgactaatgtgatgcacataggtgaaggccactaccactttgctggcctatttttcacttcaaagtttgataccttcgatcaatgcagatgtcgataggcctgtcataactccagctggaccatctggtccatcttctcctcagtctgaagctggggagtccaatgtgtttcgccaggaaaaagatgctgcagtagatggggcaccatctgacactgatggagcagtggctgagacccgagaggaagaaacgacagagaatgttggtgaagcgacatttagctatgaccgcttgatatctaaatctaccgatccagtccgtgggatagattacaaacgcagagaggcatacttatctgatagtgagttccaaagtgtttttggcatgaccaaggatgcattctaccgacagccaaattggaagcaagaactacagaagcgaaaagcagatctcttctaaagagaaca

SEQ ID NO: 80463 - DNA, 674 bp, Zea mays
  unsure (1)..(674): unsure at all n locations
  Clone ID: MRT4577_173401C.1
ngttcaccaagagccctctctcttctagttttcctcctcctccgtctcgcgttgcctcctctccttcacttcacaaaaccgaagcggcaagatggccggcgccctggacgaggccaagatcatcgactacttcaggaacaagagcgtgctcatcaccggagccacgggcttccttggcaagagtaagtccatgcatccatgccggagaagattgattggtgttgcgtcgtgtgctcactagctcgtcggcctgtgcagtcatggtggaaaagatcctgcgggtccagccggacgtgaagcggatctacctgccggtgcgggcggccgacgccgccgcggccaggcgccgggtggagaccgaggtggtggggaaggagctgttcggggtgctgcgggagcggcacggcgccgggttcgacgccttcgtcgcggacaaggtgggtggggctggccggcgacgtcatgcgcgagggcttcggcgtcgacgccgccacgctgcgggacctccggctcgccgacgagctcaacgtcatcgtcaacggcgccgccaccaccaacttttacgaaaggtacgacgtggccctggacgntgaacgtggcgggggtgaagcacatgtgcgacttcgcccggaaatgcccaacctcgaggcgctcatgcacgtctccacgaccta

SEQ ID NO: 80464 - DNA, 436 bp, Zea mays
  Clone ID: MRT4577_173402C.1
gggggtgtgttttttttttttttttttttttttttttttttttttttttttttttttttttttttttttttttttttttttttttttttttttttttttttttttaagggccaaacccggggggggccctttatttaacgaaatttttcagggggggggggggggcaaaaggaaaaaaaacggggggggaccccaaaaaagccgggggagctagcaaaacaactagctgcccctttggggagaggctcaaaaaagggatcccaccaaaaccccaagggggttgagggaaaccccaacttgggcaaaaaaaccaacgagggcaccccctttctgcacggggaacccaaacggagggtaactcccgcccccccatgctccaaaagggcccaaggtcttgaggcttgggacaaactttaggggggttataacggggggg

SEQ ID NO: 80465 - DNA, 3088 bp, Zea mays
  Clone ID: MRT4577_173403C.1
tcttacattctgaatgtcccaactgattgtttttccctgaggcaatcaaaaccgggtgcttcttacctatcagtagatgtgtagtttgtcttctgtttatgtgattatggtgttttaagctgtcaccaatgtcagcatcaggtaaattttccctgttggttaccttattatcatcggtttgtgtttaataaaattcttttttttgtcttgcttaactaatataggtgtatctaccatttttactggacgtttcatggatagtggattttgttgagctcctcaatgtaccgtatccttgtgggatacaaagaatgaaatgtaccttgtaccaccctgtggttgatttctcaattaaaaccccaccaaccgtgagtgatgatgatgttgtacttgaaactacagcaccaaggctgtacagcatcaatgatggccaattgaagctggaagaaacagctcttacaaaagccgtgcttgaaaataccaaatgtttcttacttgactctcgggctgaaatatatgtatgggttggccgggtaacacaaatggaggatagaaaatctgccactaaagcagttgaggaattcctcattaatcaaaagcgtccaaagacaacgagggtaactcaagtgattcaaggttatgagagtcatgctttcaagtccaagtttgaatcatggccagtgggtaatgctactgggagccctggcgcagaggaagggcggggaaaagttgcagctttattgaagcaacaaggtgttgatctcaaaggagctgcaaaaagcaccactccagtaaatgaggaagttcctcctttgcttgaaggcggtggaaagcttgaggtatggtgtgttgatggcaacgctaagactgctctgccaaaagaggatattggaaagttttacagtggagactgttatatcattctctatacgtatcattcgggcgacaagaaagaagagtactatctcagctactggattgggaaggatagcttggtggacgatcaagtgtcggcatctcaaataatcaatacaatgtggaattcattgaaaggacggccagttctgggccgtatataccaagggaaggagccaccacaatttgttgctcttttccagcccatggttatcttgaagggtggaatcggatctggatacaagaagctcatagaagaaaaaggtgctatgggtgagacttatactactgaaggcatagctctaattcgagtatctgagacatctatctacaacaacaagactcttcaagtagatgcggtagcaacgtctttaagctcaacggagtctttcgtactgcaatctggaaatgctatgtttacatggtttggcaattctagcacatatgagcaacagcagtgggcagcaaaagttgctgaatttttgaagcctggcgttgcagtgaagcactgcaaggaggggacagagagttctgctttctggtttgctcttggagggaaacagagttatacaaataaaaacactcctcaggatattattactagagagcctcacttgtatgcattctcattcaagaacgggagactggaggttactgagatcttcaacttttctcaagatgatttgttaactgaagacatgatggtacttgacacacatggtgaagttttcatttggattggtcagtatgtggaatcaaaagagaaacagaaggcatttgacattggccagaaatacgtggagcatgcaaattctattgaagatctttctccacatgcaccactatataaagttatggaagggaatgagccatgcttcttcaagacgtacttttcttgggataacacaaaatctttggttcatggaaattccttccagaagaaactctcgctgctttttggattgcgttctgagggtgcatctaggagctctggtaatggtggaccaactcaaagggcatctgcattagcagctctatcatctgcattcaatccatcgtctcaacaaaggctctctaatgagaggcctaaaagcacaggcgatggacccactcaacgcgcctcagcactggctgccctatctaatgcattcaatccatccttaaaacccaaaacaccacctccatctcgctcaggtcaaggttcccaaagagcagctgccgtagctgcactatcctctgtgctgactgctgagcaatctggatcttcagaaaatctacgagccaaagctagcagcacagcatataagactgatgtcgataggcctgtcataactccagctggcccatctggtccatcttctcctcagtctgaagctggggagtccaatgtgtttcgccaggaaaaagatgctgcagcagatggggcaccatctgacactgatggagcagtggctgaggccggagaggaagaaacaacggaaaatgttggtgaagcgacatttagctatgaccgcttgatatccaaatccaccgatccagttcgtgggatagattacaaacgcagagaggcatacttatcagatagtgaattccaaactgtttttggcatgaccaaggatgcattctaccgacagccaaattggaagcaagaactacagaagcgaaaagcagatcttttctaaagagaacaagccttgtttccagtggtctgctacagtatgcaatcctcttgtcgtgaatggtcggtcccatgagagttggtgtattaatatattgttggtcgtttctgaggacggtctactggtggctttgcacggttgtttttttttggcaaccaattttataggtcaattcttttatttgtatatggcctgggttgtgctgcttgcgaggtcctaagatgcttctttgttctctttgtgaatgtccatatgtgtatatcgttttttttcatcagtttgttacgtatgggcatttcctggtaggttgtcaattgtattgtcattcagatgtattgcacacgaaatacttgtgctgtctgtttgttgttgatggttggcagttgtttgggatttgaaacacttggttgaattccatgatttctctgctgtcaaaaaaaaaaaaaaaaaaaaaaaaaaaaaaaaaaaaaaactcgaggaagggccgcggtacc

SEQ ID NO: 80466 - DNA, 364 bp, Zea mays
  Clone ID: MRT4577_173404C.1
aaggacccacatgtgcatgatgatcaagtacgattacagatagagaatccccgcacgtggcacacacaggtgcaaaaccggcaagatttgccatgggaacatttgaccccgagcaagaggacaccgtacatgtacaacgcacatacagtacagggcgcagcaaagaatacagagaggcactgacagatcgtctccaccgacccccatcgatacgatacccatggacgatggaggcatggagctatctaccagctcacagtctgcacaaggccgaggaagaacagtctcagcgatccagatccatcacggccggcgggcgtgaacctcttgatgatgatgaaaaccgcagcagctcaaacccttg

SEQ ID NO: 80467 - DNA, 383 bp, Zea mays
  Clone ID: MRT4577_173405C.1
attcttaccccgtgtttttttttttaacatcagatccgtttgaccacaaccccacctcggtacactaggaaccatggcacaaacgcataaactgaccccaatgccacataaggcaaaaactacttagttatgccgaaacagccaaaacattaattttttgctctaaccaccaactgataatcaaacaacaaaacggttttcttggtgcaatggaccaagccaggcatataagctcaagaagccaagcctcgcccatgaaggaagcttttgtactcctgcacaccttctcagattcagagaaccacagagtgattcctgtctttcagaaatgcccggccattgttgaaaacatgaccgccctgcccgctgccagggcccccaac

SEQ ID NO: 80468 - DNA, 247 bp, Zea mays
  unsure (1)..(247): unsure at all n locations
  Clone ID: MRT4577_173406C.1
tgccgcccctcccntttttttttcagttgtaactaataaatttgttatctctagttccattaaattgcaagaaattagacatagtaagactgccaacaccacaagtattgtgtgtggtactggtataatcagctgtcccagaaactcttcagtgtaatgctcagctggacaatgtgttccagtagtggcaaaatttcccgagtntgtcacagncatnatcttggaagactaaatacatnttttgcac

SEQ ID NO: 80469 - DNA, 425 bp, Zea mays
  unsure (1)..(425): unsure at all n locations
  Clone ID: MRT4577_173407C.1
cttcaacctgaagagttaaaatttgtgcatgatgctttgaagttggcatatgaagcagacagtggacaaaaacggcgaagtggagaaccattcattattcatcctgttgaagttgctcgtattcttggagagcatgaacttgactgggaatccatcgctgctggtttattgcatgacactgttgaagatacgaatgtggttacttttgaaagaatagaaaatgagttagggccaactgtgcgacgtattgttgaaggggagacaaaggtgtctaagttggggaaacttcagtgtaaaagtgagggtagcacnaaacaagatattaaagcagatgacctaaggcagatgtttcttgccatgacagaagaggttcgtgtgattattgtcaaactggcatacaggttggataacatgcgcactctcac

SEQ ID NO: 80470 - DNA, 793 bp, Zea mays
  Clone ID: MRT4577_173408C.1
cactggctctcgtctcgtgcaggtgcagctagccctcgcctcgcgcagcagcaaaggagctatatcagctgcctctgcctgcttcgctcgttcccatatagagccttcgttccggccggcctctcgatcggtgctccgccgccgccaccgtaccgtcgtcacacgccgcgcgcgcgacgtcgtcgtctcagctagtagccgacactgtcaagcgcgcgcgccgggctcgtgcggtttctctgggccgatggggaggcacactggtgctggaattcactgctccgtccccctcgctctgacggtagtagtgctgctgctgctcgcctccgtctcagtgagtcatggcatcagaccagctcctgttgctggggcgaatggactggtgcatgactcgacggcagagatggtcgtcgtcgccacagcaccgtcagctcctgcgcagctgatgcaggggaggcagacgatgagcaggggcggcaagaaggacgacgacgacgacgtgctgctgcgggaggaggtggtgcgcgcgacggggcgcgcgggatgtggactgctcgcacgattacggggcgtgctcagcttgcaaccgcgtcatggtcagcttcaagtgctccgccgccgagccgctgccgtgccccatggtgtaccgctgcatgtgcaggggcaagtgctacccggtgccgtccagctgacggtgatgcatgcttgccgatcgagttgccgcgcgcgcgcggaatgtggaaatgacgatcgattaccctgctaataaagctagctagctatagcacttact

SEQ ID NO: 80471 - DNA, 356 bp, Zea mays
  Clone ID: MRT4577_173409C.1
tgtttttgggtttttttgtttttaacagtgtgggataaacatgctttgtgttagggaaaagaaggtgtatgcgggagatcaacatgaaaatgagcggtagaaaggacagaaatgaggagacacaaagcaaaggttgaccaatcgggcaagaacagagcccgggggaaaaaacccaaacgccgggcgcacgggggaacaggagttaagatcaacccgctaagaacccccgccgggcacgaggggccctttggtacccagggggtcaaaaaaaaaaaaacgaacggccaccattaaacacgaccctggggggtgtgtttcaaacccccaaaaagtccacaccaaaaaaggtgttcagg

SEQ ID NO: 80472 - DNA, 350 bp, Zea mays
  Clone ID: MRT4577_17340C.1
acaggcacaagcttttttttttttttttttttttgttttttttgtttttttttttttttttttttttttttttttttttttttttttttttttttttttttttttttttttttttttttttttttttttttttttttttttttggggggggggggggggcttttctcttgatcccctttttttttttgcctgctctgcgtggtggtgcctcctctgcgcttggtgtctttggccttctgctccgcttctttctgctctcggcctctcttggctggcgttgggccgcgcttctcttttttggccgtcctccgtggggggggctggttttctctccgggttgctttttctac

SEQ ID NO: 80473 - DNA, 373 bp, Zea mays
  Clone ID: MRT4577_173410C.1
ggcaaaaaaaattttttcccgctttttttattacaacagtttagttctcaccggtaaatcccgggttatgggtatatatagggggaaataattaagccctccccccacctaataagtccggggggggggatttgtccgtatatggccacttaggggtcccatggtttgaactttccattgacaaaatcgtaatggcccccccccagcttgggggtccctttttccagccctttcttgacaaacgggtaggacttgaggttttcaagggacacgttgacggcctccttctccaggagggagcattggtcttccaaaggggcccaggcgtggtcggccagcaccttggactttggcggggcgccgaccctgaccc

SEQ ID NO: 80474 - DNA, 689 bp, Zea mays
  Clone ID: MRT4577_173411C.1
ccggccgggagagcctatggtggcggcgcatccatccccgcgatggcgcccaggctgaggctggtatatacctcatggtgcgctggtgacacccatggtccccgatccggtgcggggctcacaacaagcacaatagggagggtctcgccgcggccatgaagaggacgaggtggagccaccaccgcatagtctgcaacgaggtacgagcccagtaaatgctggatagtcgacggagaccccagcacgctggtcggggcaacgtatggctccgacgcgccttgaagattacccacaatggcttcctgaccaccgctgcaagcataggttcaacggcgacgattcttctctctccctctcgatcctcgctgcccgcggcggtagaattgctgagtcgaggctggctatacgtgtgcaccagggtcttcatatttatacccgcgagaggatgccgaggtgaaggaaaatcctataagaatcctaacaaatcaggcgattgttacgggatccgtaacaattcatgtgcgcagtgccctttcgtttgctgacgagaggatgatggttctggaatgttgcccacatgccaacgagctacgaatcagtatggcttatgtcatggctgaccccatgatgatgcgatcaacagctagagaatgaataaaaagaaaaaaaaaaaaaaaaaatttgcggcc

SEQ ID NO: 80475 - DNA, 439 bp, Zea mays
  Clone ID: MRT4577_173412C.1
cggacgcgtgggcggacgcgtgggctgacgcgtgggcggacgcgtgggcggacgcgtgggcgcggactgaccgtgacgctgcaccggccgtccgcgtcggcgcggcttatcggcgacgacgacgaagaccaggcgctgtgctccatctgcatcaccgcgctggtggccagtgagaaggtgaaggtgctcccgccctgcgtctactcatggctacggtcctaccccagctggccgctctgccgccggctactagtactcggcgacgccaatgtgtgatcagcggcgggccgatgccccgaccaggagtgcttaagcagcgcattactaggtaatgtaatggagatggcagcgaccaccgagaccgagtagtgagatctactagtactgagtgcgtatgtaattaaagactatactactaaaagaagcgcttatcaccaat

SEQ ID NO: 80476 - DNA, 244 bp, Zea mays
  unsure (1)..(244): unsure at all n locations
  Clone ID: MRT4577_173413C.1
acaagcgagcaaatccattccatgaccaattgatccaaccgacaacgaacaagcaagggggaggaaaggacgcgcaaaaggcccccccganacagagaganccccaaaaaaaaaancgacaaacaaaaacggggcacgcctagaaaagganggaaacaagaacgaagaaaaagaaaagccgcactaccaagaagggccccnggactccaagcggagaccggaaaaaacaanacgcagaagcaac

SEQ ID NO: 80477 - DNA, 636 bp, Zea mays
  unsure (1)..(636): unsure at all n locations
  Clone ID: MRT4577_173414C.1
ccggccggggggcttccaatccttcccctctcggcagctatccgtcgccagtgcgtgtttttgtttcccgctctcgcgatctctactctcgtctctcgtgcaagctctaaggcaaggatggggcgtaggacatgtggcacggccttcatccttctctacgtgctgtctacgtcgacattgcccgcgtcgtcatcgaacaccggcgacggcctcatccgcatcccgctgaagaagagatcgataatggacaccatctacggcgacctcctgccgaagccgagcgcgccggaggagaaggagaagcaagccgtcgacgacccggtgcgggacgccatagcccgagcacgcgagcggcagcacgaaatgctggtccaggccgctgccacggaacgcaggcgcaggtactactggagctacagcggggccgggggcaagggaaacggcagccgtctgcatgacggaggccagggcgaggggtcggngagcatcgccatcgttgcgctcaagaacttcctcaacgcccagtactttgggcagatcggggtcggctgcccgccgcagaacttcaccgtcgtcttcgacaccgggagcgccaacctctgggtcccttctgccaagtgcttttttctcgctcgc

SEQ ID NO: 80478 - DNA, 258 bp, Zea mays
  Clone ID: MRT4577_173415C.1
attccatttcttcccacgcgtgctatcatatatattaacataatctttctctctaatattatccaatcttacttacgctttcatgccacggggtatctttattatagggtcacctaatttctattcactttcctttattttacaacttccttacttttaaaaccctttcttttccctacttattctccttccatcacatccccctttcaccaacctaaataatattttaatactccctcatcctatcaccctttccaa

SEQ ID NO: 80479 - DNA, 671 bp, Zea mays
  Clone ID: MRT4577_173416C.1
ccggccgggaggaaaccaccggacgcctggtcctctccgtcgacatggcggcttcctgccgccgccgccgtcacacgccgccgcagaggagatggagacgaagacaaggcgtcaatggagctggcgcctctgctgcctctgtggagcctcgtgcacgtcgtcctcgccgcctcctttccggacccggccgtgcacggcggagggtagcacccacaacatctcggccgtcgacgccgtgctctccgagtacgttccaccagccggggggtctggctcctcatgtaatggcccgtggccgccgacgggagaaccgccgcgacgtgagctcgctgcagccgccagactcgttgctgtgtgggcatcaacagcgctgaaagggtcatcaaggagatagatgtctgcattctggtacaatgcacgagcaagctgaacacgctgcttctgaccgccgctaagatttatgccccgctcgccgatctgagtacggtctccatacggcaacatctcaagatccttcactaaagaacaccgctcgagtgtttcctggtacctttgcctgtccatcgaagacccaaagagaatgttgtcctgcacggttcctgtttggatccatgcgttctgagaaacatatgctgttttcccgcaaaaaaaaaaaaaaaaaaggggcggcc

SEQ ID NO: 80480 - DNA, 753 bp, Zea mays
  Clone ID: MRT4577_173417C.1
cattgggtacctcgaggccggccgggacggcgttcccgctctaggactacgacaacaagtcctaaccctagccccggtagtcgccaccgccaggctctacgactacggcccggccgtccaccgctcggccgtccaccggtccaccgctctacgcgacggctccatcgctcggctgctccaggctccagcgccctccaggctccagcagatcccggaagcaccgaccacggtccacggcgagtcggcgagcagacagcacaggcgcacaacagtgacggcgagcagacagcacaggcgcacagcctccgcgcatccgcggtccgcgtccggccgtgcagccgcgcagtatactggcttcctaaaggatcaatgtcggctatctctgatcagaagaaacgcaccttggaagcccttcagcaacagtatactgctgcaaaagctaagaaattgcaagatgaacaggttaagagtcagaagaagagcaattttaatacccctaagcctaaatgtgatgcaccaaggggaagcaaaggtccagaaatcactcctcgacgaacatatgcccaaccttctcataaagagggggcattttctagttctaattgtgaacaaaagccttccacgtcctcaggtgaagaaatcaatcctgtgtatgctgaactatcttgtggctttcatgacactttgtccaaaggcggtgtctcggatttggatggcacagaggggtgttcacaatgtggtatttgacataat

SEQ ID NO: 80481 - DNA, 174 bp, Zea mays
  Clone ID: MRT4577_173418C.1
agtccaaacactcggtgtcatgaaactaaagaggggtgtcttcaccagtcaaacattaggttgaagcgaacaaagaaaacaggacatgaccggttggttaccggtgacatgtgcattctattactgccctaagggttctacctgattattatgcatctttagcaattagcttta

SEQ ID NO: 80482 - DNA, 310 bp, Zea mays
  Clone ID: MRT4577_173419C.1
gatgcacccgacgtaagctcggaattcggctcggggctgttttggcccccaataagttcccgaacgcaggggggaccacaggggggtcttttggagatcaacctgctgctctcctagggcaggtgtgccagaaggcagaagggacatgcacctatacagctggcgcctggatccttgttaacacaggggaagagcctacccaatactgccatggcctatttagtaccatcgcgtacaagatcgggccagatgcccccacttactatgctctagaatgtgccatggcaattgcagactcatcaacctagtg

SEQ ID NO: 80483 - DNA, 523 bp, Zea mays
  Clone ID: MRT4577_17341C.1
cccaccggccgcgcctagaggctcccacatcatcggccggagagccacaacccatcccgcggcgagagacacatactcacccaaaagaacaatgagaagcccggcgatcgcaccccctgaactagacgagcatactgaagcaaaactccaacggaggaggagggggggaaaggcgggatggcaaggacggaagccggcatgaaagcttcgacaacgagggcaagcagcagggcaaggaaagctgaccctaaccaacagactctccggcccaacagactggagcagaaagaggctacaagaccggggcaaaccacgccaggcaagacaccagcaaatgggcctgcctcgagagagaagcgtccgaacgacaaggaagcaaaaagagacaacaaccgggaaccaaagactacacaaaagacagagtggaacccacaggcaatagggaggaacctaacccaccttgagcagaagatcaagcaggaagaaggatattgagcagaacatgagaaacccgagagaacca

SEQ ID NO: 80484 - DNA, 895 bp, Zea mays
  Clone ID: MRT4577_173420C.1
gcgcgtgcgccgacagctaaaactcctgggttcctctttttcctccagagatttccgtcccgtccaccagctccaagatcccaaccatggtggccgcgacggcactctccttctcctttctgtcactagcaacgacactcttccttctcctcctgcgcagcctcatcaacaacaagaagcgccactgtcgcttcccaccgagcccgccgtcgtccctgcccgtcatcggccacctgcaccttttgaagaagccgctccaccgaacgctgtctgctcttgcggcgcagcacggccctgttctcctcttccgattcggctcccgccgcgttgtccacgtcgccgaccctgccgtcgccgcggagtgtttgagcacccacgacgtcaccttcgccaaccgcccgcggcttccctccggccgctacctctccaacgactacaccacgttgggctcgtcaagctacgggcccaactggcgcaacctccgccgcatcggcaccgtcgacgtcttctcctcgcatcgcgtcctctgctccgcggatgtccgcgccagcgaagtccgtaacatggcgcgccagctcttcaaggccgccgccggggccgacgcctccaggcccgcgcgctgcgacgtgaaggcacgcgcgttcgagatcgcgctgaacaccgtggcgagggtaatcgccgggaagcggtactacggcgacggctcggtggcgtcggaggaggccgagcggttccgtgccatggtccgcgagtacttagcgatgcacggggcatcgaacctgcaggacttcgtgcccgtacttgcactggtggacatcggcggcgtgaacaagcgcgcaataaggctgtccaaggcgcgcaacgagtgggcgcagcggcttatcgacgagcaccg

SEQ ID NO: 80485 - DNA, 391 bp, Zea mays
  unsure (1)..(391): unsure at all n locations
  Clone ID: MRT4577_173421C.1
ggagcacaaattaaaataaatacatatagccctacgaataacgatagctagcaaggcaacaacatgcatgccaacgtacttttgatgatgatgctcatcaactttctacagggcgcgcacagtacgtacgtagattgttattagggcgctcacagcttctggaggacatcaagcatgacttggcgcggtttgcacatggcctccagcggaacggcccgcgggagagtgagcccgccgccttgggtcatgtcaactttgggagcgcctgcgccttcgaccgggccccactcgaagcactggatcatggtccccagggccagccccatggtctgcagcgccatggtctctccggggcacttgcgccgccccatccngaacggtatcaggagcc

SEQ ID NO: 80486 - DNA, 823 bp, Zea mays
  unsure (1)..(823): unsure at all n locations
  Clone ID: MRT4577_173422C.1
ggttttcttccttcgctcgccctgtctgcgctttcgctttcctttcgcctcccaccaccaaaaagaggagcagaggagaggtttgtgtgacagcgtgagcgagcgagtgatgattaacacctcagccggcagacagccgccaaagcagtagcgtaagaaagagagttagtagagcccagatcgagggagggaggagtagcaccgagcacgagcatctccactccacgcgcgccccatgcccgtccgctccacctccatgagcgtcagctgagcaagacaaggaaggggaatctctccctcattcgccttgccgtcttgatctgtcggctcccggcggcaacaccctacaggtttcatctatggggcaagatgctggcttcaaacgcgaggatcattctggattgggatcaggtcctcaaactttgaaggtctcctgctgcactagtgaagaaaacgagagtcgaaacagaagataccatcagttgaaatgctcagagagcaactcggggcagttgcacctggactacgtcccaaatttccactgcaggagcttgccaacgagaagccgcaagacgaatgctgagcaaagcaccgtggggaagcgtggttctatgtaccagagctccagcgaaataagcagaatcagaaagatccaggagggcaggaggaaaatagattctgcattcgatggggacgcgttcctgtcctttgatattgtcgatgcatcctctcgccctagcancagtggagcttatctgcattccatcagaatcggagggtcggcgctagccctctgtggacccgctaagcgagcgtcaaagac

SEQ ID NO: 80487 - DNA, 427 bp, Zea mays
  Clone ID: MRT4577_173423C.1
attttgatttgagatttgatagaaatgcatgctctacttggttattttatacatcaaggcagggtctaattcatgttttaaagcacattgtttcttctggttagtgtaagtacttgtgagaacatacccttgcacataattgttgtttactttagtaaccaacgtcctgaaattaccactgtataacatgtccatgtatagagcttgaaatcaagaggagtgcagtttcctggacgttcagattgcatatatgttcttcagttgcatttttggaatattccattcacatattacatatgcatttttagaattgtctacaagatactactgcagatatgtccaccatggaaaagattaatgatacgattttcggagctaagaatgttgtgaaggagcttattaaaaaggcacatgataagcatttgga

SEQ ID NO: 80488 - DNA, 487 bp, Zea mays
  Clone ID: MRT4577_173424C.1
ggccgggcttccgttccgaaaccgcactcccgcgctctcgcattcacgtctctatcccgcgcgctcgctcgccgtcttgccgaaaccctagaccacgccgggccggcaccgatcacggaccggcgccgtccgcggcgatggcggcggcgcggcggatcgacctggccgaccgttggcgcaggatgcaggaggacgaggacgccgatgacggcggcgagtggtccgccgccaagcaccggcgactcatccgcgccaaggaggagtggttttcacattgctatacctttctgataaatttaccaaaagaagatcatatttggtgtggatatgctgatatcatgagccccttcatggagacattccatggcttctttgatgatgaagatgagaactcatctctttgaataatgcggacaagagttttccgagaaatgggcatttggacacaatgtgtatgtgaacactaccaggcacaaagatttttcaa

SEQ ID NO: 80489 - DNA, 288 bp, Zea mays
  Clone ID: MRT4577_173425C.1
caaggacagcagcgggcagcatgtggacgtgagccccagcagccagcgcctgcagctcctggagccttttgacaagtgggatggcaatgacctggaggacctgcagatcctcatcaaggtcaaagggaagtgtaccactgaccacatctcagctgctggcccctggctcaagttccgtgggcacttggataacatctccaacaagctgctcattggtgccatcaacattgacaacggcaagggcaactccgtgcgcaatgccgtcactcaggagtttggccccgtccc

SEQ ID NO: 80490 - DNA, 205 bp, Zea mays
  Clone ID: MRT4577_173426C.1
attcggctcgagcgccaacatagtttatttcctgcacggaaagactgcctatcgggggggttttttggaaatttgtattgaaacacaccctgaacctggtacttcccttctaactacaaggactgggttgggctatacctcaccgtacccgcactgtgaatgggcctgcccaaaggcagtgcagaccacatgaagactgattaac

SEQ ID NO: 80491 - DNA, 231 bp, Zea mays
  Clone ID: MRT4577_173427C.1
ccgggggaaaaagggaaatgtaatggccaacaggcccctgcaaaaacccaggacagggggggggccggacgattttggaatataaccttgggccaggggctgggaaaaaggagggccaaattttggaagccaggggttgggaaaaaaccggggggaatggcaaaacgggcccccgcgccgatgggggctggggccctccctttggccataaaaaccccaaaggggggggtc

SEQ ID NO: 80492 - DNA, 333 bp, Zea mays
  Clone ID: MRT4577_173428C.1
tttttattttaaatatttgatatgaaccggcttcaaaaaccggataagcgctgtccaacaggcggggacctctttttttaaaactaccgggttttttaacaccaattgctgggacaggaaaacactatcagttcacatattgatttcaaaaccagggggggaacaaggactgaaacctaggcggtgggttccagggcccccccagctgccttggtcttattgtaggcgaactttgagatgagcttggccttggcgacaatgggctttggggggaggaacccctttccgagcaccttgaagtaacctaactgggtgaagttctactggggggcc

SEQ ID NO: 80493 - DNA, 900 bp, Zea mays
  unsure (1)..(900): unsure at all n locations
  Clone ID: MRT4577_173429C.1
cttaaaaaaattttttttattttttgaatgttctatgcgtagaaactaccatttgcattgagaagattagtttctataaatggttccttgactaggtggcagctatggaaaccacggagcagagttgggagtgctcttacatacatcacatccgggccttctttcctcgcttcctctgcgcaccgaaattctcgctgacggtgattcggcagaaaaaaaaaactgacgggtagcgaatctgttctgttctacgcccatttggcgagcaacgacatgagccccgcgccgaggaacagggcgacgtacgccgccagctggagcttggcgttcgtctgcagcctcgggttgctgaagtccgcggcgaggagatcgaccagggacatgtacaccaggatccctgcggcggccgcgttgaagacgccctccacgaccagggcggtggcgccgtgcctgctgtagccggaagcgatggcgatgcccagcgcgatgcccgcgggagcggtgagcgagaagaaggccgccatgaccacggccgccctcgccttgaactctgcctgaacaatgcagccgccaaggccaatgccctcgaagaactggtggaagctgagggctccgacgaggggcctgatggtggacggccgcagggaggcgcccagggacacgccgatgatcaccgagtgcaccaggattcccagctccagaacctgagagatcaccctgtgcctgatggacacggcgacggcggaggcatcctgaggcgaggcaccggcgtggccgtgccctccgtgggcgtgcgtgtgcgcgtgcacgtggcccgcgggctcggcgggggcgccctcctcgtccgcgggcgccgcgcggncctggcctccgtcgacggcgtcgtcgtcgacggggcgc

SEQ ID NO: 80494 - DNA, 252 bp, Zea mays
  unsure (1)..(252): unsure at all n locations
  Clone ID: MRT4577_17342C.1
cctcgagttttttttttttttttttttttttttttttttttttttttttttttttttttttggangacagtagcagtttattgcaagcaggtcgatgcagcaaggtaaaacagaggcttagcttattcttctagggaccaagagaggcggcgtaatggcggacgtgccctgtttcatgcgttncacacgcctccctacgtcgnacacacgccaacaacatactgacgcacgcgtgtaatggtgaacccactg

SEQ ID NO: 80495 - DNA, 362 bp, Zea mays
  Clone ID: MRT4577_173430C.1
tttttttctttttttttttttttttttttttttttttttttttttttttttttttttttttgttttttttaaagcaaagggtttctcctgtagccccaatccaaaatgggcttggagaaactgttgggggggcaatgtgttaaaaggaattaatttttaatgggaccacccccttcttaaagggggggaccttgttggatattattggataggttattttttgcccagacagaaaagatcgggggtccctcaaacaaaaagtaaacccccttgtttatcgccccctagggccaaaaccccctacttgataaatagcctaagaagcgctcttgaaaaaaaagaaattgccttttttttggagg

SEQ ID NO: 80496 - DNA, 605 bp, Zea mays
  unsure (1)..(605): unsure at all n locations
  Clone ID: MRT4577_173431C.1
tactaaacgccgacaataagctcttgagaaaaccttttagatgctaacaacgtattacaccttttttaaggcacatatgattcaaatgagagcgaactctaaagaaataaaagaacaaataaagaaagaatcaaaacagtggttccaccttttaaggtgctagaatagatacatcctatgtcctcctttttgtaatgaaactgagctgcacagtgacctgttgtctaaaccacagggcattttttttgatatgctgcaaaacctgaatttcttgntgcctcttgtaacttcctgatccatccagtaagacatattggtttgaagatactggatcaagggaaagaaaatgacccaccgaattgtgagttggcagcttgtgatggaggcttgattgcaatccagagcagtgatatggtgatggagacgagtccagaccagacatacacaatagtgggcgtccttcctctccttcccatgagccccttggcaaatggatacagatgagcaagcacccagaagctgaagaacactcccccaagcagcttgctccattgcgggattgngctgtagatcgtccggctgaagccaacagcaatggccacaag

SEQ ID NO: 80497 - DNA, 777 bp, Zea mays
  Clone ID: MRT4577_173432C.1
gtacgcctgcaggttccggtccggaattcccgggtcgacccacgcgtccggctgagcattcggcggcatcatggatactgacttgtatgatgagtttgggaattatattggaccagagcttgattctgatgaagatgatgatgaactgggaagagagacaaaagatcttgatgaggatgaggacgaggacgaggatgacgtgggagagcacgaggatgaccaccccggcatggaggtggtgctgcatgaggacaagaagtactaccccacggccgaggaggtgtacggtcccgaggtggagaccatagtccaggaggaagacacccagcccctcacagaacccattataaagccagtgaaaaccaagaaattcactctgatggagcagacattacccgtcacggtgtatgagatggatttcttagcagatctgatggacaactctgagctcatcagaaacgtaaccttgtgtggccatctccaccacggcaagacctgtttcgtagattgtttaatagaacagacgcatccggaaatcagaaagcgctatgaccaagacctatgctatactgacatcctcttcacagaacaagagagaggcgtcggcatcaagagcactccggtgacggtggtgctgccggacaccaagggaagtcttacctcttcaacatcatggacacgccaggtcatgtgaatttttctgatgaggtcacagctggcttgcgcatctcagatggagtgggccttttcattgatgctgctgagggggtgatgctg

SEQ ID NO: 80498 - DNA, 213 bp, Zea mays
  Clone ID: MRT4577_173433C.1
ctctggcctcatcctcaccgaggagacgaatgacaaggtggagatggagaaggagcgctactcgctgggactgcccttctactgcggcagacgtggagcctcacacctggccccccgcccaggccgacctcacggtgctctacctgcctgaacacctacaccgagcacagacggggaggagcacaccagacttgcaggctacgacgagccaga

SEQ ID NO: 80499 - DNA, 317 bp, Zea mays
  Clone ID: MRT4577_173434C.1
tttatttttttttttttttttttgttattgattgtttatttttttttttttgaaatgacacttcttgaattttttattttgatttctaggaaggaaaacaccccctggggagggaaagaaattatgggagctctgaaggaaaaccaaagacgtgaccttgtggtttcttccgaagaggcggaaaaagcccccaaggggaagagatctctgcacaaaggggtgaaaaaaaaaatttttttcaaaaaaatttctgctagaaccaggactatctttctgaaaaaaaaaaaattttccccactggtgggggggggattcct

SEQ ID NO: 80500 - DNA, 601 bp, Zea mays
  Clone ID: MRT4577_173435C.1
ccggccgggaccactccacaaaacttccgtcgtcatgttaactgaatggcttgttcgcgctctcttcgcaaacttggctgttgccagcaaaattaaacccgcacccgccaatgcaaggttcaccacgctggtcacctttggcgacagttatacagatgaaaatcgcctaggttacttcatcaacaacaatggctccgctccgccagtgggttggcagcagccagtgggcttgaaaacagcatctggaggacggtcttgggctcgattggccagtgactactctggcgcaaagctctacaactatgctgtctctggagctgtatgctccaacaaagtatctccaaggcccctcgccgccatcaatggccctttccctgacattgatggctatgaagtacccgctttcatcgctgactccaaatacgtcaacccgaacggcaccaaattcttcactggcaaagcctcggacactgcttatgccatctggattgggaccaatgatctcggcaatggcgcctttttgaccgataaacagataccccgcaagactgtcattgactacgtggactgcatctacgaccaaattacccgtctttacaat

SEQ ID NO: 80501 - DNA, 307 bp, Zea mays
  Clone ID: MRT4577_173436C.1
cttctttacatttgtttacattttggtttttcttcttttttttagcccaaaaacaatacaactggccctatgaccaaatggaaacattgccatccggagaaccagacaacccattacaagacacgttgataaaaaatttgtcgaaacataagccagactcaccacatgaaccctaaaattaggaactatcggataaaaacccaaagcccatgccaaaggttcccagctcgacagttaacttttggaaaccagaacgtgttcaaatatctctaactggttagatggattacaaccccccagataaaaa

SEQ ID NO: 80502 - DNA, 386 bp, Zea mays
  Clone ID: MRT4577_173438C.1
ctcacgcgtgcgagaagaccttagaaatacagagtggggtacatgcgatcctgagactggaaggaatagtgttactgcatttacagacccaactgcaaaggaacaccgtcatatcctacatacagaaaatggctcaaaaaaactcacgataccttattcaattgcagggcacatactatacaggtctgtaaagctctgatcagagcgcgctgtattagagccgagtgagcgaccatgtctcctgcgcaatgtcgtctaggatgagcatgttttgctgctggtgcgtgaccagaatgtgtacctccccggcgttctgcgtctgcatgtacaggcaccacaagacggattcggcccacattatgtagctgaccttctagagcactatg

SEQ ID NO: 80503 - DNA, 414 bp, Zea mays
  Clone ID: MRT4577_173439C.1
ccgtctggacgaggctgagcagctggcgctgaagggcggcaagaagcagatccagaaactggaggccagggtacgtgaacttgaaggagaggctgagactggacacctacgtaatgctgaggccgttaaagggttaaggaagcaccacagaagagtaaaggaactcacctaccagaccgaggaggaccgcaagaacgtgctgaggctgcaggacctggtggataaattacaggcgaaggggaaagcctacaagagacaagcagaggaggctgaggaacaatccaacgtcaacctggccaagttccgcaagatccagcacgagctggaggaagccgaggagcgggccgacatcgccgagtcccaggtcaacaagctgcgggtgaagagccgagaggttcacaccaaagtcataag

SEQ ID NO: 80504 - DNA, 155 bp, Zea mays
  Clone ID: MRT4577_17343C.1
ctaccatcaggttagtattggtaggagctgctttcatgaattgatttaaaacatgatgcgaaacgtgacttttgagtctgaactgaactatccattttgttttaattgatagcagtttctgctattgatttagtttaccattgttgatacttaaa

SEQ ID NO: 80505 - DNA, 359 bp, Zea mays
  unsure (1)..(359): unsure at all n locations
  Clone ID: MRT4577_173440C.1
attcgcattcgcgacgagagaacgaagaaaataaaaatccccaatccctccgcccacccaccactgctccccgtcctcccctcccagatctgccgggcacggccctcgccggcggcgttgggtccgcgatgcctcggacggcgcagggggcctcgcccctgctccgcgacgacgccggcgccctcctcccctccgccatctgctgctcccaccgcctcaagccctggtcttggcaccccaatatccactcctcctagcgcgccccaaacctgcctgccgtccccttcctcccccctcccttccctcccccttcctccctcctcctcccctaactaaacttttcttgttctggtcnctgt

SEQ ID NO: 80506 - DNA, 2947 bp, Zea mays
  Clone ID: MRT4577_173441C.1
aaaggcccaaaaagggcaactcacccaaaagcccgcccaaacccaatggcaggtcccagcaaaaagtcccttccaaagcagataatgggccgccgtctcttgatcccaccagggccaatctggctgatcacaaaagacagtcatcaccctttaccgcacgtagcagcccagtattcgagattaaatcctgaatttgattgttaaaagatatcatcatatcaacgaagctaggccacaagactagcctgatacactgtgatgcctgcaccacttaaggtactactttcctgaagaaagtcaatttgctgacaatgcaatgaccattcccttgcctattcacatggagaaacttgatgttcatatagaaataaatatttctagacacttcaagtaataaaaatacaaaacaacttaagactacgtatgaatggctcaaaataatcattagtcacaaagctgaaaatacaccgtgacctaacttttttaattgtggtctcacagtttgatgtatatagtgcaaaatttctttcaatctttgcttacttcaacttctttctataaagtggacataatctaactttcgaggcacatgccctagaagatgagatcttttcttcattgcatgaattcttgagaacctttatttgaattctagtgttaatttcttttcaattgattttctccctgctgatatacatgcttataaagaaaaataaaattatttctttttcacttatatatgtttaaccttttcatgagagcagctttatatattcacgatttcttgttgggttgccaacgttatgtttatattgaccaactttattaggacactgcattctggtatttggcacttaacagttccactttgcaggaagaaaggttcagattgtgagacaaaggatatatgtaccatatcactgctcctctatcaagcatcagttctcattatgtatatagttttaccattatgacatccattttccttatcaaatgaatatccattttatccctaggaagaatgggataactgttagtattaattaggtatgtgatattcgtgaaaggcactgtgactttactacatgaatatgctcaaatcactttaatataaaacccttcatataacacatggtaacagaactgttacttatatttcctctaaccattctagacgatttaccctacaatctttcagttccttcattaatacttttcttttcaattcatgcctgtgttcttatacaacacacaaatgactacttatgttttatagctccgtctagtttagaatcgtagaatttcctgcccgtgcaagcattagattgttttttggattggttaactaacagttatcgataattatttgttgtagtcactgttgttttcttttttcctttttttacttgattcaaggactgctagtggccgaagggcactgcctcctccttttgcttttacgtgctgcaagaccattgttatgtatttcatgtttattattacttcgaatacggctagaatacaatgtttcagcttaatccatggaaggtatggtgatggattactctcggttgtgattaatcttgtagcacgtcctttactaaatattgtgtttaaatggcgaaggatgatggagatacaatgaacacgaaagtcattattatttttagccttggcgctatatgtttgttagcagaggttacatgattcttctttcggaataggcggaaaaatgagagccttcactgttgtttatttagtagaggttgagatcgtatttcaaattattaagaacactattgttttagattctttcacatattcatacgtttgaaaaaaaaccgcattctccatgatgttttggtcatagagaatgtaataaaagtccattaaatagcattgatactcccatactatagtattttcctttgtgttgaggattaatgcaaccacagtgttgtggtttgaacactaatcgagaaggcctctttactgttgtctaggattcccatggacatgtggttgtccattacacagatgttgatacaaatgttcagctcctttttaggtaccgttgctcatgttgcagcccgaggttgtagctacacaggaacacaaattcagatataaacagtttcatctcagatgacacaacaacagccgcaatattttgctttgacaatattgctaaacatattcttggaaaaccttgtgaaccctgatgtcgtgaacacctttatgcagtacatagctaatgtatttttatgatattaatcatgcccctaggacatgttgctacaacagacccttttgcatgtatgtataggactataggtgatagatcgatatcttaggctactaataaatagacttgctagaaacgtacttatattgatgagtacaatgctgcttggaacatgttgaactaatctgattaatatatttttgtatggctttgaagataaaagtacaagcgtgaagcacgagccagtacaagtcagcgtgaacagtacgggggtactgttcatctatttataggcacaggacagagcatgtgaggaattacagttatgccctttacatttactattgacttatagaaaaatctatgaggactagatagccttttcctctttaagtcggttcctttttccgcgattgagccgaagctcccttgcgcatagcttcggagcaacgacaaccttcgtcatgattatgctcttctcatcgggtatgcttttaacctgagtccgaaggcccctgtccataagccatgcttggaagacattgttaaattacgtttttgaggaccttcaaaggacgaaggccccaacatatagggtgtttggtttaatgaatgagctagtgcatcatcttctcccttctcaaaaacaaaaaaaaaaaaaaaaaaaaaaaaaaaaagaaaaaaaaaaaaaaaaaagcggcc

SEQ ID NO: 80507 - DNA, 313 bp, Zea mays
  Clone ID: MRT4577_173442C.1
gggggaaaaaaaaaaattttgggggttaaacagggcccggtttaaaaacctgccaaaacttggggggggggggtggccaacccccccctggggttttgaaacttacaggtaccgccaccatttgggggtcttcctcctacacggtgcccccaaaacaaaaaaatttttggctgtaaaatttaaaagccctttacggccctgggccctttattgcctggggggcaaccatttcaatcgttttccttggggcccttgctcggtttctcttgagcttgtgggaccgggccaatctcctttttaaaggtttcctttt

SEQ ID NO: 80508 - DNA, 241 bp, Zea mays
  Clone ID: MRT4577_173443C.1
gcgtgcgccacgcgtcggagcggccatctgagattttattttgttggatcaacatatattggcggcgaaagttgggaccactgagcgtctatgcctgtgagataggatgcgcctagctgttcggctgctagaaaagttggtgcacccacagcatttcctgagagggaaaaaaaagcctactgctcactttaacaggtcaacagcatcgttacctgcctcttcagcaggtcaacagctttta

SEQ ID NO: 80509 - DNA, 378 bp, Zea mays
  Clone ID: MRT4577_173444C.1
acaagcttttttttttttttttttttttttttttttttatttttttttttttttttttttttttttttttttttttttttttttttttttttttttttttttttttttttttttttttttttttttttttttttttttttttttttttttttttttttttttttttttttttttttttcttttttttttttttttttgccttacagagtttgtacctttaggccaccgaattaattatcacttctatgaagtcattctttcttgacctcctcagccatatggtttactgggtaccttcggacaactttatttacatgactcctataccctgttgagaaatcatgaccataatcagcacccagttttatcataaacaat

SEQ ID NO: 80510 - DNA, 419 bp, Zea mays
  Clone ID: MRT4577_173445C.1
ccggccgggaaaaaaagccacaaaattccggccgggaatctatctcgagatctaaaccatcccgcaacccttcgagctttcggccttcaaccccccaacaacgacaccatgtctcacgaaagcgtctggaactcccgcccccgaaactacggcaagggctctcgcagctgccgtgtctgcaagcacaaggccggtctcatccgaaagtacgacctcaacctgtgccgtcagtgcttccgtgagaaggccaaggacatcggtttcaacaagtaccgataaacgatccaccatcatgacacccggttttctcgtttaagggatggggggaactgctagagagcagagtattatgtggaagggggtgaactctcagcagaaagtcaaaggcctcgcgttaaaaaagcactcggagggcggcc

SEQ ID NO: 80511 - DNA, 597 bp, Zea mays
  Clone ID: MRT4577_173446C.1
gcatggcacaattgtgcaatgatatcgtacctgaattttcataatgtaagccacatgaaacggatgtgcactattctatgaacaagaatatccactgttaacagaattaaccttccatgaataactgaaactagaaaaccggcagaccgtattgtatctagttccttagtagtcattttgtgagtccagcatgcattaacttgcccttcaaaaccacaattggattgcatccctgttgacgatatgcccttcacatattcctgaaagcaaatacagtacagatgaaacttcagtgaataggttgctgcatgcatgttgtcttcattttagtgtgtacctactcatatatgtttatagttgaggggtatgcaaaacacagaaacatattcacaacagaaagccctgttaaggaagaaccacatcaatagatgaccaagtcaaaatcacataagcccaggttgtggaacaaatacaaatatgtttatattctaaagagggtatgcgaaggaaaaacaagaaccaaattcacaaaagacatgttcaaaaagaatcgcaacaaaagacgacctagccataatcacataatcctatggtatg

SEQ ID NO: 80512 - DNA, 454 bp, Zea mays
  Clone ID: MRT4577_173447C.1
agccgcccggtacttccgggggcgcacggacccacacactgttacattttctggggcgccccccgaaccaccccttacccaacctctaaatcccaaaccgtatgcaaaaacattgcacatttgtgtaaccctttatgaccctcatagtgcaaacaggccgcaaagaacagatggcaacgcctgcatagggccctactggagcagctgaacaagatagagcagaccgaatgcgcagctcactagggggacatgaaatttaagaaacagtggaaagaggtctttgtggatcttttggctagaggggataactaagtcgggagcacgacgatcagtgaagatggcggcgaagcacgcataaaggacgctgctatgatgcttgaacccgaacctgtggcacctgagaccgtgggtttaacagaggtcgtgcaccctaaaagaaactggcatatcattg

SEQ ID NO: 80513 - DNA, 653 bp, Zea mays
  unsure (1)..(653): unsure at all n locations
  Clone ID: MRT4577_173448C.1
gccggccgtctctagctggtggctctcgntctggttttttatcaaaagagaggtgggagatgattgcagtgcgatggctgatttgacgtgtaataccaccctaaactgtggctcgttggatcgcatgtcctgccgtagataatagcatctcctgtaaggatggagactaagaaagtgaagtctggccctgctctgataatgaggagagagcctgataacaaatagatatctgagaatcagcggccacgactcatactgagtgaggctttttaacccctgagccaccgaggacaggagtgattgattggcttaaggtcaaagaacccagagcctgagactttcttggcaagtgactgtgcgaggaagaaggaccagctgaagcaagaggatgatctctacagtgagaaggactccaagagacgatggattcctgagggtgtgggatacgtatgtccccgtaagaatttgctgatgagaagcggagagggcagggcccagctccaaaccggtgaccgtcaatagtggaggtgtgggtggacgaagactgcaaggacataaatatgtattgctgatttatacctgctgcccagagagcttaggcagcagatattcaatgagactgcngcaatgtggatggctcacggagggatcgc

SEQ ID NO: 80514 - DNA, 169 bp, Zea mays
  Clone ID: MRT4577_173449C.1
gagctttgccacgaggcttttcaacatttttgtcattggcaatggctatataccttggatttccctgcccaggggtaagggcattcgacttactgttgctgaagagggagataagaggctggccaccaaacagagcagtggctatattgcagtatcagcatatcttttt

SEQ ID NO: 80515 - DNA, 472 bp, Zea mays
  unsure (1)..(472): unsure at all n locations
  Clone ID: MRT4577_17344C.1
tgggtttttgttttttaattttgtttagtttttttnntttttgttgtgtgtgtttgtttgttggtttttgtattgtttttattatatttattgttcttgtttgttactgttctgttttgtttgtttgtgtttccttatttttcaataaattccacccctgggcgaaccgggcacaagttttctaaccgcggacaccctaatcacggggggggggggggggggggggcgtaagggggaaggggggggcgcggcgtcggagacgggcggagggggcggccaagggaaccagcagggggggacaaaaagggggcgaacaacggggccacaacctgaggcacggggggccaagagggcggggccaaacggggcgggccaaagagccagcgaaaggggccgcggaaatattggggacaaactcggaggaagcgcccggagatagaccctccgcccccgaccccccgcggaaagaccg

SEQ ID NO: 80516 - DNA, 1121 bp, Zea mays
  Clone ID: MRT4577_173450C.1
agcatctgacagcaaggggtcctgatttctgaacctgatggcaggcggtgagacaactccctctggaggcagcgaggacctccttgacggcgcccctcgacggcgtaccggcggttccacctccatttggcggcgcgcggggggcagcacctcctttgggcggcgtgcgcgaacaagagccgcagccgctcccgcttgtctttgagcggtcaccgaatctgaggtctgagcccagcgggccgcggcggctatgtcctcatcctcctccttccccaactcccgcttccccttcgcagccggcgccggggcctccggcggaagcgggagcagcgtgcggccgtggggttcgagcggcgggacatcggtgtcttcatctgggaaacggatacagaaggagctgctggacctcaacgcctccgactgctccgcggggcccaagggcgacaacctctaccactggctctccacaatcatcgggccccaaggatcgccgtatgaacgagggatatttttccttgacatagtgtttcctcctgattatcccttcaaacctcccatggtaactttcaaaacaaggatttaccattgcaatattgattccactggtaaagtgcatttggacattctgaaggatggttggagtccagctttcactatttcaaaggtgttattggccatcaaagacatcatcaacaatccagatccatacaccccgcttgtgatgagcatttcacgtcagtatctgactgatagagctaaacatgatgaaacagcagctgagtggacaatgagatttgcaagatagaggattctgtttgtatctaagcacgattgaccttgtaaaaaaatcttaatgtggcctgacgcctgaaatggtgaatgttggcaaaggagccatcagccatgtattatttgatgtgagttgtgacataaaggtgtactttatgcttgagtgttctttaatcgctgcttttaggtggagaataatctttttcgattttgcacttatgccaagttgtacaagcatctattcagaacctgctatatgagtttatttcttgaaaaatggtttttatttaaggggggggggggggggggggggggggggggggggggtggaa

SEQ ID NO: 80517 - DNA, 195 bp, Zea mays
  Clone ID: MRT4577_173451C.1
cccacgcgtccgccctcttcgagagggatgtacatacctggaggtactggattacggaggactcgattgattcgttcacacatacctgcagatgtacgaacccgcatatatttagatcgaacttctataaaaacttctgtccaaacaccgaatgaaaatccatgatatagcttcttattcacataaagtgagaaa

SEQ ID NO: 80518 - DNA, 243 bp, Zea mays
  Clone ID: MRT4577_173452C.1
atccgagaaaaggctggacgatagtgcggccgcatgccatggaactcatggaagtccagatttgcatcgagaagtgcctggagggcgtggatggagggctggtagcctgccggacttgcgctgcaaataggatgcgcactgtcagcctgctctaagtcagggtgtgccagataggtgaaacatcccatcctatgatgtaacccagatgctgacatacgctgctacaaaggccagcagattgct

SEQ ID NO: 80519 - DNA, 858 bp, Zea mays
  Clone ID: MRT4577_173453C.1
ttgggtacctcgaggccggccgggaactccctctggaggcagcgaggacctccttgacggcgcccctcgacggcgtaccggcggttccacctccatttggcggcgcgcggggggcagcacctcctttgggcggcgtgcgcgaacaagagccgcagccgctcccgcttgtctttgccggcgccggggcctccggcggaagcgggagcagcgtgcggccgtggggttcgagcggcgggacatcggtgtcttcatctgggaaacggatacagaaggagctgctggacctcaacgcctccgactgctccgcggggcccaagggcgacaacctctaccactggctctccacaatcatcgggccccaaggatcgccgtatgaaggagggatatttttccttgacatagtgtttcctcctgattatcccttcaaacctcccatggtaacattcaaaacaaggatttaccactgcaatattgattccactggtaaagtgcatttggacattctgaaggatggctggagtccagctttcactatttctaaggtgttattggccatcaaagacatcatcagcaatccagatccatactccccacttatgatgagcatttcacgtcagtatctgactgatagagctaaacacgatgaaatagcagctgagtggacaatgagatttgcaagataggggatttgtttgtatctaagcatggttgacattgtaaaaaaacaactcttaatgtggcctgagatggtgaatgttggcaaaggagccatgtttcgtttgatgtgatgtgacataaatgtgtactttatgcttgagtattatttaactgctccttttaggtgaagaataatctttt

SEQ ID NO: 80520 - DNA, 744 bp, Zea mays
  Clone ID: MRT4577_173454C.1
ccggggtaaagtcccgcagtgacttgccagttgccactgccagagcggtcaccgaatctgaggtctgagcccagcgggccgcggcggctatgtcctcatcctcctccttccccaactcccgcttccccttcgcagccggcgccggggcctccggcggaagcgggagcagcgtgcggccgtggggttcgagcggcgggacatcggtgtcttcatctgggaaacggatacagaaggagctgctggacctcaacgcctccgactgctccgcggggcccaagggcgacaacctctaccactggctctccacaatcatcgggccccaaggatcgccgtatgaaggagggatatttttccttgacatagtgtttcctcctgattatcccttcaaacctcccatggtaacattcaaaacaaggatttaccactgcaatattgattccactggtaaagtgcatttggacattctgaaggatggctggagtccagctttcactatttctaagactccccacttatgatgagcatttcacgtcagtatctgactgatagagctaaacacgatgaaatagcagctgagtggacaatgagatttgcaagataggggatttgtttgtatctaagcatggttgacattgtaaaaaaacaactcttaatgtggcctgagatggtgaatgttggcaaaggagccatgtttcgtttgatgtgatgtgacataaatgtgtactttatgcttgagtattattt

SEQ ID NO: 80521 - DNA, 1237 bp, Zea mays
  unsure (1)..(1237): unsure at all n locations
  Clone ID: MRT4577_173455C.1
acattcggcacgaggccgaatctgagccggggtgtaggcatctgacagcaaggggtcctgatttctgaacctccagccggggagacaactccctcgggaggcagcgaggacctccttgacggcgcccctcgacggcgtaccggcggttccacctccatttggcggcgcgcggggggcagcacctcctttgggcggcgtgcgcgaacaagagccgcagccgctcccgcttgtctttgggagggaacgctggcaacctcatcttctttcgacgctagatttggacagtaaagtcccgcagtgacttgccagttgccactgccagagcggtcaccgaatctgaggtctcagcccagcgggccgcggcggctatgtcctcatcctcctccttccccaactcccgcttccccttcgcagccggcgccggggcctccggcggaagcgggagcagcgtgcggccgtggggttcgagcggcgggacatcggtgtcttcatctgggaaacggatacagaaggagctgctggacctcaacgcctccgactgctccgcggggcccaagggcgacaacctctaccactggctctccaccatcatcgggccccaaggatcgccgtatgaaggagggatatttttccttgacatagtgtttcctcctgattatcccttcaaacctcccatggtaacattcaaaacaaggatttaccactgcaatattgattccactggtaaagtgcatttggacattctgaaggatggctggagtccagctttcactatttctaaggtgttattggccatcaaagacatcatcagcaatccagatccatactccccgcttatgatgagcatttcacgtcagtatctgactgatagagctaaacacgatgaaatagcagctgagtggacaatgagatttgcaagataggggatctaggagccatttttcgtttgaggtgatgtaaaaaacaactcttaatgtggcctgagatggtgaatgttggcaaaggagccatgtttcgtttgatgtgatgtgacataaatgtgtactttatgcttgagtattatttaactgctccttttaggtgaagaataatcttttagattttgtacttatgccaagttgtacaagcatctatttagaacctgctatctgagtttatttcttgnaaaaaaaaaaaaaaatataaaaaaaaaaaaaaaaaaaaaacaaaataaaaagaaataaatggaaaggaaatg

SEQ ID NO: 80522 - DNA, 420 bp, Zea mays
  Clone ID: MRT4577_173456C.1
ccggccggggatggatcccctctccgtgctccgcgactacgctggccgcagcgagctggacaagatcattttctacggcgacgagatccacttcggctgtgactacaccttgccggcttcccccccaccggcttcggctccaagcagtcaggccggccctacccgctctccgatgccgtcttcctcgcgcagaccacgacctaagcacaccacttatgcaggccgacgcctgcgccgatcccgccgtatcgtcccgaccgcagaccttctgatttctcggttgagcacaatcctacctcgcgaaccctactgcgtggtctgccagtcatacgagcactatcttcaccattactggtcgtcgggggaggagctggaagctgtcgatgaagtcttcactattatgcctgtccaagcgcatga

SEQ ID NO: 80523 - DNA, 451 bp, Zea mays
  Clone ID: MRT4577_173457C.1
acattggtaccaatattattatgggacccccgaccattcaacttaaaaatttttgaaaatgcacacttgtacattaaatgcagaataacataagtccctagtagcttttgacaattttattttggggaaaccggccaattttttgaaaccattcgcgaaaaaactggaaactgggagggctgttttaatcgaacaagctgaaacccatattttaataaaacttttcctttttttaaaactttttttccttttttgccttttaaaaagggggtgggccaccgccaggtacaggtggtggggctcccatgttaattgcccccccccctggagggacagaggataacctttcccttccaggtggaatcactttgggtatggccttggctttgagttctgggagcaagaactttaattttttttaattaacttcagcaccaactgattccaaaat

SEQ ID NO: 80524 - DNA, 560 bp, Zea mays
  Clone ID: MRT4577_173458C.1
aataacggtcgcctacagcgctaggtcctctgtggctgttccgcatgtgtctgcataggcgccaacaccagctttcacgtccgcgcccctagcgtctgccgcatgacgatgaaaagcaaccgtcgctcattaagtctcacgcgagaggtcgagaacataaggcttgccaacaactacataagcctccgcgccccatgcctcttcctggatgccaacagaagcagccgtgtcgccacaggcattgggtgcaggccctactacatcgtgcgtgggggcccaggctgctgacatggcatctgctaccgtacccgccgcaacgccaaccgcacctaggttctcctcatttggttgcaaggttgactacgtgctgctcctctgaactggacaggtagatacatctggcgctgcgactcttccacacaatatacattgcactcgatcgactaccggctacgtattagggctggcaccggggactgaggatgctggcgtctacacctgcgcattgatggcacgtacggacctctaatatggcgctgtctctccattgatgaggcaga

SEQ ID NO: 80525 - DNA, 322 bp, Zea mays
  Clone ID: MRT4577_173459C.1
tacttctatatctcaatcagacgcccctttttttatcttatcctaatatcatttactagatttttttaacatgttagtgagccaccccaactcatctccattcattaacatattatttttattttctttcaatcttcaatatcattaatctcaacaaaaaaaacaaaatttcataactattcttcttttaaaatcccaccgttaaaccaaaattattcaacccacacatttaatcaaaaatcaccttcatcatctaaaaactactttaaacaccaaacaacgaacccccctaaaaattcccaaatgacaccactgaacaatt

SEQ ID NO: 80526 - DNA, 390 bp, Zea mays
  unsure (1)..(390): unsure at all n locations
  Clone ID: MRT4577_17345C.1
cgcctcgcctgccgttcccctccacgtctccccattgccggctcccgagacctgtgcgcctgttggngacacatgggccccacaacccgcgctcacttcgtctacaatcgccgccgccgccgccgccgaggcgggcggcacgctgtcgaggaggcttccgacgaggagcagcagcagatggatagctcctcctcatcctccgacgaagaaggagatcaggaagagatgccgaagcctccggagaggacgtcgatgacgaggaagaagaggaagcggtcgctgccgagcctgcgcccaagcagccacccgcagctgcggcggcgggggagaagaggggccgaaggaagggctcgatcaccattagcctgaagaaagtgtgcaaggcgtgca

SEQ ID NO: 80527 - DNA, 417 bp, Zea mays
  Clone ID: MRT4577_173460C.1
aaaaaaagggcaaacgctcattttaggggcagaaaaaacaaaacaggccgcgcggatgtcaatttcccggggcgcactgcataggaaccaacaaaacattgcttgtttcctccccccccccccagggaaacccgaggtatctctccccctcctacagtagttctgccccctaccaaagggagaaaggggagggcaccccccacagggggggggtgaacactccctctccccccgaaagcggggggcaaaccggatgtccttgggcaagatggaaacccgcttggcccggctccctcggaggcaggaaaccttaaaaaggcccggaaggttcgcctcggcttcctcctccctcccccccacgggggagggctggaaccggatgccccaatagaactcctggaccatctcccaaacccc

SEQ ID NO: 80528 - DNA, 132 bp, Zea mays
  Clone ID: MRT4577_173461C.1
tcgctatagagccttcgcgttttttcttctgtcatcggatcggaaccggcacgggtagtagtacgcggctagccttgccactaacatgccttcagtcgtggtctaggtccaggtggtcgacaccttcttttt

SEQ ID NO: 80529 - DNA, 1520 bp, Zea mays
  Clone ID: MRT4577_173462C.1
gtccttgatcccgagactgcctcaaaccacattattcacaggcaaggccatccatatatctcatcagtattcgaagagaagtctgatcgtctcatttgcggtctggccgtccgaagagagtggaaatgatcgctctctccaagatagccctggtgtctgcggtggcgctgctggggctgggctgggcgtaccaggccacccgcccgccgcccccggcgatcttgggcgccccaggagggccgccgatcagctcacctagaatccggctgaaagacggccggcaccttgcctacagggaggaaggagtgcgcagggagaacgccaggttcaggatcgttttcatccatggcttctcctccaccaaggagagcgggttccccgtgtcccaggagcttgtggagcagctgggcatatacatgctcttcttcgacagagccgggtacggcgacagcgacgccaacccgaagcgctgcctcaagagcgacgccacggacgtcgaggagctcgccgacgcgctgcagctcggggacaggttctacgtggtagggtgctccgtgggcggctacccagcatggagctgcctcaaatacattcccaacaggctggccggagtggcactggccgcgccggcggtgaactactggtggccgctgcctgccaacgtgtccagggccgcgtacgggaggctccacgcccgggaccgtaggaccttctggatcgcgcaccacgcgccggcgctgctccacgcctggctcgcgcagaagtggttccgggtgtcgccgatcgtcagggccgagcgcgacgcgttcaccgccaaggactgggagatcctcaccgcgctctggaggaagcagcgcgagagcggcctggtggacccggccaaagcgacgcagcaggggacctacgagtcgctgtgccgcgacgccacgatcctgttcggcacgtgggagttcgaccccacggagatcgagaacccgttccccgacggggagggcggcgtcagcatctggcaggggcgccaggacaagatcgtccaggtggagatccagcggtacgtggcgcagaagctgccgtgggtgcggtaccacgagcaccccgaggccgggcacgcgctcccggacatggacgggatcggggacgagatcatcagggagctcctgctcggcgagagcgagctgcaccaggagcccagggcgcaggatgcctgagcctcaactgaacgtcgggaaaggttggtgaagagattaaactagctactgtagtagatagatactcgcgtataactggagaataaacggtgttggccccaaggcagtggttgatgaacttccagttgctggattttgctggccagtagtttgtcacgctacttattggtccccacatagatgggttaattaagagacgcttcataggtgggttgatgaactcagattcagcaaccttcaaagtttcagtttctattctctgtggaatttatgaccagacggcccagtgctatgaccatttgttttcggggc

SEQ ID NO: 80530 - DNA, 514 bp, Zea mays
  Clone ID: MRT4577_173463C.1
ccacgcgtccgttcaatgataggaggtggtgcgtctggaggtgcaaaggttggctctgatgtaggaggatctgttggtgggggtgctgacgtcaatgctggagctggagctggtgctgatgccggtgtctatactgttgctaagggtaataaggcaggtggaagtgatgctaaggctgatatttcggggggtgctaaagctggtggtgatgctggagcagatgctagcgctggtaccggtgctggtgtaggcatctccaagagtttcacgattggcggtggcgttgcaggaaaggctggcgggagtggcaacgctgaagctggtgtcgatgctggtgttggaggaaaggcaggaaagagtggaaaggcatataccggagctgatgcctgtgtctccaaagacgccaaagttggtggtggcccttgaggaagtttgggaaggagtggcaatgctggcactagcgcttccgtatgtgctggtgttttaagagaccctaaaattggtggtgccttcg

SEQ ID NO: 80531 - DNA, 867 bp, Zea mays
  Clone ID: MRT4577_173464C.1
atggcgacgtcgttgatgagcttgatgacatggtatggccctaggaagcgggacttcagcttgtccgttgtctattggggcagcgaggacggggcgcgctatcgtagacaaaggagcacccagtcaccgaccgtgctcatacgagcggatggagggtgggtcatgaccgtataccacctagaacgacgtctcccagagcgaggactgcttagtgccatgagtcgcatgagctcacaccataatgtcgaggtgaaaatcgggtcgcggtcggacaccatggactgtggcatgccatggagacgcacaatgtcggtgaagaaggcctgcgccactgactcggcgatgtacatgtgtccgagggcaatgaagtggcagtacttgctgaagtggtcgacgatggagaggatcgacgacttcccgttgacatggggaagtgcttcaacgaagttgaggctgatgtctatgcagatgatggacatgcctgaacaaagtcttgcacaaacacgatgcatgttgggaaaatggaagtcatgtcgcagccggtgtagggtgcgctggacgccctcatgtccatcttcatggagaagctgccacaatctcctgcagaagggacgaggacagtgggatgtacagacacctgttgtagaggaccatgtcttcggacactgcccatggagcagtgcgtgtgcctgtgttgacttcgtctttgatggtggccagggcgagatcagtggcctaggtgtggcagatctggctgatgaagtcgacgcagggtgccaagatcgtcgtagagcccccgtgctatcctcttcggtgtctcggcgtgagagggcatatgctactgtcacacccggatttaagggataa

SEQ ID NO: 80532 - DNA, 1918 bp, Zea mays
  Clone ID: MRT4577_173465C.1
gggaaaggccgagttttagctccggttccagaaaaaaactcggaaccagatctcaaaccacacaatccacggctgctccttcgctggacaccgagaaaccgtcaaggcgcaacgaacgaacttgcagcaaaatttcccggagaccctcgagcaaaaatctggtctggttcaaactcgccttttgcctgcgggcggcgggcgttcttacgggccatgtcgcagcgcgacggcgacctcaccggagctcatccggaagaaggagaccgccacgccgttcgaatggatggctccgacgacgatgagctggaccaacctacgagtaaagcgactgagcacatcacggctatggacgtgaggaaggggaaggatatgcaagggatcccctggaacgtgatgccgactacaagggacaagtacaggcagtcacggctgcaggggtacgccaactttgagaacgtgcctaattccggaaggctttctgagaaggaatgcatgcctgcagagaaaggccaactctactacgagtttcagcacagcacgaggtcggtgaaaccgaccatccgtcatttccagttgaggaatttagtgtgggcaacaacaaggcacgatgtgtatcttatgtcaaacttttctgtgcttcattggtcggcaatgacttgtaagaagcaagaagtcattaatcttctaggacatgtgacaccgtgcgagaagcaccatcggaattactacgaggggttttatcggactccagtcagtactttggcggtgaagcataacttgcttgttactggtggatttcatggggagataatatgcaagtttctggatcgtcaaggagtaagctactgttgcaagacaacaaatgatgacgacggtattactaattctctggagatatttgagaagcctagtggttctctgcacttccttgcgtcaaacaatgattgtggacttagagactttgacatggaaaaatttcgaatatgcaaccacttccattttgcttggcctgtgaatcatacatcgttgagcccagatggtaaacttgctgctattgtgggggacagtcctgatggacttctgattgacgctaattcaggaaagacggttcacaaactccatggccatttggattactcctttgcgtcggcatggaatccagacggccgaacattcgccacggggaaccaagacaagacgtgcagggtctgggacgtccgcaatctctccagatcagttgttgtattgggtggcaacatcggagccgtcaggtcgattcgctacacgccagacgggaagttcatggcgatgactgaacccgcggacttcatccacatcttcgatgttgagagtgggtacagcaggaagcaggagctggacttctttggtgagatcgcaggcatatcgttcagtcctgacactgaagctctctttgtcggtgtgcatgatcgcttcttcagctgctgcctcctccagttcaatcggcgacggttctactcgtaccttgattcaacactgtgagcttgtgctggtgtagacctgtgaggtcgacatcacaggctgtagaagcaagaaagttgtggctaatgttcataggtgttgctgtgaagaaactggagaacggtgcgtttacttttgctgaacaagctgtagatattcagcgacccatcttttctgggtgatcagagtttaagattcccgctttctgttatctctatcccatacttacaccgtacgactatgattagatcatcctatcctacgggcgagacgtgagtgatgctacgtaattgattgagacctgctgagggctttgctttcacatgcatgcatatgtaatcatcgatcatggaattgctaataagctgtctgtttgaaattcaaaaaaaaaaaaaaaaaaaaaacctcgtgccgaatt

SEQ ID NO: 80533 - DNA, 336 bp, Zea mays
  Clone ID: MRT4577_173466C.1
ggggaaaattaaaagcggtttacccatacccccacaactagtaatatgacgaattcatcaaatgcaaaacattaaaaaatctggtcaatacctacatataaattgacaggtaacaggaagccctgttccacacatttattggcttaaaggtcgcctcaaccaacaacactagcaggcataccgccagccacaacattacttattgtaacggtagctggggaagcagctccaacggcagaattaatacttaaacagggaggcgggcgaacacaagaaactcccctattcctaaataacgtggcccaaagtacctttttgtcaaaaaaaccaggttct

SEQ ID NO: 80534 - DNA, 343 bp, Zea mays
  Clone ID: MRT4577_173467C.1
cactgttagtgtctcgcgtgcacctttatctcttcatcggtagatgttgtcgaaatagtgtaaatgttactggtgctctgttgtgcttctctaaattcaataatatttgaattggggggggggggggcacgcttgagtacgccaagcttatagtcttgtctgcttgacttgaacgagtgctactgatgctagcatatcaggctgatctgacgcatacaaaagctatccgactatgaatcccaaattgctcatcgcatctcgccaacttatgaaattttacaccacagctatgtgcaaggattttgacatgtagtgctgatgtatgatcctccgtcatttgcag

SEQ ID NO: 80535 - DNA, 1454 bp, Zea mays
  Clone ID: MRT4577_173468C.1
gcacgaggttcagtaaaccctacgccctgcggcacacacccatctcgccgcgccgccgcgtaaaccccacccgagcccatctcgccgtcgcgcctccccgccctcgcgcaggcgcaacaatggcggccgcctcgaggggcctgctcgcgcgcctccgtgtcctctcactctccggcggcgggagcccgtggctccgcttcccgccttcccggctcttctccgcggaggccttcgtctcccattccgatgacgacgacgctgggggcgagggaggaggcgggggccggatcatcgaggcacggtccggggtgatgggccccacctcgcggcgcaccggcgtcatcggcgtcaagtgcgggatgtcggcgatgtgggacaagtggggcgccaaggtgcccatcaccgtcctctgggtcgacgacaacgttgttacccaggtcaagaccgccgagaaggagggtttcttcgccctacagcttggagcaggtcaaaagaaggaaaaacacctaacaaagcctgaagttggccactttagagcacagggagtgcctctgaaaagaaagctaagggaatttcctgtcactgaggatgcgcttcttcctgttggcacaagcatcacagttcgtcactttgttcctggacaatttgttgatgtcactggaatcacgaaggggaaaggttttgcaggtgtaatgaaaagatatggtttcagtgggatgcctgcatcacatggaacatctttggcgcatcgcagtggtggctctactggtcaaagagatgctcctggaagggttttcaaaaacagaaaaatgcctggacgcatgggtggtgtgcaacgcacagtgaagaatgtatgggtctatcaaatagacccagccaggaacttactgtatctgaagggccaggttcctggtcctcaaggtagctttgttttcgttaaggattctatatataagaaacctgacacggctttgctcccatttcctacatacttcacgcgtgaaggtgagcctgaagacttggagcccctgattgctgatcttggtgatgttgacccattcatggcagccgattaagacaatgcacaaagttggttaattcctttttgtgttctaagcactccttgagctcgtccattccacgagattgtcaaactctcgatggatgtgagcaattcctgaatcacaagctatatccggttactggccagcctgatcaatgttgttccatgtacattacctggcaagtataccagtgctataatggtttttatatgattgttttgattgaccgaatataaccttttcctcaataagttgtacgcggaaccaaaagtagtatataaaatcagaaaaaaaaaaaaaaaaaaaaaaaaaaaaaaaacgcgagctgcttatgttattgctagctaacgtttattacctgtgctttttactttctatttctaatacaac

SEQ ID NO: 80536 - DNA, 919 bp, Zea mays
  Clone ID: MRT4577_173469C.1
atcacatgatcaatctgctattgatgattcggatgatgttattattcttcaagagtcgccaaatttgacaacaagggatgaaaaagacaagggtagctgctccaacacttctgcacagcccagcacttcttctagaattcacatagcagcacgagatgataggacaacaagtgatgcacttgatagttcaaagtgggaatgtggtgcttgcacacttctgaaccagcctctggcaccaatctgtgaagtttgtggtacaacaaaacctaaaattgcaaaggcgaagtacacaacttggtcttgtaaattttgtactctagagaacagcactaaacttgacaaatgctcagcatgtgatcaatggagatactcatatgggccacctgtagccacatatggcccaagctatgattgagataacagtgaaggccacaatagcacagacgacacttctgagcaggcatctgctgcattgtcgatataagttgtgttatctgcaacagttcttgctctattactactcatgtcatatcaggtttcataggtctggaaaaatctgatacctgttaaactggtagtactatttaagcgaccctcttttgtggacgttgcttggagcaatccacggattggtaaaatgaaacaatcgtagtccatgtctgttaacgttagccccaagcccagggcatgcagcattgcagcctctgaactcgtgtttcgtgtctcgccgtctcggtgacaggtaacaactcgcacctagggcacaccggcgaattggtctttatctgttccgacgtcgtcgactcatgttgccgtggggtgaggaaatttattacgtcaattaatgtaaggtttattacaagtatctgcaatgctctttttaaaaaaaaaaaaataaaaaaaaaaaaaaaagggcggc

SEQ ID NO: 80537 - DNA, 144 bp, Zea mays
  unsure (1)..(144): unsure at all n locations
  Clone ID: MRT4577_17346C.1
cccttttcacggggcaatcgcgccnggcctgcatgtgtgcatccttgttcgtgcagccacccaccaatccaccaccccccacagaacgcatatcaaaagaatacgtgaactgaacgatgaaacgaacaccactctcgaccgaac

SEQ ID NO: 80538 - DNA, 259 bp, Zea mays
  unsure (1)..(259): unsure at all n locations
  Clone ID: MRT4577_173470C.1
gtgcggcccccgtttttaatttttccgccccgcggcgacagaagggcactgcatctggggccctgggctcctcttgggactcgacgctcgtgggtcgcagggaggccgagaggcacggttgcccggacgggccgggccgggggaggtanacacaaaacaatatgggggccgcgggagaggaacagccaacaccccccctaagcgttgccatggcgggaggagaagaccctgcccggcgcgagtgcggggaggaccgtgc

SEQ ID NO: 80539 - DNA, 518 bp, Zea mays
  Clone ID: MRT4577_173471C.1
attcacatacagaagccataaccaaatccacatacgcgaggaagacagtacaccacgtccacaggtacaggcagaaccataaccatataaccagagctgccagagccatacgcagccatcgcagcaacagccaccgagggagagaaaacctttacattacctgtcatatccgccgacacccacgcggcgaccttcaccgtagcctgtttttggcatccgatacagcgaaaccgatcggttcgtcctagacctaccatcacgataaggaggctgcgagtagccacggccacccctgctttagtagtaatccccacggtccctatgagaaggagagtagtccctgccgtacgtagagggagggtagttccgcctgtcctaggaagagggataataattctgactgtacctagaggacaagtacatgggaggcctacacctgccatagccatacccgccgtcgccagttgccgtaatactgatcacgcccaccaccataatctatatggaaactctcacta

SEQ ID NO: 80540 - DNA, 187 bp, Zea mays
  Clone ID: MRT4577_173472C.1
gaatgctcttcgtagtttagcagagaagtatttggcacatgtggagcctcaatgtagagctgtcgataacgattttgacaagctttctcttggatggcgcgatggttccttgtgggatgtgatcaatccagaatccagtgaaccgcaaccagaagatggagtgtctagagaaatgcttctgagcatc

SEQ ID NO: 80541 - DNA, 1363 bp, Zea mays
  Clone ID: MRT4577_173473C.1
atctattttgagtgaccgtatgattgaactgccggacacagtttaagggtctggattggataatgttaattgacctgttgctagaaatatgttcttgttgtcacgtgtactggcagtctgaaagggtttagttgcaatgcgttggtatcatggtattattagtttgacaactgaagtagcaaattaggttttttttggaaggcagaagcatcaagcaccactgaaccaaccaaacaaaatgtgtatgaccaagatttgaggtttattgcttaaggattacaagcaccaacttctggcgagttctattaggaactatactatgtttgtttatgtatttgactaatcatcatggtacaattttaactgatgtttcagatacgttcatcagctccttgaatctgcctacccatgtagagctggtcacttactcgtgcccagtatattgttcatttttcacacgcttcttgcaagtcaggccgttatacgttattgtatacgcactacaaactctgaagtcgttgtgttgccattgtcttgcattgttccatcatctgatttgtgccactgagcgaagaaatgatcgacgatttgcacgttctgccccccacttgcaggttggtgagtccgttgaggagatagaccgccgcgtccctccagtggtgaaggaagccccaaccttggcccgctcggctgcgaaggaggttcgccaggccggcctggtgggcacggccactggccttgccaagtcagccatcgcccgcgccgagccaaaggcccgggagctctacacccgctacgagcctgtggcagagcggcgtgccgccgaggcctgggtggccctgaaccgtctccctctggtgccctcggtcaccagggccgtcctccccactgccgcacagctctctgccaggtacaattcggcggtgcgtgatggtgccaagcgcgggaacgccgtggccacctatctcccgctggtgcccactgagcggctcgcccgcgtgttcaggtaccccgtggctgacgttgctgcagcaccagagatgcagcccattccttcccagtagaagatgaaatggaatgtgaactgcataaaccaatatcaagaagtattactgtgttttgtctttgcgtaccttatggtgaactcatgcgtggttcagtatcgtttcattcctttttgttgcagtgagcctacacaagttcgtctttgttttatggataatatgtataacattatctattggaatagcaatgttgatgcttgtgctttgtcatcaaaaaaaaaaaaaaaaaagcggccgacaaaaaaaaaaaaaaaaaaagggcaaaaaaaaaaaaaaaaaaaaaaaaaaaaaaaaaaaaa

SEQ ID NO: 80542 - DNA, 168 bp, Zea mays
  unsure (1)..(168): unsure at all n locations
  Clone ID: MRT4577_173474C.1
gccaactcgccacaagtgacggccgtcatgccgacatgccgtggccggtccaccactaccttcccgacgggccgcattggattcctcccgtcctgcctcccgntctcgccatccgccttcctggttccttcttncattccgccgccgctgntacgatcacactgcacc

SEQ ID NO: 80543 - DNA, 377 bp, Zea mays
  Clone ID: MRT4577_173475C.1
aataaaaataaaacaaataaaacaaaattttagtttataaaaaaaaaacaaaaatagggaggggataaaaaacaaaaagacaaaaaacacacaaacaaattaacttactcatgcacttcctcctgctttaaaaaaaaaaaggggcgctccttttaagagttccccatcttggaacccgagcttaccacaggctttgatcttttggtagtgtcctcaaaataaaattctggggcggctttattccaaaacacggcatgggaaacccctgcatctaccaccatttcatttacaaggaccaggcccctgagaacatcctgttgataaccgctctggcggcctcattttctccctttcgcatatttgggcgaccaagaaac

SEQ ID NO: 80544 - DNA, 250 bp, Zea mays
  Clone ID: MRT4577_173476C.1
cctgacacgcagcgaggtggacgaagatggaagcaagaaggaggaccgagcacgcctaagcactagggtagtccactacatccatgtgctgtgcaagtccgaactacggacgatctgactgagtggcgtcgacatggggctaccgcaatttatatacatcgatacactactggtggtaccgatttgagctaacaacgcagcagaccttgctctgcgtatagttaccattctatgttcaacataccggact

SEQ ID NO: 80545 - DNA, 616 bp, Zea mays
  Clone ID: MRT4577_173477C.1
ccctcgagccggccgggccgggagagcaaataatactcatctgcctatctatctatcgagagatgagagattatttctaagctacctagcatggagtgcgttagcaagaaggcagcaggtgcggtggtggctctgctgcttctccagctgaggataactctcgaccaggaggacaccccgactcctgcacacgcatacctccaccgcggttggcctgcacatcatcacgagggagtttggccatccagtgagaggcatcctctgtggtgaaacctgtgtcttcctaccatgctatacggcagccatgggttgccaatgcattggccaaatctgcatgatgtgatatctggactaaacgatattctatctatgtggtggtagaaacacaacgacaatacgcgggggctcaatttatggcatgcgtatggatgatctagtagtgagagaataatagagagggacatagtgcatgtgtttgctatctctctctgcatgtttggcgtcagtctttgtgctcatgtacgtgtgtctacatgcatgttggcccgatacgactgcgactgctgtatccatataccatttgggccacgatgatatgactttggactatatctgt

SEQ ID NO: 80546 - DNA, 682 bp, Zea mays
  Clone ID: MRT4577_173478C.1
tcagccacattgaccgtcgcgccaagctggcgccgctgggtcgtgcgctgggtcgcctcgagtcgcggcattggttccgcaaccgaagaggcgcgacggtggcgcaagtggcggtgcagttgcctgcatgcagcatccggcgcgccggttgcgtgacgcgtgggcctgggcctccatgctggcgcgttgggagtcagagaagcgtgtccacttggcgcggttgcatgccgcctgcatagctgcccactccttccgcccgttggtctgggccaaaatggggggtcgcttgtaaccgctgggcggttgtgcgcgccacgcgcggcggtttggcttcttctgctctgagccggcttgcatgacatgcgggacccagccccccgcgccgcaggggagggccttggagtgtgttggagaagactcagcccgtggcgtttgggggcgcacgtagggagagttgcctttaaaaggggggcgacccctttcggaaggcaaccatgtcttctcgctcccttatgcatcgcgtctctccaccttccaagcccccggatgggggatacccgccgtcttctcgcctcattgttggaggaacgcaactccgtgggagttggtacctttcagccatcgttcggcttcaaggattttcatccgccagcccggctgtaccccccgccggcggtcaccc

SEQ ID NO: 80547 - DNA, 156 bp, Zea mays
  Clone ID: MRT4577_173479C.1
aaagagtgcactcagcagggggacacttatataaagccgcggagaaaaaacagctacaaggggcacatacgagcacgggctgtttaactgttgcgcttccacgcataccaaattgacaacacgccctgttccactgttccgcttcccacacgtccg

SEQ ID NO: 80548 - DNA, 476 bp, Zea mays
  Clone ID: MRT4577_17347C.1
ggtttggttttgttggataggctgtttgttcttattgtctttgtcttgatgaagtcttttgtttgaaacggttgcccctgtcttcgttggttgggtttttccaattttaaaaaaggcccgggagtgccttttttcccaccatttatttgttttgttccgggagcctttccccccccatggccccttttttttggttttaaaaaccccttccttggaccggcccccccccccaaccggctttggttttttccttcccccgggggggggggcccccttttaaagggtgggtttttttaggggcccccccctttgggaaagggggtttttttttaaaaccaaccggggccggggggcccccccggaattccccgcccggcccccgggggggtcccctttttccctttggggggggctttaaaacctgggcgtaccacgggccattctgcttcccgggggaaaatggtttcccctcccca

SEQ ID NO: 80549 - DNA, 304 bp, Zea mays
  Clone ID: MRT4577_173480C.1
aattcgccacaaggattaaatcaggtaatgacattgctaagaagagactagttcatgcacagctcaatgaacttcaagactactacctgtacagacggcatactgtagcacagccactctgactagatgaaagagagaccgctgcagtgaatagacatggctatcatgcacgaagttccgagatttccagtctgtgctaacaacattcactcaatataggagtctacgatttcattactgaactaatacatggagacttgcttcactctgtcaatactatgggtcatcattgattttcgatcgg

SEQ ID NO: 80550 - DNA, 508 bp, Zea mays
  Clone ID: MRT4577_173481C.1
ctccgctcgacaccaacccagctcgctcgtcccagctgatcaggtcgagcacctagtagcgacctgctcgatcatcagtgtagagtgtcggtaggtgtctgtctctcttggtggctggttgcaacggtcatggcgacgtcgtctcgtcgggtgcccttgctgctgctgtgcctgggcgtgctggtgtcctgctccttcgcgtcgcgcagcttgcaccctcagctggacctcccgtgggggtcccgccggtgcctcggtccttgccggcggtgcgtgtgcagtccctcctggtggacctgaccgctgccgccgttcctcagacccttggcccccccattggcctctctgtggatgacctacgcactaacaattctctcacggtcctgtccgacagtgcccagacgctctatccgtacgcagcccacctggttctcttcgccgggcgtgctcgcgaggccggtgccgctgattctcctccgtatgagtttgcctcggccccccatggccg

SEQ ID NO: 80551 - DNA, 196 bp, Zea mays
  unsure (1)..(196): unsure at all n locations
  Clone ID: MRT4577_173482C.1
ctccacaccaagccagtaactttttctatccaagtccctcccctcatanaanacaactccaacacttttacttcgagacttcttaatctctccacacacccacaaacccagcaaagcaataacaccaaccatagatacatatatatagacacggaaggatcattcatccatcaaaccattacccattgacaacctt

SEQ ID NO: 80552 - DNA, 175 bp, Zea mays
  Clone ID: MRT4577_173483C.1
gggacagcatgggcagagttatctgtctcttataagctcgacaaccgtcttatacagtatagaggcacgactctggttgacaagcagcacatttatacatgccttattcattgtgctcaaataaaccggtttttgatgagcagatgctgcgcccttatcaggcaagcaacaaatt

SEQ ID NO: 80553 - DNA, 415 bp, Zea mays
  Clone ID: MRT4577_173484C.1
gcaaaagctaaagccaaagctaaacaggtccaagaatctctcaaggctagccaatcggccatgcagaaattctgggcaaggcttttgggtattggtcctgctctgcgagctgtggcttcaatgagcaggtctcagttccttcatacctaaatgcgtacatataagaacaatgattgatcggtctctttcttaacttatgaaactttacctctttgtttgttaagggctgattgggctgcaaagcttaagcattggaaggctgaatttgttactacactgcagcattactggttagggacaaagctactatgggcagatgttagaatctcatcaagattactggtgaaacttgctggtggaaaaagcctttctagaagagagaggcaacagctgacacgcacaacagctgatatct

SEQ ID NO: 80554 - DNA, 1350 bp, Zea mays
  Clone ID: MRT4577_173485C.1
cgcttcatgatattttttcactgttagggctagttttggacactgttttcataagcaattcggcacgagggagctttcgaagctcgcccattgcctcccagtctcccaccctcgcaaccatcaccgccgcccaccgttcccaccgccgcggcctttatttctcccccttccatgccccgctcgcctccgccacctccccctcctcccgcccctaggtgactgtgactccctccggcgcctgaatctccatctcgctccccacccgccgcctccgccgcgagatctccggctgcccgcgccatggtcgccgcctccggccttgcgctgccgcgggtggccgcaccctgcccggcgcgcccgcggggtggtctccgccccgccttgctccgattcgcgccgcccgtggcactgccaccgcaccagctccggtgctgcgcgtccaccgtcgatgacggcttggtgtccgcagcggcctccaagccccgcctccccagggtggttggtatgggttcaaagcttgtcggatgtggatcaatcccaacacttggcgtcaaatgatgaccttcaaaatagttgatcagtgaatggattgcagctcgcgtccgattcaaacattgcgggggctctcaataaaagcagctcaaagggcacttgaaatggccaaagtaaaagctgaagatgttgaccttgttctcctttgtacatctactccagatgatttgtttggaggtgccactcaggtgctgacggacgtggggtgcacaaaggcttttggatttgatattacagctgcttgcagtgggtttatagttggcttaatcacagctactcgttttatcaaaggtggaggttttcagaatatcctagtagttggtgctgatgctctttcaaaatatgtggattggacagacagaggtacatgcatcctttttggtgatgctgctggtgctgtgttggtacagtatagcttatcccctgtgtaaatatttatatttctccctatcccgtcagtgttccatgctatctttgaaatataacagtggcaggtgatgtgacactgtatattatgaattcatagtctaaaacttaccgtgccttttgaatttattgtcgattctagcaaaaagaaagaatactagtagctttgcgccataccttgatcttaatatctgtatgttggacactccattttttgtagtactttagacatctaaactagttcagacttaatttaagactaggtaagtacccgtgcgttgcaccggaaaaaaatagtgtaacaataacatatatatgactatatgttgtgttgttaattaaaattaagctccctatggactttgtagtgac

SEQ ID NO: 80555 - DNA, 783 bp, Zea mays
  Clone ID: MRT4577_173486C.1
acgagccgcgcgctagacgcacgagcgcgaacacgaacacgaacaccataacgcttaacgcggcggtcatggtgggcggcggcggcgacccaaggccggaggacgagcccttctccgacggagacgccacggagtcggacaccgacgagtctcctccgcaggggattagtgctcgccgccccggcgccaccaccaacccgatcctgactcgcggcccccggggtgtgcctcctccgcttcgcctgggagtccgccgcgggatccctcgtcggcgccgttgtcggatacggtaaaggtctggcatgagggagggttttaaaggatcatttcctgatgctgcttcgtctgctaagatatttgctgtccttgctggcgtacaaagtttggtagcctgctctttgcgaaaactacgtggaaaagatgatggtatcaatgcaggagtggcaggctgttgcactggccttgcgctgagctttccaggtgcaccgcaaactctgattcagagctgcctgacctttgggactttctcgtacatcatagagacgctaaacaagcagcagcccgcactggcgctaccactggctaaagggattaaggatcaaaagggtggacaaagtgttcttcctcccttcacgctccctcttccgcaggatgcgatggatggattttctaagttccagaactttttgtcgtcgaaatttcagggaaaatgaatcaccttatggagtggacgttagttgccttgtaaatgcgtcaatctgaagcccttttttgggtttattt

SEQ ID NO: 80556 - DNA, 340 bp, Zea mays
  Clone ID: MRT4577_173487C.1
gagctctcttttcggcggccgcccttgtttttttttttttgttgtttttttttctttttctttttttttttcttcaccttggtccgaaaggcacccccattgaaataaaacaaaattatttttaacacttaattcagggcccggtagattttttccgtcaattttgggaccttttaaagctttaccctttataaaataatccccggtttatgactgggggattttttccgcggggacggcctttaaatttttggccataacccgaggactcgtacggacttaaatgacttgcaagaaactttattgaacaaaagaacccctaatacttttttttttgacc

SEQ ID NO: 80557 - DNA, 1056 bp, Zea mays
  Clone ID: MRT4577_173488C.1
ctcgaggccggccgggaaaggtggtgtggacttaacgggccggaccagggcaccaggccatcgtgacgagccgcgcgctaggcgcacgagcgcgaacacgaacacgaacaccataacgcggcggccatggtgggcggcggcggcgacccaaggccggaggacgagcccttctccgacggagacgccacggagtcggacaccgacgagtctcctccgcaggggattagtgctcgccgccccggcgccaccaccaacccgatcctgactcgcctcgcggtgtcgcggaacccgagcccgctggccgcggccaccgcggcccccggggtgtgcctcctccgcttcgcctgggagtccgccgcgggatccctcgtcggcgccgttgtcggatacggtaaaggtctggtcatgaggaagggttttaaaggatcatttcctgatgctgcttcgtctgctaagatatttgctgtccttgctggcgtacaaagtttggtagcctgctctttgcgaaaactacgtggaaaagatgatggtatcaatgcaggagtggcaggctgttgcactggccttgcgctgagctttccaggtgcaccgcaaactctgattcagagctgcctgacctttgggactttctcgtacatcatagagacgctaaacaagcagcagcccgcactggcgctaccactggctaaagggattaaggatcaaaaggctggacaaagtgttcttcctcccttcacgctccctcttccgcaggatgcgatggatggattttctaagttccagaactttttgtcgtcgaaatttcagggaaaatgagtcaccttatggagtgacgtttagttgccttgtaaatgcgtcaatctgagcccttttttgggtttatttctctgcaaatgtatgtttctaaggtagtgtcttgttaatgttaatgattctacacctttctgtgacagttttgcgaataagaggagcacctcatcctttgttcaggtgttgtagtatttgttggggcctctatgccgccccgtaaaaaggaaaaacatgccccttgtttcc

SEQ ID NO: 80558 - DNA, 349 bp, Zea mays
  Clone ID: MRT4577_173489C.1
tcgaccacgcgtccgccacgcgtccgccacgcgtccgccccgcgtccgccacgcgtccgtgagcattagaacacatatgcgaagcgcactacacgacctacacaatgctacgagatataccctctgcctcttgcttttggaccacaatcttatattacatgctactgctaggctatcatgtctcacattcatggttaaacagtggagcacatgaacaggtgcgaggtaacacatgcatgacacatctgcattacatcagataacgacagacacagtctaagctgcactactgtacctggctctgagaagtgtgatcacactgttgcacgatgaaagacacacagtcaag

SEQ ID NO: 80559 - DNA, 150 bp, Zea mays
  Clone ID: MRT4577_17348C.1
gcgttgcctctagcatggcattcaggctgatggtcacatgcccggcgacatgaccattgggggaggggctgatgctcaaaacaccttcttcactgctactggcgctcagaagcacatcccccgtgctgttaacattgaccacacccactc

SEQ ID NO: 80560 - DNA, 163 bp, Zea mays
  Clone ID: MRT4577_173490C.1
tcctaacaacaatcggctacgcggattttatccctcctcgctctcattgcgctatttgcgagcgcaacaaatgcgttcattttcccacactgctcactcgcttcaagttccattatttcacagttcctcccactcagttactttaatgggtttcgaacaccca

SEQ ID NO: 80561 - DNA, 177 bp, Zea mays
  Clone ID: MRT4577_173491C.1
tactacataaacctgctgtacctaggaaatgtgaagcaagcctcgagagaagcccaccacataaggagatattatccgtcttaactcaccgaatggccactggatctacaggggcctgcaatcctacctctacctagctcctgttcgcccttcctgccattccttccttggacatat

SEQ ID NO: 80562 - DNA, 203 bp, Zea mays
  unsure (1)..(203): unsure at all n locations
  Clone ID: MRT4577_173492C.1
ggaaataccgctcccggggcatgacccgggagtacaggtccggagggggggggcnaacaaccttcccctctacaaaacataataaaactactgaggcgaaatgtgggggtgtcacccaccaaacaacaactgtcgctacnaataggacagctgagagaggagcctaataacacgaggcctatgctgggcactctccgctagac

SEQ ID NO: 80563 - DNA, 227 bp, Zea mays
  Clone ID: MRT4577_173493C.1
taggggtggaggccaactcttttgtactcatactccccagggggggggcgggatgtttaagcgcgcgctccacctgctccgacgcgaagctggcctagtggaacaagaaaaagatgccgcagctcaaaagcgaacgccggaaaatcaaggagaaaaccaaggtggcccatctcgggatcgatgattgcgagcttctcctgcaccatggctgacacgcgttgggatga

SEQ ID NO: 80564 - DNA, 650 bp, Zea mays
  Clone ID: MRT4577_173494C.1
gattatctcacagctactgcgtattatacatcctcccttcattctcacgagcgaacgataatacaccgcatgtgcaagctgcaattatctcgcatactcctatctgcactcaaggtcctgacctattcattcacactgacaggacttgctaccaacagcaccctgtgtcaggtcccgacaaaactcatcacctaaggaactgtggatgtattgatttctgcgactccatccgtcaagactggagaggacgagaccgttcatgacacaaactgcagaagcgtcgttggatattgcacgacacattgcgtattacaagacgaacctgcttttgactacatctcattagtgttttacattcaaaagtacatcgagaatcatcactgctgtgatcgagacagaaaaagaatatgagttaaagaagtattgttagggtgccaccacatttctccttagcaagctgagtgatctccaataatttgatggtgagaccatgaaagatgatgtcattgagctcttcatctatgactacgatgctgccgctaaaccgacattcctctatttctctcatggtcttacggagatcagagtgctaggcgtgctccgatattcattacgcatgatgccgcactatctatgtactattactatat

SEQ ID NO: 80565 - DNA, 286 bp, Zea mays
  Clone ID: MRT4577_173495C.1
cgggttcgacaccacgacgttcggcatctgcgacgatctgctgtaagcacgcctgatactcttccagcggaaccacgctggttgccaagaacaaggactttttggcgctcatgcacgtcgtctacgccctcatcaagcgggccacctgtggctcttgtaatgcgacttttccggtgcccgtcgtctgtgccaagattcaattatttggttatagaattttctcgatttatccgtaacggtgccagagttagtttttgctaagggatatctatttattttaagtata

SEQ ID NO: 80566 - DNA, 473 bp, Zea mays
  Clone ID: MRT4577_173496C.1
gcttcttgaggagaagactgctagatttgttgagtcaatagcgaaaacgaatacagagaagattactaaagaaattttggagggcttgtctgaagatactgatgatagtgacaaccatgatgtggagagtgtaggcgaagactctgaagatcggccctggcgaccaagtcatgcagtcttcgggaaatcaactatcaaacagagtcatcttgataatatgagaggaaggtattttcgagatatgtctattgtgagggctgacgtagacagggctattcctgctcctaaagaaaacgaagttgtgatcttccgaagcttcttcaaagctgggcttcggttcccgttgagcaggtttgtggttgaagttttgaagacataccggattttccttcaccagatcactcctgaagcagttattagaatggggatttttgtttgggctgtgagaagtcaaggtctgagtcgacctgcag

SEQ ID NO: 80567 - DNA, 252 bp, Zea mays
  unsure (1)..(252): unsure at all n locations
  Clone ID: MRT4577_173497C.1
cccttttaatantttaagaaaaccaaaaacgaaacttactggggatttttaatacaagactgaaacaaaacctttcctctcgttcacctggggcgtcacgcgctataactaaagctgattacaccgcgggcagaaattggtgatcaaaaccgagacatacaatgattcaaagcagggcataagactgtacaagcttcttgcttaagccctaaaaattctaagattctaaccagaacgacggcatgtggcgct

SEQ ID NO: 80568 - DNA, 626 bp, Zea mays
  unsure (1)..(626): unsure at all n locations
  Clone ID: MRT4577_173498C.1
tctcgagttttttttttttttttttaagctgcgaacgacaaccgcaaccaactggtatancccaccaaaaatgtccacaatggacgtagcaaagacaaacaggtgagatgatgaaacgtagcctaaagcgagaccgagccagcaaaaggcttgccatagtggcatcaggtagcaaactattggactagcctgtttacacgaaacaaggtacaactagccaaaaataaacaacaatccagtaccacagccttgtcaccagcgcataacttcacttttcacagtgccaaaacccctctctatcagctcaacaatgtttcacttggtcttcctgaccagcaaaacttccggtaaagacgcaggatcaagctcccagtaaccacaaagatcgccagtttcgtctgtcaagcggtaggcaggaacctgatgagagaacatagtcaagtcactccttgctattctcctggatttacggttctgctctggcatgaacaccgtgctaaagccctccgctttagtaaggcacgacactgttatatcaccatcagaaacctccgtgacctcgaccagaagatactcgcatctactgtaatcttcgaagctccatgcgcggctccagccttgataca

SEQ ID NO: 80569 - DNA, 208 bp, Zea mays
  Clone ID: MRT4577_173499C.1
gccatttttggacttaaaaaatgtaaaaactaatgggaattctacaggcaacgaggctaacgacgcattacttaaagaaaaggcagttaaggaccctaaatatgttcacattgaatggatcgcatgaaaggatcccaactatttggaaaagctatatcgccatactttgagcaacgttgaatcagacaacgattctcttatcgttttg

SEQ ID NO: 80570 - DNA, 838 bp, Zea mays
  Clone ID: MRT4577_17349C.1
gatgcatggggtgccttcggtgtccggaccaacccaatcccaatccaacatcgcgagtcggggtctctgtccctcaccgtcgccgccgcggcttccccccgctgacctccgccggagttcgccggactcgtagggtttcttcagtcgtcctcttccctgctggagatccgtaccctaggaaggaagggaggaaggaagcagggtgagttgtggtgattttgtggtttggacgtgtggtgttcacagtttggtgggagcttggaggcaggagatttagaaggaagggttgacgatgagcagccgaagcccgccgcagggaccggaggatgcgtactgaacgcaccttgtaccgtgacgcgccataccggagagacagggacggccgccgtggtccaaacaggtctgctagtgatttgtgcaacaactgtaagcgtccagggcattttgctagagattgtccaaatgtgtctgtctgccatgcctgtggccttccagggcacattgcagctgagtgttcttccaaagatctctgctggaactgcaaagagcctggacacatggctaatgcctgcccgaacgaagggatatgccgcaactgtggcaaatcaggccacattgcaaaagactgcactgctccgccaatgctgcctggagaagtgaagctctgcaacaactgctacaaaccagggcacattgccgtggagtgcaccaacgagaaggcctgcaacaactgtaggaagagtggccatcttgcccgtaactgcaccaatgagcctgtttgcaacctctgccatgttgcagggcatttggcccgtcaatgccccaaatctgacgagat

SEQ ID NO: 80571 - DNA, 506 bp, Zea mays
  Clone ID: MRT4577_1734C.1
tttctccccctcgtgggggaagtggcatcgatcgattaagatcccctttacaaccaccatgatggcagcctcgtcgtcgtcgtccttcaacctcagtgatcatctcgttcaagatgacctcccgtggcctgcttcttcttcttcttcctcccagctgccatttgctccttctcatcctcctcacggcgccattattggaggcagccagcaatggtggcagcaacctcaaatgctaaactgtgcagaccggcatcccgccgatcttgacgacggcaccgtgctcccggcgagcgtcaacgtcccccggacgacgacgacgcgccagaggccattcccggcggcgccgccacctctccccggcgacgcgttcgagatactggcttcgtcgaggctatgcacgaccctgctgcttagccaagcttcttcttcggtactgctccataatggcacgacgatgcctttgctgagatcagagcatgtgccctatggccctcctgctcctgctc

SEQ ID NO: 80572 - DNA, 318 bp, Zea mays
  Clone ID: MRT4577_173500C.1
ccttctcttccacggacgcgtgggggagaaccgagagcggagagacatggggccccaccagtagcagcgggcgctgatgctgttcccactcggcttgctcatcgtcctgcttgccacgcacatcatcggcgcgtggggaaaggagggccacatcatggtctgcaagagcgacgagaagtacctggaggagaacgccgcagaggaggtgcatgcgctcttttctgactcggaggtcggtgagctgtcgacggcgaggccgtgggccgaccaggagcgctggcactaccactgggacagtccgatccaatacgtcaacac

SEQ ID NO: 80573 - DNA, 410 bp, Zea mays
  unsure (1)..(410): unsure at all n locations
  Clone ID: MRT4577_173501C.1
aaccttttgcgcgagcccggacggagcggacgtctatgcagtatcttggagctggtcgcaaatcttcaactcataactttgtacgccaaagacgcgaaaggttccatgtgaacggcacttgcgcatgggtaagccgatcctaaggtactggggaaacccttaaggtagcgcgatcacgcccgtaacccaacagggaattgcactaatattttccgagccgtgacttaatggactacagctacgctaggaagtaccgtgacgccggctgnggtcttctgaagagttatctattgtctgcttaacggcccgccgaacctgtaattggctcactccttagtaaggtccagcggacggaacagcaccgtacatcttgcggaagtcattgcgccccctgacgaccttgaaaattc

SEQ ID NO: 80574 - DNA, 435 bp, Zea mays
  Clone ID: MRT4577_173502C.1
tcagggcgaattgtgtaccgggccgcccctctacgcgagcgctatatttttttttagcttttatcacaaacaaggcctttattgcaagcgggacgagtgccatttcacagatctatgaaaactaaccaattaacctataactttttcatagtaaacaagttaatcacaatacatcttaaaaaacaacacatcatgcttgacacaggatcttattaacacacccagctcctgatccaacaccacaagtgaaaacttatggccatcatgatccatgataggacaagattctgaacacttctgttggggctggcctgccacctttcaccacctatatgaggatggagcagagcttatctaaacgatctcatcacattcatgtagcagaccatagagctgcatataatatgcacagacccatgctattgtcataaaggc

SEQ ID NO: 80575 - DNA, 459 bp, Zea mays
  Clone ID: MRT4577_173503C.1
cccctcgagccggccgggggcacggcaacctcatggtggatccaagcagtgttcctcaaaagggagctcacaaggacgattgccgtcaggcgaagcatgagcgcgaaaagtccaagaaggcaactggcgcgccactcaccgcgtcaggcgtcctaacaaaccaggctcctgcggctcagaagacaactcgggaaagtcaattgatgacagaaagtgtaaagcctgctccgaaagaaggttctgaaaccgttgtaaagccgaagaaaaacaagccgcgtccgagcaaatctgcgcgtgcaagaatacaagcagcgaaagcttcgctaacgacagaatcgtctccttcgtctataggaattgtaaaaccagccactgatgtcaaagagccccaactaaccacagtacccgtgtcggtatcgtcttctcgagtaccaccggccaagaatacgcactccaaag

SEQ ID NO: 80576 - DNA, 531 bp, Zea mays
  Clone ID: MRT4577_173504C.1
ccgtccgaaaaaaaaaaaaaaaaaaaaaaaaaaaaaaaaaaaaaaaaaaaaaaaaaaaaaaaaaaaaaaaaaaaaaaaaaaaaaaaaaaaaaaaaaaaaaaaaaaaaagggtagggcgttttttggggaacccatctttacgttcccttggttgggcgcggcttcacctctttttttggggggcccccccctctgcgtttccctgggccgacctctttgaacctcctcgccttgaaatcccttggcgttgccccccttaatcgttttgccggtcgtccctttttccccagttgcgcttattaatggccggggcccgccccgcttgtttttccaatggtggcccgcccttgtgggggatggggccgcggccttttggggggcttttaggccccccgcgccgggggggtttccacctctttgtggcccccttttctttccccgctccttggttcccccccttgggtttcgttcctttccttcctttccccgttccccggttttccctgcccggcttttaatgttggggtcctt

SEQ ID NO: 80577 - DNA, 1708 bp, Zea mays
  unsure (1)..(1708): unsure at all n locations
  Clone ID: MRT4577_173505C.1
cggacgcgtgggcggacgcgtgggctgactcgtgggcggacgcgtgggcggacgcgtgggcggacgcgtgggttgagaccggcatttaatcccgcgttccattccgaacagcgagcacaaccaccgctgctgcgatctcgccgtctccctcctccacgccgtctcggtctccctcccatggccggctacccgcctcccggctccggctacccctacggtcccggcgggggctacggcgccccgccgccgccctacggctcctcgcccgcgccctccgccccgccgtacggcgagaagccgcccaaggaaggcaagacctcgacctcctccgcgcccccctactacggcgcgcctcccccatcctacggcgcgccgcccccctcccagccctacggcggcgggggcgggggcgggggcgggtacgggtacggcgcctcgcagccgccgccctacggcggcgccccgcagcagcagccccccgtacgggggcggggccccggcagggttcggcagcccgttcgcgtcgctggtgccctccgcgttcccgcccggcaccgaccccaacgtcgtggcctgcttccaggcggccgaccgcgacggcagcggcatgatcgacgacaaggagctgcagtccgcgctgtccgggtacaaccagagcttcagcctccgcaccgtccacctcctcatgtacctcttcaccaacaccaacgtccgcaagatcggacccaaggaatttacttctgtgttttacagtcttcagaactggagagcaatatttgagaggtttgatcgtgatcgaagtggcaggatcgacatgtcagaactgcgcgatgctcttctcagtctcggatattctgtgtctccaactgtccttgatctgcttgtgtctaaatttgacaagactgggggcaagagcaaagcaatcgaatatgacaacttcattgaatgctgcctcactgttaaggggctgacagagaagttcaaggagaaggacaccgcctactctgggtcggcgactttcacctacgaggccttcatgctgaccgtgctgcctttcctcattgcgtagtggcagtccactccgccgctcaaaacaagctttataagcttttccaatagtactgtaatattatgcctgctgtaaagagatttatgttcgcagagttgtttttagacgagttgttttgattctggatttaacttgtgttgtgaatcataaagttactctgaaatggagaatgtacctgttggttgaacaaaaaaaaaaaaaaaaaaaaaaaaaaataaaaaaaaaaaaaaaaaataaaaaaaaaaaaaaaaaaaaaaaaaaaaaaaaaataaggcgaggagctcgaatgtacaaggagagcacgctataactacggtaccgtagagaacataccaacagggcttgatcggtaaaaaagactaacaagggaattgtagcaccttgaatccactctaataacattgctcccaaatatgccctaatcggtaaaattttagttcacttaaatagctagtctaccattttngttactgtgaaccatatgactttntgactacatcgttaattagataagtattggcgaagcatatctgaatntgtaggtatagaaattacgggcaacgttgtaaattgaacttgctggtcaacgtaggngcagctcacaagcatttattatgtcagggttnttgaagggagcgc

SEQ ID NO: 80578 - DNA, 277 bp, Zea mays
  Clone ID: MRT4577_173506C.1
gtgctgtaaaccctaatcaggagtgattatccgtgagccatgagtagttgcagctggttcaaggatgccatctccaatgtgggtgccaggagaaatggagttactggactgggaacttaatgctgagaatatatccacaaggcagcttaggcttgtagtgcccatatctgtcagatgaggtcatgctgggatgcagatgttgggggcggagagactgctcatgagtgggttaagaaaagacagacagagctgtagaggctgcagagaccatgctttg

SEQ ID NO: 80579 - DNA, 1073 bp, Zea mays
  Clone ID: MRT4577_173507C.1
gttagcttagaaaatagtgtggtccaagcttcaattatttcgatatgtgaactgtaattctgaattgttgcattccctattggtctatagtagtggtcagttctgatatggtgtgttctggtgtttatatgcaattacttgttattctgatatggtgtgtatatttcttatttttgtttttatctcttaacctgagaaaatgggttttatcagaatatgtttaagaacaaattagatctttgagagttactatgggttcgactgtttctatctactttgaatttttattgtcaataatagcaactgatataggttagttttgttgtttctatctacttatctatattctcctcttgtttgatttactcttgtataatttaatgaatatttggaactgcattttctagaacaacattttgtcttccgatcagtgaggtcagtcatcctctattgttatatattattgcatgtggtttattaatccatcataattaaatatatttgactagactattttcctaataaagatttaacatgccttgttatgtcatgaattagtaccgcttcattgctgcaacaattaatcagtactgacttttctttctgtattgacaaaacaagcaacaagcaactacaaaattaagactaatgttctgcactaatcaatcatttagcattagtcatatttctatctttagctaggacatgccacttgtgcttttttccttctcttcattgttaaatgtcacctccattctgatgtagcgttccttcaggaaaggggaagatctcagttctatatccaaacaagactaccacccccaagtcagttaaagaccttgaatttgatggtttctccttcactactgaccttcgtgaggtttctccttgactactgaccttgaatctgcaaaactttattttattgaatccattctatggttgttaatttagttttcacattgaaattttgtgtattgttgttttttttttatgtttacatgtgcatagtgtttccctgtacttaaattggttgttctgttaagaagctatatacagatcgtgtttagaaa

SEQ ID NO: 80580 - DNA, 220 bp, Zea mays
  unsure (1)..(220): unsure at all n locations
  Clone ID: MRT4577_173508C.1
ccttctgtgcctcacgacgtaccaaacccacatccatagcgtnacgcccgcggccccctttgcgggcgcgaacccccacgagccggggggcgctcagagcccgccatcccgcgcggagaggcggcgtgcctgccgggcgctcgtccgcggcctcgcgcactgacacgctgcgcgcggccggggcgctgcggcgcgcgcgccaccccgccccgctgcggcg

SEQ ID NO: 80581 - DNA, 434 bp, Zea mays
  Clone ID: MRT4577_173509C.1
cctccgatccagggtttcctcgcgccgccgccgcagccgccttcgtccacgccgccacgatgccgtcgcacaagaccttccggatcaagcagaagctggccaagaagcagcgccagaaccgccccatcccctactggatccgcatgaggaccgacaacaccatcaggtacaacgccaagcgcaggcactggcgccgcaccaagctcggattctaatccggggatgacggcgatgacacccgttgctgccgacgggagaagggtctagggtacctagggtttatgatgtctcgttgtttttgcatgctagcaagtgactccgggatgccagttttaagatttcgcttgtgttgaaagatattattattattactgcttgtagcctacctgggataccgtcatattttgctgattatggaaccccttttatcctgc

SEQ ID NO: 80582 - DNA, 1486 bp, Zea mays
  Clone ID: MRT4577_17350C.1
ccggccgggagggtcatccgagttgccagccaattttgcatccccaccaccaatccaccaccccacacccagtgacagagacagaaggccgggcagggctacgcgacgcgacggagatggagcacacgaatcatcgccgccgccgtcaagctttggccaccgtgtcggtgacgacgacgctcctgctgcttctcctctgcctcgcggcgttgacgacggcagaggcgctgcgcgagcacagggacgagggcggcgctagcagcagtggcggaagcggaagcggctgcggcagcaacgccgccggcggcaagcaatcgccggccgtgtgggtgttcggggactcgtacgcggacacggggaacctgggcgacctcgggcgggagctgacccgcgagtggtacgacccgtacgggaccaccttccccggccgtcccaccggccgcttctccgacggccgcgtcctcaccgacttcatagcctccgcgatgggagtgccaacgccggtggcgtacaagctgcgcaggggcgctgcgcgcgggctcgtggcgcgcggcatgaacttcgccgtcggcggcgcgggcgtgatggacaccggcaacttccagcgcaacatcggcgagcagatcgacctgttccaggcgcagcgcccgccgccgccgccctccgcccgcggctgcgacggcggggtcgcggtcgtcgtcgtctccggcaacgactactcctacgccgccgacaaggacaacagcacaagcgtacgcgccgcgatcgcctacatcccggcggtggtgcggcagctccgggaacagctgctgcggctgcgcgacgaggcgggcatgcgcaaggtggtggtcaccaacctgcaccccatggggtgcacgccgctcttcacccgcgctctcaactacacggcctgcgacccgctggccaacgcgggcgccgtgcagcacaacgcggcgctccagtccgtgctcgccgcgctcgacccggccaaccgtaccttcctcctcctcgacctcaacacgcccttcgccgccttagtcgacggcgcggcggcggcgacggcggaggagaggttcgcggagccgaggcggccgtgctgcgagagcttcagcgccgacggccactgcgggcagcaggacgacagcggcaggcggcagtacacgctgtgtagcgacccgagcaagcatttttactgggacgacgtccacccgacgcaggccgcgtgggccgccgtctcccgaacgttcaggcccatgattcaagagttccttctgtctacctgatcacagctttgtttcgatcagatgagataaaaactagcactacttatcaaaagaaccaatcaatcaagggtggagagctaaccgagttgttggattagtgaaattctcctgtcattgttactctaaaaatggctggattttttgtattaaaaaaatccacggtgcgagatgttggaataaaaaagcgatcttcagttcagtat

SEQ ID NO: 80583 - DNA, 2086 bp, Zea mays
  Clone ID: MRT4577_173510C.1
atgctagggaagccactaaaaatcgggaacctggaactcctcgtgaggggtgaacaacaggaggaaatcaaagttggcggacctcctgggaaggtatcctacgactcgcctggcccaatccagtatcgcgagaagcgctacgcggccggcgaggcgctccccccaatatggtgcgcgtcgtcgtctccaccctccccgccctccgtccgcttctccgccgtggctctctgctaaaccataaacccctgccccgctcacgccttcagccgtggccgttctgcacgctctcgtcctcgcccgccgccggcgcgcccagcgccgtggtgaagggggaggaggttgcgttggacaagcaccttacccggtgcgcggcggcaggcatagcaccgttgcgggtggcggtgctggtgagcggcggggtggatagcagcgtggcgcttcgcctcctccacgccgccggccatcgctgcaccgcgttctacctgaagatttggttccaggaagatttcaggaatttctggtccgagtgcccatgggacgaggatttgaagtatgcacaagctgtttgtgacaagattgatgtgccattggaggtggtccacctatccgatgaatactggaaccatgtggtatcacatatgatcaatgagtatcgctgtggtcgtacaccaaatcccgatgttctgtgcaacacgagaataaaattcgggtctttcttagaagccattgaaaatttaggatttgactacatagcttcaggacactatgcacacgtagtacatccttccgctgaaaataccgaagcgccatccgtactacaattatcaaaggacaagatcaaggatcaaacctatttcctctcacatctatctcaatctcagcttagaaggcttcttttcccactaggatgtattacaaaggatgaggttcgcagactggctactcaaatggcccttcctaaccaaggtaggaaagactcacaagggatatgctttcttggaaaggtcaagtttagtgagtttgttgaaagacatataggagaaaaggaaggaatcatactggaagctgagtccggagattacctagggatacaccgtgggttttggttttatacaattggtcagcggcaaggattacggcttcctggaggaccttggtacgttgtagagaaagatgttcaaaacaatgtggtttttgtatcaaggaattattattcattggataagcggaggcgcacatttcgtgttggatcactaaactggtttgataattgtggacctggaaacaatgagcaactcaaatgcaaggtgcgacatagccctgaatttcatgattgcactttggtaaaagagcgtagtgaagaaaatggggatgctttggtggtgcatctggctgaagatgaccagggcttggcagctggtcagtttgcagcgttctatagtgaaaatgtatgcctggggtcaggcataattttggattcatgggacaagatgagcttccctgtctgctcaagggcactcgaaatcgcaaagttggcggacaagtcgagcttagggaagccaataagaatcgtgaacctggaacatatcgtgaaacctgaacaacaggaggaaatcaaagttgcctgacagattggtgccgtaaccttctcctagctccgccagctgcccccttcaaatcaattcatcaatcaaccgtatcgcaggccctggaaatcgaaggatgaggggtcttctagaatctaccgatatatacccccagttggaaactccaggtccttcttggaaggatgacatagtggaatatggcatgacttcgtgttgcagaggaacgatgaagcttcgtgcgtggatatggttgatctgaattaactgttgacagtgattttacgatctcgcgggaaagcaacacaatagtttgggcacgtcctctcctgagtggaatgatctggattcagtagtagtcagtggcacttcattaaaactaatacagggaaatcgtgacgttgtatgatagtggtaagatattgtattgtgaattttgacgataatatcggtgcgtgattgtgccactggatttgttcatc

SEQ ID NO: 80584 - DNA, 580 bp, Zea mays
  unsure (1)..(580): unsure at all n locations
  Clone ID: MRT4577_173511C.1
gggagctatgtatgacaggctgcaggatactggggcacgaagcagccacaaaacataccgcaaaattgcaggttgctttacagctcttattgacaattggaaaacactgtgcatcacatgcacaatcaggaatagtttcttagttggccctggctaggtctccgctgcaccccgaccgctctgaggctttccaccgcacgaggacgggcagcagctctgagcaacaaggcaaagcttggtcccgcataagccgcattgaatggtctcgggcttgatgctcatatcacattatcaccagttggccaatgagaagacataaagggactccaccgaatcaccgatattgatggtgtagtgcagtagtggacggccttctcccggtaatccgccgcccaagggcctggcacggcagacctaagatgcgcctcgtccgccatgcccgtgctcttcctcggcagaggggggcgcagccggggaccggcggcgcaaaaagacntgcgcggagcggtggggagcaaccaaggtttggaattgggcggcacgggcggggggcatgagcagagctgcaggggcagccggg

SEQ ID NO: 80585 - DNA, 327 bp, Zea mays
  Clone ID: MRT4577_173512C.1
gacgaaaattaatgctcgacacataagacaaccgcagacgggtatatctgagaaggacatggggaagaaggccaccatctaatggtctaccccacgggcctgcaatttgctgttctacgaatacaccgtcagctgatgcaaaagacttaggcaaatggccgcgttggtacctctgcagccgtctactctgccgtcattctgcagtacttgactgccaaggatctggaactggctgtgaacgctagcttggatctgaacgtgaagcgtatcacccgtcgccacctacagtttgccattctcggagacaatgagcttgacactcttatt

SEQ ID NO: 80586 - DNA, 561 bp, Zea mays
  Clone ID: MRT4577_173513C.1
ggactgagcatcgcacacgatcttcacgagcaggaagtatccaggatgctcacagggtggatgttttaagagtcagcatgtgggcatctcgcattaggatcaccattcacaaagcaggagcaccttaaggagtaaggaccaccattttatctggacctttccctctgaccgctttcttctcctgataattaaaaacgccataaggaatccccagctggttttctgagtctgggacaaggatgggctctatttcaaccccccatccttgctgatatttccatgacaatttcatggttccaacatgatctttaggtattcctagcatgtttccttgccgcatggtttgtagcggcatggcatgcatgaagtagcgttctgtctctagggatccctaaaggcttgggagaggagacgggttttatgctctcctctgctctcttctttagttgtggttttatgttttgtccacgtatactgcgttgtactagtactatggtacaatgagcgtcaatgtgttcctatgtttatgcgccttgcatttggaatatatacgtcgtattt

SEQ ID NO: 80587 - DNA, 420 bp, Zea mays
  unsure (1)..(420): unsure at all n locations
  Clone ID: MRT4577_173514C.1
cggtnccggaaattcccggggcatcttacttatatggcccatcactagtgtggatgctgttggagtactgttgatgatctccagtgccctgtatcatgggaacgattctgcatgctgtatggtgaccttttggggctggccttgtcatgctctgattgtatgggatcttgttgctcaccggtggtaaagggtagacccagtgccgacgctactacatgatctgagacctgaaagggataaactgatgacatgccttatcgctgcaaatacgtacaggctgcttgaactacctttgaccttgggaatcacagagtcaggatatctctgaccactgcactcggcctgccctgtgccattgcttttggggccttattggagagctgctaatattccgctgctgataggtctgcataataaata

SEQ ID NO: 80588 - DNA, 1145 bp, Zea mays
  Clone ID: MRT4577_173515C.1
aacatgccatcaataaatacaaaaagagcatcatataaagtacttttgaatacaaatctaataacatgcatacactaaaaaaatacttcctccttcctaaaatatagttctttctagccctcttttttccgtccatattcgaatgaatgataatgaatgtagacatacatacaaactacattcataggttaattaatgaatgtatgtttagtctaaaacgaattatattttgggaggaatggagtatgtgtttttggctgaattattagttaaaatttttaaaacatttgactttttaaaaaaacatgtaccccttaatttatgtggagggagtattattttttaacaaacctaataatactattttaatgtgatgaatttaaataggttagaagttagaacatattagtggctgaagtagagtttcacaactcagatttaagaagtgttatatttctagtgaagtgttagaattatgaccagtttttgctcacttgtccttttctgggattgcagatgttaatcaggaaagaatcgttgaggaaggagggctcgatgctcttctatcccttctagaaacatcagaaaacaccactattcatcgagtcactgctggtgctgttgctaacttggcaatgaatggtaatcgattcatagtttccaacaaaacacccatcagatttctcttcaatttggttgaattggtcgaaaaatctactagatcactgccaggatttcttaattatcatcattttatactgcaaaatggtggtcaacatgtgtattttaaccattaaagaatttctttgacacatgaataccaaattattgcattgctaaagaaatattacagacggacactttcatctatcatcgttacagatgaaaatgttctatatgcatgtgaatttgttaagcattgcatctcaatttaagttcacactttcttgaactgttttgatgtttgtcttatatccactaaagttaatctaatcccaaatagtaattggattagtagtaaagttcaaaagaattaaatcatattggaaacaatgtttgtgcaattttttgccatctcatgggtggagatttgttaatatgatatgctaatattgtctcattccaattatggagggctttacatg

SEQ ID NO: 80589 - DNA, 148 bp, Zea mays
  Clone ID: MRT4577_173516C.1
tgcttggggtgcgaggaagcagccgcaaaatggagtccattctcttgtccttggactggcccatcaatggagctccatgagagagatagataccgagagagcgagagagagagagagagagagatcaagcattgtccacaggagggaa

SEQ ID NO: 80590 - DNA, 361 bp, Zea mays
  Clone ID: MRT4577_173517C.1
tgcaacttctctttaagactaggacaaaaaccatgcttaatatttctgtcaacaagtggataatcttcaaattaacctgctcagatttgtaatccaaaacatcaataaagaccggtataacaaccccccccagatgcaaaaatacggcttgctccatcaggagccccttctgcatcacctaggaaaaacttaaacacctctggtttagattgatggtcctcgaccagatcaataactgtagaaactaaaatctcttttaccccgctatccatgctaccattcaagtttatgtctgctaggaaaccttctagctgcttcaagacaaacaattcactgtatctcacaagatcattcctgttgt

SEQ ID NO: 80591 - DNA, 141 bp, Zea mays
  Clone ID: MRT4577_173518C.1
gaacgtccgattacctgcgattcctctccactcgcctactcgtctcccgctaagggatcggcggagaggaatcgcaaagagggccagctcatgcaacttaaggaaggcctggaccacaacgaggctgggtgccaagccccc

SEQ ID NO: 80592 - DNA, 510 bp, Zea mays
  Clone ID: MRT4577_173519C.1
ggggggggaacaaaaaagaaaattaccgggctgaaaccaggtttgcaagctggtggttcctgacccaaaaggggaagggggggggggggcccaccccaaagaacaacaaagggggggggggggggggtctaatttaccaaccaaccaaccccggcctggaaacaacacttttttttgcgcctagacgggcagagcttttttttatgaacccccccaaggggggaacaaaaactaaaatccctggtggtcacacctccacttcacggggacccgttttttcgggggccctcgtggaccaaacctccttgctcgacccggtggacttaatgggggttttcacaagctgccccccggggagcgcccacagcagggagagctcgccggggaggacccccccggggaccacggggggcagcaacctctcgttccacccgggacgggcccgggttgggcccctcacccccaagagggccatgcaggcggactgggacccccgctgagtcccccccc

SEQ ID NO: 80593 - DNA, 814 bp, Zea mays
  unsure (1)..(814): unsure at all n locations
  Clone ID: MRT4577_173520C.1
gtacgcctgcaggttccggtccggaattcccgggtcgacccacgcgtccgcccgattccccctctggagcccttcagacagctgcggaagaggaggaaacgaaaacatttaaagacctgggtgtgacggatgtattgtgtgaagcttgtgaccagttgggatgggcaaagcccaccaagatccagatcgaagctattcctttggccttgcaaggtcgtgatattattgggttggcagaaacgggatctgggaaaacaggtgcctttgctttgcccatcctgaatgccctgctggagacgccccagcgactgttcgccctggtcctcacccctactcgagagttggcctttcagatctctgagcagttcgaggccctggggtcatctattggagtgcagtgtgctgtcattgttggtggaattgattcaatgtctcagtcactagcattggccaaaaaaccacatatagtaatagctactcctggccgactgattgaccacttggaaaataccaaaggcttcaacttaagagctcttaagtacttggtcatggatgaagcagaccggatactgaacatggattttgagacagaggttgacaagatcctcaaagtgattccccgagatcggaaaacatttctcttttctgccaccatgaccaagaaggtacaaaaacttcagcgtgcagctcttaagaaccctgtgaaatgtgctgtgtcctctaagtaccagactgtggagaaactgcagcagtatttacctttttattccctcgaaaatcaaggatacctacctggnttatatttctcatgaac

SEQ ID NO: 80594 - DNA, 264 bp, Zea mays
  Clone ID: MRT4577_173521C.1
attgttcacacgttattgaagttaatgcttaaacagaccaaactctgtatatgtgaactgtgaaaggcacagacagacaatctggtacactgcatagggattagtgggtaggaatttcagattgtagtcgtcccttgtatctgcagtttgtgtacatgtcttcctttctaagatggactagcgtgttgtgtgattttttaccgtaagattctttttacagctcgcagtgtttttttattctcggtctaatgaggactttctgac

SEQ ID NO: 80595 - DNA, 169 bp, Zea mays
  Clone ID: MRT4577_173522C.1
ggacaaccccaagcgcctccggcgagctccacctttccaccggctgcggcggaggtgatccggtagccggagccgagtctagggcgatggggcagttggtgctgatttacgcgttcgtggcgtgtgtgactgtttttgcgtagttggcggattgagttcaccggtatct

SEQ ID NO: 80596 - DNA, 257 bp, Zea mays
  Clone ID: MRT4577_173523C.1
ggggccggccctggttttttttttttttttttttcatggttctttttttttttttttggaacgaaagcggttttgaattttttgccttttgccgacaaggggcaaaattacctctttccatttgttgccggtggaatttgggagaaaccctgtctccccccatttgggggaggaatagaacccgggggcccaaaacgcgatttacccttagcctttaaaattgactccatggaaaatccaaaaatgggccgaaaggt

SEQ ID NO: 80597 - DNA, 687 bp, Zea mays
  Clone ID: MRT4577_173524C.1
cctcgaggccggccggggactcctgtcctgaccacctctcctccgactccgatcctctccgccatttccctgcgcttctggaatgctgctctacacccccataccctaacgttctaagctctgggttgctgctgttgctactgccggagctgcggccatgaacgccttccgggtcctcgcggacatgacccacctcttctcggtgctcgtgctcctcctcaagagctaggccaccaaggcctgctcaggggtgacgaggaagacgcaggagctgacatgttggggatcgcgaggaggtacctctacctctgcacggactacgtctcgctctacaactcatacgatgaatatggtgttcatctccatgtcgatgactgttgagaggcgcatgatgcgccacccgcaggtactgaggacttacgacaaagaagaagacaccttccgacacgatgtgctcgatcccgccgcgatgctgctcgcgctgatgttcctcgaccgtctcaccttccgagagatatgctgctcatgttctatctatttagaggccagggcacattctcccacagatatcgttactccagagaaccaagaatgtggataacttaactggagaatatgtgtgcttccttggggcctatcgtgcattctacattctatgctgaattgaacgccattacacagatggtg

SEQ ID NO: 80598 - DNA, 925 bp, Zea mays
  Clone ID: MRT4577_173525C.1
cttggtctttctgcgtccgtgaagtccaatgtgcctcccggccgccgggtgaagacgaagaggagagtgccctccgcgctggctgagaagaagcgtaccagtcgggcgctgcggcgccgtccatggcgagagagagcgtctgcaggccagccgagagcccgagaccagtctgctgtctgctcgtgccggtgtgggtgacgggcgttggcgtgtgtgggggtctctgtccaagtccaagagcaaggtacgccgtacgctgaagctgctatgccttttggccctgcgtcgtgtctttcgacgttggctggtggccctggcaccacgccgtggagcggtggagccgccggtgggccgggacgggaggcaggccgccgccgggtgctcagctcagctctgtcctagcgcgcgccatccatcgatctccgccacacaccaccaactgcaagctggctgttgacggcgtgagggttctccgacttccgagggaagggaaccggccggccggccggccggagctgcagtaccacgggttggtcatctcggccttccatgtcagaagagcacagcagccgggacacggagctcgaggccggctgccggtgacctcatgtcatcatcaccctctgccttcaggatcactgcttcagtgcttctgcatgaatgtgtcactgcacgtttccttgtaacaaaaaaaattcctaaaattttagatgctataaaaaaatctaaaacttgctagtgttttatctatgttggcggcaaagtaaagacgtttgataccatagaaagacaaaccataaattataaaaaaaacacaatttgcttgtactacctgatcatataacagtgttgtcgaaaaaaatgtttttaaaaactgacattacaaatttagatatagaagaagggaaaaaaaaaaaaaaaaaaa

SEQ ID NO: 80599 - DNA, 599 bp, Zea mays
  Clone ID: MRT4577_173526C.1
ggcgaagctgccgggccaatccagcgtcgctagcagccgcgagaagcgaggggctcgctcgccgcgcccgccgccttcttcctcgcctccgttccgccgcgccgtctctacggttgctaagccgccgccgcatccagggatggagatgaagaagatcgcctgcgccgtcctcttcgccgcctcggccaccgtggcgctcgccgcggaggctccggctccggcccccaccagcggctcctccgccgtcgcacccgccgtcggcgccgcactcggggccgccgtggcctccttcttcgcctactacattcagtgagccggccggccgcgcccagagggaggaggaggaggaggaggaagagacgaaggggaggagacatggctgcgctgatcccaacacgcgcgcgcattccgatgcgtgggcgtgttctgattcgacactcctttgtcttcgtttctttgttctcttccttaatttaacgaattcattgatgcaccaagtttaatttggtgccttgttatttgttcgtccctttagagagagggatcgacacttgtaccattgcttgccatttatttggatcaattcaacaattcgattt

SEQ ID NO: 80600 - DNA, 464 bp, Zea mays
  Clone ID: MRT4577_173527C.1
cataagttgcggttggccttatcctcctcttctccggcgcggctcagatctatgcgtgcgtgggtggcggcgttctcgtatgctaccaccgataacccgaatgccggcgagaacatctttaagaccacgtgcgcgcagtagccacactgtcgacatgggcacacgccacaagcggggtcctaacttgatcggacttttgggtagacagtcttgtaccactggaagctacttctactgtgcggtaaacaaatacaaggctgttgtctgggaagaagacactttgtatgatttcctgcttaaccctataatgttcatttctggtaccaagatggttttcctgggctgaagaaaccgcaggatcgtgctgatctcatctgctacctgaacgaagcaacttgatagttcattgacatgcctcttgccatgaacagaatattgcggggagtttaataaataacatttct

SEQ ID NO: 80601 - DNA, 161 bp, Zea mays
  Clone ID: MRT4577_173528C.1
cgtccgttctacgattggccgccgcccgactcgccctagtcaacagaagcccactcgtaagcgagcgagcgagccaccctacttgtcgtcggcaccgccacctgtcggtggacaggctgggtgcatttcgatctcggcagggggatgtcgggctacacctt

SEQ ID NO: 80602 - DNA, 366 bp, Zea mays
  Clone ID: MRT4577_173529C.1
aatgtctttattttctttttctttttcttttacaaccgtcatatcgttttctttttccttgacatgaccaccaagctatggaacaatgtggggggtgccagtacgccatcaaaaggcaatctaggcggcggctaggaaaacttgggaaacggtggggtgtgttacgcctaaagcaatgaccttacaaagctgctttgaatatttatcctgggaccccacccccgaggattttaaaaaccccaactgacccctgggcttaactatggaagggggcggttgctatcttaaccccgttaaagctagcccagaacaggatctgggcccctgaaaccggaatgacgggcttaatgtcctgcacaacttggt

SEQ ID NO: 80603 - DNA, 438 bp, Zea mays
  Clone ID: MRT4577_17352C.1
cgcacgcgtccgagcatttgcacgcttgatcatagaaaatcttacactgtttcctccaatccacgctgtatgagacctaaaaatgcttaacgacccttcaagtttgcttttcaaggaaattttaacagatattgcccgtgctgattactttgagcctattaggaccttcgatgagtcctgcatggctgactttttcaaaaaaacgacctctttatctcagcacctggtatacaatcctaaagaggtatgacggcagagagggatcatcatgctttgatctttaagaattcttttgttagctcaaagactacaaaggacccttctctatgatgtatattgtatgctctctgaaatttgaagaattctgtatgaaactttggttgccttgagcattattgtatagcgcccgatagggcgctactgtttctaggttaaatt

SEQ ID NO: 80604 - DNA, 170 bp, Zea mays
  Clone ID: MRT4577_173530C.1
gcggtacatgcatatcgtacgtaaaaaaccaattctatgtccctattttctcatcgaactgcactcaatcgtcctgggagggagggaagtcaatagaggatcctaagcagactctcacgctgatggggtagccatgtaccctagaaattaaagacattgcggatgctacg

SEQ ID NO: 80605 - DNA, 199 bp, Zea mays
  Clone ID: MRT4577_173531C.1
gggacttccattacccccctctggccccactgcccaggggcttttttattttgctggtgcaccccaccaccatacccatcaccagcacccacctcaaccccgccaggagcctaggcacccccatcatctaccacaggccgcacggttcgcaccgacacgaaacttagccagaaagacaaatcacgcacaaaacaaatac

SEQ ID NO: 80606 - DNA, 317 bp, Zea mays
  Clone ID: MRT4577_173532C.1
tgaagatattaggactagagatatgtgcagacacaatggtaggggatgagatgctcaggggcatatctggtggacaacggaagcgcgttacaactggtgagatgctggttgggccagccagggcgcttttcatggacgagatctcaactgggcttgatagctccactacattccaaattgtgaactcgctgaggcagtccattcacatcctcggtggcacagctgttatctccctactgcagccagcacctgagacatataacttgtttgatgatatcatactcctctcagatggtcaggttgtgtaccacggtccc

SEQ ID NO: 80607 - DNA, 308 bp, Zea mays
  Clone ID: MRT4577_173533C.1
aaaaaaaggacaatgcaaaacctttttaaacattttttatttccaggcccggttcaaaacaacaacaactttacaagctttgacttgcccaaaaaacatttaaaccaattgccccataaaaaacaaaggagggagtaaatttttcttgggtttatcccaaaaatacaaaaaatacccagccagcgacacatactatttttttcccccactatattataagccgatccaataaacaaaaggcatttatatttatttgggactgtttgatttataaaacttcccttctccagaagcaaaattttaaaaat

SEQ ID NO: 80608 - DNA, 232 bp, Zea mays
  unsure (1)..(232): unsure at all n locations
  Clone ID: MRT4577_173534C.1
cnnnnaaggacgctcgccgtctacatgcctttgcttgggttaatattgacttcttttttcgtcctattttttccctttttttatgttcggcgtcttttttgttaccccaattatattctcgtaacggtcgtttctaatgggaatggggggctctccgcgggtcttttagccgttgtttttttatgggttccttttttttgtttgcatttttttttgggtcattcggggctgt

SEQ ID NO: 80609 - DNA, 285 bp, Zea mays
  Clone ID: MRT4577_173535C.1
aaaacaaaagaaaccggaacgggcttaaaaaaaaaatctatatgttataaggcttacagagggcacgggaaaagggcactagaaccagaaacatcagaggggaaaaatgaaacagtaagtcccatgaggccatgaccacacaaaccaattttgaactataatttgggagccttacatacatggaaaaagcatttatttattaaaaaacaaaacaggggagataacaaaaaaagctggatcaggtggaaaagccacacattgggggggggagggaaccgcaccaag

SEQ ID NO: 80610 - DNA, 759 bp, Zea mays
  unsure (1)..(759): unsure at all n locations
  Clone ID: MRT4577_173536C.1
ataccaccactgggtcttcagaccattagctttatctactccagagcgcagaagaacccgagcgacaccatgagggagttgttcgttgccctcgctctcctggctctcgctgagagcgccacctccacgcatacaagcggtggctgcggctgacagccaccgtcgccgagtcatctaccgccgccggtgcatcggccacctacgactcacctgccaactccggcgcatttcccaccgccgttccacctggcgtcgccgatccacctgccaccgacgggccatgtgccgccgtgcgataaccatgccgacgacgaccatgccacctacaactactaacaccgagctggtactagcactgagcccagtaacactgatgcacgtggcaacctacttatacaagcccgtgccagcttccaacaaactggctctgtggaaggaacccgcacatgagccacagcaacagagtgtctcaggtattggcagcagctcagacaactagccatactgatccctgtagcgtacagtacaacgagaacaactgctgtcatgctagcccggtcggtgtgagcaaagcacctacatacacncgatcatcaatngtggcaccagattgcaccagctctgactcaactagctgtggcagaccctgttgcctacttgcaacagctgtttccattcaaccaactgactctgtcgaactgtgctgcgtacctacaacagcgacaacaggtacttaatccactggtagtggaaaaccca

SEQ ID NO: 80611 - DNA, 849 bp, Zea mays
  Clone ID: MRT4577_173537C.1
gttggggccttgggggagctggccaacggttccgttgtcgctccatcgctgccgtccgccacgccatccccgacggaaactgccctgccgcggctgcctcactgtctgccagactgcccacccggccccgtctatcccttggaaagtcagacgagaaagcgtgctgggcaccgcaaggaaagcgaccacgaaaccgcgcgcctcctgcctctccatcttctccatatatactacctatcgaccgtgtccggcgggccgggcctcttgtcgtcttggtgcgcgcgctcggtttcccttcctttttccctcgcgcgcggccaacctagaaagcgacggcggagccggagagggaaggggaggcgggccggctggtcaagggcggacgatgtgctgcggcggcgacggggagtgccggccgctcgggtggctcctgggcctgcccttcgcgctgctcgccgtcctcgtctccttcgtcggcgccgtcatctggatcatcgggctgcccatctcgtgcatctgcccctgctgcctctgcgtgacggtgctgctggaggtggccgtggagctcgtcaaggcgccgctccatgtcatgacctggtttacctccaagatcccctgctagctgtcccctgctttctgctgtgcggatcatacatacatcttgctttagccggagaggttgctgtactgtactgtactgttgtttcgtttcgtcgtcgcttggtccgttcgtcctagtgctactttgggtttctgcgattgatttttcagactaaaaaaaaaaagaaaaaaaaaaaaaaaaaaggggcggcccttgttcttgaattgaatgcatgcacttgtgctacc

SEQ ID NO: 80612 - DNA, 767 bp, Zea mays
  Clone ID: MRT4577_173538C.1
tgggtacctcgaggccggccggggccgtgcccgacccaaccaccacgccacttccctcccgtcccgtctcgttctcgtcgcacctcgccccgcagggaagggggtgcgcgctcgctcgatccgtgcgcgccagccagcgccatggcctcggaccaacaggccctctcggtcccggtccccgtccccgtcccgtccaaccctaacccgagcgcactagccgacccgaccccgccctcggcctccgccccgcgcaagctccctatcaagcgccggtccccgcggccgtcgtcctcgcccccatcctcctctccggactcctccgacccgctccgcgcgcccgcggccggcggcggtggcggcggatctgacaagcagcagcagccgcccttcaagttccagcgcatctggtccgagtccgacgagctccgcttcctgcagggcctcctcggctgcggcgcgcagggcctcgtcttcccacgcgacctcaacgtcttctacgaccgcttctccgagtccatgccccagccctacacccgcgcccagctctccgagaagctccgccgcctcaagaacaagttccgcagcatgtccgcgcgcgtcgcggagggcctagacccggctcgcctcgcgccgcacgacgcgacgtgctccacctctgctccaggctgtgggaccccgacgacggcgtcacgtcgcccttcgtgactagcgccggaacgtccgggaacaagcgtcgacgcgacaacctgcaaggcacgtctctccct

SEQ ID NO: 80613 - DNA, 251 bp, Zea mays
  Clone ID: MRT4577_173539C.1
gattaccaacctattcacatggacttcaacaaccataccagctacctgcagcagcgccatcattatgagagagatctgttgcatccatcacactagcgctcctaggcgagatgaaccccttctactactgctgaatacgcacgtccgtctttagctaaagatcgctaggaggaataaggatgagctgtctcaaatctgctataggcacctcatccagtaggtagatctagtcacatattgttcatccatac

SEQ ID NO: 80614 - DNA, 296 bp, Zea mays
  Clone ID: MRT4577_17353C.1
aagcccacgcgtccgcccacgcattcgtttgcttttagtgccattattccacatttcctcgccttcgtttacttaaaataagcagcgaacacccaactcttcaatcctataagctacaacaagctcttgcatctagcatcttataacaaccaatttcccaattacaacaacaatccttatcacatttaaccatacaaaccatcttaactcaacatcaactatcacttaacctactatcccttattaaccctattccctactttcaacaacatctgctttcatacaacccactttct

SEQ ID NO: 80615 - DNA, 333 bp, Zea mays
  Clone ID: MRT4577_173540C.1
accactcgtccgggaaccttacctatctgctgccgccgccgcctaattcatcctggctgggctctagctgctatctgggtgcgacttcacatactctattcctgaatggacgaataatatataacatgcatgtacagctagcgaccatgtctgaatgacatcttcgttgctagctgatgctgctactgctacctgtcactttggtgttctaaaagactctgatgaagcgttctgaatgtctgcatttcaagtttgctatgtgacgttaaaaaaaaagccgtatcttagatcttgatgaagccacggcatctatagacaacgctactgatgcta

SEQ ID NO: 80616 - DNA, 3284 bp, Zea mays
  Clone ID: MRT4577_173541C.1
aagaaatactataattttactgtggtaaaataatattgtaatacttatgttatatacaattgtaaactatagtactatatgctttaaaactatagtattctaaaaatgcattaccaaacagacaatcaaatgtaatgtaacggttagccgttttttttttcgagagagttcctttctgcctttctttgggcgcccaaatctggccatcatacggcctagacccatgtggacgtggccgtctttcgaggaaacatggacgtgaccgctgttgttgtggatcatttccaacttccaaggagacctcaatcagccaagcgaccagcggactgccagctccgtgagtcgcgcccggcggcggctacgtggcgacggccgtccagtagctggtcatacaggcgctggccggcgtgccgataatccgcgcccactcccacccgccgcacccgtccgcggagggcggccgccgcagctccgccagccggccatctcgcagctcgaagaccacggcgtcctccgagaacggcaccggccgcacggctgccaccttcccgtcgcagctccccctgaacccgtcggcgtagtgcgcgccggcgcccgtgtccggtgtggcgcagctctgttcgtcaacggcggccggctccgacggcgggtgcccgtggctcgtccacctccacgtcctcccctccatgtgccgccggtacacgtgcccgtcggagccgaccacgaacagctgggagccgtcgaagcacgggccaggggcgccgacgagggtcacgccccggtggggcgtcccgtgctctacccactcccacccgtcctgtgggctgaagtggtactccaccagccccccgtgctcggacaccatgaacagggagccggccagggacagcggcgatggccgcatggccgtccctggggagcacgataggaacaggtgaggtgattggtagtgcctgtgccagagctccgtgatcctgttgtactggtagaggcgaccgttgcggcctaccacgaagatgatgtttcttctgaagacctcctggtccactatgaaagcaatcttggtgtcaggaggactgtggcagtccttccacttgaatttccgcagcgcaaccgtgaactgtagcagcctgcctcgcttgttgacaaagaagagtgcatcatctgttgtcactctgcgcaatagaccagggatgccatcccatggagacccacttgcaacctgtcttcccttcttcatcgctgtgcagttaatccacaacagttcatctccatttctttctctaatgtgtaagttcccatgcacgtcgacaagatacaaactgccattgtagcttcctagtgttcctttcatggctgtaacatgttcatgtcttaaccacaaccaaacaccattgctgtttagatattcaaaagtcaatccattgtctgctataaggaaaagcgatctgtctgcatgcatcacccgcatgtggaagttaagatcaatggtccttgatagaaagttgtatgattcagtttcatcactctgctggtatctgttaacatttaggtagtgctgcttctcttctactttacgcctcctggaaggtgggttattgctcaagtcatttgattctgtgtctgcagctatattctttgctccactaatacaatttgtcggaccgtgctcttcggtgcaatattctgcattccaaccttctgtttctggtgcgtctaggatggaccactcgtacttgtttgatagttttcttcttatggtactttgggcactcggaccaaaatcagtaccccccatcccaggaaaatgtagttccccaagcctaccatcatctagtgggaataccattctgccgacttgaacatgtacacctgggacgtttcttgcaacctttgcatgctcaggggacatgtgatttatccattgtcctcttatcttattgctctgggccccacctgtatattttggaaactgatactcatatacttttcctgtggttgtcgttaaaaacattgaagtcgcatcattaagttcatccttctgaacttctgcaattgaactaagtctctgacccgtaggagctccatgtttgtcccacttccacttccttctatgcaagcgccgctccactaaaaggccatccttgcttatcaggaaaagagacactgagttagaccctgacaaaccatgcaaagcaaagccagccgatgattttaatgagatatttttcgccagttcttcactccatatatgctttttccatgatggctttgtttctttgtcaaactcatagaggtctccagtggaacttactgtgaacagggtccctggccgcagatttccagcatcagatatatacgacacgtctgcacctggaggacgcccatggtaattccaccttagaggctgaatttctgttacctcaagcagggatccattcatgatagacaggaaaagtttccttccatcattggatacaatcccatttcttatacgcatagcttgactttgtgtttttaatccaagattcgctgactgctggcttgagttgaatgccatctctgtccagataggctgggcatgctcatttagctgcaactggtagagggttccagcttcagacagagcaaggatagttgtattgacaatgaaagttgcggtggcatacccagccgaggcagggagctcatgaggagcaatcacccacaccaccccgttccagaacctctcgtagatggagccgctctgccctgtcacccagactgacgactctgacattcttgtcaaggaaattctcctccttacaggcaggacagggtcttcttctgcaccatctccctgaacccgccgcgtgtcttcctcctcctcctcctggctctggacgggaggaaggccgtgtcgtccaggctccctcgccagccgcccgatcgatcctacctttgtgcaggtgccgttgatgcaggacatgaggtcgaacggcgcgcgtacttgtacccaggtattgctctgctcctggtactcccagaacctgtccgtcttctgctcgaacctcctcgcttcgtgcctcggggtgggactcggagcgcgccatgaacgagcagggaccgtggcctccaggacggcgagagctgcgaagcatgtgaacaaccacgagaggaacctggccatggccatggccatcttagcaggtctttatccttcgttaagacgcatgctgccgcgcccccgaggttatagctgcgcagtcatcgggacgacggagcctggaaagctccctgcctcg

SEQ ID NO: 80617 - DNA, 387 bp, Zea mays
  Clone ID: MRT4577_173542C.1
agcgtccgtggaagactatagccggctggcgggccgaaggatgatttactgggtgcagaccctacctatgcagatgcctctgtgctgaatctaccgagcaaaggatgcgatggccagctcaccttgcgaagcttctccgacaaggagaagactgcctgctagggcgcgccccaggggcgtgggcccacctgcgattcctacaggcgcacatgcattacgcgcgacagttccaagcccaccgtctcgctatcgctgggcgcgctccacggcgtccccaccgtcatgctcgaccagatcctgcgcctgttgagaacacctaacgaggcgcgctcgagcgccgtgtgcctcacctggcgcgtgctcgcgttcgacaacaggctgtagcct

SEQ ID NO: 80618 - DNA, 368 bp, Zea mays
  Clone ID: MRT4577_173543C.1
atcattcaactcctactacctaatgcagcatataagtgataaaatttttaaagcaacaagtaggtggcaaatgcaccggggcttgcataggataaacactactttagtgttgttagatgacgtccacttggcgagcatctcacatcctggcgcttgatccgatcacgcaaatcttcaagttcattcatcagtatcccttgctaagaaacccacgcttaacagcatctcatggtcgactcagctcgacttccacatcacgtgatcaactagcgtaccaaggtcgaccacaaggccagggattgcagatcgacgacgtgctgttgcggaccaacacggttgcggggatttcgacgatagcgcgcaagcgc

SEQ ID NO: 80619 - DNA, 266 bp, Zea mays
  Clone ID: MRT4577_173544C.1
cccacacctctttatcccttcgtttacagttcttacccaaacctacctatttggggaatcgttattttcttatccttccccccttcttagtactacctttttttataactaccctctcaatctgctatagaatcctttcttttcaactaacatcatttcttttaatctcttcattaaatatatctcttccttaatcttcttattttatgctcctttcaacttctacttccactacttatacttcctttactattattactactatt

SEQ ID NO: 80620 - DNA, 277 bp, Zea mays
  Clone ID: MRT4577_173545C.1
gtgaagaacgagagcaagaaaaagatgatttagatgttgccctactacctaccattgtggaaaaggtgattcttcctaaactaacagtgatagctgaaaatatgtgggaccctttttctacaacacagacttcaagaatggtgggaattacactaaaattaatcaatggatatccttcagtagtgaatgcagaaaataaaaattcacaggtatacctaaaggcactttattgagaatgagaagaacttaagatgaggaggattatgccctatatccc

SEQ ID NO: 80621 - DNA, 274 bp, Zea mays
  Clone ID: MRT4577_173546C.1
ctaagcatcatatatataatccataagggtagcattatttatgtacaaatcgattgaaaccacctgtttttatccttttaaagtcggagatacctatcgagcactgtagatttttgcaatctaaaaactgctaggagcagcctccaataagctcaagtactttgcgatagcctgtccttcgttactgacataaataatcgagtcatccaaggcattccccttcagttcattggcaagctcacttttcattgacgcatccctggctggaactgga

SEQ ID NO: 80622 - DNA, 379 bp, Zea mays
  Clone ID: MRT4577_173547C.1
actctattaatggtgctaaggcacctgcatggacatatcatactcatttaattgactatagctcatcaaaaattatataaaggctaccaccaatggacggagatgatgacctaacactgctggctactgaagctcagctggtttgagtaggcctcattcgatatctatgctacaggatgtcccaaggatcagcacacatctgttaaagactacactactgctgatgccacattaaggaatcttggctcacaccatgtaccctgcatgagtgatatcactcgatgatgctgggatggaggtgacagaacaatgctggtcatgtttcttttggagacacattgttgaaggtaggcaaggaaaagctttgtgaatggaatga

SEQ ID NO: 80623 - DNA, 155 bp, Zea mays
  unsure (1)..(155): unsure at all n locations
  Clone ID: MRT4577_173548C.1
agagtgtgaagaatttgtaagaggaaaggagtatttttagatggtgagaggaagagagtaatgtgaagatgtatagatgagagtgtatagaggatagattgtagatatgttntgatttatgaatatagtggagaaagtgataagtattttgatga

SEQ ID NO: 80624 - DNA, 770 bp, Zea mays
  unsure (1)..(770): unsure at all n locations
  Clone ID: MRT4577_173549C.1
cggncgcgtggggngaagcgggggtacctgctccaggcccgcccggcacgggcaagaccagcctcgtcgctgccatcgccaacctgctcgacttcgacgtctacgacctggagctcaccacggtgcccaccaactcccacctccgccgcctgctcgtctccaccacgcccaagtccgtcgtcgtcgtcgaggacatcgactgctccctcgacctctccgaccgcaacaagaagacaaagaagggtgctggcgtcggcgtcggcatcggcaccgccggcgacgaagacgccgcagcacagctcgccgtcatgtcggtgtcgccggtcgcggcggccgtgatggggcgcgagtccgtcagcctctccggggtgctcaacttcgtcgacgggctctggtcgtcctgcgtcggcgagcgcctgatggtgttcacgaccaaccacccggagcggctcgacccggcgctgctccgcccgggccgcatggaccgcaagatcgagctcggctactgcacgccgcccgcgctgcgtgtgctcgccaagaactacctcggcgtcggcgacgagggctgcgacgacgccgacgcggaccccgacacggtcaacgccctcatggcggaggccgagggcctgctcgccgccgccgaggtgcaaatcacacccgccgacatcgccgaggtgttcatgggctgcgacggcgcgggcgccgccgccgcgctgaggaagctcgtgggcgagctgcggcggaggcgggatgctgctgcccttgccacg

SEQ ID NO: 80625 - DNA, 569 bp, Zea mays
  Clone ID: MRT4577_17354C.1
ctccgtatgaccactctgtgaccgaggggaccggcagcggcgtaaggagtcttcctctctaacgctggcaacgtcgacaccgctggcaagcttctctccgattgtccctgctccagtaagagtaggcgaggacgagcctcccccatcttgggtgttggtgcctgacccattttctcaagagatgggcttcgctccgataccagctgtgacggaacctcccaagtcattaggcccacctacagtttccttgtccaacggacctcagataaccctgcaggtacgtgaattaaccacgtgatgcggagaaccagagttgagtcgaccacaagataatgctacgcgtgagcttctccacaaggtgatgctgatggacgaacctgaagatggacagacgaaacaagtgtcagaacaaagactgatcgtcaagtgatcgtcgtctaacaaacactaacctagtgtttcatcccaggcaagcctcggtgcatgcaacccattccttgtatttttaaaagatttttatacactttaagtctagtgaaatgtgcattaagtttataggagttgcttgg

SEQ ID NO: 80626 - DNA, 752 bp, Zea mays
  Clone ID: MRT4577_173550C.1
ccacgcgtccgagcgaacgtgcccaacaaagtcgaagcccgaaacgaacgagcgggccgcagaacttatattgggccaacgggtgtgttgtgatgcggtccagctgcatcttttcgatcgccacggatccggcccacccaacacacaagccctgtctcatttgacgacgagaagaaaggcacagcctcctcctttccgatccgtccatgattggaggagactcgtcgctttcgtccgtccgacacagccatgtatcccgatatctcacgacgcagacaggttttgcttcccccttgcacctagctagcgtagtgtccgccctagctagtagcagcgactagtgcagcaggacggatggctgggaggctctcagctcgcgatctgcacgtacgatctccgtgcatgctgtcgggccaccattggcggacggcggcgaggcgtggtggccactggacactggcgagactgccccgttccattccatgcttagtcctcggtcgcccctgcatcatgctgcttcattattagtcctgccttttccgaattattagattggattcgcgcgtctcccctttttgtcaccgatcggtctcaatgggccgtctcggtctctgcttttctgcatgcatatagctattcatgtgagtgcttgttaagttcggggtagattgagggagattaatctcctattcaaatttaaatagaagaagagttaatctagatcaatataatagcgctttattatttactgg

SEQ ID NO: 80627 - DNA, 315 bp, Zea mays
  Clone ID: MRT4577_173551C.1
aggccggccgggatcgatttccatcgtcggggttctcccttcagtccttttcacagtctcctccacctctagccccgtcgatcaactgcaggtcagatgtacgtcttcgtcggcaagacagcccgaaggaaaaagaacttgagccctccgggtgtcaggcctccgccgccaaaacgttcttagatctggagaactagcaaccagtgactgctgcccgacctcaaggatctgcagctcaatgatgtcatcgagatgcatgttatggggagaacgaagggtggcgtcatgcagtgccgacccggtgcgcaaggcctt

SEQ ID NO: 80628 - DNA, 707 bp, Zea mays
  unsure (1)..(707): unsure at all n locations
  Clone ID: MRT4577_173552C.1
ctctaagctggccagnaggtcagttttttatgcgcaagngactgatgttcttagtaaatgggtgggtgaggctgaaaggcactaaagttactttttgaggaagctcaaaagaatcagccgtcaattatattttttgatgaaatagatggcctggcacctgtgaggtctagcaagcaagagcagattcacaattcaattgtttcgacattgcttgctttgatggatggccttgattcacgtgggcaagttgttttgattggagcaactaacagaattgatgccattgatggagcattgcgtagacctggccgatttgatcgtgagttttattttcctttacctggctatgaggctcgagcagaaatactggatattcatacaaggaaatggaaggatcctccaccgaaggaactaaagatggaacttgctgctagctgtgtgggctattgtggagctgatttgaaggcattatgtacagaagcagctattagagcatttagagagaagtatcctcaggtctacactagtgatgacaagtttgtcattgatgttgattcggtcagtgtcgagaagtaccactttttggaagctatgtctacaataactcctgctgctcacaggggatctattgtgcattcaaggccactttcaacagttatcgctccatgtctgaagagtcatcttgagaaaataatggaacatatttc

SEQ ID NO: 80629 - DNA, 494 bp, Zea mays
  Clone ID: MRT4577_173553C.1
attcacctctcatccatttctcacgcgaaggcaagagcgagcgcaggaagaacatctctaggagatctcaagcggagcgggatgaggacgatatgcccacggtcgacccgcgtccgccgttcttgcgacggcagcggaaccttccttcgcgccttcctccctcaccgcatccttcctggctacgacgtcgccaaaatgccccgaggatgcacccaagaagtcctcgagaactccgaaacccaccaagaacacctgacgaaccactggcaagacatgtgaaagacgcgtgatagaccagtgagtgctcagatgcttctgaaaggcttatgaatgccccacttacacccctccttctccgaaacgctagcactctgtgtgccctctgtgatgcattaggagggaaatgggatgcacctgcatcgatccacctccgatcgacttctgtctgagagagatctaggatgtggcctgaatgcatcggggtcgcatctaaa

SEQ ID NO: 80630 - DNA, 379 bp, Zea mays
  unsure (1)..(379): unsure at all n locations
  Clone ID: MRT4577_173554C.1
gcggaggacgggcttctcggcggtggtgccgtcggcgtggntgacggcggggcggctgtgcctggcaggcgcagcgtcgggcgagccgatgccgcagtactacaatgccatcttgaggttgggcgactacttctccgacacgggcaacttcgtgataattaagtagggcaaggtggccaacatgcccaagttaccgacgtcgtacgcgaggggcgtggaacgggcggctggtaatggacttcctgaacgatgtgtttggaatgcgggtggttgctgcgggggagaacaaaggcacaaactttaagcagggcagaaagtttggggtgatggagagtgatggaggttgatctcaagtacttaaaggggagaaaagggggga

SEQ ID NO: 80631 - DNA, 560 bp, Zea mays
  Clone ID: MRT4577_173555C.1
cgttgctgtcgatttcatcatcattacagtacaaacaataatgcaattgcgagttcatgataggcagggatcgatgtagctatattctacaagggtactaatgaacaacaatcagctgctgttcagttgacgacgttgcactttctcctgatctcgccctggtcgccggtgagcacgccgatggctgccatcttggccatggagacggtgaagtcgtggaagaagtgtccgtcgaacctgccggaggcggcctgcagcacgtaggccctggtgaagcggtggtccaggagcgatgcgtcggagcggagcagtccgcgcctccgcgcgacgtggcggtagtagctggtgtcgaaggtggtgcagctgccggggtcgagctcggacgccgccgtgctgctggtgctactgctgttgctggggcagcgcatccgcagcctgtcggcgtagcgggcgtcgagcgccgggtcgggcgtggtgcaggtggcggaggcgtagaggcggtcggcgtaggaggcgcagtgcgccttgcccagcgtgtgcgcgccggacagcacggcgag

SEQ ID NO: 80632 - DNA, 207 bp, Zea mays
  Clone ID: MRT4577_173556C.1
tcttccgcatctgctcatattgccctacatctagcaagctgtggcaagctgtagggcattctgtcctcagtcactgttgctcatctgctaccagcatttcgccattaacacggtgtgcgttcttacatcatcaaccatgcttgccctagagccagctcgttgtgccagaatcaccgcacatttcatgacatcccattatagctagtt

SEQ ID NO: 80633 - DNA, 400 bp, Zea mays
  unsure (1)..(400): unsure at all n locations
  Clone ID: MRT4577_173557C.1
nnatnntatatctttttttttttttttttttggggggggtcctaaattatatgagttagattatggtaaaaggattacagtgtaaaatattactttgaaatcaccaataagctaaaagaacatagcattagataagttgaaagaactagcactgaacaggtcctaaaccgggatagcacacgacgagttccattttctggagcgtgctagtgggtgcctcctcaagagcacaactggttgtcgcgcctacgaaagtaacgccctcatgggcgcacatgatgttgcccgcaccgtctaggcggccagaggaacgatggtgtaaccaccgacggcgggcggcggcgttggcgttcgttccaaattcgacggccggatggcccaccgtgaggccttggtgatc

SEQ ID NO: 80634 - DNA, 643 bp, Zea mays
  Clone ID: MRT4577_173558C.1
cagtcgccattcccgaagctccctgcgcgtgctgcttcttctctgctcctccagccgcgccctacctttctctctccctcgcagcttctcttccctgcgagatcctccctgcgttcctgctcgccatggtgctggtcgtcgtcgccctcctctggagttcgccttggcccgcgcttcctgcatcgcgcccagccgtgccttctcccatcgccgcgcgtccctactccttggtctcccttatctccttccccagcgccagccgtgagctcgcccatggtgcccactcttccccaggtccgatgttggttgccttgtgcactcgatctcacagacgccgagttcttttcccagtcaagccgtcccagatctcacccggtcgcagccgtgttgctcgcccttgcgctcgtccatggctgcagttcaccgaacgtgcgcccttgagtcggttgttgttcccatgagcttcgctggttgtgcgtgcgccctgctcggtttttctggtgcacacgccgttcgttgacctcaccggtgtcgttgaactgtcgaacccccttcctcaggcgtatcgggtctccatgcccggttgtgtccttcgccgtcgcgacgtgtgtgcagcaacgtcgctgattcctccatgattctt

SEQ ID NO: 80635 - DNA, 406 bp, Zea mays
  Clone ID: MRT4577_173559C.1
gggtaaaatgaattggggaaccgggcccaacaaatggcaagccatgggccagggggccacccccctctcgagggaaagaacaaataacggggccccaaatttaactggtccctcaccgattcccatttgtttaatgaaaatccgaaagggggaagggaaaaaaccaaccaaagggagaccaaggggggcccctggcgggcccaatcaaagcacaccccccccccccttgggaatgcccgggagcaataaaacaacgcaacgcaacccattttttcccccccttgggtttttcccttcgggagtccggcttctcgtccggggggtcaatgaatgtttctccccaaaaagggggccacgggggcccccacgatggggggtgccaccccggaggaacccctggtggggg

SEQ ID NO: 80636 - DNA, 677 bp, Zea mays
  Clone ID: MRT4577_17355C.1
ctttctaacctagcctctgttacttctcctccgccgccctcccctccattcccgccaccgccaattccataccgcgctccgcatcctctgctgacagcgagaagagatggtacgcatgggtgatggctcggcaatcgacatctatctcgggacgacgtactcttgtctcggaggctgacatgacgaccgtgtggagatcatcgccgacgaccagggtaaccgcaccacaccctcgaacgtcgccttcaccgactccgagcgcctcatcggagatgcagccaagtaagctgtcgccatgaaccccatcaacaccgtctttgatgccaagggtctcattgtgaggaggcttagtgactcctctgtatagagcgatatgaagatgaggcccttctaggtcattcctgggcccgagagagaagccaatgatagttgttcatgcacaagggggaggagaacggtgtgcaggcgaagagatctcctctatggttctcgtcaagatgcgcgagatcgctgaagcttaccttggcagcaagagcaacaatgctgatgtcacggtacctgcctattgcaacgactcgcagaggcaggccacataggatgctggggtgattgctggactcaatgtgctgcgtatcatcagtgagccaaccgctgctgctattgcctatggtcttgac

SEQ ID NO: 80637 - DNA, 485 bp, Zea mays
  unsure (1)..(485): unsure at all n locations
  Clone ID: MRT4577_173560C.1
gctttctatccttctgtgaatttttttctagtttttgtgcagttttagtgagaatacagttattaatttgaagaggttgcattgaaaaatgtaatagggaatagagaatgcagttggtcagttttgtagagaagattactaaaaacacagtaaccagtaggattttgaaatataatctttcaatatattgatgctttctccttttaaatggaagttctgaatatttatgattttcatcttcagttctcccatgggaaataaagcatgtcaaggatagagtttcagagaactgttcttaaaatgaccgtgttgataactgggtttggctcttttgttttaggaacatattcatgcaggagggtgttatgaaagaaagaatatcctnattggtgttttcccttagnatgtgtttntggagtncttacaatggacggagtatcagaacagatcttcattatcaaagaactgatctgatactccgncca

SEQ ID NO: 80638 - DNA, 562 bp, Zea mays
  Clone ID: MRT4577_173561C.1
atggacttcgcctcgcccgacccagggctcggactcaaccacgactcagaagacgacggactccgcctcgcccgaccccagggctcggacacagcctcggcttcggaagacggtctccgcctcgcccgaccccagggctcgggctcaacctcgacgctggacgacgaactccgcctcgcccgaccccagggctcggacacagcctcggcttcggaagacggtctccgcctcgcccgaccccagggctcgggctcaacctcgacgctggacgacgaactccgcctcgcccgaccccagggctcggacacagcctcggcctcggaagacggtcttcgcctcgcccgacccggggctcggactcgacctcgacctcggaggagcctccgcctcgcccgaccccagggctcggacacagcctcggcctcggaagacggtctccgcctcgcccgacccagggctcagactcgacctcgacctcggaagacggactcgacctcgacctcggaggagcctccgcctcacccgacctagggctcggaccgaccacgtcacaggggggcat

SEQ ID NO: 80639 - DNA, 326 bp, Zea mays
  unsure (1)..(326): unsure at all n locations
  Clone ID: MRT4577_173562C.1
aaacccgcaggagccacgcgtncgggtcacaccattatatccccctttctttttaacaccgccaccctcagcaagcaggctgcgatcttctaaaggttgtggacgaactcaacaactaactcacttcatttattcagctacttgttcaccacactcccattattatctactgacaacatttagcatcatacaacataaactactatagctcctcatcaccacctaatccagctatactttgagaccactattataccttacactattaaaaaggttgaatatgacgctcattacaatatgattttttatctacaaccctatgtata

SEQ ID NO: 80640 - DNA, 204 bp, Zea mays
  Clone ID: MRT4577_173563C.1
tgcaatttaccattatcttgtatattagcctgagttcgtgatctgctttagttcagtttaccattagcttgtatattattagcctcagtttgtatcacttagttgtttggcagcatattagcagaatttcgggcagtatatgagcagaatttcgctgcctggtccaatttcccatagacaagtatgcaggcaaaattcattgtc

SEQ ID NO: 80641 - DNA, 535 bp, Zea mays
  Clone ID: MRT4577_173564C.1
cacggattagcggctacagctgtttgagaggcgtgtcccctaactaccttagccagagaattagaacattgattgattgaaaccacatccgcaacaaatgtttcacaaaatcatctagcttcctcggcctaaagaaaatctaaacaagaacatataagaccatgacttagtaaattctcctattaactagttaattgaacaaagcttatatataaatattagtcagttggtcatatgtgaagataacttgtgaatttactttgcacaactttttcagacgacacctcctaacctagcggtaccagaagatccacatgttgaaactccgatgcaacattgggtggatcaattgtctgaaaatggtggagttagaccccaaaactcaaatattgaacggactggtggtggtggacctcaaatattgtctgaaaatggtggagttagatcccccaaccttaagtcagatcttcattctttgcttgtatggactcgttttttggattgttaacgtgtatgaaccttgttgttagactcc

SEQ ID NO: 80642 - DNA, 653 bp, Zea mays
  unsure (1)..(653): unsure at all n locations
  Clone ID: MRT4577_173565C.1
agcagactgcagacggctgagtatttgtatttattacttggagatgagcgctcggccaaacggccagcgccagcgtcgaccctggtcgccaaaggtggcacaataccgaaggagagagaggacaaagtccctgtactgtacgtcgccgcacaggccacagcaggatttcagcacatgtaaacgatcaggatgcactcgatttgtttaaaatcaatttcatacatattaaacaagtgtactgaatagacatgtaaatgaaacaattctgaattaatagaccagaaatccaaacctttatcctatgcatactgggacggttaaattttgaaataggtagagctcgtgacgagttatccatatgacaggaaaaaaaaaactgatttggtgaagcattgctgatagacactgaccactntatatattgctgacagatacagagagtttcgaacaaatttacttttcttctagaaattcctgggaactagacagaatgctacaacaccacgaacccccattaaaacttcaacanatcctaaagacactgtcatcttctcatttttctagnttccatcaatttgagatgaaatttacacaatgccccttatgcccacaaagcaaacctcaaactttggaaatgactaataatgccctaa

SEQ ID NO: 80643 - DNA, 275 bp, Zea mays
  Clone ID: MRT4577_173566C.1
tacctcgcagccggccgggccggagaaagctcccgcacaccctgcctgatccctctcaatcagctccccagctccacgccggacgcagcagcagcagcagtagagatggccgtcctcgccgcctcctccacggtcgccttcgccgtcaagccgcgcctcccacgcgcgcgcctcaccgtggcctgctccgccaccggcggccgacggtaaccgaagcagtagcgtgttgctcgcatcctccgcgcacacgttctctggccgcgctggttctgtcg

SEQ ID NO: 80644 - DNA, 320 bp, Zea mays
  Clone ID: MRT4577_173567C.1
agtggttacaactcagtttttcgcaggaaccagcaagccttgaagctgcgccgggccgactacgtatatggcacatgctgacagtaccatccatgccactggagaagcatacactgtttgttgtgctaaggcgtggaggtgtcttccccagaacctgcagtttaaagaacgcaccggaacagagttcgcttacgtcagtgccacgcatggcctcgctaccatcatgctacatggctacaacctgacacttgttagcggcgcgaatctgttcatgcgggaagacgtcgagctcaccgacggaaatgtacaagtgcggggga

SEQ ID NO: 80645 - DNA, 507 bp, Zea mays
  Clone ID: MRT4577_173568C.1
tcgacgaccagactgctttctgtcactgtattggcaacgactgggctacctcactctccggagccctacgcaaggtcggcaaggatccacgccttctcaggcaccgagctcccgccatcgcattaacgatgtacggtacgcccatggtagctctgcctgccgtcctacctagatggggctacgtcactttgcagaagatcggtgcttcgatgaaagccgctggcggtgtcaagattggagcaaccacgtgcaacctgcacggctgcttcatctgctgccatatcggtaaaagacgctgaagtaacactcttcggagacggacacgaaatgatatgacccatggattgagcgacaaggatgaaatcgcctctccagaggcttacaagagcagaggctgccctagtccataagttacacgagtaaattttgatgctccgtgtgtcctctatctcggcaataagaacgacagtccagatgtccccagaagtatgattgtgcgttgcgcac

SEQ ID NO: 80646 - DNA, 563 bp, Zea mays
  Clone ID: MRT4577_173569C.1
gccggcgggaaggcgacccaaacacaaaccaaccagcacgactcctgaaagcctgatcgcactccactgaccgcctcacctcctctggaggagaccaaaaggccgagcacaccagcaccaacccagaacagagagagagagagagagagagagagagagagagattactaaaaggctcgcgagcaggttagtcaaaacgtacttgtagctcgcgccggcagcccggcaccaatcaccggaggacagcgcttccctctccctgcgtggctatatcttcttcgacagtgggagagacagagagagacaacacccacacgctcgggatcggagaacgcgcacaggcactttccatcccccgatcaaatcgtcatcatgtgcaacgccgccgggacagattccttgccggcgccggcgcccccgctcggctctctcaaggactccgcgcaccagctcctccaccccgtcgacggagaccaagccaacgcccatgcactgtagctctccaaggtggccggcgaggctcgggcgatcggcagggtgtcggtgccgatggcgggcacggg

SEQ ID NO: 80647 - DNA, 998 bp, Zea mays
  Clone ID: MRT4577_17356C.1
gctcttttattagcatgatgattgggtttgtaaagccaacatcagggaacgcttttgtacgggggttcagcatacaaaatgacatggaaaagaatacagcagcatgggagtttgcccacagaatgatatgctttgggagacactaactggtagggaacatctccagttttatggccgactgaagggcctcagtggttcatccttggatcttgttgtcgatgagtccttaaggagtgtaaatttgcttcatgggggtgctcctgataagcaagtgaagaagtacagtggtggcatgaggaggcgccttagtgtcgccatctcgttgatcggagatgctaaagttgtgtacatggatgagccaagcaccggattagacccagcttcgaggaagagtctgtggagcgcagtgaagcaagcaaagcaggatagagcaatcattctcaccacgcattccatggaagaagctgaaactctttgtgacagactgtgtatcatggtcgatggaaagctccagtgcataggcactcccaaagagctcatagctagatacggagggtactacgtgctgacgatgacgacactgccggagttcgaacaagaggtcgaagatctggtgcgcaggctctcgccaagctccaggaaggtgtaccatctgtcggggacgcagaagcacgagctgccgaagcaggaagcgaggatctcagacgtgttcatggccgtagagagcttcaagaagagggtggaagtccaggcctggggcctcgcggacaccaccatggaggacgtgttcgtcaaggtcgccaaaggggcccagtccagcgaagaactctcctagagtcgtagtctacatgtaatggtgcaagggcaggagcctgctgttgatgctaggtgtatatatatgtacagcacgtaaaatttcttccgttgcaaagcaaatggtttggtttgctcacctttgattttggaattttgataacaaggattatttggattgaatt

SEQ ID NO: 80648 - DNA, 293 bp, Zea mays
  Clone ID: MRT4577_173570C.1
attcggctcgagcaagagcttgcagagccgattttattcgcaggtgtgggcctattgcatgcgccctgcataagagagtcatcgctctttgtacgggcttcataaagctatgttcgacgcactaagggtcttcttatatcaaggcgtctagaagggcatgctgtctcggctacgccggcacacttgtgccccaatctgcagtcaacaaggctacatgtgaacacttgatctccactctgaacaccttgtgtgatgatccaaagcacgttgtgtgtatcatcagtggacgagga

SEQ ID NO: 80649 - DNA, 550 bp, Zea mays
  Clone ID: MRT4577_173571C.1
ccggccggggatcatcctctcctctcttgcttgtcctctccatctcggagatcgacggatgctggccggagtcgctcctgcggccgatcgttcacatggcaactatgggctggctctgccgccgccgcagggccctgctaactttctcccgggactccctcgtcacgaagctccgtgtaccgtatgctccctcctcgctgacggagagtcacatcccggcgacggtccgctctgtctctccggcaagtgccgcgtctgcgccgccatgggatccagctcctcctacagctccagaaatcgaatgtcactgatgctgtcgctcagatttacattcgatgaatattcctctagtatcaaaaggctatatagatgcagaagggtgattgctcaaagtgatggtgaaagctcttgcggtgaagcacacggaaaagatcgagccatagactacaatggctattgcaggagaagctggttctgtcaccaaactaggtgcagaggatgctattgttgttggcggaggtaatatctgtccgcggagtctgcttgggct

SEQ ID NO: 80650 - DNA, 288 bp, Zea mays
  Clone ID: MRT4577_173572C.1
tgcatttatatggaacaataacatgagggcaccacaactacagcaacttgggctggccgaccatgctgcctactctcagcgacggctgtttggtccattcagccgacttggtgcgttggactctgctttttgtgcgccgcgtcggcagctccccttcagccgggttggtgctgcctacgccccagcggcttcttcccttcagccgactggctggtttgagctctcctgcttgttttcagccggcacatctactgccttttcgccggctagctggtgtgagccctgctg

SEQ ID NO: 80651 - DNA, 1450 bp, Zea mays
  Clone ID: MRT4577_173573C.1
aacaaccgcggcggcgtcaccggcgggcgagcgcgatgagcaggcaagcacgtcagtacgcgtgcgggtctccgctattcctttcccttccctctgtccttcattctcattcggtcccgtccccgcgccgcgtggcgtggtggtggtggtggtctgattggggcgccatgcgcgcgcgtgcctattggttttcagcagctcgcgtgcgacgacgggttcgccggccgcgcctggacgtccggaggcgccgagcgtcgctgggaccgggagagacggtggcggagggcccgcggggggcgacgagcgtgcgctgctggtcgtgacgacgatgccgccggcgggcgccacggcggtgggggtggccgcgcccggcgtgcctgtggccgagacggagacgacaacgtgggcgcggtggacgtcgatgtcgtccgtgccgtgggcgaggctcgtgtttggattgctgctcctcgttctgctcggcttcgcgttcttcaagtggggcctcccgtttctctccgagaaggtgatcatgccaattattgaatgggaagcaaaatctttcggcctccccgtgttagcggtggtgatagtcgtttctctagcggtcttcccggtggtgttgctgccctccggtccaccaatgtggctaaccggaatagttttcggctacggtttcggcttcctgatcatcatggtcggggtgaccatcggcatgtctataccttactggatcggcctactgttccgcgaccgcctaaacctctggctggagaagaaatggccacggcagattgctctgatcaaactggtaggtcaagggagctggttccagcagttccgcgtggccgcgttgctcaggatctcgccgttcccatacgcgttgttcaactacgctgtaaccgtgacggagatgaagttcgtcccttacatatggggttcggttatcggaatggtgcctgatgtgttcatcaacatctacagtgggcggctgatacgcacgttggctgagctgaattatcggaagcaccggatgacagcagtcgagatagcgtacaacgctatatctgtaattgttaccgtcgtctttgcgattgtatttacagtatacgcaagacgagccctggacaacatggaacagtccgaagtcgcctgcgctgaacctgtcgtcggtgaccctgctggatcgaccgagtccagggatcaccttcagggatgttcgactgcacgttctgtaccaatcgatgttgtgtaatgacacaggtacagtacacgtctaaacgactggttgacttaaagttcctttgttgtacatacaacacgatagatcggtagaagggagatcttaacaatgtgtgtaattgttacgtactactgtaagtctgtaaatatgttatgacctgatgctgtgttcagccacacgcatgttgtgtgattgttgttgcttcacaaa

SEQ ID NO: 80652 - DNA, 296 bp, Zea mays
  Clone ID: MRT4577_173574C.1
cgttctagattccctcctttttttttttattttttttttttaaccatttttttttttattttagtaggttttattttacattttaatattttattaacaacttattatctttatctattttctttcaaaaataattcacactctatatttcctaacacaactcatcacaataccattccatactaccattttaacaccactccttatactccttaacaatatcagctcatgaatacaactatatcatactctcacactaaatactaaaatctataacgccgtctactcattcaccc

SEQ ID NO: 80653 - DNA, 233 bp, Zea mays
  Clone ID: MRT4577_173575C.1
tacaatttactgtccaaaatcaaatgaatgcaccgatcccatgactaggctacacatcagtgccctgacgaccgatgggttgcaggagtttcttctagtatcggaaacgctactgtcaccggactggaaaggacggcattgatttgactgcccggctcattcaatcccaagatcacattgcataccttgggatctgatgtggcacaacaccataccatcctctgctcccagcc

SEQ ID NO: 80654 - DNA, 366 bp, Zea mays
  unsure (1)..(366): unsure at all n locations
  Clone ID: MRT4577_173576C.1
acggaccatcatcaataaagatatcgagcgtgtggggcacaacaacgtgagaaagtgtaccgcactggtcttatccttcaaacacccaaccaccattcctggtcaaggacaagaaacagaataccttgaatgtgcaaacacacatggctcaaatcaaatgtggcttaacctctcatttagttcacatcccctataccgactataacagcaagggaacagggtcaatctcacaaanatttcatcacttccacagctaatcccagggatctgtggntcagtcaggtctgtatgtctccatctgctcggctcaaggctactcagcggctccctcacttgctgcggtttcgccacctgatagatgctgct

SEQ ID NO: 80655 - DNA, 228 bp, Zea mays
  unsure (1)..(228): unsure at all n locations
  Clone ID: MRT4577_173577C.1
ccgggccggacggcagnnnggccatctttaactgnacaccatatagcagcagtggctccgcagngcaaacacagcgcatgcggggagcaatggcgggggagacgaaaaagggcctgccgctgntcggcttgacctcccctgaggccgttccgggnttgcccgctgctgttgagattcttacccacagcncctccccttttggggggggggggggggaaaaattttttt

SEQ ID NO: 80656 - DNA, 313 bp, Zea mays
  Clone ID: MRT4577_173578C.1
gtcgggaggacgccgcgtgacaagagggcggggccgagggtttttactagtctcattgaatgtaacctattttgcccccagtgagggaccattccagctgttttgtgtgactatggtggctgatgttgtgattccaccctccttgtactgcagatttggcggtgatcgcaccatgacgttagtagggtgggcgttattctctatgtccttgatgtcgactataaggtcacttatgtactggaatgaggcggaggattggtgtgctgagtgtgcggatccttctgctgcctgattccgtgctcgttgctatcga

SEQ ID NO: 80657 - DNA, 166 bp, Zea mays
  Clone ID: MRT4577_173579C.1
attttactcatgctgtgttttttaatataagctttacaaaaaaagatgcattcccttcctgttcacactcttacctgtttttgttcttccttaagaatgattttgtgtgtgtgtgtgtgtgtgtgtgtaagtgtgtgagtgtaaaaacatgggttttctatcttca

SEQ ID NO: 80658 - DNA, 176 bp, Zea mays
  Clone ID: MRT4577_17357C.1
attatggaatgcttaacaattgtccgtatatttgaaaagagtcatctgttaagcaaattgtgtccagaaaccaatggatccccaaacgatttctgctcgtctcttttctacaactccaatcaatccacagttcacttatgttgcagccccatgacccagttatttcaaaaatgtta

SEQ ID NO: 80659 - DNA, 344 bp, Zea mays
  Clone ID: MRT4577_173580C.1
cccacgcgtgcgcgctgggatctagcacgcaagcgagcgagagagccaaccacctatgtgttaagcgactccgcgttcttgaacggagtccgaggccaacactacctatggcggctggtggcgggggtgtcatgtggatagcggtgctttaagatcatgtctcagtgttcgaccccgcgctccttttacaagcgtgcagggcgcctaaggcacagcgctttaccgagcggcttaagtactccgtgtatgacttcaaggttcagtgctagaccagttcaattatcacaaactatggattggtggtcaaccctgagcagagtgcaggcaacgagctttttgaaaca

SEQ ID NO: 80660 - DNA, 237 bp, Zea mays
  Clone ID: MRT4577_173581C.1
ctcggtacagatgtttttttctggggaaccatgtcttcctctccttatagtctgggatataactagggctcatattccagtttgcaacattccatagcgctaagtcgatcaggaacctatcacacgaactgtcggaatgattaagacttgaatctcgggctgccccccctgctggtccctctattcaaccaaaaagggtgggccttatggtgaccccccatgagttgaacgggtgtt

SEQ ID NO: 80661 - DNA, 1396 bp, Zea mays
  unsure (1)..(1396): unsure at all n locations
  Clone ID: MRT4577_173582C.1
aatcagcatgagggcctgaaggagcaagcagtctcggtctttatcttgtgccctggcttcctataaagctgaagcatctcgcgcggtctctgtcctgcctcgaggagcaagcaagtcgaagcatcaaatggcgcgtcaggagatcgagcacagccacctccccgtccgcgggatcaacctccacgtcgctcaggtcggcaaaggtgacctgggcacggtggtgttcctgcacggcttcccggagatatggtactcgtggcgccaccagatgcttgccgtggccgcggcggggtaccgcgccatcgcgccggactgccgcgggtacggcctgtcggaccagccgccggagaacgaggaggcgtcctgggtctgggatgacctcgtcgcggacgtgctcgccatcctcgacgcgctttccatcccaaaggcgttcttggtgggcaaggacttcggcgccctgccggcgtacgacttcgcgctgcagcacccggaccgcacctgcggcgtggtgtgcctcggcatccccttcagccccgtccccttcgccttcgacaccatgcccgagggcttctacgtcctgcgctggggcgagcctggcagggcagaggctgacttcggccggtacgacgtcaggcgcgtggtgcgcaccgtctacgtgctcttctcccgcgccgacatcccgattgccaaggaagggcaggagatcatggacctggccgacctgtccgcgcccctcccggagtggttcaccgaggaggacctggacgtctacgccaagctctacgagaagtccggcttccgctacccgctccagatgccatacaggtctctacgcaagatgccgcagcggctggacgccaagttccaggccccggtgctcatggtgatgggagagaaggactactgcttcaagttcccggggttcgagaccgccgtgcgcagcggcgccatggacaacttcatgccggacctgaagattacctacatcccggaggggggccacttcgtgcaggagcagctcccggatcgggtcaacgagctcctcctcgacttcctcaatggccaccccgtcgcatcatgatacctagtagcagttgcagcaataatcgcggcgtatctgcatgccatcgcatatgcttggcgcactggttgggtttgattttctcggaaaataaaagaaaatgtattcttcatgcgtcttgtttgactgatttggggatgctccctgtatctcgactcgatgatgtgggagcaatttgcttcgactcatctgattggggaaatatgttcgtggctactctgattgaagtcaaatctactgtaaacgtaaaagcncggtggttccacccagcacccttaaaatgttaccctcccctttnntaaagaggaattagaa

SEQ ID NO: 80662 - DNA, 308 bp, Zea mays
  unsure (1)..(308): unsure at all n locations
  Clone ID: MRT4577_173583C.1
cgcccgaaggcagcccccacccacgcggggggggggggggggaccacgacacgncgcccccgcgggcggccacaccggggcgaggggccacaaagcacggccgggggccgagggggccaggaccaccaacccgcgggcccgngacaacgcgaaccgcaaggaaccccccaaccggcgacaggggggggccnncancaccncccaagcgacaaagcccngccgagcgacccngncgnccgcccccgcgcggagacaaaggccccagacgagaaggcacnccnngangaccacaaagaggcccaccccaa

SEQ ID NO: 80663 - DNA, 286 bp, Zea mays
  unsure (1)..(286): unsure at all n locations
  Clone ID: MRT4577_173584C.1
tgccaagcgtncggccacccntncgatggtgttgccgagcatgatgtcgcaaatgatgatgccacaatgtcactgggacgcccgctcgcagattatgctgcgacagcgggtaccattcatggtcaacccaatggccatgacgatttcacccatgttcttacaggaaccctttggtggggctgcattctaagatagaaatattgtgtggtggccacaaataatgagttgacatgccatcgcgtgtgactcattattattaaaaataaaacaagggttcttttattat

SEQ ID NO: 80664 - DNA, 381 bp, Zea mays
  Clone ID: MRT4577_173585C.1
cccactcgtatgtaatcgactcctcggttttatgggccgcaagttcttcttcggtcacagcttctttggcaatgtaaccacagatcaggtctataagattgttaaaacccttaatgaatgacatgttcccccttcagatgttgtggatgtcgttgtcagcccttcttatgtatttcttcctgtggtcaatatccagctgcgccaagagttccatgttgcgtctcagaactgctgagttaataagggatgtgctttcaccgttgaagtcagtgctgacatgctcgtcaaccttggtgttccctgtgtcattcttggacactcttaaaggaaagctctgctgtgagaatcaaatgaatttgttggatacaaagttgcgtattc

SEQ ID NO: 80665 - DNA, 334 bp, Zea mays
  Clone ID: MRT4577_173586C.1
cccttctttgagccataggtgacaaccttgatgggggaggctgctgagtatggcgggcgatcaatggagatcggtgaatacccggcgcaagacgcatgtaaaagggccattttagaagagcgattctatccttaacattggaagatgcgccagttggcattcttgtggctgcactggggggggtttatcgtcggttgccttatgcttggattgggcaagatattctgtgacgcccaattaagtgtccttttatcacatatactacacttgctgaggcccttcttggtgctgcggtcgcggataaggcctattctatactaaatgacatggcttc

SEQ ID NO: 80666 - DNA, 832 bp, Zea mays
  unsure (1)..(832): unsure at all n locations
  Clone ID: MRT4577_173587C.1
ccatgcccaaccaaaagagtgttgatgcttttttctcacagaactcttacattgggtacgacgtgcttcagaaacttgcaattcctcaacctaaacagttcttggaggcccgatatccagatggtattgcattggatgctgtctttgttcatacttctgtggttgatatgctcgatactgcggttggtgatgcaattgagaatggacactggattgattctctttcagttcttccatcatatattagtggaccagatgcaaccaaaattttatctatctgtccatctctgcagaaggctatcaagtcttctaaagcagtggtatttggagagtcatgtgtcttcagtaacatgtttattaagggtatttttgaccgacttgagaaagatatggactcgtttggtattagacttagtgttggtcaaggaagacctgtgaatacgaatctgggtagtgagcacaagacagggtctggtcagcactcggacacaaaagatcttggtggtaatggcactagcagtaccggtgcttcatcagacagagggtcaaagaagaaaagggggaaagggacagggtctaccaaaggtggatcacttgaaaaggatgatgacaatgaagaaagcattcctgttaagggcaagaaatctcacagganaaacaaggatgcntgtgcatctggtgacatnaaacatggtggtaaaaaaacgtcagagaaaatgatagaggagaatgcaaatatctttcctgatgaatngatagaagaaaaagttttggcttgtgctccagagttagaagagttgggaagctctgatgactcaaatgccccccttaa

SEQ ID NO: 80667 - DNA, 1799 bp, Zea mays
  Clone ID: MRT4577_173588C.1
tttctcgtttaattcaacacgactcgtcgtcgggacttcgtgcgcagccgccacccgcacggccgcacgttctgccagcccagtatcccagatccagtccactactccactcccgttcccccaagtctatcagccaaagcatcgcccgccgatggcgtctccgccccactcagtcgaggtccggacccccggcgactcgccgcggcccaccgccgctctcctctccccctccgtggccgcaccccagccctccaacgcctcccgcctcctgctcctcctcaccgcggccgtcgccgccgctacggccttcgtcctgctccgcccgcccatcaccgtcgtgaccgcggcgtccgccaccgcgcggccgctctccaagctctccaagcccgtggtgctgctcatttcctcggacggcttccgcttcgggtaccagtacaaggcccccctcccgcacatccgccgcctcttcgccaatggcacatccgccgccgagggcctgatccccgtcttccccacgctcaccttccccaaccactactccatcgtcaccggcctctacccctcctcccacggcatcatcaacaactacttccccgatcccatctcgggggactacttcaccatgaaaaaccacgatcccaagtggtggctcggggagccgctctgggccaccgctgccgcccagggggtcctgtctgccacattcttctggccgggttcggaggttacgaagggttcctggaactgccccgacaagtactgccgccactacaatggctcggtgccgtttgaggagagggtcgacaccatccttggctattttgatctcccgcctaaccaaatgccacagttcatgacgctgtactttgaggatcctgatcaccaggggcaccaggtgggtcctgacgatccctcaatcaccgatgcggtcgtacatatagatgagatgctcgggaggctcattgctggtttggaggctaggggaatgtttgaggatgtgaacattatattggtaggtgaccatggtatggttgggacctgcgataggaagcttgtgtttctcgaagagttggctccatggatcgagttgaagtcagattgggttctgtcagtgacgccattgctggcaatcaggccgccagatggtgtgtcgccagctgaggttgtggccaagatgaatgaggggcttggatctgggaaggtgaagaatggggaatatttgaaaatgtacttaaaagaggagttgcctactcgcctgcattattcagagagttacaggatcccaccaatcatcgggctggttggggaagggtataagatcgagatgaagcgctccaagagaaatgagtgtggaggagcccatgggtacgacaatgccttcttctcaatgaggaccatatttgccgcacatggacctcgttttcagggtggtagaactgtgccctcatttgagaatgtggagatatacaatgtcatggcttccattctcaatttgaagcctgctccaaacaatggttcagcttctttccctggcacgattctgttgccgaacaaatgatcatggattggttttgtaggagtaagggcacatggatgtatgatggtgttctcatttggttattgtattgtacctcttaaattagacttctgccacatcactgtatctgagcaaaaatgctgctagtagagagttgcttctctctagtgacaacatttggaaacatgtttcacatcaaacgtttggctgctcaattgtttcataggagttcattcgagctccatgttttctcaaaaaaaaa

SEQ ID NO: 80668 - DNA, 355 bp, Zea mays
  Clone ID: MRT4577_173589C.1
gctcatttacattttataccaccaacccctccggggacgggccaacttatactgattttgcatcaaacaaaggatacaacaacattacattctatacgcccatctatataaaatgtagcgtacccgatgaccacacaaatatactttacgacgtcatatcagatctcaattctgtgctcattgtgggctggaaggccaaagacataaacgatgactagctgatcaccaccactacctacgtctttaacttcctcacctaccccaacggtatcatgatgcacaccctaaatgacaactgcctctctctgtacttgagctattgatccaacctactcttctaaaccatcaccaataa

SEQ ID NO: 80669 - DNA, 345 bp, Zea mays
  Clone ID: MRT4577_17358C.1
agacgacggctactggatcgacattgtacgtgtgtgctacttggacatcatcggctacgtaagccatgacaggcaagcgccagcagtgtggagcaaaaactcatgcacaccgaagtacgacagtatcatcatgctcatctcgctgaagatggacatcatcaaccacggagacgtgtccacggtcacgcagtccaagtcgaagttcttcgacatgaacatgtagcgctacaatgacatgccaatcaaagacgtcaccataacggcacccggcgacagatccaacagtgctggaagtcatatgtgcgactcatccgggatcacgatcaccaacacagtctttggcat

SEQ ID NO: 80670 - DNA, 370 bp, Zea mays
  Clone ID: MRT4577_173590C.1
gccatgccgaaaactaaccgaaaggcgcggataagggatataagctgagagtggctggaacgactccgggggcaatccgacagatacgaacaaggccgaactgaacatacatacctgctgacacgccgcttgccatacacgttggtgatgctatggatgtgaacagatcagccatctgcaagctgatagcagccaccgatgattactgaggaacagggcacaaccaaaataaaagtctcttgttatagggaagtatattatgagtagcaatcggcttatgttggtgtggaccgcccccattatgcattagctcgagccgctaggctgtatgtaatcataaacaacaatgcgcttattatgaattgcattc

SEQ ID NO: 80671 - DNA, 635 bp, Zea mays
  Clone ID: MRT4577_173591C.1
gcgttcggtgagctgcggcagcagtggcgtgtggcgcgtgcaggactgcctggccgtgtcgcgcgcgttcggcgacgcgtccatgaaggcctgggtcacctgtgagccggaggtctcgcggcgccgcctcaccccggactgccgtttcctcgtcgtcgcgtccgacggcctctggaacaagggggcctgccaggaggcagtcgacgtcgtcgtctccgccccgccaggtggagctggagcatcgtcctccgtggaatcgtgcaaggacctggtcgccttggccaggaaaagggggagccgggacgacatcaccgtcatgctcgttgatctgcagcgattcatttgacagtcacaggacgcggaggccaccgttcatcaatgcatcagccaagcaaaacattcgtacgtgatcaaattaatgttctttttatagtgtatatttttctttttttttctttcacttttattattggatactctagctagatgatttccaaagagattatattgtacgtagtagtgtagagagggctgccttccgaagagatttgaattcaaactcgtcagaaagtgcagaagaagattagcgcgacgtgtaaaaaatagctatgataatttcctctattagttcgagc

SEQ ID NO: 80672 - DNA, 319 bp, Zea mays
  Clone ID: MRT4577_173592C.1
aaggggtcttgagcttctacgtaggggtggtggggctcatgtatctggcgacgacatgatgattacatccgtcccgacgggccggataaggtcgtggattcagtcagggctatggctggccccgctactgtgcatgactttgaggaccggtctttcttatactgtcttctgcttcgggggagcttaatccgatgctactggcgtgtctccgatgcttaaacgtcggctctcacaggcggctcttgaatgcggcaaatcgggcacatgctatagggtgactagtttcccttccagacggagcacctgtcgtcccagtcgt

SEQ ID NO: 80673 - DNA, 565 bp, Zea mays
  Clone ID: MRT4577_173593C.1
gcggccttatcctaccccttcgggtcgggtgggggtgcgcgaggctgttcggggttcggtttcaggggggagcggatcagagatgggggccatgagatgtctgagtaccggtgcttaaggggcagactctgctgcggcacagggcgaccactctgtgcacagcggctatgaagaacgacgggaagagcctcgaatgcaagatcagtgcttaatagagagacgcagacgccccacaggtgaaggtgactgaccttctccacggaggatgcgacgccgaacgccataaacggcatgaacggcaaggagctggacagccgcaacattaccggcaacgaggcccacaccaccggcaggcgtggaggcaggggcagccgaaggaacccgtggtgtggcgaggaggctgccgatacatgccgtggcgggcgccgtgatggaggccgcggctactgcggtggcggacaatactgccgtggcggccgcgggtacggtggtggtggccgaggctactgaggtggcaaccgcggaggcggctacggaaactccgacgggaactggaagaactgag

SEQ ID NO: 80674 - DNA, 609 bp, Zea mays
  Clone ID: MRT4577_173594C.1
gggtacctcgaggccggccggattctcatcctcttcgactcttcgtaacctgctcctgctgctggtggtgcgacaagatagatcgcctgtgcaccctaagtctatccgtcacaacctcaagatgcccccggggaagaaggggccgcgagtcccacgacatcacgcagatacagaacctactcctacagattatgagaaacagagggcaattacaatcatgaagaataatcaaatgatgcaacggttagggattcgtcaattacagtcaatgatggctagtattccaagtggaaggatgaacgataatgctcctcaggaatctggatcgttgtatgatggagatgatattgaagactctgaggatgagatggaatccctagttgataagtctgtaggcagccacatccccaacaatggtgctgaaatctcttcgaaaaatacaagagcctctaaaagggttgttgcaccaggagtgcaagaacaaccaattagagttactaggcgaaggagtgctaccataaaccaagagtccaaccaaaatataatggctggtatactatctgattcttgtgatgccacaaaccaagattgcatccaacgcatatctac

SEQ ID NO: 80675 - DNA, 175 bp, Zea mays
  Clone ID: MRT4577_173595C.1
tcatagcagccgcatccaaaagccctatgggggggtccttttcagccgccgcagccagctcacgtaatctactgtaaggacagatacagaggtcaatccgcacgaggtcgggatggtctagtttgtgcaactcaaacgctaccgcaagagggagctccccgagagggttgacatt

SEQ ID NO: 80676 - DNA, 219 bp, Zea mays
  Clone ID: MRT4577_173596C.1
gtttcacgttggaccaccggtcctctgcgcacgccctggtcaaagtcctgaagctgaacctccagctgtaaaagtgcatcaagaccctggagcgcatcatgggaaggaacaagtatctgtaagacaggacaaaggtagacaagcaccgactgctgctgccatactgcaacaatgcagacctgacacctactacaaccgcatggcggacaggctccggag

SEQ ID NO: 80677 - DNA, 236 bp, Zea mays
  Clone ID: MRT4577_173597C.1
tcggcgaagcaaagctatcctaattagaagggatttctgtagatgtgagactaccccccactagttctggctcctactttcgttcgagagagcgattctggcggcactggccaatagcgagggtccggcgatcgggatcgacctcggctccacctactcatgcgtcggcgcatgacatcacgtcctggtggagattatctgcaacaaccaggggaaccgcagcacgccgacctatg

SEQ ID NO: 80678 - DNA, 198 bp, Zea mays
  Clone ID: MRT4577_173598C.1
accttccctccattcaagatcttccctctccggattctctctctgcctccagtccatagccactctgactatctgcccgattccgcctcccggttcctcggacaccctcgcctcctcggatagttcgggtcgacggtcggcctagcttcaatttcagggatggtgttctacctgacggcgcggtctcatggcggccac

SEQ ID NO: 80679 - DNA, 679 bp, Zea mays
  unsure (1)..(679): unsure at all n locations
  Clone ID: MRT4577_173599C.1
tccggcggtcagcgatgagtcatcggnanactagnanatgatgacacnntgaccataaggattcatctgcgcccaagaagaggaaatctggtaacacatcggctgaagatgagccgtctcaagctactgttgtgcgatatgctgcggttgagtcaccatatcccgcaaaaggaaggtctgcctcaaagcttccagtgtctgcacctgggcgtgcagcgcttcctagtgccaccccgaatctaaacattgggatggacatttggaatgcttctcctgccttggctgtgcctgcagtgcagggggaagtgagtcctgggttggcacttgtccgacgtgatggcgttactcaactggacgaacgtgaaataaagagggagaggcgaaaacaatctaacagggagtctgcaaggagatctagattacgcaagcagcaagagtgcgaggagttagcccgctggggccatgtagagtcgcccccactgcagccatgtattatttatggctcgtcgcggtgtgctttgtgtttttttgtgtgttgtgtaaaaactattgatgtaacaaaacctagagagcctagaggttttttttatgtctgctaactcctgacgagggatgtaatgtaaccggccaatttgttgcctgatcgttcgttagatgaaatgctagcaaatgtcactcg

SEQ ID NO: 80680 - DNA, 1191 bp, Zea mays
  Clone ID: MRT4577_17359C.1
agacacagcgtccccgaaatctagccagccaccgcccaccgcctccctcctccccgcctctctctctttctctctctgcgccaagaaagagaaggcgccacgttgacattgcggatgccgtagcgggggcgcgcgcgccagccatgcgctcgtgatgatccggccgttccagaagatcggccacggcctcgaaaaggttctcgtccaggcgccggaggtcgtcgtcgccgccgtcgttggcctcggacggcacgggcgcctgcctcctcgatggacgcgcaggcgcagcctttcaccaggcgggcgctgtccaggagctgcgggtccaaggggacccggctgtccgttgaccatccgccgccgccgctggccggcggcccttcggcggacaagggggtggcagggagctcgtcctcgctcgcggtgccgcccgagccggcccgtcgtgagggcccgccctcagacgcggagaaggtgagggagaagttctccaagctactgctgggggaggacatgtccggcaccggcaaaggggtgacctctgctctcgccctttccaacgccatcactaatcttgcagcttctgtgtttggtgagcagcgccgtctgcagcccatggccgacgaccagaaatcgcggtggaagaaggaggtcgactggcttttgtccgtcgccgaccacattgttgaatttgttccttcgcagcaggtcgccgagaatgggacctccgttgagataatgatcacccagcaacgtcaagatctacagatgaacatccccgcgctgcgcaagctcgatgcgatgctccttgaatacctcgacagtttcgcgggtaagcaggagttctggtatgcgtcgaaagacgcaggtggaccgggcaagggcagcacgccgaggcaggacgacaaatggtggctcccgactgtcagggtccctcctgacggtctgtcagttgcatacagtaaatggcttcagaaccagaaggacctcgttgcgcaggtgctcaaggcagcaatggctatcaacgctaacgtccttatggaaatggaggtccctgaatcgtacacggagtcgctaccgaagaatgggaagtccacccttggggattcagtgtacagacttataaccgacgatcatttcgaccctggagaactgctacgctccgtggactcatcggatgaacacagcatt

SEQ ID NO: 80681 - DNA, 366 bp, Zea mays
  Clone ID: MRT4577_1735C.1
cgtaagctcggaattcggctcgagcgcctccgttccgcgcctgtgggttctgtggctcccactcacttggcgcctccggcgtcgccgcccacgggatgaagaaccccgacttgactgcacacaaggaggctcgtcaaggacttcgtgttcaacttcgtcggccctgacggcgaccacaagtgcctgaacattctagactatagctccaacaggataacacacgcgatccatatcgagctggacaacctgttagatcacacggacctggatgaggagatcctgcagcgtgtaactgagaacacacggagctacgtgagcatctgcggggaggccatgcacgagatcatgccggagcgcactgaggcg

SEQ ID NO: 80682 - DNA, 829 bp, Zea mays
  Clone ID: MRT4577_173600C.1
tcttaacattgggttggtcatttggcatgcttctcctgccttggctgtgcctgcagtgcagggggaagtgagtcctgggttgtcacttgctcatccacctgtgtatcttacctagtactgttagcctccagtttgtggctggctacaacacagttcccattgctgttattactaaatttcttgtggaggtggccctactgataatgattctgctgcaactgcacttgcttggctgtgcctgcagtgcagggggaagtgagtcctgggttggcacttgcccgacgttatggcgttactcaactgttccttgtttcttcaggacgaacgtgaaataaagagggagaggcgaaaacaatctaacagggagtctgcaaggagatctagattacgcaagcagcaagagtgcgaggagttagcccggaaggtagctgacctaacgaccgagaacagcgctctcagagcagaacttgacaacctcaagaaggcttgtcaagacatggaagcagaaaattcacgtctgttgggtggggtggctgacgcccaggtaccaagtgtcacgaccacactgggaatgagcatcgagccgccgaagttgcagctgcagctgcagcagcatcatgatgaggagggccagctccacaagaaatctagtaataacagcaatgggaactgtgctggaggcagccacaaaccggaggctaacactactaggtgagatacagaggtggatgaggaagtgacaaagatgagatgagatgaggtgtttcttatctaaccacaacacccatcatcggtcagtgtgtgtgttttttcttagcgaagctgtcgt

SEQ ID NO: 80683 - DNA, 1263 bp, Zea mays
  Clone ID: MRT4577_173601C.1
cccacgcgtccgcccacgcgtccgggaaaggcaaggggaagggcgggggcgcgtcgcctgagaagggcagctctggggcgccctccggtgaggacgactccaggagcagtgacagcggcagcgatgagtcgtcagagacgagagatgatgacactgaccataagggttcatctgcgcccaagaaaaggaaatctggtaacacgtcggctgaaggtgaaccgtctcaagctgctgttgtgcgctatgctacggttgagtcgccatatcccgcaaagggaaggtctgccggcaaagcttccagtgtctgcacctggcagggcagcgcttcctagtgccaccccgaatctgaacattgggatggacatttggaatgcttctcctgccttggctgttcctgcagtgcagggggaagcgaatcctgggttggcgcttgcccgacgtgatggcgttactcaactggatgaacgtgaattgaagagggagaggcggaaacaatctaacagggagtctgcaaggagatctaggttacgcaagcagcaagagtgtgaggaattagccaggaaggtagctgacctaacaactgagaatagtgctctcagagcggaacttgacaacctgaggaaggcttgccaagacatggaagcagaaaattcacgtctattggtgagcacggtaccaagtgtcacaaccacactgggaatgagcatcgagccgccaaaggcgcagcagcatcatgacgacgagggccagctccacaagaaatctagtaataacagcaacgggaaaggaagccacaaaccggaggctaacactaggtgagagacaggtgaatgagaaagtgacagagatgagatgaggtgtttcctatctaaccacaacacccatcatcaaccagtgcgttttcacagcccgctggggggccatgtagagtcgccccccactgcagccatgtattatttatggctcgccgcggtgtgcgttgtgtgtttttttgtgtgtgtgtcgtgtaaacctattgatgtagctattgtaacaaaaacctagagagcctagaatttttatgtctgctaactcctgatgaggggggatgtaaccggccaatttggtgcctggtcgatcgtttagatgaaatgcgagcaaatatcatttgatagcccgcctcacaaaaaaaaagttttggattttttttgcgactttgcgggagtcttttatacaggctattgaatttttaaaaaaaaaaaaaaaaaaaaaacccaaaccaag

SEQ ID NO: 80684 - DNA, 2580 bp, Zea mays
  Clone ID: MRT4577_173602C.1
cattgggtacctcgaggccggccgggggtgctttcctgtgagtattgattgaaaacaaggaaaagctagcagtggctattaggttgtatttgctgattccatttcgaacctcaactgtcatcgataaacgatcttgttttcctcttcgtttcatgctgtcgaccaagttcttggtgacacattttaactgaaccattgtgttgatccacaactggacgacttgagtgttccaatgtctggccattggtctgaagttcactgcactcatctgttaaatagtattgaaagcacaaatagctcttagcttcaagatatcaatacgagttaaagattctagttgagccggccgtactgtgaccttcatgcaaaatttccaattacatggtttggattgccaaggcggggctagagcctagaatatataatgtcaaattaggtatgtaatctaaggtgcctactctcccccagatacagcatataacagtatatgtaagtcaattgtggagcaaagctctcagtacaggaaatatggaagtgttgattccttgttgcatgcataccttgtagtaaaactcctatccttcattcttatgattacgaaataatgttcacacttaccatgtctcatgggccaccggtgctcgctccgcccaggaccagcgggggagcctccagatctcggcgcgccgcgcaggccagcatggcgtcgtcctccgacgagcagtccaagccgccggagtcgcccgccgccgccgccgtggtcaccgccgcagcaccgccacagacgcacgccgagtgggtcgcttcgcttcaggcctactacgctgccgcggggcacccctacgcctggccggcgcagcacctcatggcggcggctgcggcgggggcgcacttcggcacgccggtgccgttccccgtctaccacccaggcgccgccgcggcgtactacgcgcacgcgtccatggccgcgggcgtcccttacccgacgtgcgaagctgtccctgcggtggcgctgcccactggcagaaaattcacgtctattggtgagcgcggtagcgcgtcgcctgagaaaggcgggaatgagcatccagccgccaaggacgcttctaggagcgatgacagcggcagcgatgagtcatcagagacgagagatgatgacactgaccataaggattcatctgcgcccaagaagaggaaatctggtaacacatcggctgaaggtgagccgtctcaagctgctgttgtgcgatatgctgcggttgagtcaccatatcccgcaaagggaaggtctgcctcaaagcttccagtgtctgcacctggccgtgcagcgcttcctagtgccaccccgaatctgaacattgggatggacatttggaatgcttctcctgccttggctgtgcctgcagtgcagggggaagtgagtcctgggttggcacttgcccgacgtgatggcgttactcaactggacgaacgtgaaataaagagggagaggcgaaaacaatctaacagggagtctgcaaggagatctagattacgcaagcagcaagagtgcgaggagttagcccggaaggtagctgacctaacgaccgagaacagcgctctcagagcagaacttgacaacctcaagaaggcttgtcaagacatggaagcagaaaattcacgtctgttgggtggggtggctgacgcccaggtaccaagtgtcacgaccacactgggaatgagcatcgagccgccgaagttgcagctgcagctgcagcagcatcatgatgaggagggccagctccacaagaaatctagtaataacagcaatgggaactgtgctggaggcagccacaaaccggaggctaacactactaggtgagatacagaggtggatgaggaagtgacaaagatgagatgagatgaggtgtttcttatctaaccacaacacccatcatcggtcagtgtgtgtgttttttcttagcgaagctgtcgttttagtcctcgcagcccgctggggccatgtagagtcgcccccactgcagccatgtattatttatggctcgtcgcggtgtgctttgtgtttttttgtgtgttgtgtaaaaactattgatgtaacaaaacctagagagcctagaggtttttttttatgtctgctaactcctgacgagggatgtaatgtaaccggccaatttgttgcctgatcgttcgttagatgaaatgctagcaaatgtcactcgataaaaaaaaaaaaaaaaaaaaaaacctcgggctccaaccttgatctttgcgggagtgcgtctaagaaagctgaccgccatagacgacgcccgtattgcttcagtgcgttttcacagcccgctggggggccatgtaaagtcgcccccccctgcagccatgtattatttatggctccccccggtgtgcgttgtgtgtttttttgtgtgtgtgtcgtgtaaacctattgatgtagctattgtaacaaaaacctagagagcctagaatttttatgtctgctaactcctgataaggggggatgtaaccggccaatttggtgcctggtcgatcgtttagatgaaatgcgagcaaatatcttttgtt

SEQ ID NO: 80685 - DNA, 197 bp, Zea mays
  Clone ID: MRT4577_173603C.1
cccacccagccgctgacgtaccgctaaccaagtaaccagtcaccagccttgcggggcgcgtgctagccacccgccgaccgtagccatgtcggtgacgctctacacgaacctgggcgacatcaagcgcgaggtgttatgagaccatgtgcccctgaacggtagacaagttatctggacctctgcgccagcggctacta

SEQ ID NO: 80686 - DNA, 524 bp, Zea mays
  unsure (1)..(524): unsure at all n locations
  Clone ID: MRT4577_173604C.1
ctcctctccgccccgtcccgtaaccctactccgtcgccggcggcggcggcggggggcctccacgggcgtgtgccggggcaggcgcacctcccgcgcggggggctcgggctcgccccccgccgcagcagccgcgcgctccgcgtgcgcgcgtgggtggcgatcgagaaggagacgccggagagcgagccgcgcggggggggtgtgcgcgaggactggcacgggtccgggtccgtgcgggcgcgggtcgaggccatgatccggcgggtgcagggggaggtgtgcgccgcgctcnaggaggccgacggggggggcgcgcgcttcgtcnaggacgtctgggcgcgccctggcgggggcgggggggtcagccgcgtcctgcagggacggcctggtcttcgagaaggcgggggtcaacgtgtccgtggtgtacggggtgatgcgggccgacgcctaccgcgccggcaaggggggaggggtcaagaacggggccgccgccgcggatgggcacaagcctgggcccgtgccat

SEQ ID NO: 80687 - DNA, 411 bp, Zea mays
  Clone ID: MRT4577_173605C.1
gaggcatccaataaaaccaaattggactccttatggcgtggtttggggagctggccagaaaaagacaccagcgtattctgttcataccttgacacccttctggaaaataaaggttacatactaacaaaattgtggggcactccgggacccggagaaaaccttctcactggagggtacccacatgcggcctgggggtatttttgacctaaaagagcccaccctgggggggggtattagcggccctcccttggaaaccccccaatgcccatttttcttcaaaaatcccttgggtttttaaaggggttctcccccatctaggtggagggcgttaaacgccgggtccctaaaccccgaggaaagaaggggttctcttaaccttccctgctggaaggaagatttcacctggcccct

SEQ ID NO: 80688 - DNA, 425 bp, Zea mays
  Clone ID: MRT4577_173606C.1
gcctagtccggatcgacggctgcaatgcccccacccccgtgagggacgggggcgctgacagggtggggtggttgaagcatgatctccgcatcgactaccacccgggcctcgacgacgacgtcttgaagccgctgtgccccgtcgtgccggtgtacgtcttcggccgacgcatcctcgcgggctattcagattaaatgctggaactgatgctattcgctctgaaagatcttaagatgacgttgaaatgtcacgagtctgatttgctgataggcctgggaaacgctgacgatgttgagctgtagcttgagaatgaggtacaagcatgtctcgtttatacagaagaagaagtcgactatggagtgcgcgatgttattgccaatgacgaatcatctatatttaacgaggcatgctgatggggaagctgt

SEQ ID NO: 80689 - DNA, 510 bp, Zea mays
  unsure (1)..(510): unsure at all n locations
  Clone ID: MRT4577_173607C.1
ccctcccccgnagaacatctccacctccgcccggccgcggtatcagggcaacacccgccgccacaactacctcgatctccctccttgtctagcccattactcctccacccggcaacgatctcgtagcagggtcactctcggatgtttcgacccaggtggcgcggagactccagcaccgcacatgcatcatcgtaggcctcacacagggacgacagngacggagtcagatcctcctcctgaggaacacattatgatatgatctgagctaccgtgaagggcaagctagccatatgcagcggcgtaccacggctgatggaaaagtccttattttctcgacctaccccgcctgcattcatggacatcattatccattccccacactggtgagaactacatcgcttctttatgacacctaggctcgcttgacccttcactctgtcaggcaccacgatgctaagttcaatccctgcaaggacaacattgtccagatcagccaaaagggcatcccct

SEQ ID NO: 80690 - DNA, 384 bp, Zea mays
  Clone ID: MRT4577_173608C.1
taccctcgagcctgccgggacgtccaaccgccccgggtttcctcacggctcacgcctccgccctaccacccgttcacgtaccgtgcctattcacacgtgatggcctaccgcctcgccgtcgccaaggacgaaatctttcgaagggaaattatatttcatagtgcttacgagtttgccatggccagagagaataaggtatttatgttaaaaaaagtgacagagataaaagggaccgagggggtggtggatcatgatcgaccgaaaaatgtgtatgaattgacaggaatatatgggggaccaaagatggcctgcagctgctgagcttttgggtgagcctattcgggctgggctggcagatagagatggacgaaaaaaggccggcct

SEQ ID NO: 80691 - DNA, 494 bp, Zea mays
  Clone ID: MRT4577_173609C.1
gcgtcatgcgcgcgcgcgcgtgcgcgggtcctctatagcgggcgcgcccttttttttttttttttttttttttttttttaggggggactgttggttggtccatggggttttccgcaaacatatagccatatagaagccacacagatagcttgacaaagggttacaaaagtttaattgcaacttggaactagcgcgacagcaccatgacggattgtttcccaaaggaaagggacaatcctggtaggcgcagaaacttatacttgagaaactacttggcaacatgctggttggccctcaaactttctattataaaattgggtttgccacctgacgtccacactgaatggactttgagctgcggaattaagcgggcactgacgccagtattgaagctacatgtccaacgggagttgcatcatatggcccggggggagcggctattatcaacggagttgagtttggggcagtaaccctcggcgagaatggggaagacc

SEQ ID NO: 80692 - DNA, 452 bp, Zea mays
  Clone ID: MRT4577_17360C.1
gatgacctctgtcctcaaacgattgctggagcataatatgggtcacaagttaaacactctgaagcctgaacttaggcggcagcacacacgagttaaccaattgcccaaccagagaggatgggcaagcatgcatctgctaccaccatccacatgttgctgcaaaagctatgctggcgccaagagcgtcagctgcctgtgcatgcaattttcattccgcgcgaacgacatgcacatccatcgtgtacttgttgctgttggtgttctcaagtagttcgaagaggcagaggtctcccagctgcagcttgttgtcgtgagcaaactgcctccacccttgcgcgagccttttgcatccgcgtctgcccttctgaatccgacactgcacctcccagctctcgccgcagcgttggagcgtcagcgttcggtcctcgaatggtaggtatacatcagcatat

SEQ ID NO: 80693 - DNA, 709 bp, Zea mays
  unsure (1)..(709): unsure at all n locations
  Clone ID: MRT4577_173610C.1
agcacagcagnaaggggagaggggttgggtggggggataagctttgccgacaccacactgcatccctcggctgcctgaagcaagcaagcgaccgcttcgtcctaggcagcgcgtatctgagctgtcgctgatggatgatagataaagcggtggagcagggtgagagggaggtgctcctcgtggttaccatcgccaccatggccgtgtagtgtacaggagcactgcagcccgaagcccggaagaggtttttcagatacagagagaaagaaagagaagggggtgggcacagcgcaggcaggatgaagtcgagaactgcgacattggcggtcggcatcctcctcctcgtcgcgcttgtggtggtggcggaagccgacaccgacgccggcgatgtcgcggccttggggaatctctacagctcctggaacagcccggcgcagctcaccggctggtccgccagcggcggcgacccctgcggcgctgcgtgggcgggtgtctcctgctcgggctccgccgtcacctcaatcaagctttctggtatggagctgaatggtactctgggttatcaattgtcaagtctacaggctctgaaaacaatggacttaagcaacaaccacttgcatgattcaatccctatcagttgccatcaaaccttacctatctgaatctggcaaaaataacttctctggtaatcttcatactctatatccac

SEQ ID NO: 80694 - DNA, 258 bp, Zea mays
  Clone ID: MRT4577_173611C.1
cgcacgcgtcgaaccagacgaggaccaagggacagtactggcagccaagcacaacaccgcgctgcttatatgcctcagccctagcgagactcccgcccgcggagacagcccaacacgagcaggtcttttttgtccggtacaagggcacaaacctcccgctgaaggggatggacacctcaccacaggacggtctccacatgagcaccaaaggcccaagccacatcaacggcgaaaccttctagccggcgccggtgaaga

SEQ ID NO: 80695 - DNA, 394 bp, Zea mays
  Clone ID: MRT4577_173612C.1
agcaagctgaacatattgaagcttgctcctggtgggcatgtgggacgtttctgcatttggactgaaagtgcattccggcagttagatgcattgtacggcacttggcgtaaagccgcatccctcaagagtaactacaatcttcccatgcacaagatgattaatacagatcttcgcagaatcttgaaaagcccagagatccaaagagcccttcgagcaccacgcaagaagatccatcgcagagtcctaaagaagaacccactgaaaaacttgagaatcatgttgaagctaaacccatatgcaaagaccatgcgccggaacaccattcttcgccaggccaggaatcacaagctccgggtggataaggcagctgctgcagcagcggcactacaagcca

SEQ ID NO: 80696 - DNA, 1039 bp, Zea mays
  Clone ID: MRT4577_173613C.1
gccggcgccacgcgtccggcagcagcacactcgcccggtcgcccctgagcagcgtcgcacaccattccctgctaaaaaccctagcccatcagggcagcgaccttctagaaccgtctccaatggcgctactccgagcgctccggcgagcccttccggcgctctcctcgccggcggcggttctcccccgtcgcgccccgcacccactacctcctccgcccgctcctcgtcggttcctggacccgatcgggctccgctccttctccgccgccgccgccaccgcgtcgcaggcgccgcccatgggggccaccctgttcggcgggctcatggacacccggttcccgaagcgccggccgggcttcgccaaccgccggaagagggctagcttgcgccccaaaggtccgtactactgggtgaagtgcaagcctgacgagcccataccagttagtcagccgaaccaagggagcgtacgagggaggaaggagaagaagcggatcaagcagcgcaaggactttatcatggctgagaagaagaagcgcagagctcagtattctgctgctgttaagagaaaggaggcagaacgaacagaaaggaagatggctgctgtggcaagagagcgggcatgggcagcaaggttgatagagctaaaacagattgaggaagacgttaaagctgtaatggcataagggcctgctctggaaaatggcaaggcgtctaacctgtttctgctgctctattttctcctcctttgttcctacatagtttaaattgtcacaattctttgtgatggaatggaagaccagtaccacttctttcaacagtaatatcaaatgccggaactgtttttttaatacagactctcattagaccatgtttggagtttgtttacttttgatgtaatttagaataagtgatgcgatggtatctgtgtgcttgacatctgagatggctgttgtctgcaatatatagttttggtacacttgttctatgatacataatttgtactgtcagtattcaagcaactaatgcttgctagtctttt

SEQ ID NO: 80697 - DNA, 254 bp, Zea mays
  Clone ID: MRT4577_173614C.1
caaacacaccaatgtccatctgacctttctatagctcttatttctacatctatataatttgtaactgtaacattctaacttacacttgatcgaataatactttgataccaacataaactcaatacattatacaacctttactaccaaatatcctttgttatactttctcatattatcatactaatcactatcaatattacaccaccattcttataaaattacgcatgctttatacttaatccaactcttcttct

SEQ ID NO: 80698 - DNA, 579 bp, Zea mays
  Clone ID: MRT4577_173615C.1
ttttttttttttttttttaacaaataaatagatagataaaacaccaccaaacctttctctccgtacacggcagaaaggccatgttccttcccccaatttctttttttataaaccccccgtgtttagctagcgagttgttactatatatatcgatcgacatggtgctgcctttccccggcccttcacgtgccatagctaactacatcgtcacgcatctatatgaggaagctgaaagtacacggagcacctggctcgcggcagagcacatgctaaagagagacatgtacaaggcaattcagacggacgtatatggttggtccagggcgcgcgaaaaagaaaggtcatgtacattgtgtgtatcgcccgcgcccccggcccgatcagggaccatcgcatgtacggcatgcatcgttgctttgtttagcccattagatccacacatctccaatctgcagctcttcaattcctctccccaccggtttctaggcccaattcttctcctcctcccagtgtcatgtaaataaatgaacatgctggaaagttttatctgatgacttcctcttcaaatcaaacatgatg

SEQ ID NO: 80699 - DNA, 472 bp, Zea mays
  Clone ID: MRT4577_173616C.1
cttgacatcgaattcctgctgtccggggtatgcactcacatatacaccgactgcgctcctaggcgtctgtttctagttgtcgtttctgccgaatccaaacaatgaatccgtccgccaaatcacaccagtacatgcacgatcatactgacgtccaccactgctgccgcaaggaagcctaggatgccaccggcgccgggaccgcggcgacctgagatactctacgatgcatgcacgagcacggacagaaactaaaggatgcgctatcgcctacagatatgtggatgcgctagatgtcctgcctacccctaggtacaaggggtccgagtttaagaagtccgaggagaagatctgctagctggtgtgggacatgaacaccaccttcgacatgcccctccggatcgccccggccatgatggggctcacccactccaccctctggtgaccccactcccaactgacaaaggaggagcct

SEQ ID NO: 80700 - DNA, 271 bp, Zea mays
  Clone ID: MRT4577_173617C.1
gggggctaaccaaaaccaaaaggggttcgctgcgagcgtggtgtgggatccttatagacaaatatacgcgacagacattacctgcgtgttttgccaactgtcattacaattgccaagcgttcagtgcaccaatgaaaatactcagcccagtagtcccatgtgcccaaaatgtggagaccatgcctaactacagtaggcatgctgtgcgccagctggaattgtaatcaggccccccctttttgcacgatatcatgaacggggcttttcacct

SEQ ID NO: 80701 - DNA, 329 bp, Zea mays
  Clone ID: MRT4577_173618C.1
attctggtctcatacttaaactggaataaaaaactgggcacattcactgaacaaaaccggttaaaattcgggccccgttcgggggggggggacacacacagccggggcacacacccagggccaagccccaaacccggggggccccaaccgaacccaatagttggaccacaagcgtggcggccaaaaacaacaactttggtggacacacatttcggggcacaataccaaggctgggggcacaacacgccgtggggagtcccactccctgggcgaaccacgcctcaggggtcgccctcggagcttttgccaaacccggccctttgaccccc

SEQ ID NO: 80702 - DNA, 531 bp, Zea mays
  Clone ID: MRT4577_173619C.1
ggttcatgattttaccattgtcttcgaattcaacgccttacatgaacattaaccaggaaagcgccgaccgcaaggaccgccagctcaggtgcctttccgccaaaactgtccagccccctaactctggtgactggaaacgatggggggcccccgggcttcatacactacaatacattacgatgatcctagatggtttagggatacccacgatgaccaacatccaatccatgggcacaatgacccccattaccgattttcttgagacgccagtttggtggacgagcaagatagcgttcgtcagcccatcgcatacttctgcgttcacttgccgtccctcgactcccacttgggccgctccgtattgtacatgtgggcaatctccgagacatgaggatcccacaggttgaagtcgttcagaagggaccacatggtcaacaggaccttataaattgacaaatcggtcatgcactgcctttttgagaatggcacagcatatactcccattgctgaagatattaggatcgaacacct

SEQ ID NO: 80703 - DNA, 291 bp, Zea mays
  Clone ID: MRT4577_17361C.1
tattatctcctccttgcgctttttgcccttttagtgagcgcaacaaatgcgttctttattccacagtgctcacttgctcctagtgccattattccacagttcctcccaccagttacttcaatgggcttcgaacatccagccttgcaagcctacatgctacatctagcgcttgcggttagcgtcttacatcaaccaattgcccaattgcaacaacaattccttggcacattttaacctacataccatttcaactcatcatcaacaacagtatctgccatcactgatccacct

SEQ ID NO: 80704 - DNA, 1897 bp, Zea mays
  Clone ID: MRT4577_173620C.1
gccggccgggcttcctcttctcttaagatggacagccccgttcggggacgggacaacccttgagccgtcaccaatggcggacctcgaaaccctagccacgcccgcccctgcctctgcctctgcctctgcctccaccaagaagaagaagaaacactccaagaagcacaaggccgccagtgacgcccccaccaatgtcaccgtcgacgcatcccttatgggtggttcctcctacgtcgcggccgcccccgtggtcggctacttcccctccgggtacgacccactcactaccgctgcgggggcggagcctgcccccggcacccagctcttccggcacgagaagcatcccacctgggtggacctcgtggtccggagccccggcggcggacacgacttcgttggccggagctatgccggtgaggccgccgtgccgcaggtctgcgactacgcgcttggcgtccttgacaaggcctccggcactctcaggatcgtgcccatcgctggcaaaaagattctgaggctagagccacatcttgaagtgcagcatccagcgcattcgcagcactctgaggtggcatcagaagcggcttcagctgcaggaaatgatgaattgaaggttcaggatctgacaatgatgtatggagccaagacggacagggacaaggacaataagtggagatcgttaaaggaacaaaggaatgatccttccgcttatgaggacattgatcttggaatatcagagaccaatgtcaacgccaatgataggcaggaacctgtacttgttcggaacattccaccttatgatcctaccgcagatacatcagaaaatgcatatcttttggacgagattattccaaagagtatgcgggagcatcttttggaaattgtccgtcattttgaatcaggagaaatctcctcaaaaggctatgggagttttgtctcaaaacgtgtgcacaagttaaaggagcttcagggtgaagataaaaagaggtttgcttggatactttcctacatccaacatctcctatctctattggcgcggaatggctccatgtccaatcgcaaatggaaaggcagaaatgaaaaccagataagccatggaccagcaaccccgcaggctgtatatcgcaggctgctgttcatgtttacagaaccggggtccagtgtcatgccaacagagaaaaaagagcttctgaccaactacatattggtcctaacactttttgccgatgacttcagatccaaccccagcgacatatgtgaggaccttaaaatgacccgccaaaatcttaaaccatactatgaccagttgggatgcaaatctgtgacagaaggtgcttttaagtctactttcatgacgctcccagcccctctcaagttcccaaaggaagttacgagaaagcggcgacggcagtagggcttttatccaaaggagacaaggagagaaaccaatggctatttatctcagaaatggcttgcattacttgaatggatggctggattggaaatactccctatcgaaggcaagaagtaaaggcatcgatgctaggggcccgattttaatagtgtactggaaatgaaaagttgtcctgtgtttcatctcgttttgtttttagttgctcatcgacattttcttgttaaggaaacatgtcatctatgtattgataaatgtttgtctatctgtatgagtgaatgtattgaaatgcttccgcttgggttaattcttagggttaattgtgtggagcagcttatcagaaaaaggcctccatgctaggggcccgattttaatagtgtactggaaatgaaaaaccagaaaaccaagcccggggccatcatcatccgccagcgcggcaccagggtctatcctggaaataacgttggaatgggcaaggatcgcccc

SEQ ID NO: 80705 - DNA, 783 bp, Zea mays
  Clone ID: MRT4577_173621C.1
caactcaatcattgatgcttatatagagtcaggtgacactgagcaggctttccttctggtggagaagatgaaaaatagtggagtatccgcaagtatagttacctataatttgctgctaaaaggtctttgcagaagttcacaaatagatgaagctgaagagttgatttacaccttaagaaatcaagggctgagacctgacgttgtcagctacaatactataatatcagcatgctgcaacaagggcgatactgataaagcattggagcttctccaagaaatgaacaagtatggcatcagacctacactgagaacgtaccatacacttgttagtgcattggctagtgcagggagagttcatgatatggaatgcctatatcagcaaatgttgcacaagaatgttgaaccgagcagtagcatatatggcatcatggttgatgcctatgtgagatgtgaaaatgattcaaaggtagcatctctgaaaaaagtaatgtcagagaaaggaatagcctttgatgacacgaagagaagtaaccatgagctagataggataatagcaagtccaatttgattggattgccttgaaatgaaaaggctggaaggttgccagttatgttaatatcaaaaacaaaatttcagatttaaaaaaaaaaaaagttagactacccgtctagggtttggggttttccccttgtaattaccatctcaccctcaatgtaatgggcctggcccatgtactgagtctattaatactactcacaaaaaaaaaaaaaaaaaaggccccta

SEQ ID NO: 80706 - DNA, 256 bp, Zea mays
  unsure (1)..(256): unsure at all n locations
  Clone ID: MRT4577_173622C.1
cgtggaggggacagagcgcgagaaactatgatgcgctgcgccgccgccgcgcttgcggtcgccctcatcgctgccgttgccgccgcaaccgctgcgnggtcgccggccgcatgcacgtgcgcgcggacgtgcgcgccgccgttcctcgacgccgtcgcagtgcgctgccccttcgtccggatcgacgcgtccccgcgtctcgaggtgacacgagagactgttgatactgagttggaccttcgagagaggggtgctt

SEQ ID NO: 80707 - DNA, 771 bp, Zea mays
  Clone ID: MRT4577_173623C.1
atgagggttgtacttgaggttaagaccatcgaccaccccactgaacaaagagcagtgctaggagagtgcatgttgtgcagcatcctgcatggccgcctcaacagtatcactctcgaggatgaaataatgctcagagaaagcctatgtaccctaaaagtcatcctccaggtggcgtaccaggcagtgacaccagaggtcaaggtgagaatagggtcaatagtccttagaatggccattacaatacctaggttagcggtcctagagtcagcacagactttgataccatttatgtcacatccgatttcagaagaggtcgcacacttacccataagtcatgaccccttttgcctcgggttgtacaaaccattaaacactaccaatctaagggtgccccatttcaccctcatgattgcatcgttttcccaggtggtctctcaacaaataggtctttacggagaggttaggcgatgtggaggctcttccgaggtcgaggtcgagtccgagcccctggatcgggcgaggcggagaccgtcggctgaggccagggctgagtccgagccctggggttgggcgaagcggagtttgtcgtcttcaggggctgagcccgagtccgagctccgggtcgggcggagcggagttcgccgtcttccggagcctagcccgagtccaagccctaggtcgggcggagcggagttcgccgtcttccggggcttagcccgagttcgagccctgggtcgggcggagcggagttcgccgtcttccggggcttag

SEQ ID NO: 80708 - DNA, 158 bp, Zea mays
  unsure (1)..(158): unsure at all n locations
  Clone ID: MRT4577_173624C.1
cttagttattcatccctttcttcattcatatattattctccccaaccattacttggacttgctcaatttcaaaacatatccgtctcccttatatanaccaaatcctctctcaacttaatagaccttttttccccttatcaactaccttcttctaaaac

SEQ ID NO: 80709 - DNA, 699 bp, Zea mays
  Clone ID: MRT4577_173625C.1
gcgcaagaaacgaaagccacccgccccgcccgcctccaaccgcgcttaaatgcgcgcctttcttcttccgcgttaaaccctccggctgtctcatcgctccgcgtagtaaactcttgttacaaaaggccagctgctcgtttgctccgccgcgcgccgtcggttggctgctcgctcgctctggctgggcggcgtcggttgctcggctgagtccggccggggagcgagcaatgcacattgcgacctgcgtgtggcaagagaaggcgtcggccggcggcatggggggagctgctgctggtggaggcggctgcgccggcggagagtggggcgcggcgcgcgcgaaggtggcgtcggtgctgggcgtggccgggtgcgcgctcaactgcgcggtgagcttcgtggtgttctcggcgctggacgtgctggacgtggtgctgtgcctggtgtacaagctggtggactacgcggcggaggcggagtggaagccgcgccaccagcggcgggcgggcccaaggtggtgcggctgtcggcgtcgtccgcgaagctgcagctggaggacgtgtcggacacgctgtacgtgcggccgtcgctgctggccgacgcgacgcgggcgggcaacggcagcggcagcggcgtggcccccgcgctcaccgtgagccccgccatcgcggagctgatccgcgggaagatggaccgggcccc

SEQ ID NO: 80710 - DNA, 802 bp, Zea mays
  Clone ID: MRT4577_173626C.1
ccaaagtccaaaagcgaggaaaggaaggaggacgtcgcgcaagaaacgaaagccacccgccccgcccgcctccaaccgcgcttaaatgcgcgcctttcttcttccgcgttaaaccctccggctgtctcatcgctccgcgtagtaaactcttgttacaaaaggccagctgctcgtttgctccgccgcgcgccgtcggttggctgctcgctcgctctggctgggcggcgtcggttgctcggctgagtccggccggggagcgagcaatgcacattgcgacctgcgtgtggcaagagaaggcgtcggccggcggcatggggggagctgctgctgctggtggtaggcggctgcgtcggcggagagtggggcgcggcgcgcgcgaaggtggcgtcggcgctgggcgtggccgggtgcgcgctcaactgcgcggtgagcttcgtggtgttctcggcgctggacgtgctggacgtggtgctgtgcctggtgtacaagctggtggactacgcggcggaggcggagtggaagtcgtgctactgcgcggcggcgtcgggcccgcgggcggcgcagctgcccctcgccgccgcgccaccagcggcgggcgggcccaaggtggtgcggctgtcggcgtcgtccgcgaagctgcagctggaggacgtgtcggacacgctgtacgtgcggccgtcgctgctggccgacgcgacgcgggcgggcaacggcagcggcagcggcgtggcccccgcgctcaccgtgagccccgccatcgcggagctgatccgcgggaagatggaccgggccccgcggccgc

SEQ ID NO: 80711 - DNA, 253 bp, Zea mays
  unsure (1)..(253): unsure at all n locations
  Clone ID: MRT4577_173627C.1
aagctcggagagcaagggcatcggggggaggcccagatatgcatgtagagaagaaggaattctnncctggagaatataagattgtagatcttgttcttccaaacacatctgatagttacaggttgttctgcatgatatttttttctagagacttttatgtgactcgttgcttatttccatactcttctttagatattattgttttttacaaattttttttttcatactttttttttccttaccttatttttat

SEQ ID NO: 80712 - DNA, 396 bp, Zea mays
  Clone ID: MRT4577_173628C.1
cctcgtcccgtcctcctccatcgcgtcgcacccaaccctaacccatcccaccctcgcgccgccgccaccggatccatccgcaccgccgccgccgcgaccatgggcttcgacgtgggcgtcgtccccttcaaccccgacggctggggccctcccgacgcgccgggcgcggcgccgctgctgggcggggccgtcgccacggcctccatccccttcgcgcccttctcccgctccgacaagctgggccgcatcgccgactggacgcgcaacccgggccacccgggtgcgcacggccaccacgcggccgcggcctcccgcgactcggtcttcgacttctcctcggacgacgactcgctcgccgccgccgccgaggactcgtccttcagcttcgtggacgcc

SEQ ID NO: 80713 - DNA, 293 bp, Zea mays
  Clone ID: MRT4577_173629C.1
gttttggaccgcgggcggccgttctttagtttccaggctaacgtccccgggcttgcgacggcatacttcttttttggggcggcctaaattaaatcaactggccgccgtttaccaccgtctggcctgggaaacccctggcgttccccacctaatttgcctggcagaaattccccctttcgccggttggcgtaataccaaaagggccggaaccgtttgcccttccaaacagtggcccaccctgaatggctattggaaccccccttgtaccggctctttaagcccgggggtggtgg

SEQ ID NO: 80714 - DNA, 421 bp, Zea mays
  Clone ID: MRT4577_17362C.1
gaccaagaactccactttcatgtacacatgtataaagaaggatgcatcaaacgtgggaacggcatccatggcgatgatggacaaccgcacagggctgggctcggtggtggaaagcaggatcttcatctggaacatggtgcacaaccacctcgcggccgccttcggctaccgccgcaacacccgcgacaacaagaaggactctctcttcttcccttaccaggagaccagcaaccccaacgacgaggtcgagggcttccaccgcagcgacatcttcgtcgtggccgaggactacctcaccgacgcctgcacccgctattttttcgagctcccggcccacctcggcaaggacagcaagaacctccaggcctccgtcgaccacaatgacgacgtcaccgacgactactccggggccatcatctgg

SEQ ID NO: 80715 - DNA, 808 bp, Zea mays
  Clone ID: MRT4577_173630C.1
gagaactagcagaactgttgattgccaaatgtgcacagaagaaatactatatgcaatggcatcaatgggcttggttactggggggcagtacgtgggaatcagcacctgctggtgctggctgggttggtgctcatttgaaaaacaggggaaggagattatttttccttgatggggcaaggacggtagatctgaaagcagcatggcgtggaaatatttttcttgaaaacagtaggcacaggattaagtacaagaatactccattagaattttgagttgaagggtcttgaattttttacccaattgctggagcaaactcagggatctaacacggtttagtctaactacttagttaagagtattcaacataaagattctttggaatcacaataagctgacaaatgcatcatttctttatcaatttcaccatctcatctgcatagttccctttgtttttattctgttattcacatggtttttctagtgatgttattatcaaagcagttgacgatgcttacctgtttttccatgctaacgtggcttcgatattatcatgtttttttgagccctttgagaattgtagccccccagcatgcctctttccaaagtcgtgcgtggagattcaaaccggtagtctagtggttgccgtcaaaagcagccaaatttgtgaaatcgtcatgtgtgttgctctctagtttaccaatctgtgggcttgtaaagaaccctgtaggcatgaaaccacccgtatgtccagaaaaaataattaactgctcgtatgaaatcccaaacggagatgtaccgccgtttgtcc

SEQ ID NO: 80716 - DNA, 651 bp, Zea mays
  Clone ID: MRT4577_173631C.1
ggtgaccagcgtcgaaagattgcaagaatcaagctgcagggtctgaacgtgacaccaaagattcttgtgctgactaggctgataccagatgccaagggtacaaaatgcaatgtggagctcgagccagttgaaaatacaaaacattcccacatacttcgtgtgccattcaagactgaaaacggcaaggagttgcgccagtgggtgtcccggtttgacatctacccttacctagagagatatgcccaggattcttgtgccaaaattcttgacattttggagggcaagccggacctgatcatcggcaactacactgatggcaacttagtggcgtccctcatgtcaagcaaactaggggtcactcaggggacaatcgcgcacgctctagagaagacaaagtatgaagattcagatgtgaagtggagagatctggatcagaagtaccatttctcctgccaattcactgcagatatgattgccatgaacactagtgactttatcatcactagcacataccaagaaatcgctggaagcaaggagaagcctgggcagtacgagcaccactacgcattcacaatgccggggctctgtcgctacgccacgggcatcaatgtcttcgatccaaagttcaacatcgccgcacccggtgcagac

SEQ ID NO: 80717 - DNA, 360 bp, Zea mays
  Clone ID: MRT4577_173632C.1
tttttgttctagatcgcgggcggacctttgcgcccactcatgggcccacacgttcggctagctgctcgcggccacgctactacggtgaccacgctgaccattcacaacctctgccccaacccggtgtggtcaatggtgaccaccagctcgggcgttccctccatctacaccaacactcgacggttgggcccaaacgcgctgctcatggtatacttactgtccagcttatgggccggacgtgtgatcgtgcgcacgggctgatacagcagaatgacctgttactggacggggaccaatcaagccggcaccgtagggcatgttaagggacactacggaagagacttgagccaaggcacctac

SEQ ID NO: 80718 - DNA, 918 bp, Zea mays
  unsure (1)..(918): unsure at all n locations
  Clone ID: MRT4577_173633C.1
gttccaattaggcaaagtaccactaccacatcaaaaccaagaagtcaagactcaagaaccagcacggcaccgccgccagtccgctacatggaagccgcagcctccgcccttctcctccttggcctcagcgccagcctcgctcccttcgcctcggccgcggctccgtacgacccgccgacggtgccggagctcatggaccagttaggcctcccgcgcgcgctgctcccggagacagcccggcggtacctcctacacgacgatggcacctttgagctcttcctcgacgacggttgcgtggtagaggcggggggctaccgcgtcggctacgacatcaagctctccggcaccgtgtcccctgggtcggtcacggggctcgagggcgtccgcgtccgcgtgctgttcgcctgggtgcccatcaccggcgtcgaggcggccgacggagaggtcactgtccacatcgggccaatcaggaagtcgttccccgccgttgggttcaaatccagcccccggtgcatcatcggattggcggcggcagatatcttgcctcctttggtagaacagtagtcaggctgcctgatttgttaggatttagtcgaaatttgcggtgtcaacaagattataatttccttatgcttttctgtggcatgttgtttctgaaccctcactagtgtctgcgatagcacacaattacacgattattgtattgtttagtgtgactatttgttttctatcgaacagaaaaacgaagactggtacctatcgnatgttttatttttcttttgttttacccaaacggnaatcatgcaccccagtttgctgtagacttgtagttncacaggggagatgtaattttcatccccacactgcgattgggtgagtttgctgcaccaagatcatgcactgtcatgtttgacgcgg

SEQ ID NO: 80719 - DNA, 755 bp, Zea mays
  Clone ID: MRT4577_173634C.1
cattgggtacctcgaggccggccgggacactgtctccctccacactccacggcggcgcgccgagcgtgttatccaccacgttgctcaccaccgtctccacggtctcctctccctcccgaatcatccgacgattctcttcttctcaagactctcgccccccttcctcgctcctacttctcgccccgtgacgaggacccggcaattccccgtgcgcctgtaactggcaccgattcgttgtgcgccgtatgagctgaactgcgctagtgctcctcgatgaattatcggacgccggagccagcgataagcgacgaggaggaggagcactgtgcctactagttgacgtaacgagagggcgatatctacgacgccgtggagctctccgagccggacgtatgcatcacagagatgagacgtgctggacctctgccatccgatgtctgacttctcatggatggcggatgattcagatcttgacagatcgtttatatataagggctctactgagggcataaaacatgaagggaacctcatctcctattgcattgcatggaagtgtgaatctactgaggtacaagttgatgatacatgcacggatcgctctcgcctgtatgcagagcttggcatgagaacgcagcggtgttcttggagcaataaacccatcatacttcagacctaatccgttgacatttgcttgataacaatagactgaagatatttgccatgtaatgaaatctctatatgactaccactctgaa

SEQ ID NO: 80720 - DNA, 338 bp, Zea mays
  Clone ID: MRT4577_173635C.1
gtggcctgggtaaaaggtaattttacatatagaaaaaaaggcaataaactactggaaaattgagaaaaacccaaagcctttgaaattctagatcttctacccacgaaacaaaaatcctaaattgttttaccaagcgtgcgacacaaactgaaagcaatcagccggacacctgcattgacaaaacattcgcctctgaggggagagccaccatttattcctctgaatacaagcctgctacagaagagatggctgaaccactgaaggagggttgcgggccttagaccgggggttgccacaaccgtttgtcagtgaagggcatcttttcaagccccttgggg

SEQ ID NO: 80721 - DNA, 684 bp, Zea mays
  Clone ID: MRT4577_173636C.1
atggcagtgagcggtatgggtgctgagtcccggcgggggtgggagaaccatactcctgatgagggcgctccgcgtgctcagcccgaactccgcaatctcaacacgagccctactcaactcgtcaagagtgtggtcatcctccagacagcgcaccagataggtagtctcccagtggtccgggaatgtctcatgactatgctggtagactacacaacagtactcgatcgaccaggtgtgtcggtccatagcccggcgcaacaaggtgtcgagcacgtcgtgaaagtgacaaccgtgagcggcgtcacgggtgatgggtcgggtgatccaaccttccggctcctgctcctcaaaaagcatggtgatgtgtctcgagcttttttcgttgttgtctccgtcaggatctcctccaacagctcctcctgcagccgggacgccctatggtggtgcaaggggcgcctctgcggggcacaggggagagacgcctcgcagactccacctcctactgtggcggggaataagaatcttgttgctccctatcttgtcgacgacgttcctgctcctcaagcaggcggtggtgcagcctctccaagtgactcggctgaccggtcactgtgcggtgaagcggatgcttcgcaagacgagagggtaggaaaggaatctctgatttgcatgttgtgtgcctaa

SEQ ID NO: 80722 - DNA, 445 bp, Zea mays
  Clone ID: MRT4577_173637C.1
gcggggaggcccttcgcaccgtttggtaagagggaccgcggggtcatccacaccgactttcttaggaaactctggcgcaacaaggagtcccactaccgaatcggtgacctgcgttgcattcgtgatcctggtctgcgacatggggaaagcggagctggacggggcaaacgagtacaccgagaaccagcccggatcgctcaacaccacagacgcgctgatcgcagacctgaacaactacgacatcagtgtttcacatagaggacatagccctactgccacggttacatatcagatggggaccacttcactgagcacgtggcgcccatcaccgcccacaagcaatacatggtggacattggtaaccacgatctggactggcccgacacggcggcattatgggacgagctggactagctcggcgaatgcgaagtcccaggcgagacct

SEQ ID NO: 80723 - DNA, 347 bp, Zea mays
  Clone ID: MRT4577_173638C.1
gttctgcatagtattctgtgcagttatttgattgattcacattttcaaatgatcggttgaaactctgttatgcttgactagactgaatctagattgtttactaaaattgggcatgggttttaattgtagtggtttgtagctatctgtcattgtacactgattcaagtgacaacgatttcttttctgtggatgcattttagtaggattggccaccaaggtcgtggagtatatgttgcccaattttaatgaggtctggtgggatatcattaccttagatatcttgatatgcaaatagtttggtgagacatttgaagataattaatgttcatgtcacaaacattcagtta

SEQ ID NO: 80724 - DNA, 847 bp, Zea mays
  Clone ID: MRT4577_173639C.1
acctcccggctccgcgccccggccaccccaacgccccatcgacacaaactcgttgagagcgcctcaaaaccaccagaaaaattccccagatcgtccccagcacgaaaaagcgcagatggagcattccggcgccaagaagtcgaacaagatcaccgaggtcgtgcggatgcagcagatgctgaagaagtggcgcaagctctcggtcacccccaaggagccaagctcgcccacctccggcggcggcggaggcaatgctggcgagagcaagaccaggaagttcctgaagcgtacgctctccttcacggacgggccgccgtcggggtcccctccgccgccgcccaagggccacctcgccgtgtgcgtgggccccgcgatgcagaggttcgtgatcccgatggagtacctgaagcaccgcgccttcgcggccctgctgcgggaggccgaggaggagttcgggttccagcaggagggcgtgctccgcatcccctgcgaggtccccgtcttcgagtccatcctcaaggccgtcgagaagaacaagaaggacgccgccttctgttactgcggcgtcgagtacgccgccgacgaggtcgggcgcggcacgcctaacaacccgctctgcagataggtggagctcaagaaccaaacggaaatgatttcttatatttccccccattgtaacgtgttgcggtgagggatgagtcgatagtatctccccccgcggattagaattactgctccgatttttatctctgctgaactgagctgatctggactgggtaatgtaacagccatggatgcaacgaatcatggaaaaattgatgtggaaacgaagggttttctgtgttct

SEQ ID NO: 80725 - DNA, 583 bp, Zea mays
  Clone ID: MRT4577_17363C.1
aattcggcacgaggcacccacgctcacactgacccatctcgctgatcgccatagcaccatatgcagctgaaggctgaagctccgaggtgtctcgccgtggttgcacttgcaccgaccgaaacagcagtggattcaacgttggcacgttgccgtgctgagcagctggtgccaatcgatcgtgaatcgtgatggcggcgacggcgaggaagctgatcgtggaggtggtggaggcgcggaacctggtgcccaaggacggcaccggcacgtccagcccctacgcgcgagctgacttcgacggacagcgacgcaagacgcgcaccgtggccagagacctcaacccggcgtggaacgaggcgctcgagttcgacttcccgcccgccggcgtcgaccccgtcgccggggagccgctcgaggtcaccgtgctgcatgacctccgcatcgggcctactcgccggaacaacttcctcggccgcgtccgcctcgaccgcgccagttcgtgcgcaagggcgaagaggcgctcatctacttcccgcttgagaagaacaagggcctcttcaacttcaactgggtccgcggcgacatt

SEQ ID NO: 80726 - DNA, 397 bp, Zea mays
  Clone ID: MRT4577_173640C.1
tcggtcttcttctactacatcgtctgcatccctctcgggtgccttctaggattctactttggcctcggatcaacggggattcagagcgttatttatctgtcacgcctttaaggcagaccttgatcttgatatcggttacattcacgaccaactggaacaaggaggttgaagaatcacagaagacgataaacaaaatggacgacggcaaggcttctctgctgtcagcgcaagaatgaaacaactcgtctcttttgttcccaaccaaaaaacaacgagacgtggatttatatgacctgtacagtcttgtttggaaagaaagagtattgtataggattgaaggggttataattctcttgctattcaatattgtatgacaagggtttatattccccacaat

SEQ ID NO: 80727 - DNA, 297 bp, Zea mays
  unsure (1)..(297): unsure at all n locations
  Clone ID: MRT4577_173641C.1
ggaaaaaagctccaggaaagaaccaccctttctccggggtttatcattcttggaccaccacgcaatttaaaatgtggccgccactttaaacaacattttgcttaacaaccccggcttttgttcccgcgcggcagcaaaaatctccaaaattttttttttcttgttttagcttggttcctaagcaaagttacccagattcaaaatatgcttgtttgaatgcaggcatgcaaaatcactcctccatagcataaccaccctcggggacctcaaccttntgttttagaagtgtgacctttg

SEQ ID NO: 80728 - DNA, 624 bp, Zea mays
  Clone ID: MRT4577_173642C.1
gtttgcaaattgtagattgatgctcaaagtaagggaaaatctgttacgtcctcaggcatccaacctgctcctcattctcttcgtactcatgccccacctccacgggcatgaggaaatacatgggggctcttaaggacaccacaacagtcagcatagcaaaagtaaacagcgattacaaggagctggacattgctattgtgaaggccacaaaccatgtcgagaatccaacaaaggagaaatacgtgagagatatcttttaccatctttcacccggaaggcctcgggcagatgtcgcctactgcatccgcgcccttggtagacgtctttcaaagacacgcaactgggcggttgctatgaagacattaattgtcatacaccgtgctcttcgggaagttgatcctgctttccgtgaagagcttattagttatggaaagatctagctcccatatgctctatctgtcatactttaaagacgattctagcgcagaagcttgggattactctgcttgggtgcgcaattatgctttatatttggaggagaaacttgaatcattccgtgtactgaactatgatgttgaaaaggatccgttgcaaattcgggatcttgatacaaatggattgctc

SEQ ID NO: 80729 - DNA, 262 bp, Zea mays
  unsure (1)..(262): unsure at all n locations
  Clone ID: MRT4577_173643C.1
gctaaatcccttccattagtaccaagcagaaagcatggttgttttgccacccacacggttttcacgggtggcggctgtgagcgaccggggagagcgtcctcacgctcnatggacgccctggtggagaggtactggggtctggggggacggcggttccgtgcgtgcggcggttccccagctgcggcgcactgccagacgtgcccgggcggcgcgtacctgtgcgcggggtgcgacgcggtgcacgcgcgggcggtgctcgaac

SEQ ID NO: 80730 - DNA, 220 bp, Zea mays
  Clone ID: MRT4577_173644C.1
cgggactggatcgtatctatccggctttactttagaatgacctacggatttcacaaggtgagggtgaatcggactacgagtctggacacattactcatgaatgacttcagaagtcatattgacgaaccatagcatccctgtatccattggcaaacatactatgattctctatcgaccgatgatgtgagaccattagcactgatcaagctcaactgcttga

SEQ ID NO: 80731 - DNA, 754 bp, Zea mays
  Clone ID: MRT4577_173646C.1
gttcgaacctgggcgccccctgccgccgttgccggcggtggcggctgcggctgcggctgcgtccattgtccgattataatcccagtcccactccatgattactagcgatctcgagtttcctattgagttcggcaacagcctcttgcggcgccggcggacacacaggcggcagaattgatacagacgctgttcaagcccttggctgtgtcggcgcccgcggcaggtccattccgtcttggtcgcagacttgtaggcaccttcggatcccctcctggcggaggccaatgctctggtcaggcctgttaaagatagtcttctggaaacatggcacaatacaggaagcagttcttcaaatagtctgttgccatgaggccaggcctgttccgagggatggttgttgacttgttggcatctagtccttaggcactcatactgtttatcctttgtagtgggcatgtgtggtaggtaatgagaaactatttatgattggtggacatgagggagactttatgactaaaccaggatcacctgtttttaaatgttggtggaactacagagaagcatgccatcaccaataagctgattcttgttggtgaagtcttccgttttgatttggaagcattggtaggtcatgtcctccagaccatttttttccccttatggatgtttttagttttttattgtgagtcgatgccactttcctctgaattttgagggtccaactagatgaactaaaagtctctgccaattttgc

SEQ ID NO: 80732 - DNA, 188 bp, Zea mays
  Clone ID: MRT4577_173647C.1
atgacgcttgacctacactgaccacactagttgtgattgcggaaacgctgggcaaatgggggtatccatattcgaaagaaagactagacctactgccacggcataataaatgcaccactcagcttcatacctacttccatgcaaaagctgcacctattcaagagctattgtctcacaaagtatgaacc

SEQ ID NO: 80733 - DNA, 2391 bp, Zea mays
  Clone ID: MRT4577_173648C.1
ggaccctcgggccggccggaattggtagcttattttctccattacgtgttcccagctgcatgccgcaagtgtcaaactccaattagtcaccagccttgcttgcttgcttgtcccagctaagccgaggacaggacacgcgaagaagaggaacgatcagtcaccagccttgtttgacatcctgagcagcttcatctcctcctcctggcaagtttcttggcaagctggtgctcaaacaatggcgtgttaattaggaataggatagaacaggatcgttgcatcacgcagccaaggagacatggctaggagcagagaggtggcgggctggggcacggtggccggcggcggcgcggcggccgtggagaaggcggtgcggtgcctcggcaggggcgtcgacatgacgggcgacctgaggctgaagcactgcaaggacgcggggggctgcctggtcgtccggagcgccgggaggaaggcggcggaggaaaaggccgtcgtgccgggcttcggcgtcgtcgccgacctgcccgccgacgtcaggtgcggcaagggcgaccggatcaggttcaggtccgacgtgctcgagttcaacaagatgtcggaggcgttcaaccaccggaattcgctggcggggaagatcccgtcggggctcttcaactcctgcttcgacctggagagcggctcgtgggcggaggacgccgccgccaccaagtgcctcgccttcgacggctacttcatctcgctcctcgacctccgcctcgactgccggccgctcgccctcgccgaccacgtcgtcggcgacgtgccggcggcatgggacccggcagccatagcaagtttcatcgagaggtacgggacccacatcgttgtcgggctgggcttgggtgggcaggacgtggtgtacgtgaagcaggacaggtcgtctccgctgtccccgtccgagatcaaggagcacctcgacaggctcggtgaccagctcttcaccgggacctgcaccctgcccccttccaaccgcaaactcagggaacacaaatctaaggtccctgaggcgttcaatgtgttcgatgcccaagtgacacagcaagggctccaaggactaatggctactccagtgtcctgcaaagagggcgtgacggtgatacactccaagaggggagggaacgcggcggcgagcgaccactcggagtggctgctcaccgtgcccgcgacgccggacgcgataagcttcaagctcgtgcccatcacgtccctcctcaagggcgtgaccggcgtcggcttcctctcccacgccatcaacctgtatctcagatacaaacctccgacaggcgagctgaggtacttcctggacttccagcaccacaggctgtgggctccagtgctcggtgacctgccacttgggccctgctccaaccggcaggctcctagtccggccttgaacttcagcctcgtcggttccaagctctacgtcagctcgagcgaggtggttgttccaagactacccgtcaccgggatgagactacatctggagggcaagaaaaataaccgcctaggcatccacctgcagcatctgtccaacaccccagcgttcatcggcggaacaccggccaatgagcagccggcggcggcggtttggcgcgggtcggagacgatctccgacgcgcggtactacgagccggtccagtggaggatgttcgcgcacgtgtgcacggtgccggtgaagtacgaccctcgctgggccggcgccggcgccggcccgccgtcggcgtacgtcgtctccggcgcgcagctccacgtcaaggcccacgactcgaccaacatcctgcacctcaggctcctgtacgcccggctgccgggccacgccgtggtgcagtccaggtgggcgcacggcgccgccaccaggctgtcatcgggcagagggagcttcttcctgtccaagtcgctggcctcgggctccggcggcgtcgacaaggagcagcagcacccggggagggttcacgtcgactccggcgtgttcgccggagggccgcccgtgcctgtcgggacccagaggctgctcaggtttgtggacacgtctcaggtcaccatggggccgcaggacagtcctgggtactggctggtcactggcgccaagctggacgttgagaaggggaagatctcactccgcgtcaagttctcgctgctcgctccagtttcttgacacgctagtcttctttctgctaggagaacaccgctgtgcagaaggccgaaattaggggggactccttgcgcagtgatgagtgattgtatcaaggtcatatttgattttacacagccttccgtacatatttttgctactactttcttgtacaatatattcttaaaatccttcagatttttcatgcaattatacacatttgc

SEQ ID NO: 80734 - DNA, 508 bp, Zea mays
  Clone ID: MRT4577_173649C.1
gcttatcgctaccgtcgacctcgagaacatattacaacggaggatccatcggcaactattatgacactgctccctgcacggtacagttggagacgataatgccaataagaacgagggtgctctgcggatctccaaggatatgatatgattggtagtcatgaccgtgatgacacacctacaatcagaagtcgtggggagcacactacttgcattatgtcgaatatggtgatcaattccgtggttagcaatggccgccatatagattgcaatttccgaggacgcaccacaggatgctcatgactgaatctatgagttaaaatacaatcagcacttcatcgtcttgatctcacgcgtgcccggtccccagatcggaatcttgggcgtaccattgagtggacctgtaaattggataacggtacctgcaatggatcctgatttcactatggtgagtactgtttgatcgtgacgtaataatggtcatacgtgcttcatgcgagaaaatgtatca

SEQ ID NO: 80735 - DNA, 311 bp, Zea mays
  Clone ID: MRT4577_17364C.1
tcggtctcctttaccccactggctggcgagcagcaaactccaggtgcagagcggacaagttcctcacgagcgcagggaacaacagatgggatccgtattttaaggattgtattggagctattgatggtacacatgtaagagccactgttcctagagatatggagcatgcctttcgtggtaggaagtcctatgcgactcaaaatgtaatggtgggtgtagattttgatctacgctttacttatttgttggctggttgggagggaacaactcatgatgcttatgttttatgagatgctttagaacgtgtgaat

SEQ ID NO: 80736 - DNA, 441 bp, Zea mays
  Clone ID: MRT4577_173650C.1
cccacgcgtccgaaaaaaaaaaaaaaattaaaaaaaaaaaaaaaaaaaaaaaaaaaaaagaaaaaataaaaaaaaaaaaaaaaaaaaaaaaaaaaaaaaaaaaaaaaaaaaaaaaaaaaaaaaaaaaaaaaaaaaaaaaaaaaaaaaaaggccgccctttttaaagatcccaattttacttccccttccttccaacttaatactttttttttaggtcccccaaaattaatttaattgccccttttttaaaaacttcttaattgaaaaacccttggctttcccaaattaaatccctttgcaaaaaatccctttttcccaacttggcttaataccaaaaagccccgaacaaatcccctttccaaaaatttccccaccttaattggcaattggaaccccccttttaccggcacttaaaccccggctgttttggggtttacccca

SEQ ID NO: 80737 - DNA, 863 bp, Zea mays
  Clone ID: MRT4577_173651C.1
aaaatacaaaatagaccatctcaccaccctcctccctccctccctcccccactccgcccgcaactccttcactgtgccgcccgtgctctcccatccgctccgctccccgcgccgatccaaagcccagaccctcgccttgatccggcctcgcgatgtgcggcggagccatcctcgcgggcttcatcccgccgtcggcggccgccgcggcggccaaggcggcggcagccaagaagcagcagcagcagcagcagcagcagcagcgcagcgtgacggccgactcgctgtggccgggcctgcggaaaaaggcggccgaggaggaggacttcgaggccgacttccgcgacttcgagcgggactccagcgacgacgacgccgtggtcgaggaggttccaccgccgccggcctcggcgggtttcgccttcgccgccgcggtcgaggtcgcgcccccggcccctgcccgcctagatgctgttcaacatgatggacctgctgccaaatcagtgaagcgcgttcggaagaatcagtacagagggatccgccagcgtccctgggggaaatgggcagctgaaatccgtgaccctagcaagggtgtccgggtttggctcgggacatacgacactgctgaggaggcagccagggcatatgacgctgaagcccgcaagatccgtggcaagaaggccaaggtcaattttcctgaggaggctccaactgttcagaagtccaccctgaagccaactgctgtgaaatcagcaaagctggctccacctccgaagacctgcgaggatgagcccttcaatcacctgagcagaggagacaatgatttgttcgcgatgtttgcccttcatgacaagaagggttctgca

SEQ ID NO: 80738 - DNA, 362 bp, Zea mays
  Clone ID: MRT4577_173652C.1
gcgcatgactcgtgctgcgcatgagcatcgggatggccaactcaactagctaggacggacgacagggaagcgacttgaagtgtctgatcaaaactcttctagatttggagaagaacctctagatgagaaaggaggtataggtgaacgaaacttcacgtctcttgcatgacgcgtgcagtgcatgagatcgggatggtcaactcatctagctgtgactgacgacactgagaagacaacagatagcgtcaacactcattatatggataatagtgtatggatagatatatagatactcgtcacaccgaatgctcacttgcgcatgatctgctcctgaattccatcgttcctgaaccagtagatca

SEQ ID NO: 80739 - DNA, 752 bp, Zea mays
  unsure (1)..(752): unsure at all n locations
  Clone ID: MRT4577_173653C.1
ttttttgtcacggggggggggggggggggtggggggggggaggtaaggcccgtacaagaggtaaaggtggggcaaaaatgtactataaattaggtaaagcggtnaacagaggnntaaaggtgnngtcaaaagccggtacatggggancnnataaaaacgaatgtggaagnaggactannctggtattattatcttatcccccccataatggtnntcaaatgccacgcccctnnacaacatgggaattatgcgcgtgcaaaaactgaaaaacccttgagcccctnnncacttactaatttcccccctgccnannctgccactngnncgactactnnactatttaccaatnntacccnnntccccctnnntgttggcgtttattttactannccttganngttgttttggctncnnttgcaacnntctgtnntccttcctggccctccgttttggcctcttggngtgtnnatcccaaagtccaatctccnnnatcagcgcnnactcgccnnnagtctctatncaaaaatctaccgcccgcttattggnngcctcgataactggggtcccnacccatnncgacttagggtagacnnnatctagctgggtttggccccatcgttntggcagnnccttctttggcggtttatcagcgggttgtaattgccaaattggtggcagtcttgggccgttggcccctatctattgggcctctacggggcactattccagcgatggcatcgcattctccttag

SEQ ID NO: 80740 - DNA, 1215 bp, Zea mays
  Clone ID: MRT4577_173654C.1
gcacgaggggcgattgggctccggccgggggaatgttgggggcgcaccggtcaaacaggctcaggaggaggctctctcctgtcctacctgttcgctcccggctcccctccatctctttcgccacacgcgcgagaggggggagaggaaacagctagcagcgagcgaggaacgaagagggtgcttcgcacgtgcatgtgagatcgatcccgatcgtcggccggcgcgaattgaactaacgacgacgtacgtgcgaccggggcgggcgttggattaattattccggcctgagcaatgggcaagatcgagtacggcgtggtggcgcgcggcgcggtggtgctggcggagcactacggcgcggcggcggcgggcggcaacgcgggcgccgtggcgcggcaggtcctggagcgtctccctggcggcggcgacgacgactgcaacgtgtcgtacacgcaggacctccacgtgttccacgtcaagcgcaccgacggcctcacggcgctctgcatggccgacgacgccgccgggcggcgtgtccccttcgcgttcctggaggacatccacgggaggttcgtcaaggcgtacggccgagcggcgctcaccgcgctggcgtacgccatgaacgacgagttctcccgcgttctggcccagcagatggactactactccaacgacgccagcgcggacaggataaatcgcatgaggggagagatggaccaggtccggagcgtgatgatggacaacatcgacagggtgctggagaggggtgaccgtctggaggtgctggtggacaagacggcaaccatgcaggggaacacggtgcgcttcaagcgccaagctcgccgcttcaggaacaccatgtggtggaggaacgtcaagctcacagctgcagtgatattcatcctcaccgtaatcgtgtacgtcctgctcgcctacatgtgtcgcggcttcaccataccgtcatgctttccgtaatctccatccgtcccggtgccagtgcggaccaccagccctagctctagctgcctcacaacttggttttccgggttctgtaacagcagcagcggtgctgcagttctctctcttgtacgagggaaacaacagctcattctcaagttctgcaacaaccagatctgatttttttttaaaaaaaagatggtagtcaaatggggaagctttcccacctgattttctatcattaaacacacgaacttctgg

SEQ ID NO: 80741 - DNA, 381 bp, Zea mays
  Clone ID: MRT4577_173655C.1
tttcgggaaattaaaagaccgacccggcccttgcaacaaccacgcaaatagatcccactcatatacactccagtagctagtagtagccgacgacctcgtcgccctgcaacgtcggagtcgtcgccgcctcgctactactgcttctgctgcacgccgtcgtcagctactagcttcgccacgcgtcgcttgagttttgttatgtttcagctgtgtgttcgtccattccatatatatcctcatatatatacacacacaactgttcttttttcgcgcataattacgcgcaggacaagagcgcatcaactgcattagccctgattgcctcacaaactctcacaaggaaaacacaactcgttaattaataaacgtgccatgattagc

SEQ ID NO: 80742 - DNA, 815 bp, Zea mays
  Clone ID: MRT4577_173656C.1
cattggggtcgcccccggccggccacctttccggccgatccatcatctagagctaagctcatcatcagtctttcgcgtgtgtgtatgtatatggtggtgaccagcagctagctatagcagcagggtggttgttctatagttcgttcctatggttatggtggcggcggcggcggtactgctcgcgctggccgccgtggcgacggaggtggccgcggcaggaacgacgtacacggtgggcgcgccggacgggctgtgggacatgcagaccgactacgcgcagtgggtgaagagcaagaccttccgccccggcgacaccatcacgttcacgtactcgccggagctgcacgacgtggtggaggtgacgagggccggctacgatgcctgctccagcgccaacaacatctccgccttccgcaccggcaacgacgccgtgcccctcaccgccgtcggcacccgctacttcctctgcggcctcacgggccactgcggcaacggcatgaagatccgcgtcgacgtcgtcgccgccgcggcctcgccgtccgcgccgggccccgccgctgccgccgcggcgccgccgacgacctcgtcgccctgcaacgtcggagtcgtcgccgcctcgctactactgcttctgctgcacgccgtcgtcagctactagcttcgccacgcgtcgcttgagttttgttatgtttcagctgtgtgttcgtccattccatatatatcctcatatatatacacacacaactgttcttttttcgcgcataattacgcgcaggacaagagcgcatcaactgcattagcccctgattgcctag

SEQ ID NO: 80743 - DNA, 272 bp, Zea mays
  Clone ID: MRT4577_173657C.1
gtgcctgtcggggctcacttgaagcctgtcagggatgctttgtatctaacacaacgccaacagaagcacatttgtcttccagaacaccgtgccttagaaatgctttagaatctgaactttttaagacagacttaataatgtggcatattttctagatatcacttttattaggttgaactgaaagggtttttgtaaattttttggccaaaattttttaaaacatacttactttggactaggggtacattcttacaaaataaataaacagtttt

SEQ ID NO: 80744 - DNA, 318 bp, Zea mays
  Clone ID: MRT4577_173658C.1
ggctatggaaggagcttcacgttacctatgtgaccacatttctgatggtcaaacacgctgtataaggccggtgccatgggatcccagacaattacacgtgctgttgtattgcatacagtgccagcgccctcagtgattgctactgacggaacagggtaatacttgtcggctgcagagatcttatgcacattatcgactcgcgcgcttaatgggaaacgatgggctcacacacggacgaggatacgaattatgacagcagtggcatcttatcatcatgattaccatcagcaacttttttttgccagctggctatgacac

SEQ ID NO: 80745 - DNA, 139 bp, Zea mays
  Clone ID: MRT4577_173659C.1
ctttttcactttactctttattctttcaccaacaattatcctgatctaacataccatttgaccattaaaagctcaagcaaccactctaccatcacccatgggaggatttactttacaccaagtgagaaagccattcttt

SEQ ID NO: 80746 - DNA, 264 bp, Zea mays
  unsure (1)..(264): unsure at all n locations
  Clone ID: MRT4577_17365C.1
agcttttattcgcccttagatatctcccggggggggggtggggagggacaagcccgacgtgccctaccttacctgtttgctttaacccgtaactcttatatttagttgctcttgcctacgagatccaactcgtgttcgcgggccaccttccttttttttttttttttaaacctttgtgtgggggggggggggccctttttttttccctctctcctcttcgggggggggggggccccccccgtggggggttgttttttncccctc

SEQ ID NO: 80747 - DNA, 1414 bp, Zea mays
  Clone ID: MRT4577_173660C.1
cccacgcgtccgcactcatacactccagtagctagtagtagtcgacccctctccttctctctccgggcgcgcccccggcccgccccctctccggccgttcctgcgcctgcccccggccggccccccttccggccgtcgcgtcttctggagctagctcggcggcggcctgtgccgcgcgcgtgcgtggagcggggtggccggccgctagctcgtgccgctgggtgggggggcggcggctccgccctcccgtgctcgggcctccgcggccgcagcattaaactcgaccacaccaaacgacggccggcccaaattaaaagaccgacccggcccttgcaacaaccacgcaaatagatcccactcatatacactccagtagctagtagtagtcgacccatctgcatctgtatgtgtgcttgcccccggccggccacctttccggccgatccatcatctagagctagctcatcatcagtctttggcgtgtgtgtatgtatatggtggtgaccagcagctagctatagcagcagggtggttgttctatagttcgttcctatggttatggcggcggcggcggcggtactgctcgcgctggccgccgtggcgacggaggtggccgcggcaggaacgacgtacacggtgggcgcgccggacgggctgtgggacatgcagaccgactacgcgcagtgggtgaagagcaagaccttccgccccggcgacaccatcagtcagtgatctctctgggtctctcgtttattattgtttcggtcacgcatcgttgacgcgcggcgcggccatgcaccgcatatgcacgctcgatcgtcctgtcctgccctggcagcgttcacgtactcgccggagctgcacgacgtggtggaggtgacgagggccggctacgatgcctgctccagcgccaacaacatctccgccttccgcaccggcaacgacgccgtgcccctcaccgccgtcggcacccgctacttcctctgcggcctcacgggccactgcggcaacggcatgaagatccgcgtcgacgtcgtcgccgccgcggcctcgccgtccgcgccgggccccgccgctgccgccgcggcgccgccgacgacctcgtcgccctgcaacgtcggagtcgtcgccgcctcgctactactgcttctgctgcacgccgtcgtcagctactagcttcgccacgcgtcgcttgagttttgttatgtttcagctgtgtgttcgtccattccatatatatcctcatatatatacacacacaactgttcttttttcgcgcataattacgcgcaggacaagagcgcatcaactgcattaaccctgattgcctcacaaactctcacaaggaaaacacaactcgttaattaataaacgtgccatgattagcaaaatcattgcatgagcggcttcaact

SEQ ID NO: 80748 - DNA, 487 bp, Zea mays
  Clone ID: MRT4577_173661C.1
gactactatcatcatttcaacctctctccctcggcctcgccggcggcacagcgcagcgcttccactgttgggtgtggtggatttcctccgcccccgaacgatcgatcttttgcatggcagcagcggctagctccaaggggcggtggacaccaaccagctgggcgtcgccgctgacgctgccgccgcgaatgcggctgcagcaggaggcacggtgctggaccagaaggtgtggctccgcccgctcgaggacgtcgagaagccgccccccgtcgcctgaaccgcgccacgcccacgcgacgcgacactgccagcccacactgctgatacaagggcggcggccgggagggagagtcctggcaacgtcatgctcgtgcctgtaataagaacaagcaggagatgtgtgtgcctgtgatgtaccggtgtcgttatcagcgttatacaagtacttgcggttcatatgatcgataaccactagaactagcttccc

SEQ ID NO: 80749 - DNA, 559 bp, Zea mays
  Clone ID: MRT4577_173662C.1
ttgggtacctcgaggccggccgggtatatctgcattaaacctctctccctcggcctcgtcggcggcacagcgcagcgcttccactgttgggtgtggtggatttcctccgcccccgaacgatcgatcttttgcatggcagcagcggctagctccaaggggcgggcgatcgctgggagcttcgtcagccgcgtcctggccggcaaggccgcctccccggcggcggtggacaccaaccagctgggcgtcgccgctgacgctgccgccgcgaatgcggctgcagcaggaggcacggtgctggaccagaaggtgtggttccgcccgctcgaggacgtcgagaagccgccccccgtcgcctgaatcttgccacgcccacgcgacgcgacgctgccagcccacactgctgatacaagggcggcggccgggagggagagtcctggcaacgtcatgctcgtgcctgtaataagaacaagcaggagatgtgtgtgcctgtgatgtaccggtgtcgttatcagcgttatacaagtacttgcggttcaaaaaaaaaaaaaaaaaagcggcc

SEQ ID NO: 80750 - DNA, 1459 bp, Zea mays
  Clone ID: MRT4577_173663C.1
gttgcccgtcagtgctgctccccaatagccaatagcaatagcaatcgcaatagcaggcgctgtacgacggtgtgccggcaccggctagctcgggcgctataaaatgggggcagccggtgggtgtggtgactactatcatcatttcaacctctctccctcggcctcgccggcggcacagcgcagcgcagcgcttccactgttgggtgtggtggatttcctccgcccccgaacgatcgatcttttgcatggcagcagcggctagctccaaggggcgggcgatcgctgggagcttcgtcagccgcgtcctggccggcaaggccgcctccccgaggagggccgtgcacgcctcgtcgtacgacaagaacccggaggagcaggtgcgcccggcgttcgtgccggacgatgtgatcggcggcgcggggagccccgacaagtactggagcccccaccccaagaccggcgtgttcggcccggcggcggtggacaccaaccagctgggcgtcgccgctgacgctgccgccgcgaatgcggctgcagcaggaggcacggtgctggaccagaaggtgtggttccgcccgctcgaggacgtcgagaagccgccccccgtcgcctgaaccgcgccacgcccacgcgacgcgacgctgccagcccacactgctgatacaagggcggcggccgggagggagagtcctggcaacgtcatgctcgtgcctgtaataagaacaagcaggagatgtgtgtgcctgtgatgtaccggtgtcgttatcagcgttatacaagtacttgcggttcatacaaaaaaaaaaaaaaaaaaaaaaaaaaaaaaaaaaaaatggatttcctccgctcccgccgaacggtcgatcttttgcatggcagcagcggcggctagctccaaggggcgggcgatcgctgggagcttcgtcagccgcgtcctggccggcaaggccgcctccccgaggagggccgtgcacgcctcgtcgtacgacaagaacccggaggagcaggtgcgcccggcgttcgtgccggacgatgtgatcggccgcggcgcggggagccccgacaagtactggagcccccaccccaagaccggcgtgttcggcccggcggcggtggaccccaaccagctgggcgtcgccgctgacgctgcagcagcaggaggcacggttctggaccagaaggtgtggttccgcccgctcgaggacgtcgagaagccgccccccgtcgcctgaaccgcgccacgcccacgcgacgcgacgctgccagcccacactgctgatacaagggcggcggccgggagggagagtcctggcaacgtcatgctcgtgcctgtaataagaacaagcaggagatgtgtgtgcctgtgatgtaccggtgtcgttatcagcgttatacaagtacttgcggttcatatgatcgataaccactagaaaagaaaaaaaaaaaaaaaaaagcggcc

SEQ ID NO: 80751 - DNA, 339 bp, Zea mays
  Clone ID: MRT4577_173664C.1
acaagcttttttttttttttttttttttttttttttttttttttttttttttttttttttttttttttttttttttttttaaaaaacttttttaggaccatgcatattttatgggccaacccaaacaagaaaagggggggggtttaacggcattataacatatatagatagagggagagggatgggggaaattccccaaatttaaggaataagtagggggggggaagggcaggggaaaccccacaggggtggggggggaagctgggcagttggtactggaaaagcccacccagggccggaatgttttgccccataataagggccaggggggggaaaccc

SEQ ID NO: 80752 - DNA, 467 bp, Zea mays
  Clone ID: MRT4577_173665C.1
gtcgcatcctcacaggacaacgcacacggacgaacgcgcgtgcgaacggcggcgactgctcctgcctcaaggagaacaactacttgcacactggaatatcctttcggatccggatcaaccgactactctctcctcacacccaaaggtatcgatggcggacgttcgggctctacggcctcatggcgaacaccaacgtcttcattagcggcatcatactgccacgccgctgatccagtgcagcaagggccgccacgacggcacatgctggtcagttctacttacacgctgcgcggaacggaccgttcatcgactggcccgctgccgatcaggacactgctgcaacgagatgctgctacacctcctcatgatacggatgctcaagcaacagctacagctgcacgacgagcctgtacatgtagctggtgtggccatggacaggtgatacagagctgcgcggtctctgcgtg

SEQ ID NO: 80753 - DNA, 190 bp, Zea mays
  Clone ID: MRT4577_173666C.1
gttaggagcagtggaactatttacagctattgattacttggttatgaatgctgattcaaagaccgctgcaacatcagtctcttaagaaaaatgtattccacctttattctctcaaataagactaaacggcacttgctttgaggaatggctggcatcttacatagggcaggtcattagaagcccatttctt

SEQ ID NO: 80754 - DNA, 456 bp, Zea mays
  unsure (1)..(456): unsure at all n locations
  Clone ID: MRT4577_173667C.1
cttgngcccctccctcagccgcgtcgcgtcccttcctacgntccaanggtgctgtgtgctcgcggcgctggcgaagaactacccgaccgtgnngcgccggtcagcgaggctgtcgagaaggccaggcgcgtgctccgagccctcatcgccgagaagagctgcgccccgctcatgctccgcctcgcgtggcactccgcggggacgtggggggggtcgtcgtggtccggcggtcccttcggcgcgatggngcntcagtgcgggttggctcacggcgctgtcgcggggctggtcgtcgcggtgcggctgctcgtgcccgtcgcgggggggttcccgttcctctcttccgccggttgctacccgctcgcgggggttgtggccgtggtggtcgccggtgggcctgtggttcccttccaccccggtggggggggcacgcctgaaccccctcctgtgggccgt

SEQ ID NO: 80755 - DNA, 768 bp, Zea mays
  unsure (1)..(768): unsure at all n locations
  Clone ID: MRT4577_173668C.1
gccggccgggttgcggcccaccgtgcagttacagtcatcacacattcacactccacgcaccgcggccaccacctctcttctcttcctcgcttccttgctcaaccggctcgacgcgagcgtggcaagaatcgcggtgcgtgtgagccttgttcggagaagagctacccgatgcacctgaggctgtgagagctctgggcacggatgatgggagaagcaggggaggaagaatcagcggccgcgccggcggaggtgaaccgacaagcggagctggatgagcagcgatgcctggcggaggcgctggacgctctcagttcattggtctccgcctccttgtccgcgacgctgttcccgctcaagtggcagctcaccagggaccggctggaccggctccacgcctgcctcgccgacatcaccgtcccctcgggggacgagagcggcgaggacaggcgcgacgcgttcgtgaacctcctgcgggacgtcgcggcgaccgcccgggaggcgcgagagctggtgccgcggagccaggggcggcagtacggcggcggcaagctgcggctgcgaagcgacctcgacgtcctggcagcagccctcgacacgcacgtggcgcggctggacgaggtgtacgcgtcaggcncccctgaacgcgggcgcgnncactgggtggtgccgcgccccggcgccggggccacccgcgacgacgtgcggntctacgtgcgcgacctcttcgcccggctcagggccggcggcgccgaagatgcggagggaggc

SEQ ID NO: 80756 - DNA, 351 bp, Zea mays
  unsure (1)..(351): unsure at all n locations
  Clone ID: MRT4577_173669C.1
gggcacnagggcagggacaggacgaccagacaggcnccgcgnnncccgggccgcgaacgcgagcgcgagnncancaccnnacacggggccggcgcgccgcgggcnnnncccgcccgccccgagcccgccgcgcccgcacaccgacgaccagngngngggnggagaccagcgggagggggaggcgnnacaancgancggcgcaaggacgnggggaagaaggggggcnaanccggccgngcacacaaccggaccgggcgcggnaggcagngggaaggcgccgagccgcggccgccaacncgcccgggganccncgccaccagaacagggcgnggaggaagnccgcgcgccacc

SEQ ID NO: 80757 - DNA, 484 bp, Zea mays
  Clone ID: MRT4577_17366C.1
actatgacgtcagacctgcacgcctcacgtaagctctcgatcctctatagcggccgccctccacttcgtcctgttaattcccctgcattgctacctatttattgataataattatggctgtttaaaaaaaaaaattttttttttttttttttttttttttttttttttaaaacccccctttttttttcaaaaaacccggggccaacgcggggaaattaaccccccccggggggccccccttaaaatacccaacttttccttccggggcccccaaatttcttattttttttttggtgaaacctaagccaattcccgggcccggctttttccccgggaaaaattgaaaaacccctaaattccccaaattataacacctggaaacaaaaccccttttccccgggggccttaaaaaaaaaaaaaccccccattatttccctttccaacaatttcccctttttaattggaaaaaccccacccccctttt

SEQ ID NO: 80758 - DNA, 674 bp, Zea mays
  Clone ID: MRT4577_173670C.1
tgaccacgctcatcccgaggaaaccaccatccccaccaagaaggagcaggtcttctccacctactcggacaaccagccgggcgtcctgatccaggtgtacgagggcgagcgcgccaggaccaaggacaacaacctcctgggcaagttcgagctctctggcatcccgccggcgccccgcggcgtgccccagatcacggtgtgcttcgacatcgacgccaatggcatcctgaacgtgtcggcggaggacaagacgactgggcagaagaacaagatcaccatcaccaacgacaaggggcggctgagcaaggaggagatcgagaagatggtgcaggaggcggagcggtacaaggcggaggacgaggagcacaagaagaaggtggacgccaagaacgcgctggagaactacgcctacaacatgcgcaacacggtcaaggacgacaagatcgcctccaagctcggcgccgacgacaagaagaaggttgaggaggcgatcgagggcaccatcagctggctggacgccaaccagctcgccgaggccgacgagttcgaggacaagatgaaggagctggagggcatctgcaaccccatcatcgccaagatgtaccagggcgccgcgccggacatgggcggcggcatgggcatggacgaggacatgcccgccggtgctggcggcg

SEQ ID NO: 80759 - DNA, 789 bp, Zea mays
  Clone ID: MRT4577_173671C.1
agccttctttttcctcccgcagcctccgttccccgttccgcgccgccctcccgttctcctcgctccgcccgttctggattcaaatttcgaatccccccaccgtttccgcccccctgcaccaaatacccgacccgattccttttcctcccccctcccaccatgagcgacgcacccggcgcagcagcctcagctatgggcagcggcagggagctcgccaacccgccgtcggacggcatctccaacctccgtttctccaaccacagcgaccacctcctcgtttcctcctgggacaagacggttcggctatacgacgccgaggcgaatctgctcaaaggggagttcgcgcaccccgggcctgtgctcgactgctgcttccacgacgactcctcggggttcagtgctggcgccgaccacaccgtgcggagattatcatttacttcgtcaaaggaggatgttctggggcgtcatgatgctccagttcgctgtgtggagtactcttatgctgcaggacaagtcataactggcagctgggacaagacaattaaatgctgggatcccagaggagttagcggaccagagcgtacacttgttgggacatatgctcaaccagagcgcgtatattctatgtcactggtaggaaataggttggttgttgcaacagcaggaagacatgtcagtatttatgatttgcgcaatatgtctcaacctgagcaaaaaagggaaccgtctttgaaatatcaaacacgctgcgtccgatgtttccccaaacggacacggtaatgctctaag

SEQ ID NO: 80760 - DNA, 201 bp, Zea mays
  Clone ID: MRT4577_173672C.1
tctttttctaaattttttttttaagaaaccccccgcacatacatgtagtgctctagtcatgcttaagaattccttggcattgtgagaagtatctcatataacaagctgtgctcgacagcgatactgcagtgtatacggattggctgagcgctgcaagtagtcgcttgagagcacaagggtactgtttttttgtccatgaca

SEQ ID NO: 80761 - DNA, 517 bp, Zea mays
  Clone ID: MRT4577_173673C.1
cggacgcgtgggcggcggccctggcggcgtttcgcggcggcgcgcggacgcggctccgtggcggcgggcgggtgcggttgggcacgcgctgccccgccacgcggccccagtggcgcggttgcaggcctaggcacgggcgccccctggtgcgcgagcgcacggcctcaacggcgtgcgggcgcgcggcccccggctcacaggcgtggcctccagcgacggtccggcctcgtcggtggcgcggggcgtggccccgacgcgcgttggcgtattccctgccggcgcgggccacagctcctccgcgagagcgcaggcagccaggtgtagcctcggaatgggcttggcaccggcacgggcgcgcagctccggccacggatgccctccggccaaatgcggcgcggctactcggggcgtgggcacagtccctgtagggccctctccggtcagacgtgtccctggcgcgtggctcctcccaacgtgggttcagacatgccggtgcccggagcgggcagtcggacac

SEQ ID NO: 80762 - DNA, 460 bp, Zea mays
  unsure (1)..(460): unsure at all n locations
  Clone ID: MRT4577_173674C.1
ggggggtggggtggttttttttttatttttttttgtgttttttttttttttttttggtcaacagaaatttatttttttttttgcaaatcacaacagttcccccccggccaggggttacttttctggttttttttttttggccanccaggcttttgggggggggggaaaagccccggccttttaagtttttccaaactggccggggggggcacactgggggtccatacaagcttatgaagactggcgaagctctgggcgcccgaaatcaggatcagggggcactgggatgttaacagggggcctgaggtgagcgcagacttgggtggccccggggaccgggtccgacatgaacgcgctgatgaggtcttgggtgatcggggctttgttgggaacagtcacaaacccctgttggggcaagatgggatggaagcggggggcccacttgctggatcccaaacga

SEQ ID NO: 80763 - DNA, 572 bp, Zea mays
  Clone ID: MRT4577_173675C.1
attttgcatttccttcttccactagacattgtcccacgcataccactgactccacttgcatccttcagagaagaaactcaagctgttctggatcggttatcttctcaggcgccaaacaactctcctgctgggaggtctcttgttatacctgaatattatgaaactttattgagaagcacactatctattgccagttatgaggcctgttctttcatgggatgtaccagctccatcctggggacattgacttctttcattgacctctccccttacagaccttgtgggacttatcatttcttgacaagcagtgagcaattgattgttctcgcaaattcagatgctgtactgcagttgttattctactgccttcagttggatccccagcaacaactgcttgatgctgctgctagaagcttaagtgctcactggcagtacgaaccaattaaatactgcatacaggatatagtttgtgtggattacctgggaacaatctcatcagctgttcctggtaggcaggcaggcagagtggcccttggaagcattgaactgagcagggaagctatactgcacct

SEQ ID NO: 80764 - DNA, 179 bp, Zea mays
  Clone ID: MRT4577_173676C.1
ttcacactttccatgaaacattaactctactttttaaccaccacgacacacaccaagtgagctctcttacaaactagggcggatatttacaacattaccacaatctagcacttcatctaattaatgtttctactccattcatcataatcttcaactcacatactctaatctctatcaac

SEQ ID NO: 80765 - DNA, 1486 bp, Zea mays
  unsure (1)..(1486): unsure at all n locations
  Clone ID: MRT4577_173677C.1
cattgggtacctcgaggccggccgcgtctccgactgggtcggccgccgccgcaccatctccctcgcggcctgcatcttcctcgcggggtcagtcctcatgggcctctcgcccaacttcggtacgctcctggcaggacgctgcgtggccggcgtcggcgtcggatacgcgctcatgatcgcgcccgtctacgcggccgagatttcgtccgcccacatccgcggctccgtcacctcgctgcccgagatctgcatcagcttcggcatcctgattgggtacgtggccaactacctgctagctaagctcccgctggtctacggctggcgcgccatgctggggctcggcgcgctgccgagcgccgtgctcgcagtcgccgtgctcgcgatgccggagtcgccccggtggctcgtcatgcagggccgcgtcgagcaggcccacgccgtgctcaggcgcgtgtccgacactgcaggcgaggccgatgtgcgcctcgcggaaatcaagaccgcggcggggctggcagacgacgatgacggctcaccgagaggtgtcggcaagggcgtgtggaaggagatgttcctgcacccgacgccccccgtccggcgtatcctcgtcgctgccttcggagtccacttcttccagcatctcacgggaatcgaagccgtggtcctctacagcccacgcatctttaaggcagccggcatcgccacccgcagcgagatccttgcagcgaccatcggcgtgggcgtcaccaagacggtgttcatcatgacagccatcctgctggtggaccgcatcggccggaggccgctctacctctcgagcctggcgggcatcatcgcctcgcttgcctgcctcggtcttggcctcaccgtcgtggagcgctcggtgccgcgccactcgccgacgtgggctatggcattgtccatcgcaacggtcttcaccttcatagcgtccttctccatcggtgtggggcccatcacgtgggcgtacagcaccgaggtgtacccgctccggctgcgcgcgcagggcgccagcgtcggcgtggccatcaaccgtgtcatgaacgccggggtctctatgacgttcgtgtcgctgtacaatgcggtgaccatcggcggtgccttttttctgttcgcagggctgcccgtgttgncggccatgttcttctacttcctctgcccggagacgcaaggacggccactggaggagatcnaaaaggtgttcggccgtgggtggcgcgcgcgcctcctgtcatgggacgaagctgttgtggagcttccaatgtccaacaccaccgacggcaacaccaaggcgcgcccgtgatgcaaatgcgattgcaaaaattatggatagacattcatatatggtcacgtaaaacactagttttggttatattgtagaaaacagtttttttaaggcaagagtcaagttttaaatagaggataccataaataatagaataaacccctgctatacccagtttacccc

SEQ ID NO: 80766 - DNA, 269 bp, Zea mays
  Clone ID: MRT4577_173678C.1
cccccacaggcagcaaaaagctaatctcaggccccatattaccgagcggatctgccacaaagggtaccaggaagggaaacaaaagggcaaaacatgcccaaactcagcaggacccgggcgacccaaaggccccccccatccacattaattctgggcatacacaagcagcacccatccatgaaaagcgggggggaaaaacccctacggggtcttgaacatgggggggatcaggccaacgacccggttgctgaacccccattcgttgtcga

SEQ ID NO: 80767 - DNA, 530 bp, Zea mays
  unsure (1)..(530): unsure at all n locations
  Clone ID: MRT4577_173679C.1
ggctttgtttttggggggtttttaaaaaaaatttttntttttttttttttttttnttttttttttttgggcaaaaaccgtacctttttctttggcaccaaaaggaccagtagccaaagggccggactaaaaacattaactactcctaaaaaaaaaggggggggggggggggcgggcccaactaaagctactccccctttctataaaaacaaaacagcctaatcattcatcggacaacaatcagaaaaactaacaaaaacattctgggacattttttttctgtatctaaagaaggggcaaatgtgcagctagggtatccccacaaggggacgaaaaaagtctcccgggcaccaaagtctctccaccccctcgggatcctataatttctggattggaagggagagcttaaactcaggcgggagctcctcctccgaggagaggcgggcaaaaaagtaaattctgggggagccggcagttcgtatgaacttgcacccccaaggtttcnacctaatttgtgccctaccccctttt

SEQ ID NO: 80768 - DNA, 159 bp, Zea mays
  Clone ID: MRT4577_17367C.1
aaaggctttttaagttttcagccctggggcgcaccacgaacagggggggaaggggcatgacaggcagaaagggccaacaacaacctgaatagaggagacacacatctcatgcaaggaacagcacagggatggggctgctactggcaacagcacagcaca

SEQ ID NO: 80769 - DNA, 694 bp, Zea mays
  Clone ID: MRT4577_173680C.1
tgcatttggtgtacatgagcaggtctaaggcgagattggaaattggggatatccctggtgcacttggggatgctgaggaagcaataagaatagctcccagatttcctcaggctcacttattgcgaggcgacgcactttttgcaatgggcgaatattctgtcgcggaagatgcctatgcagatgccttggatcttgatccatctattcgccggtccaagtctttcagggctcgcgtggaaaggctacgagagaagcttgttagtgccaataatccgtagttcattttgaagctctctctccatcagaagttcgatccacaagtaatgtagatatgttcttggtgaaggtaataatgctcacacactttgcaagccactggtcaggaattgattgttgccacagcttggaggatccaacagttcatatgaatggcttctggaattttctcatgatttcatctggactgatgagaacaaactactaagtctcaactacaagtgttttgaaggtaacggaaatgcaacatggttattgtcttgcacttagccggtatgttcatttgtttggattcatacacagatgtcgtcacaatatgttaagtatttccatgctttggcactacatgtcatgaaatttagtatcaaatcaagtactcctgtaacctttattcaaaaaaaaaaaaaaaaaagcgtat

SEQ ID NO: 80770 - DNA, 199 bp, Zea mays
  Clone ID: MRT4577_173681C.1
accggagagagaacccgcttcgaatgcacaaacttctgtaaccccacttacatgagcgattgatctaccgtcatcattgactgcgctggatccacacccaaagactaccagaacagcacgaaactgaaaaggactaaagcttttaagtatactcaaccaattacaccagcactaatgaaacaaatgcctgatgatttct

SEQ ID NO: 80771 - DNA, 241 bp, Zea mays
  Clone ID: MRT4577_173682C.1
gcacccagtctcggcgcctaaagccccaaaatcctctcgcggtcgcagatcgctcttccctcagcctcttatctctttctcttctcccagtccttcctgccactcccgcgcgcagcgccaccatggcctcctccgtcgcggtgtccctccgcgccctcgctgccgccccgctccccaagtccagccccgcgacttcctgccccttcttcgtactccttgcgccggcgctgccccgacgcct

SEQ ID NO: 80772 - DNA, 341 bp, Zea mays
  Clone ID: MRT4577_173683C.1
aacctgtttatcacggattcaggatgactcggggcggggagaaacttttttatatacacccacaggactcttcaaacagaccatctggggcaccttagcactcagctttaacaacttatgccatatgcagcgccacttatttcgctctatccttattcttactctaaagattatcgataaatacatgtctaatattgtaccatatatagattacaactaggcttaagatattcttgatttagtgtgaggagagtggctgagatgtttttctgaagaatgctgacgaggagcttgacagacagatatgaactccctggatggagattcatgattgtggttcg

SEQ ID NO: 80773 - DNA, 345 bp, Zea mays
  Clone ID: MRT4577_173684C.1
gtgaggttggagggccctctacagggccaagagtgactgtgctctggatcttgcacggtgcacaatctggacaaagctgtgcaacaaggaggtgtgactcatataggctctgtgaggcaagctatgctatctattgtgtgaagattgacaacatgacctgtggcactaccaagctcttgctcaccatggcaagaatccttgagctgagctgaagagactgcctatgctactggctgatgcgaagtacttccacgggacgtggatctggtatggcgcacagacagtctgccacaggagctgttttgagagaattgactgactgaacccgttctttggcagcctgaa

SEQ ID NO: 80774 - DNA, 600 bp, Zea mays
  Clone ID: MRT4577_173685C.1
atgaaataattctttctaaatgacacacgtgtcaaacctatatctcatcttttgcaaatctgtgataactttttcttaaaagacttcttaggtccttttacctctgatcggctcatctatcagcactaaacctaaatcattggggcctttgcagacccaacttgcaatattgtttgatttgctagttctatccatgtcagggactcttgctatttatgatgtatgtaaattcatatagcttgttaatgtatatagatgagcacttctgtggttttttacctgtcttctgagtttaaaataggttgtgaacgcatatcgtgcatccacctgcagagttatacaagatggtatgtgagaccaatgaaacaaatttagatattggcatacatagctgttcttctgccaaaagatgcaggctcttctttacaaaggtctctctctagtggtgaagtcttagtggagctgtactctccagatcgtcctctggttgaactgcagaggtgtttctgtggcttatggcagttggtaccattctttgtgcatcatactggtcagcaatggagtgcccgagaagcagatattgaacaagagaagcttctg

SEQ ID NO: 80775 - DNA, 463 bp, Zea mays
  Clone ID: MRT4577_173686C.1
atcatcacattcagaattgatcaacgacattcattccactacaagaactttgagaactgattgaacatgtgaacctattgcacgaagcacagattcaggatatatgcgctagcttgaatatatattacaggtgcccctaaaatgctttcactgccaagaattgagttgcctgcgtaagttcttcttaccaaacattatggatggaggcaatggcccaaaaacactcttcccaaagcgatgaggtgatgcccaaccccttgtaacgggattatgaagtgatggctgaggtgatacctggtgagatgtctcgctgggcctttggatggttgcccatggtgcaagaacgtatgtgagtgcaatcatacattacatatcccaacacaccgtctccgaacagtgggggtgtggtatacggagttgcgaagaacgctaccagggtccacaacgggaaacacaaaattgg

SEQ ID NO: 80776 - DNA, 424 bp, Zea mays
  Clone ID: MRT4577_173687C.1
ggccccccaaataaaaaaggcccatttcgaactttttcagggggtaaacaaattttgcacaaagctaaaaccaaaacccggggccaaaatactgggagcaggcaaaggcttgccccagggaaacccccaggagcgggggggggcaattttttggggggaggctggaacccctagttggcccaacacaaaacctttggaaacaaaaagaaaaaaactttttaacaggttgggtcaaagttttcacacaagggcgccccccccttatgggacaaaagtcccccccccttggtaaaggggacccacccacttttgggccactattataaaggaaacaaaccctctttaaaattgggggaagggaccccccccaaatagggcccccccttttaaggcccccccacccgggaaaaccccggggggaaaa

SEQ ID NO: 80777 - DNA, 545 bp, Zea mays
  Clone ID: MRT4577_173688C.1
ggtgttttttttttttttttttttttttttttgggcacgagcacacattcaagcgacttggatcacctatttaagcattccagtctagaagattgaacagttttacagcaaacgtgactttccattcattcatgtcacctggtcactgggggggggggtgagttttttttttgaacagctacacgactaggttccaagttggggctcatttttttttcaaaagatataaaatccggcccctaatggcagcttattctggacaagaactggcttattaaaacataagctcagtcacattattaaaacagcactaggagtttataaccaattttttaaggatggggactagacccatatttgggtgtttctctgggggaaccaattaacttattggggaacacattaattacgataccatttggccaaacctcctaaatatatcatcattttaaaaagcgttgttctttttatttgaagacgggttgggccaaggaagcctctgccttaaattacgatcgggacttaaaaagcggactccacattaa

SEQ ID NO: 80778 - DNA, 852 bp, Zea mays
  unsure (1)..(852): unsure at all n locations
  Clone ID: MRT4577_173689C.1
ggccggccgggaaaaaaaaaaaaaaaaaaattccgtaccgcgtcagatcgcacccctcctccatggcggcgctcagcctccgccagaggcagcttgatctgattgtgcggatgctgcacctcaacaagccaccgccgccgcccggcacggctgcggagcaagaagaggaggtgtacaagatcctggtactggacagcttctgcctctcgctgctctcgccgctgctccgcgtcgccgacctccgcaagcacggggtcaccctctactttcccatcgacaagccccgccagcaggtcgccgacgcccccgccgtgtacttcctccgccccacgcaagccaatgccgaccgcgtcgctgcagatgccgccgcctcgctctacgcatccttccacctcaacttctcctccgccctcccgcgcccggctctgcccaccgcgtcgcccgcctcgccgaccagtacctcgacttcgtctctctcgaggacaacctcttctccctcgcccacccgcgctcctacgtcgcgctcaacgaccccaaagcggccgacgccgacattgaggccctcgtcgacgcgatcgcgctcggcctctntctgcgcggcggccacgctcggcaccgtgcccgtcatcaggtgcccccgcggtggccccgccgagatggtcgccgccgcccttgacgcccgcctccggcatcacctcctcgccaagcctaacctcttcaccgaggcctcagcctcagcctccgttgcctccttccagcgccccgtgctctgcctcttcgacaggaatttggacctctctgtgggaatacagcacgattggagctacccgccctttggtccatgacgtcctc

SEQ ID NO: 80779 - DNA, 356 bp, Zea mays
  Clone ID: MRT4577_17368C.1
cggaatttggctcgtgctcttgccggacgcgcgattggaaccctgcacgcaggccagacctaggggttctgtatgagggatgcccccgtgcttccaccctccgcggcggcgacgccgatggctcctcctcctccgcccccgtcctccgccacgatccggggctcgaggtccgccgagatggcggacgcgggcgcgcttgatggtgggctcaaggagcgccagctccacatggaggagctgcagatccagggggtgcaccgttaagtcgctcatgaagatggtcaagcgcgaactggtgcatgcgcgtgacgaggtcaggggatcccgcgtaccagctcgcttgacatcacacacag

SEQ ID NO: 80780 - DNA, 2293 bp, Zea mays
  Clone ID: MRT4577_173690C.1
cctcgaggccggccgggccgggtctttccgaccctgttgaccgtgcctagcgttgagcacaactgcacaagcaggagaaatcagaatcaagggtctcgtcttcgttcccttcgcctccccattccgtaccgcgtcagatcgcacccctcctccatggcggcgctcagcctccgccagaggcagcttgatctgattgtgcggatgctgcacctcaacaagccaccgccgccgcccggcacggctgcggagcaagaagaggaggtgtacaagatcctggtactggacagcttctgcctctcgctgctctcgccgctgctccgcgtcgccgacctccgcaagcacggggtcaccctctactttcccatcgacaagccccgccagcaggtcgccgacgcccccgccgtgtacttcctccgccccacgcaagccaatgccgaccgcgtcgctgcagatgccgccgcctcgctctacgcatccttccacctcaacttctcctccgccctcccgcgcccgctcctcgaccgcctggccgccgccaccgcagcctccggctctgcccaccgcgtcgcccgcctcgccgaccagtacctcgacttcgtctctctcgaggacaacctcttctccctcgcccacccgcgctcctacgtcgcgctcaacgaccccaaagcggccgacgccgacattgaggccctcgtcgacgcgatcgcgctcggcctcttctgcgcggcggccacgctcggcaccgtgcccgtcatcaggtgcccccgcggtggccccgccgagatggtcgccgccgcccttgacgcccgcctccggcatcacctcctcgccaagcctaacctcttcaccgaggcctcagcctcagcctccgttgcctccttccagcgccccgtgctctgcctcttcgacaggaatttggacctctctgtgggaatacagcacgattggagctaccgccccttggtccatgacgtcctcggcctcaagctcaacaagctcaagatgcccgcggacaagtctggcccggccaaggcctacgatctcgatgattccgatgccttctgggtagcaaacagctggtcgccgttccccagggtggctgaggagatcgagtcgcagctcgccaagtacaagcaggatgtggacgaggtgaaccagcgcaccggtggcaacaaggatggcatcgagttcgatggcacagacctcattggcaacacccagcacctgatgaatgccgttaactcgctcccggagctcacagaacgcaagaagatgatcgacaagcacacgaatatcgcgacagcgttgcttgggcacatcaaggagagatcgctggatggatactgtgactgcgggaacgacatgctcacgaagggcaccgtggacaggagcacgctactgggccttctccgagggaagggcaccaaggcggacaagcttcgtctggctgtgacctacctcctctgtttcgagacgccagagctagagcaggtcgaggcggcgctgcgtgagtcagaagtggacatgtcagcgtttcagtatgtgaagaggatcaaatcgctgaacacgcagtttagtgcctcgtcgtcaagcagtgcaacgaggagcaacattgttgattgggcagagaagctgtatgggcagtccattagcgcagtgacagcaggggtgaagaatctcttgtccagtgggaggcagcttgcattgacgaggacggtcgaagctctcatggaagggaagccgaatccggaggtggacaactatctgctgtttgacccacgtgcccctagatcaggaagcggtgggcagttcaaagggccattcagagaagcaattgtgttcatgattggtggtgggaattacattgagtacaggagcttgatggagctggcagaatgctcgcagccgccttcttccaagcatgtcatatacggagcaactgagattgtcaacggggtggagttcatcgagcaacttgcagaactggggcagaaagcggggctgggtctgggtggtggaaacaaccctccactacagtaattactaataaataagggggggttctttcacatcgtttgaacattgtcagatatgatatgatcatttgcttccttttgtatggtttatattcgttgagaatatgttagtgcaatctgatccgcagtcttttttatactggttactggaggcaataataattataaacagatagaagaacaagacattcaaaggtttctagagatggagctgctattgtcaagtaattttaatagatagaaatgaagtatgcatc

SEQ ID NO: 80781 - DNA, 589 bp, Zea mays
  unsure (1)..(589): unsure at all n locations
  Clone ID: MRT4577_173691C.1
ccggccgggtgacaccacacccagctgaaagcatgggaactctgcatgcgctcgtcctgatgctcctgctccattgcatatctaggcatgcatcttcctccgagcaggaagtgagtggcgatcgaagagctttgctggcgatcaagctggagctctctgaccccgtgggctggctgagctcgtggaacagcacaagctccgatttctgccagtggaccggcgtgacatgcacccgccggcaccctggcagagtggcgtcgctggacatatcatcgagacagctgtcaggcaccatctctccggcgatcggcaacctcacgttcctccggaagctgaaccttggatccaacatgctggccggcgaggtgccaggcgccatcggccgtctacgtcgcctgcacttcctttctctgttcaacaactccttccatggcgagatccctcgagagctctgcaactgctccagcctcgcccacctcatcctgggggtcaaccagctggagggggagattcctgctggccttggcctgctgtctcagcttcgcaccctctacatcnactacaaccatttagtagggagcatcccacc

SEQ ID NO: 80782 - DNA, 701 bp, Zea mays
  Clone ID: MRT4577_173692C.1
tccgcgcggctcaacttccccgaccagctcgacggcgcggcggtggccgacaaccccgaggcgcacaagtccggcgcggggctcacagccgccgccatccgcaagaaggcggccgaggtcgtcgcccgcgtcgacgcgctccactgcggcggcggcggcggcggcggcggcacctctccgcagccgctgtcgttccatcgccgccgccccaagaaccccgacctcaaccgggagccaaccccggaaacctcagacgacgagtaaagcgcgctgattagggtagctagctagctaggcaggcaggcaggcagcagtagcaagtaaagcaagcaaccaggtggcggcggcgggccaccaaacggatgagcgtgggcgggtgcagcgcaaggtgttcggtggaatgcggatgggctcggaggtgtccaataatggagccgcgacgtcgacgtcagggccggaagccgtagtaaagtggaatagcgcgcgagctgtgccgtttgtttgcccggagggaggcgacggctctagcagtaagcaggagacagacgggtgcgtccgtgcctcagtcagtgtgtgtgcttgctaagcaacacggctatgttcatctcctcttctcacataaagacgtgtgcaaagaaaaaagatactgtactacccggcaagcaagatgggcaagagcttattgaatcttttccttgttt

SEQ ID NO: 80783 - DNA, 425 bp, Zea mays
  Clone ID: MRT4577_173693C.1
tagcgatttagctccattggtggagccgttttatctattttattagccaatgagccccaatggaggacccgatttaacaatactgttttacgacggtacaaaaatgaacacttggacacacacttttgatttaaaaatggtgaagacgccaaaaacagaaccgcccttcttatgtcctcagatgatgagccggaattcccctatcgccacacttaggccttgggctgaaaaacttacgttcccctcattgaacagttcgaacatcgcacctaaaaacgtacccttggatcctctacggaccaaaatcagcaccttggcagggtacctttatttaaccccggaggcaaagctcaaaatctcaatatccaatttatactacccgccagggcgagctgaaaaactccctacactcgtggcttctaagg

SEQ ID NO: 80784 - DNA, 333 bp, Zea mays
  Clone ID: MRT4577_173694C.1
aatggtactgtttttttttaatttttttgtacaataaacttttttttaatcacttcacgctcacaaaaacccataaaaattccacaccacattttaattcaaacccccttacatccaactacatttctaaaaacaagcttggaaaaaactcacggaagccttaacaaacaaaacacacaataagatggctgccaatctacccaccaaccaattgtggaaatacatctttttgggccacctagactaaacccaccacacataaaattatcacaatctatcttaaaaagaaatctatgggggaacaaaagatcatcaaacttacccaaaactaaa

SEQ ID NO: 80785 - DNA, 393 bp, Zea mays
  Clone ID: MRT4577_173695C.1
atgatcaaccgtgcctgtggggaggtctctcgaacctcgacccccgaagctcggtccacctcgtcctccgagaccggtggccgggaaggcttgtgccaccctacctcctggagacagacggaaagtctcggctgtgagaaccaagggcaatccgacgcaaggagaaagaaggagcggacactcaccagggacacacacccgcggtcgggacacatcaagggctgggaaagggcgccggcgtccggtttccccaacataacggctacccgcctgtggaggtcgtcgacgggaaggggatccgaggacatccgcaaaccctccaagtcggcctccggcgtcatctcccagagcggcaaccaccgctctgtcaagggaagcaccctctggcgatga

SEQ ID NO: 80786 - DNA, 468 bp, Zea mays
  Clone ID: MRT4577_173696C.1
ggacctttgggctggtttatgtgcttgtggatgtgcgggtttggtctgagactgaacctttgttctcgttaagtagtactctcctcgataggggtcttctagacgagcctactgacgttaatacttagtccgtctctgccgccgtcaggaagtctaaagagtctaaggggatcaggctccgcacagcgcccttcgactaattcgaaaaatgcagggtactagagccgcctaagatagtcacagatatgaccgagggcgcaattactagtctttcggacgacccatttatcgatttcgctaatagtcctcctaaactaacaagaaatatttcggaccccgatcctctagacgataacgaaggcagacggaaactcgacgaattattactgccacacactcctactaatagtagtatgtgcgattccgtcctcacagagaagcacgcggaaaaagccgttatactcgcct

SEQ ID NO: 80787 - DNA, 205 bp, Zea mays
  unsure (1)..(205): unsure at all n locations
  Clone ID: MRT4577_173697C.1
acangcgagagaaggaagagaagccccccgatcntctccatnagcncgccggcagtnncacngcagcgcggnncngcgcgcgtntngagccggatccggatnncncgcnacgcaagcnggtngcggnggtcngngcctcggggagaagatccgatccatgggagcagcggggcccgccggcgtgcatntcttggacncgtncttc

SEQ ID NO: 80788 - DNA, 762 bp, Zea mays
  unsure (1)..(762): unsure at all n locations
  Clone ID: MRT4577_173698C.1
gtttccaatgttgtgcatctggttttccatcaacttcttcaaattttcatttctgtcgtgtatgatctatgcatctaacatatgaaagaaaccgacggatacatgcacaaagagaggacaaattccagcgcacacacagaaaagtttaaatcttctgttttgaaaagtgaaactggagtggtattagttttgagtacaccagtattgttttatgttctttttttaggtcctcacactgtattgctactgtacatagaattccaatcactagattaaagaactaccagggagaccgaggaaggaagaaggagctaaggagataggccgcatcgagaacaacaccgccgttctcgtccaccccctcgacgacgctaaggtacaagaagaggatgaagcacacaccttcttcccctggtcctactacttccccgctagtcggatctctcgctccatcgtcgctgccaaacgacaccatgtgctctccccttccaccgcatcttagaacctcaacacccccacctacgctgtgtgcgggatccgagggcacaagcaagaggatccgatcagtgcgaaggacaaggccaacgtgatgtacgcgaaggacaaggagtggtgggtgttgattcactccacgacgatctccggctcggtgngaaggacaagggtgttcagaagcacgaagagatcagtaaagtcgagaaagacagtgttctcaggcatactgaatatggcagggtgaatattggcagacgtcaagttcct

SEQ ID NO: 80789 - DNA, 356 bp, Zea mays
  Clone ID: MRT4577_173699C.1
gcgacctcttgattcggccgaggaggcacgacaccagggagaccgagctccgccgccgccgtagagattcgtgcactggttgcggttcggggtgctctggtgggcaccggagtatagctcggcgctcgcgacagtggtggcgacctgataaccgcggcgcgccggtggacctctaccaatttctcataggagctgctctgccgtcgcggggccatatgtcaccgtggacgggactctctacaccatgattcccggtaaggaaaccctctaccgactcgccatgatctccgtactgcgttgcgtgtaggggcttacgaattggggcacaggggcgccgatttggtcagctctgtcat

SEQ ID NO: 80790 - DNA, 588 bp, Zea mays
  Clone ID: MRT4577_17369C.1
ccctttcccttctctggctccggccagcgccgccaccagcccgggcatttccaccaccatctgccggcgccaacgcacattcctctcatctctctcccacatggagccgatcaaaaccacggccaccccatcaagcaaggcccttttccagcacgaacccgccgacggcggagatgcggcgagcggcaccatcggcggcctccctttccacctcacggagaggatcctgcgccgcatcagcccgctcgagtcggcgcccttcgccgccgtctgcaagtcctgggcggcgaccatctccgagcggctagcgacacccatcccgcacctgttcgcgctcgaggtactcgacgaggacgagtacttcctcgatctcctgttcgtgcccgacatggagcgccgccgtggcgccatcttctccgtgccggtcgacgacgagggttcgccggcgccggtgatccccgcccggctgccggccacggtcagccacgcgaaagatgacaacatcaagttatctggcgccttgccctgcggcggcctctccttcgcggaagacaaccgcgtcgtcctcgtctaccccgtcaccggcgc

SEQ ID NO: 80791 - DNA, 505 bp, Zea mays
  Clone ID: MRT4577_1736C.1
actcctaagggcgattgggtgcatcgaggccggccgggatagacaatctcctcacctcgcatcggcgcaatgaacaagcagcgggagagggaggaactctgcgagaacgagcacccgcatggacctggggctcctcgacccatggacggcgaactgcgagggcaatacgggcgccaagaacctatacatcatcatccgacaacggcatcaaggatagactcaaccgcctgccgtccgcctgcgtcagcgacatggccttggccacctccacgaacggtaagaccgagcacacgaagaaggacatgcccgccgtcatcgtccgccagcgcccagtggggccccggacggacgaagcctacatgcacttcaagtaccctgccggaatcattgtggaccccaagggcgagatgaaccgatctgccagtcgctgtacctagtgccaaggagtgcgctgacctttgctctatgatcgctagcgcagcataagcaatcgcctgatactact

SEQ ID NO: 80792 - DNA, 162 bp, Zea mays
  Clone ID: MRT4577_173700C.1
aaatatataggggagagggttatttacaatctcatattccttacttatccaaaattcttctccatcctcactttacaacatttcaattacacacaacaccactatatcttcaacacacctactactttaaaataatcaatccttaaaaaaaaaaaattaatc

SEQ ID NO: 80793 - DNA, 698 bp, Zea mays
  unsure (1)..(698): unsure at all n locations
  Clone ID: MRT4577_173701C.1
gattcgacaatctcagaggccaaaaccctcgccccccaacatcacaccgccggcgatctcctcctcctcctcctcctccgatggatctctcggccgtccacgccgcgctctctgccaagtcctactccgccatcgccacactctgcgacgacctcttcctccaggttgcgtcccggggcgtcgccaccgacgactggccttacgccgttcatctcctcggccatctctatctcaacgacctgaacagcgcgaggtttctgtggaaaacggtgccgcaggaggtgaaggacgctcatccggagctgggcgccatctggaagattggccagtgcctctggaaccgtgactacgctggggtctatacttccgcacaggggttcgagtgggggcctgaaatctctgattttgtgaccgccttcctagaaagctacagaaagaggatattcgagctgttgacttctgcgtataccacaatcagcattgcagatgtggctcacttcatggggatgagcgaggaggatgctactaactatgccgtgcaaaatggttgggaagtttggatgtggcaaccaagatgcttactgtcagaaaacaaaagccccagactaaccagaagcttgatgcaagcaaactgcagcgttgcccggaaatgtgttttccactnaggcacttgatgcccccccccccccccccccctc

SEQ ID NO: 80794 - DNA, 459 bp, Zea mays
  Clone ID: MRT4577_173702C.1
ctttaacgttggaagccagcagaaatcccatgaggtccgtcaaatgttgggattaccatttgtgtgcatattgtggagtgggttaagttataatctacctgaatatagagtattttttatcaacatgattcatgagccccttactcgttaattaactaagtttgtgctccatgtgagcttagtacttcttgcggtcggtatatattcgagaacggaggtagtatttaatacaataatacaacacaacgacatcaaagccttttatgtttctttttttttccttctattttggagctacgtaccgtataaacaacatgctcacttatgataaagttggttgggacaccaaacattcaagattcagttcaatataggtgacccatgaccatgtggttgtgtaggttacaaactatgataccgacaccaatacaacatgcactctacttgcaaactactttt

SEQ ID NO: 80795 - DNA, 255 bp, Zea mays
  Clone ID: MRT4577_173703C.1
gggggggccccacaaacccgggaatcatgttttttcaatcgggggctcaagggaaaattaaaaaaagccggcccttttaccccacgacagtttttgattacaaaggtgagggcttggggggtttgggtttaaaacccttggccttaccctgcccccgcaggtgttgcccccctcaaaaagctgcccccacacgctttggtttttaaagccgctggtacatgggttctcacacccgggaactgtcccaaatttttt

SEQ ID NO: 80796 - DNA, 521 bp, Zea mays
  Clone ID: MRT4577_173704C.1
tatcttctcctgttccccttcgtccccggccggcgacgacgccgcgcgcgccgctaacccagcccctcctccggttgcagtaagcaaggaaggatgagtaggcgctggagccggaccatttacgttgggaacctcccaggggatatcagggagcgggaggtggaggatctcttctacaagtatggacggatagttgaaattgacttgaaggtccccccaaggcctcctggctttgcttttgttgagtttgaagatccccgtgatgctgaagatgcgattcatggccgagatggctacaactttgatgggaatcggcttagggttgaacttgcacatggcgggagggccaactcttcatcccttccgaacagctatggtggtgggggacgccgtggtggtgtctctaggcatacggagtatcgtgttctggttactggactaccttcttctgcatcatggcaagatctgaaggaccatatgagaaaggctggtgatgtttgtttctctgaggtgtaccgtga

SEQ ID NO: 80797 - DNA, 304 bp, Zea mays
  Clone ID: MRT4577_173705C.1
gatcaaaatgcatagagctttatttgacaaccatgttaggtccttaccagacccggcgaccaatggaaccttttagaccgcttgatgggtcttcgagacatatttttagagaccttatacctgcgtatataataagtgttgtcccgcgcctggcggcgaaaacaaaataaaggttgggccaggtagaacaccgatcgcagcgacaagcctggtcgtcaccgcgtccatagaataccacgatgcttgtgccgaaggggcccgggaacacaaacacgtgtcgctctctagaaccccatggggcccc

SEQ ID NO: 80798 - DNA, 452 bp, Zea mays
  Clone ID: MRT4577_173706C.1
gccggccgggttccagatactagcaggcatccatgcgctcattgccaccaacacgctactgagctgcaccatcgccatgaccaccacaggccgcacggtctcctctccttcctccgcctcattgagcttctccaagcggcagctcggcgggctctcactctccgccggcgatgcaactcaaaccgccgtcgacctcctccccaagaggaatgagatgcagtccattgtcgcgcgggacgagtgcccggtaacggacaagaagattaaccgggtaaagaaggagcccatttccgaccacgagacgaagaagaagcggaaaagtgaacctgcagtacaacaaaatggggagagagggcggaaagcacgtccataaactgcggctttccaccgaagtgctcaagaacatcgaaataaactgcctcgacgccgacgcagcgcaaggcacgggatcg

SEQ ID NO: 80799 - DNA, 1526 bp, Zea mays
  unsure (1)..(1526): unsure at all n locations
  Clone ID: MRT4577_173707C.1
gggtacctcgaggccggccggngactaaggtgttgtttggtttggtgtccttaggggttagagagtggggactcgtctcgcctgagcagccaagcccatccatcgttccacccacctccgcgatacgatggccgtccctcctgcccgcctcgccgcgtcctcgctcccgctgctcctcgtctggctccagctccagctgctcctcgcgtccgcctgcgaccgctgcgtgcgccactccaaggccgcctactacacctccgcgctcaccctcgcgggcggctcctgtgggtacggcaccgacgccgcctccttgagcgccgggttcctcgccgccgccgccagccccgcgctgtaccgcgccggcgtcggctgcggcgcctgcttccaggtgcggtgcaaggacaagaagctgtgcgccgcggcgggcgccagggtggtggtcacggaccgcgccaggaccaaccgcaccgacctcgtgctcagcagcaccgcgttcgcggccatggcgcgccccggcatggccccacgcctcgcagcacaattcggcgtcgagggctgagtactgcagggtgccgtgcgagtacaagcacagaaacctgtcggtgagggtggaggagaggagccatgctgcggccccggcccccggcgacctcgccatcaggttcctctaccagggcgggcagaccgacatcgtcgccgtagacgtcgcgcaggtaccggtacgggtgcacgcacgaacgcagccgacctgtggatcagttcgacgacacgtacgtgtctccgaaggaaacttcggggctgaatgaatgaattggattgaaataaaaaaggagcctgctttcttttgaggagtgcatgcaggtgggttcgtccaactggaggttcatgacgcgcgacgacgggccggcgtggagcacgaggcaggcgccgccgggcccgctccagctcagggtggtggtgacgggcgggtacgacggcaagtgggtgtgggccgaccgcgaggtgctgccgcggtggcggcgcgccggcgaggtctacgacacgggcgtccagacacggacgtcgcccaggagggctgcttcccgtgtgacacgcacgagtgggaggaggagtgacggcaccagcagagcagaggctgcaacggaactcgctgaggactggagcctgcgggctgcggagttgagatgctctgtctggctccttcgtgtcacactcgctgccttttgagttttgacggagtggcacttttaacgacaagaggagagccccgaaacccctctccctcccctgaacataaattagctgcatgcgtcgtcgtcgttcccatgcccgttgtttcaaccggatcacatgcctcgtggtcgttcccccccccccccccttaaacacttgtaatagtcgttgccatggcccggcggcggcacgactcgctgtccgtctatgcaccaggacatcgggcagcaagcgtccgcttggcattcagttgattattactaaaaaaaaaaaaaaaaaaaaaaaaaccaacc

SEQ ID NO: 80800 - DNA, 480 bp, Zea mays
  unsure (1)..(480): unsure at all n locations
  Clone ID: MRT4577_173708C.1
ttaaataatttcttttttttttttttttttttttgtgggtttttttaatttttttttgttttttttcccctctctttgttaaaggaaaaaaaacctattaaacggggtcattcatgggccaatcacaaaaccaagggcgggggccggaaaaaatccggccccaaagggcttccccccgccccaagggggccggccggaaccgaaaagggggccagaacccttggggaaaacaaaaaaatttggtggcacccacccccaacgggcctttggttctttggggtgggccacctggcaccgatgccttgggggggggggttggagaaaaaaaaatgccaaaaaaatcccggcactttcccatgggccccccctgcacggggaaggcccccgcccggctgtcctccccgattgcccttggaacccccaaccccacctccttttagacaaatcccccgggccccaaaaaccgngcccccccccccc

SEQ ID NO: 80801 - DNA, 1064 bp, Zea mays
  Clone ID: MRT4577_173709C.1
gtgcggacgctcgaggccggccgggtcgggcccccttctcgagtgagccctggacgaaagacgatggccgtccctgttggtcgcctcgccgcctccacgctcctccagctcctcgtctggctcccgctccccgcgtccgcctgcgaccgctgcgtgcgccactccaagggcgcatactacacctcctcgctcaccctcgccggcggctcctgcgggtacggcaccgaggccgcctccttcagcgccgggctcctcgccgccgctccagctcaggccacgggtgacgggaggcatcatcataattcaggtgtaggcggtgtagtactagtaggaaggacggcggtagatagaaccggtccaggacaggaggatgaagaacgcttcggcgcggttggttgacgccataaactctctctctctctctctctctctcgccttaaataaatgaacggccgaattggaacctactagcaataagtttcgtcagcgccgcgcgcgcacatgtgcagggtgccgtgcgagtacaagcacaggaacctgtcggtgagggtgcaggagaagaggcgctccccggggggccctggcgacctcgccatcaggtttctctaccatggcggccagaccgacatcgtcgccgtcgacgtcgcgcatgtcgctggaggttcatgacgcgcgacgacgggccggcgtggagcacgaggcaggcgccgccgggcccgctccagctcagggtggtggtgacgggcgggtacgacggcaagtgggtgtgggccgaccgcgaggtgctgccgcggcggcggcgcgccggcgaggtctacgacacgggcgtccagatcacggacgtcgcccaggagggctgcttcccgtgtgacacgcacgagtgggaggagtgacggctgcaacggaactcgctgagggctggagcctgcggagttgagttgctctgtctgcctcctccgtgtcactcgctgcctcttttttttatgagttttgccggagtggcacttttaacgacgagaggagagccgcgaaacccctctccctcccctgtacattaattagct

SEQ ID NO: 80802 - DNA, 1175 bp, Zea mays
  unsure (1)..(1175): unsure at all n locations
  Clone ID: MRT4577_17370C.1
caccacagtcctctctttccccggcaccaccaccacccaggctaaccggactggaccgagtgttgaacaacactgagggcgaggcagatagagcgacggcaggcatggtgagccgtgaaaatttgcacctggtgctggacccggcgtctctgggcgcgccgtgggccgacccgtccgccgcagagatcccgccgcagctcctcgccgcgctgggagagtacctctcctccacccgcgccgagggcggcgacgtcgcgacggaggcggacgacgagttcatgatgcacgagttcaaggtgcggcggtgcgcgcgcgcgcggagccacgactggacggcgtgcccctacgcgcacccgggggaggccgcgcggcggcgggacccgcgccgcgtggcctacgcgggggagccgtgcccggacttccggcgccgcccgggcgcgggcgccgcgtgcccgcgcggggccgcctgcccgctcgcgcacggcaccttcgagctgtggctccacccgtcccgctaccgcacgcgcccctgccgcgcgggcgctgcctgccgccgccgcgtctgcttcttcgcgcacgccgcggccgagctccgcgccggcgccggcgccggcgccggcgccgccaaggacggctgctcgccgctcgcgctgtcgctctcgcccaagtcgacgctggcgccgccctgggagtcgccgccggtgtcgccggtggagggccggaggtgggtcgacgagccggcggacgccgaggtggaggagctgttgctcgcgatgcgggagctcggattcaggaaggccaaggcgtcgtcgtcggcgccggtcctgcctgcggctgcggtcacggaggacgacgggccggacttgggatgggtgtcggagctggtgatgtaggcgtccaagatgtggtggatgccgatctgcgatctccttcgctcgctgctgccggcgtcgtcaacggaacagcttcgttaagcaatattgattgtagcattttctttcatgaattgcatcattcttcttgtggatataaaccaaacctggtgcaactacaactattaatactgcaatctgtaagcgtggcgtgctgctgtacatggttctcgttcgttcgatcattactaccagtgtatatacaaagtgtagttgccttcgcagtcaaaaaaaataaatnnt

SEQ ID NO: 80803 - DNA, 509 bp, Zea mays
  Clone ID: MRT4577_173710C.1
aattcggcacgaggctctggtcgtgtgagccctggaccaactttgtgtagccccaaagacgatggccgtccctgttggtcgcctcgccgcctccacgctcctccagctcctcgtctggctcccgctccccgcgtccgcctgcgaccgctgcgtgcgccactccaaggccgcatactacacctcctcgctcaccctcgccggcggctcctgcgggtacggcaccgaggccgtctccttcagcgccgggctcctcgccgccgccggccccgagctgtaccggccggtgccggctgcggcgcctgcttacagactgaccctgtccggctgtcccccgcccccgtggcgccgaccgcgctcccggttcccggcatagtcgcctatacgtacgtattacctgctcgcaggtgctgtgcaaggacaggaagcttgcgcgccgtggcggccgccagggtggtggtatcggaccgagccaggaccaaccgcaccgaccttgtgctgagcagcaccgc

SEQ ID NO: 80804 - DNA, 1566 bp, Zea mays
  Clone ID: MRT4577_173711C.1
ttgggttactcggggccggccgggtcttcgtcgacccggacctcggcatgcggatccgcttgcagtagcccttttcatcatgtttccaggacttcttccgcactctgacgtggtggatagtgccgtgcctagccgtgaaggtgacccgggaggtctcccgcttcgcgcacatcctgcagcaggggtcgtcgtcggcctggacctggagggcctgcgcggtgctgttcgcgtccgtggcgtcgtggacgtacctgacgacgatcatcctgtcgtcctgcatgctcttcaacctggtgtgcagcctgcaggtcatccacttcgacgactacggcaagctgctggagcaggacgcggacccgctggtgtacctcaaggagcacctgcagctccgccacaacctgtccaagatcagccacaggttccgcgtgttcctcctcctgctcttcctctccgtcaccgccggccagttcgccatcctcttcaagaccacggcgtacagcgggccgatcaacttcaccaacggaggggacatcgctgtgtcttcggtggttcaggtggtcggcctcgtcctctgcctgcacgccgctgccaagatctcccaccgagctcagaacatcgctgcgctggctagccggtggcacgcgctggcgacgtgctctaccgactccacctacgtgaccaccccgaacagttccgggaacctcgcgcctttccccgcgcacctgttcctgagagactactcggggagtgacctggagtccctggacagcgcgtcggttcagggcagctcccacggcacggcccagctggcttcctacatgtcctcgtaccacaagagggagtcgctagtgctgtacctgctggccaacccaggcggcatcacgatatttggctggatcgtcgaccgggcgttcctgaacaccatcctgatgctcgagctgacccttgtgctcttcgtgcttagcaagaccgttgtgatcccggccaagacactggtgcacagttacatcggctacccatgattacgaccgttgcgaatctgctggcattgaagcgttcaggttcaggttcagttaggcgatgggatttgatgacaggcaggttgccggggtttgcacgctacggtgaatgaaactggtaggaatggtgggtctcccccctcaagcgcagatcatatgcgctggcaatccaagcatgccgcaggttgaaggcaggctgagggctagggtcgtgacgtgtacagtttttttggggaaaaaaatctctacagccggttgcagaaagcggtcctgcaggttgcaaagcaggttgcttcagatttacacttctgcaccaatcaatgatcagagattgtttttctctgcagccagttgaagagaatttctcccggtacatatactactaatactataaaccaatatatgtattattgtacgtatacacgcacgcaatgtatatgcactcttataataatataaactaatatatgtcaacaatattttttctaaaaaaaaaaaaacctagaacggtcatttaaatttaaatatatagtattaagttacccgt

SEQ ID NO: 80805 - DNA, 1812 bp, Zea mays
  Clone ID: MRT4577_173712C.1
cattgggtacctcgaggccggccgggcacggtgaaaacctgcagggagaaagcgtggggaggaagactagcctagccactaggtgagagtttgagtcgtggtggtgtataaagcagtcgtcaagcacaagctcctcctctccctctccctcgtctcgcccaagcagccaagcccatccatcgttccacacctccgcgatacgatggccgtccctcctgcccgcctcgccgcgtcctcgctcccgctgctcctcgtctggctccagctccagctcctcctcgcgtccgcctgcgaccgctgcgtgcgccactccaaggccgcctactacacctccgcgctcaccctcgccggcggctcctgtgggtacggcaccgatgccgcctccttgagcgccgggttcctcgccgccgccagccccgcgctgtaccgcgccggcgtcggctgcggcgcctgcttccaggtgcggtgcaaggacaagaagctgtgcgggcgcggcgggcgccagggtggtggtcacggaccgcgccaggaccaaccgcaccgacctcgtgctcagcagcaccgcgttcgcggccatggcgcgccccggcatggccgcacgcctcgcagcacgccgcgccgtcgacgtcgagtacaaaagggtgccgtgcgagtacaagcacaggaacctgtcggtgagggtggaggacaggagccatgcccccggcgacctcgccatcaggttcctctaccagggcgggcagaccgacatcgtcgccgtagacgtcgcgcaggtgggttcgtccaactggaggttcatgacgcgcgacgacgggccggcgtggagcacgaggcaggcgccgccgggcccgctccagctcagggtggtggtgacgggcgggtacgacggcaagtgggtgtgggccgaccgcgaggtgctgccgcggtggcggcgcgccggcgaggtctacgacacgggcgtccagatcacggacgtcgcccaggagggctgcttcccgtgtgacacgcacgagtgggaggaggagtgacggcaccagcagagcagaggctgcaacggaactcgctgaggactggagcctgcgggctgcggagttgagttgctctgtctgcctcctccgtgtcagtgtcactcgctgcctttctttttttgagttttgccggagtggcacttttaacgacgagaggagagagccccgaaacccctctccctcccctgtacatgaattagctgcatgcgtcgtcgtcgttgccatggccgttgtttcaaccggatcacatgcctcgtcgtcgttgctttctgccaacacttaaacacttgtactagtaggctagtagcttcgttatttatatatatattcttctgacgcgggccggaagaaactctccatggccaccgatccgtctggtgccaggacagaacaagcggtgccggtgagcgagacagagaggcgccggcccggcggcggcacgactcgctgtccgtctctgcaccaggacattgggcagcaagcgtacgcttggccttgagttgattattactattctgatcctcacaagtcacaatcagttgctaatgtcgcagtcagcagtaccgatgatgtaacgctaagcatatctctcgcccgcttcgttggttcttatccgttaagctaagagcaggttgcgtggatattaaacagattcatgcgttcgtctgcttagggttgggttgggacttgggaggcatggctttgtttgcgttgcgttgcgtgtcttatgtgaagattggtcaccaaccataacggtcttgctgaatttctgttcagacagtca

SEQ ID NO: 80806 - DNA, 521 bp, Zea mays
  unsure (1)..(521): unsure at all n locations
  Clone ID: MRT4577_173713C.1
ggtggtttttttttttttttttttttttttttatttttggtttgaatattttagaaatgaatttatttttttgttgtgtttattatttagacatatgagatagctaaaagttaattttttatgaaatatgtttttaaaaaatacttggaggggggggtggcnacaccaataatccaggggcattagatgacgccggttatggtggacaggttgaactcggcctacgtgacaagggtggcgggaaataaggtttgaacctaacgcgggcagcccggaaggtgctctaggcggcccttcagttgggcgtccgggaacggggggatcgggccgtgcatgaagatgctcagcgccgagcaccggaagtacgccgggatgtcagcaagctgccggcagcatctccttttaagttcaggccacgggaggcgcggcccgatgccgaaggtccggttggtcacgtaccagggggagctcggaagagggttgtgcgggatggcccaacccggcaagcaggaggtcccggc

SEQ ID NO: 80807 - DNA, 207 bp, Zea mays
  Clone ID: MRT4577_173714C.1
attccaggtcggcgccacgcgtccggttgtttcttatgtgagcggaggaggggttattggagaggtatcctggggaggaacagaactagggggttttttgcgcgaactgactacagtttcctttgaaaggtgattaggttatgtgcctgatcaacatatctcttgcaggatcctctactgttacctggtgagggatgagtttgttta

SEQ ID NO: 80808 - DNA, 1244 bp, Zea mays
  Clone ID: MRT4577_173715C.1
aaagcagtcgtcgttcgtgaagcacaagctgccccccctcctctccctcttctcgtgtcagcgcctggaccaaagacgatggccgtccctgttggtcgcctcgccgcctccacgctcctccagctcctcgtctggctcccgctccccgcgtccgcctgcgaccgctgcgtgcgccactccaaggccgcatactactacacctcctcgctcaccctcgccggcggctcctgcgggtacggcaccgaggccgcctccttcagcgccgggctcctcgccgccgccggccccgcgctgtaccgcggcggcgccggctgcggcgcctgcttccaggtgcggtgcaaggacaggaagctgtgcggcgcggcgggcgccagggtggtggtcacggaccgcgccaggaccaaccgcaccgacctcgtgctcagcagcaccgcgttcgcggccatggcgcgccccggcatggcccggcgcctcgccggcctccgcgccgtcgacgtcgagtacaagagggtgccgtgcgagtacaagcacaggaacctgtcggtgagggtggaggagaagaggcgctccccggggggccctggcgacctcgccatcaggttcctctaccagggcggccagaccgacatcgtcgccgtcgacgtcgcgcaggtgggctcgtccaactggaagtccatgacgcgccacagcggcgggccggcgtggagcacgaggcaggcgccggcggggccgctccagctcagggtggtggtgacgggcggctacgacggcaagtgggtgtgggcggagcgcgaggtgctgccgcggcggcggcgcgccggcgaggtctacgacacgggcgtccagatcaccgacgtcgcccgggagggatgcttcccctgcgacacgcgcgagtgggagtgatgccgcatgtggacgaaccacgccagtgacggcagaagcagaagcagaagcagaagcccaagcgctgaagcttcaactcaacttgaagagcctgcctgtagaattgctctagctagctcctccgtgccaactgcccttttgggcttgcctcaaaggtcaccgggagacgacgagggagacgactaattaacagacgctgacagagtgacgcgcgagaggagaggagagttccgaacccccccctctccgctgtactgtacatgagctgctgacgtgtcggataagtagtagtagctagcgtcccggcgggtgctggaaagaataataataataatgtaacg

SEQ ID NO: 80809 - DNA, 530 bp, Zea mays
  unsure (1)..(530): unsure at all n locations
  Clone ID: MRT4577_173716C.1
catctcatccctctgctctcatcatgcggctccctccaatctctggcctactcccctgtctgctgctcatcatcgccgctacgcacgcgatggattcgcacgccaccgccgacgaatggacgacactgagctcagccaactgcacgaactcccccaggcagaaccgatgcgcccgcgcgccgtgatacaccacatgcagagcccacagagactgacaaggcaccaatcattgaagaataggcgcctcacgcaactagagggaacactgtactgataaagaacctggactgtgatgaggacacgagcgtacgccgcagcgatgaaaagtctgtgaaccactccatgcagtgcgttctgagaggctcccagcagacccagaacgaggacacgccacgactaagagacaggccgtcgataattggctagactcacgaagtgcgtaccactgcgaagacagctgccattccctgnagtgtgctggcactgacttgcaagacctttgactcaatctgccttgacgatacctgaga

SEQ ID NO: 80810 - DNA, 315 bp, Zea mays
  Clone ID: MRT4577_173717C.1
cttcatcatctttcttggtggagtcaacggggctatactggttgtgcgtgtctgccaactgtatcccaatgctgagcccagtatgctggtctcacggttttttagagtttgtacacaatggcatgaaagcaaaccgcggatattctttggtctatacaacaagaagaacttggtttacctgtctgggatccacgctaaaatcctcgagccagataccatcataatcctattataacccctccgtacccatgcattgattcaagctataatgtttccacaagcacacttagggatatgttggaacaacagcgagtt

SEQ ID NO: 80811 - DNA, 287 bp, Zea mays
  unsure (1)..(287): unsure at all n locations
  Clone ID: MRT4577_173718C.1
aagttaagtctcagaatacgtatcgtaagctgtacgagcacgaatcagttcccatctgtataccacggccacgatgcctccggaagcatgcacagcgataaaggcattctanaagaccatacagggtcatgaagatctcaatatcgccgttaaaggtctgcatctacagtctcggctagttagggctatcactcagcaatctacaatgcgacttcgcggcatcacacacagtcacgggcatattggtaactagtataattgcagacgtgaacatctcattcaacgtc

SEQ ID NO: 80812 - DNA, 794 bp, Zea mays
  Clone ID: MRT4577_173719C.1
ctcgaggccggccgggactgttattcgttgtctcactaaacatcttcaacatgatcagtcttaccattggtgtcttggcccttcaaggcggcttctcagaacatattgatcttgttcgcaaagccgcagagtcaatttcttgtacagaaaacatctccaagaacaagatccaatgcattgaagtccgcacaaaagagcaactcgaccaatgtagcgctctcattatcccaggtggtgagagcactacgatctctttcgtcgctgctcaatctggtctactagagccacttagagatttcgtcaaggttcaaaagagacctgtttggggaacgtgtgctggtctgattctactatcagatgaagcaaacgctaccaagaaaggcggccaggaactcatcggtggtctcgccgtccgcgttcaccgcaatcactttggtcgtcaaacagaaagctttgaagctggcatgaatctaccctttttgaacgacgagaagccttaccctggtgtctttatccgtgcgcctgtcgtggaacaagtcattggagcatccgatggccgacaaccagtcgaggttctcgcaaaattgccaggccgtgttgacaagatgaagtctggagtctcgcaggccaacacaaaagacgactctggtgatatcgtcgctgtcagacagggaaatgtgctgggaactagtttccatccagagttgacaaaggatgagcggatacacgtctggtggctaaaggagattcttaaccagcaatagacttagatacaaatagacggcgtttttcac

SEQ ID NO: 80813 - DNA, 322 bp, Zea mays
  Clone ID: MRT4577_17371C.1
gagggtctcggccggttttttttttcggctgttttttaaaaaaactatcaagggcaatactgccttggaatgaaaaagggcacgggtttattcgtccttttacagactggtgacacacaataatcaccaggggaaccttgtttccatttttactggtacacttagggttacagtttttccccctttcctttccctttttgccggggccaccttaataaaaaggttaccagctacatgcacaactaactggttcaaataagccccttttagattgggcacttaagatccgcgccaaattaaatctacaccccttccccggggg

SEQ ID NO: 80814 - DNA, 303 bp, Zea mays
  Clone ID: MRT4577_173720C.1
gccggccgggccgggcgattgaccagggcatcgtacctgctgatgatcatggcgctggtgctcacctacctcatccaccctctggacgcctccgccccgtacaagctcttctgagcgagcagattttttctcctccattttttggcaggctttagtaggtagtggtgtgggtgtgggtgagattcggtccctattcattgccatgaattacattcggtttcgcgcgcgtgtgtatattattactcctatatgtcttcaggttcatgctttgatgtccaaaaaaaaaaaaaaaaaaggccccta

SEQ ID NO: 80815 - DNA, 241 bp, Zea mays
  unsure (1)..(241): unsure at all n locations
  Clone ID: MRT4577_173721C.1
aattcggcacgaggctttactcatcacccgtcatcgcctccctctccatccccgagcagccaagccagccaagaaccgaacgagagtagaaagcgcgtataatgggggaccgggcgtacgcgccggccgcgaagccggttcccgtacgggccaccaacggcgcggcgagcaacgggggcgggccgccgccgcggncagcgccgncgtccatgctgccgggcggccgtgtgccccctccgcc

SEQ ID NO: 80816 - DNA, 681 bp, Zea mays
  Clone ID: MRT4577_173722C.1
tgggaccctcgaggccggccgggaccgccgcggcttccttctctacccttccctcgcgccgccgccaccgcaagagtatctcaactccgcctcgagacctccccccctcgctggtctcagccatggtgaaatattcgacggagccgtccaaccccaccaagtccgctaaggccatgggccgtgacctacgtgttcacttcaagaacacacgtgagacagcttttgcccttaggaagttgtcactcaccaaggccaaaagttaccttgaggatgtgatcgcccacaagcaggccatcccgttccgcaggtgaaaggacttgatgtggataccctctatgtgtcgcacattcaagttaatcaggctcagaagcagcgacgcaggacataccgtgctcatggacgcatcaacccttacatgtcctccccatgccacatagagctcatcttgtcggagaaggaagaaccagtgaagaaagaggccgagtctcagatcgcaaccaggaaggcttagagaaggggctctatcttctgtgattggcttagtacaagttttggctgattatttgttgtctcatactgtttacctgagtattgtttgcaagtgctttatcactgtccgaactgtgcatgcaattcactggtctagagtattgttccaaaaaaaaaaaaaaaaaagcggcc

SEQ ID NO: 80817 - DNA, 154 bp, Zea mays
  Clone ID: MRT4577_173723C.1
gtggacctctatgtccccaggaagtgctcggccacaaacaggatcatcactgccaggaccatgctctgacagatcacttggccactggcatgcgatggctgtatgatggtcattcacaagttgtctctcgggttgtcgtgctcaggcgagcgac

SEQ ID NO: 80818 - DNA, 1738 bp, Zea mays
  Clone ID: MRT4577_173724C.1
gaaactgaagccaatttttattcttgcaacataacttgaagaaatgtgtaatgataattgtcgcggtaaaatatgtcatgatactttcaagtcaaatagagcttccctctcgacaaggtgataagccgataaccatacaacatagtgtaccgtgagaggacaagagatatgacacacaccttgacacgctaaaactgggtcttagaaccatcacttgcatgctggtaaattcaggtcacaccaaaaggttcagacaatgttcagcatagggcaagaaggctggcagcagcatcacttgcgcctcttggcccttctgctctccagcctctgttgcgcttgctcaaactcttcttctgtgggctctgagctgctcgccttggagtcacacttggacatgatgttcgagaggatggagttgaactgttttttccgctcaaccctacgttcgctctcctctctagcggatttgttggtggctccatccctgagatctttttagcccatttctcatacaccttagttgacttcagctcactaagtcaatcacagaagatagagccccttctctaagccttcctggttgcaatctgagactcagcctctttcttcactggctcttccttctccgacaagatgagctcgatgtggcatggggaggacatgtaagctggaccaggtaggcaaacagaatgttaagctccaaatgaagaacagttcatcgcatagcaaaatttcaactttagttagatagacttatggttgatgcgtccatgagcacggtatgtcctgcgtcgctgcttctgagcctgattaacttgaatgtgagacacatagatggtatccacatcaagtcctttcacctcagcattgctctctgcattcttgagaaggtctagaatgaatctagcagacttgacatgccagcgtccctgaccatttgagtggcgagacttagcctgagcagtacgcccaacaccaccacaatacctgcggaaagggatggcctgcttgtgggcgatcacatcctcaaggtaacttttggccttggtgagtgacaacttcctaagggcaaaagctgtctcacgtgtgttcataaatgacagctctactaagctcacacctcatcttgtgctccttcgacactactgttggctgttaatatacaataacccttgcacattggggcaagcagcacgacaccgtcccagtagagaggatccttcctgtggagctgaagcaccacggttcctcccatggagaagccgtagaggaacctcttcttcagcttgttctcctatttcgcacagacactcttgaaatggtccgagcagtctctgacgacgtcgccgaagctcgacaagtagcctttcgagcctgaagatttgtcgtggccctcgtggtcgattccgtgaacagcgtatacatggtgtactaatcgagcgaccgtgtctcccatggatatgctgcactcggctccgtatccgtggcagataaagatcaaagctttgcactccgatttcctcggtgtccacctgcaagtgaagagcctgtttctcttcatatttgatatcgtctttgtactgatcctgctgggtgctcctcgccggcgaagagaccaacaagagcctcagcacctggcttagggcggcggcggcgtcggcggcggcggcccaccggtcgtctgagagcgagaggggacgagagagagagagagacagagacagagacagagagagac

SEQ ID NO: 80819 - DNA, 783 bp, Zea mays
  unsure (1)..(783): unsure at all n locations
  Clone ID: MRT4577_173725C.1
acctcgagccggcgggaatccactcaagacggaccacgaatccacgatcagatgacacgagcgaacggcacgcgggagcacgaccgcgcatccgaccggcgtgcagcgtcgcgagagcgaccagcgacgcgagcgcgcagtggtgtactcactactcagtattcctcattgtctcgggcggcggcgcgtgggcgcagtcgccaaaggaatgtccactaggtgttcgggaaaatgcttgtttggaacgcgcccataaaacccgccagccccggtcggcaatcgcggcccatcatcacgcgacctagcggcagccccagctccagccgtcgctgcctccctctacccgcctggccgcctcggcacctcctgcgtcctggtcttgcctcctctccgcgctcgtccgcggcccgccagcgccaggccccaggctcgctcgcccgcccgctagtccgccaccgcagcgccagcgcgctcgcccgccacggcgccacccacacgccacagcgcgctgccgcgctcgcggctcgccccagtcgcccgccacagccaggcacggtcgcgcacttggcgctcgcgcggaggcgccagccggcagctacgcaggagccgcaagccgcagcagcccgagccgccgagtgcgctcgcccggagcccggagctgtagagcaccgncgacccgccgttgtccagccaccggagtccggagcaccgagcaggcgatcatgggagcagccgaggcgagcaccgccatcgagcagccgtgaccgtgagccgagcaggggt

SEQ ID NO: 80820 - DNA, 1258 bp, Zea mays
  Clone ID: MRT4577_173726C.1
cccccccccggggtttaatggcccgttaaagggggggtccttttccctttagggtgggcaaatttttggaaaggggattgggtggggccttttttgtttttacccaactggggaaaaggggatttttttcaaagccatttaatttgggtacccccaggtttttcccattcccccgttttaaaacccggcccattaatttttaaacccccccctataaggggaaatgggccccttaaaaggaaggttcaacggcccccaattttatggaaattttcaaaaattccccctaagggggttccggcccaaggaccctttttttttttttttttttttttttttcctttttttttttttttttttttttttttttttttttttttttttttttttttttttttttttttttttttttttttttttttttttttttttttttttttttttgaaacaatccacgaacaattctctagaccagtgaattgcatgcacagttaggacagtgagaaagcacttgcaaacaatactcaggtaaacagtatgagacaacaaataatcagccaaaacttgtactaagccaatcacagaaaatagagacccttctctaagctttcctggttgcgatctgagactcagcctctttcttcactggctcttccttctccgacaagatgagctcgatgtggcatggggaggacatgtaagggttgatgcgtccatgagcacggtatgtcctgcgtcgctgcttctgagcctgattaacttgaatgtgcgacacatagagggtatccacatcaagtcctttcacctcagcattgctctctgcattcttgagaaggtctagaatgaatttagcagacttgacaggccagcgtccctgaccattcgagtggcgagacttagcctgagcagtacgcccaacaccaccacaatacctgcggaacgggatggcctgcttgtgggcgatcacatcctcaaggtaacttttggccttggtgagtgacaacttcctaagggcaaaagctgtctcacgtgtgttcttgaagtgaacacgtaggtcacggcccatggccttggcggacttggtggggttggtcggctccgtcgaatatttcaccatggctgagaccagcgaggggggaggtctcggggcagagttgagatactcttgcggtggcggcggcgcgagggaagaagggtagagaaggaagccgcggcggcggtagcagcgcgaaagattgtgcggacgcgggcgtcgacc

SEQ ID NO: 80821 - DNA, 1143 bp, Zea mays
  unsure (1)..(1143): unsure at all n locations
  Clone ID: MRT4577_173727C.1
ggccgcttttttttttttttttttacagtcactcaaaaaactttactttttacactgttcacaatggggttagaaatagatgggatgcaaggatgggttcggagatagttataaggatgcaacaaccacaaaccatatgctaaggacagccctactcttgatgttcgcttcagattgttaatgctacacttaatgttcggtacagattaaagcaaagcaacagacatgagccatacgcacaaatatgaaacaatccacgaacaatactctagaccagtgaattgcatgcacagttcggacagtgataaagcacttgcaaacaatactcaggtaaacagtatgagacaacaaataatcagccaaaacttgtactaagccaatcacagaagatagagccccttctctaagccttcctggttgcgatctgagactcggcctctttcttcactggttcttccttctccgacaagatgagctctatgtggcatggggaggacatgtaagggttgatgcgtccatgagcacggtatgtcctgcgtcgctgcttctgagcctgattaacttgaatgtgcgacacatagagggtatccacatcaagtcctttcacctgcagcattgctctctgcattcttgagaaggtctagaatgaatttagcagacttgacaggccagcgtccctgaccatttgagtggcgagacttagcctgagcagtgcgcccaacaccaccacaatacctgcggaacgggatggcctgcttgtgggcgatcacatcctcaaggtaacttttggccttggtgagtgacaacttcctaagggcaaaagctgtctcacgtgtgttcttgaagtgaacacgtaggtcacggcccatggccttagcggacttggtggggttggacggctccgtcgaatatttcaccatggctgagaccagcgagggggggaggtctcgaggcggagttgagatactcttgcggtggcggcggcgcgagggaagggtagagaaggaagccgcggcggtacccggtaggagcgcgaaagattgtgtatatttttttttttttttttttttttttttttttttttttttttttttttttttttttttttttttttttttccccggccggccctcgaggangtac

SEQ ID NO: 80822 - DNA, 181 bp, Zea mays
  unsure (1)..(181): unsure at all n locations
  Clone ID: MRT4577_173728C.1
tcgcgatctagaactagtcctgctctggtctgaggatctctggtatgccaacatcctcagaccagagcaggnatattggcatgaccatgacgatccatacgacccagcgctagtatcctgccggacgcgctgcgctgcgacccgcggcaatggcggggtaccagaacactctcgcggcgcg

SEQ ID NO: 80823 - DNA, 383 bp, Zea mays
  Clone ID: MRT4577_173729C.1
atccgtctgccggtcgctcctaattatagttttaaccaatacaattacacggtacgaagctctatactcggaggtttccataagcctaaactacccaaccgtgagcgccgagctcagttaggccgtctagaacgccatggacacgctccgcccgctcataagcaggaagatctttctacccctgatgctaccactggtgtggcactccagaaggacgctcgacctgttaactaggacctgcggaaccttgttttccatgaagtgccattcggaactggctgattgcgacaactcggatctggacatgtcgatgcggctgctcgagcccatcgaggatgagtggcccaaactctcctatgccacacttctaccagctcgccgga

SEQ ID NO: 80824 - DNA, 384 bp, Zea mays
  Clone ID: MRT4577_17372C.1
ataatgataataagacgacacttgtcttattagtcaataatgagtcacgaccccatggtatgtcaactaattatcccgaacaccacaattattgctatctacatggcctcgaccatcgataaggctcctgtaacaaccttgttggattgctgctgacccttgggttgagcatcaagggcaactgctggatgcagcctaatatggcaaacgatctacctgctgcattggggtgcaataatttgcgaaacaagagctccagtgcaacttggtgacatcctaccctgcatggtaaccggtcagactaggccgagacccacagtttagcctatactctctatcctggcctgaaggggctagaacatcggaggctgcatcatcatgtcc

SEQ ID NO: 80825 - DNA, 1200 bp, Zea mays
  Clone ID: MRT4577_173730C.1
gaaggaatgggtaatgataattgtcgcgggaaaatatgtcatgatactttcaagtcaaatagagcttccctctcgacaaggtgataagccgataaccatacaacatagtgtaccgtgagaggacaagagatatgacacacaccttgacacgctaaaactgggtcttagaaccatcacttgcatgctggtaaattcaggtcacaccaaaaggttcagacaatgttcagcatagggcaagaaggctggcagcagcatcacttgcgcctcttggcccttctgctctccagcctctgttgcgcttgctcaaactcttcttctgtgggctctgagctgctcgccttggagtcacacttggacatgatgttcgagaggatggagttgaactgttttttccgctcaaccctacgctgtgagatagctagtatcagatcattctcctcactgttcttcctttcgctctcctctctagcggatttgttggtggctccatccctgagatctttttagcccatttctcatacaccttagttgacttcagctcactaagtcaatcacagaagatagagccccttctctaagccttcctggttgcaatctgagactcagcctctttcttcactggctcttccttctccgacaagatgagctcgatgtggcatggggaggacatgtaagggttgatgcgtccatgagcacggtatgtcctgcgtcgctgcttctgagcctgattaacttgaatgtgcgacacatagagggtatccacatcaagtcctttcacctcagcattgctctctgcattcttgagaaggtctagaatgaatttagcagacttgacaggccagcgtccctgaccattcgagtggcgagacttagcctgagcagtacgcccaacaccaccacaatacctgcggaacgggatggcctgcttgtgggcgatcacatcctcaaggtaacttttggccttggtgagtgacaacttcctaagggcaaaagctgtctcacgtgtgttcttgaagtgaacacgtaggtcacggcccatggccttagcggacttggtggggttggacggctccgtcgaatatttcaccatggctgagaccagcgagggggggaggtctcgaggcggagttgagatactcttgcggtggcggcggcgcgagggaagggtagagaaggaaggcacggcggtcccggccggcc

SEQ ID NO: 80826 - DNA, 234 bp, Zea mays
  Clone ID: MRT4577_173731C.1
aaaaaaaaaaaaataaataaaaaaaataatttaaaaaaaaaaaaaaaaaaaaaaagggagggatttttaaaaaacacagtctgcctacaaaacaataactatttacatactatcctaataaacaccttctacataccttcactttcaacacctacctgtctcaagtttatgcgcctcttcttttaatcttcgtccctccacatttccctgtcgtaaccctgcaacttatacaca

SEQ ID NO: 80827 - DNA, 1071 bp, Zea mays
  Clone ID: MRT4577_173732C.1
agggcgaccggtaggttacacagtcactcaaaaaacattactttttacactgttcacaatggagttagaaatagatgggatgaaaggatgggttcggagatagttataaggatgcaacaaccacaaaccatatgctaaggacagccctactcttaatgttcgcttcagattgttaatgctacacttaatgttcggtacagattaaagcaaagcaacagacatgagccatacgcacaaatatgaaacaatccacgaacaattctctagaccagtgaattgcatgcacagttcggacagtgataaagcacttgcaaacaatactcaggtaaacagtatgagacaacaaacaatcagccaaaacttgtactaagccaatcacagaagatagagccccttctctaagccttcctggttgcgatctgagactcagcctctttcttcactggctcttccttctccgacaagatgagctctatgtggcatggggaggacatgtaagggttgatgcgtccatgagcacggtatgtcctgcgtcgctgcttctgagcctgattaacttgaatgtgcgacacatagagggtatccacatcaagtcctttcacctcagcattgctctctgcattcttgagaaggtctagaatgaatttagcagacttggcaggccagcgtccctgaccatttgagtggcgagacttagcctgagcagtacgcccaacaccaccacaatacctgcggaacgggatggcctgcttgtgggcgatcacatcctcaaggtaacttttggccttggtgagtgacaacttcctaagggcaaaagctgtctcacgtgtgttcttgaagtgaacacgtaggtcacggcccatggccttggcggacttggtggggttggtcggctccgtcgaatatttcaccatggctgagaccagcgaggggggaaggtctcgaggcggagttgagatactcttgcggtggcggcggcgcgagggaagaagggtagagaaggaagccgcggcggtaggagcgcgaaagattgtgtatatgaggcaccccggccggcctcgagggacccaa

SEQ ID NO: 80828 - DNA, 510 bp, Zea mays
  unsure (1)..(510): unsure at all n locations
  Clone ID: MRT4577_173733C.1
cggacacactgatctaatgtcatttctttactatgctctcctcttgtaagtttatagctttcgagctatgtccatcgatgcttaccactccataaacagcctgatccgcatgcctcgttaatcctacgtgatggattagatgacctcaccctattgatagtgcaccaccaaactactgacactggagacccgagnaatacttctgtcacttagaacggtatgtgataataaactcgctcgatacgttcaaagctatgtgctacagtaaagcacatcctttttgcgtatattcattcaatcctcacatatatgcaataatggtccagaaaatacatgtatctttagagagatgacttagctcttttttcaaaatcttatggttagaagagcgcagtacaatgctgatccacacatgaggttgcatatacttaatccactgatactgtacatgcctctttaacgctctgacattgtgaagaacctacgctcgcgcgcacgctcactaaggag

SEQ ID NO: 80829 - DNA, 128 bp, Zea mays
  Clone ID: MRT4577_173734C.1
agctttacactttttatgaccgcactaattgggcatattggtgatattcatgctgccgcgcgctaatcccatgtaagccaataccaatataccttaattatgacgctcatcagccattcttccctacc

SEQ ID NO: 80830 - DNA, 261 bp, Zea mays
  unsure (1)..(261): unsure at all n locations
  Clone ID: MRT4577_173735C.1
ttactcgttctacctgatgatgtgaggtacagactcgtggagcgattcaacaaanagacccatgattttganttccgagatgtccttcaagtgcttgatatgccaaccatgttacctantttaattctcaatcaacancaaatatttntantncacattnattttgtcaccttttttggtggggggggcatnttatattcctttctttcatctncnaatncatcttataattttcttnctttatatcatactttccttttt

SEQ ID NO: 80831 - DNA, 696 bp, Zea mays
  unsure (1)..(696): unsure at all n locations
  Clone ID: MRT4577_173736C.1
ccggccgggccgggatcctaagcggacctccctacgcttcgacaggaattttgcccgccagaagacgaacgagatgtccatcaccttgactgcttcgcctcgcaactccgcatggcgctgacccacgcccccaacattgtatagactagaacagtgcctctagaaaatcttcaccgagcacggatcctgcggtcatacaaacgagcacccatatcctagggctccgtcatagaactgcgatgatggatgactgcgacaccgatattattgagtagctcgggaatgttgacatacctgtccgcacctcttcatgtgctccccgtgagaagatatcgactcaacccgacacacagtctctcttcggcatttggagctccaccgtgacacctgctggctccgtgatgtgtgtactctgcaacaagttcgcagacagggatcgattcatctgcatatcccactgtgaagtgaaatctctcgtgtctggctagaaacatctaccacgccactatgaacatgcgagcatgcatggatgagctcgtaatagatctatgccgatatacctcagtctacagtatgctgctgcagcattgcctcataggatgcaatgactcacttatctttgcactgaactgcatgtcatatagtgaagatgaagtccttcgacctcgngccgtttgatcatttcaaaaagcccct

SEQ ID NO: 80832 - DNA, 396 bp, Zea mays
  Clone ID: MRT4577_173737C.1
tcggcaatggctgccagcgccctgcttgcctgcggtgtcatggtccatgatgtgctgctgggcgcaggtgatggcgggctggtcttcgaggccagccagttaaccgtcaaggtcggtgacaccatcacattcaagaacaacgccggcttcccgcacaacggggtgttagacgaagacgacgtgccgagcggcgttgacgtcaccaagatctcacaggaggagtaccttaacgcgccaggcgagacctactaagtgacccttaccgagtccggaacctacggcttctactgcgagccgtatcaaggagccggaatggtccgcaagatcaccgtcaactaattaagctagctatcgatcgatatccattcatgtattaactgttgcttcctgctttgt

SEQ ID NO: 80833 - DNA, 215 bp, Zea mays
  Clone ID: MRT4577_173738C.1
cccacgcttcgcatactcattcgcattctttctctctctcgctctgtcactcgtatagccacatcgtggcggagacagtggcaaacgtaatgccatccctcctgctgtccgtgctgctggtggtggcggttctggtggcagctgtgcttgcatcggcgtcttgctacgtgtgtcgggacctagggaggttccaggcgagcttcctctttcgagga

SEQ ID NO: 80834 - DNA, 2012 bp, Zea mays
  Clone ID: MRT4577_173739C.1
gagtcatcattaccagccggcggccgctccactctttcgctctccatctccatctagctacgctctcgcgagtcgcgacgacatcatcctccgcggagcttgcgcgggtacggcacggagatggccgcggccgggccgacgacgtccccggccacggcgggcgccgtggaggagctcacgcggctgtaccgggagctgccgccgcgcccggccgtggaggaggtggaggcggcggcggcggtgctggcgtcggcggcggcggaggaggaggcgcgcctcgccgagatcgccagggaggaggagattgcggaggcgcgggcgcgcgggggcgcgccgcccgagctcctcgacgtgctgtgggaggcccggcgcagctccgtgcgcctccgcgcgctgcagcagcgcaaggaggccgcgcacgtcctcgagctcgagaggcggttcaggctcttcgacgacctcatccagcgggcgtcgcgtcttctgtcccccggcggtggtgccggggccaggagcggcacgggtggtgccgcggtggaccacgacgaggtcgtcgaggtcgacgccacccggaacacggagctggacgccgcgccagccgagattggtcgcgggagcaagggcggcttgggactggaacccaagtccgtctcgtcgctgcgtcgtgctgcttcggcaggtactgacacagaaaagctgggccttatccaagtggcaagccttatagagtcatcggcaaagaaggggactacagagctcaatctccggggtaagctggtggaccaagttgaatggctccctgtctcgcttgggaagttacaggatgtgactgagcttgatctatctgagaataggatcatggcactcccatcaacaattggtagccttagatacttgacaaagctcgacctccactcaaaccagctgatcaatctgcctgataccttcggggaactttccagcctgattgatcttgacttgcgtgcaaaccagctaaagtctcttcctacatcatttggaaatctcacgagcctcgccaatcttgacctgagctcgaatctgttgaaggtccttcctgattgtttaggaaagttgaaaaacttgagaaggttaattgctgagacgaatgagcttgaggagctaccctatactattggatcgtgcacctctctcgtggagcttagactggattttaatcagctcaaagccctcccagaagccattgggaagttggaaaacctggaaatcctgacgttacactacaacagaatcaaaggcctgcctacaacaattggccatcttaccaggttgagggagctggatgtcagtttcaacgaagttgagactatacctgagaacatttgctttgcagccagccttgtgaagttgaatgtcagcaggaactttgccgacttaagagccctgccaaaatcaataggggaacttgagatgctagaggagctggacatcagtagcaaccagatacgagtgcttccagactcttttgggcatctctcaaagctacgtgtgtttcatgctgatgaaactccactggaagtaccgcccaaagaagttgtaaagctaggggctcaggagctggttaattatatgaagaatatggttgctgcaagggaagtgagccagaatcaaacagataagaggagcttctggacctggctccgctcactgtttggttgttacaaaaagaatcaaggattgggaccagttccagcctagctgaaccatatcgtccgcatgtattgtcatgaattattcagttttgctccatctctcaagtcagcgacgaaatgaggcatgactactattattatttcaactttatgtttgtgtatacaatggataaatattgtagcgctttcttgtacataagattaggttatgtgtaagttcatctgtacgaaacactatcatgttaatccatgaaacacgagctgccgaatattactagcaagtactacacccgtacagaaaagaattcagttccaatagaa

SEQ ID NO: 80835 - DNA, 466 bp, Zea mays
  unsure (1)..(466): unsure at all n locations
  Clone ID: MRT4577_17373C.1
ctagtagagatagacttaccatgaatcctgtctgatgcacacgtgagtatgggacagtacatcatgcttcatgcacggtcacacactatgataagcaagtggacacacgcctaacgtaggttagatggtggcctggtttattctttacgtggggaggcaaacaacctgaaggcttgcgttgcaacaaccattggatcaggggctaacgtcatgatcctccgcaaggtttctgggtcccgcatgccatgttgttcacgtaccccacttccagcataccgtggcacctcttggggtagccgagccagcccttggggggtttggaccaccccgtggagcgggcctcgccggactctagaccacacctgatgatgttcatggtcaggccggatccggggagcctccccgcggcgcggtccgtggcggagggccttcacacgccggtcatcaccgngtgggacgagggctt

SEQ ID NO: 80836 - DNA, 678 bp, Zea mays
  Clone ID: MRT4577_173740C.1
ataggggcctttttttttttttttttgggatatatagatattggtattgaacattgattgatatacagagacggacatgatgggggtttggcgtcaataaataaaagaggaagggccaggggaaggagaacgccaaaacagagcttttgttgtctctcacctactattcttcttgcctcctccctccaccagcatccctgagtctgccatgggcaactgctggggaaccaagattagctctgacaccgccgcctccccttccacatcaccgttccctcgcagcgagggtgagattctccggtgtgccaatgtcaggagcttcaccttgacggagctgatgacctccacccggaacttccggcccgacagcgtcctcggcgagggaggcttcggctccgtcttcaaggggtggatcgacgagaccaccttcgccccggccaggcccggcacagggatggtcatcgctgtcaagaagctcaaccagcagggattgcaggggcacagggagtggctggctgaagtcaactacctgggccagttgtctcaccccagtctcgtaaggctcgtaaggtactgcctccaagacgagcagcgccttctcgtctacgatttcatgccgcgaggaagcttggagaaccatctgttcaggacctcacgtgtccagccgctctcctggaa

SEQ ID NO: 80837 - DNA, 2335 bp, Zea mays
  Clone ID: MRT4577_173741C.1
gggtaccccgcgtacctcggccggggcaaaaaaaaacgagaggagagcggagagacagacaggagccaaatctacgtctcctgccaattcgcctttctccaaccagcttccccgcgccgcccgcccgtcgccgctcctccccgccctctctgcccgcatcagatcgtcttccccacgccgtgtgaccgaggtcccgtgatccctcccacttctgcgccggcgaggacccgggaggcgggatgagcggctgagcacgacgatggcacgcagagccacgccgcaggaggccgccgtcgctgccgcggaggccgccatacgatccgtaggcctggggttcgacgtcgtcagcgacgtccgcctcaagttctgtaagcagcggggcgcgcccgacccctggctcatcgaacttgaccatggggaggtccaggatatcgtgctgcccggcggcgtcaccgtcgctggcgtcaccgcttcggttaagtgtgacaaaggggagcggatgaggttccgctccgatgtcctgtcgttccagcagatgtctgagcaattcaaccaggagctatcattgtctgggaaaattccatctggcttcttcaatactatgtttgagttttctggcagctggcagaaagatgctgctaataccaaagcacttgcttttgatggttggtatgtcacactatacagtgttgcgctctcaaaagggcaaattgtactccgggatcatgttaaacagtctgttccatcaacctgggatcctgccgctttggcaaggtttattaaaaaatttggcactcatatagttgttggcctaaagatgggtgggaaagatgtaatttatttgaagcaacaacattcatcaaccttgcaagctgtcgacgttcaaaaacgattgaaggagatgtcagatagtagatttcttgatgcaaatgtgcaatatgacatgagtaggaacaatcaggatttggtgatgatgcttaagcgaagaggtgggagggataaagaatctatatctcatagtgagtggcttaatactgttcaagcagagcctgatgttacctcaatgtcctttataccaatcacttcgctgttgaatggagttcctggaagtggatttttgatccatgcaattaatctgtatctccgacataaacctccaatcgaggaattacatcagtttttggagttccagcttccaaggcagtgggcacctgtttacagtgatctcgctctgggtcctcagaggaaaagacaaggcagtacatcgttgccagtaaatttaatcggtccaaagctttatgtttgcactaacatggttgatgtgggtaaaagaccagttacaggactccggttgttccttgaaggaaggaagagcaacaaattagctgtacatcttcaacatctctgctctcttcctcagattattcagcttgaagacgacccttacaatcaccaaaccccggaatatgaccgcaaatactacgaaccaattggaccgtggaaacatttctctcatgtttgcacagcaccagtcgagtcagatgacctgtgcatcgtcacaggggcacaattagacgtggtccaccaaggcctcaagaaaattttgttccttcgcctacatttctccaaagcctgcaatgccgttgtgaggaactcggaatgggagaattctcccaacatagctcagaaatcaggccttatctcaacactcattagcacacatttctcctcggtagctcagacgcctccgccgcggccagccgatgtgaacataaactcggcggtgtaccctgggggaccacctgttccagtgcagaccccaaagctgctgaaatttgttgatccaacagagatgatgcgtgggccgcaggactcaccgggctattgggtggtttcaggcgcaaagttgaaccttgagaggagtaagatctcattgcgggtgaaatactcactgctgacagctatgatgccagatgatgagtttccacttgatgatgatgaattttagaacctggaacgaaagaaacctgtgtagcaaaggttgaggatccaagatttccgtcatttgggcatttgtttgatgttgtatactttgtggtttctttaaacattatagcataaacgagttctctgccctgaatggagcgagaagaattgttgtaacatttctttgtagcgtgggcgtggcacatagcgatcagcattagatgatagatcaaattatctgtatatatgggatgaataaaaaatattgtttcaaaaaaaaaaaaaaaaaaagaaaaaaaaaaaaaaaaaaaggagttttggctccctgccgaaaaaaaaaaaaaaaaaa

SEQ ID NO: 80838 - DNA, 289 bp, Zea mays
  Clone ID: MRT4577_173742C.1
tttttaggtgaggatctatgcttcgggtggcctggcttaggtgtcaccaggagactgctggcccatgggggtgggcaccccggggccggcgcacaaaacatgtgaccacccggtcctgatgcatggttctctggatgagacagatgcgcggatcgaagatggtatcctgctgactgggatggtgtacattgctagagaggcaaaaacgctgtaccagggcgtaacgttggcgttcgctgtgaaggacggtaagccgagtgactgctattatgtcgaagaccgggaccat

SEQ ID NO: 80839 - DNA, 306 bp, Zea mays
  unsure (1)..(306): unsure at all n locations
  Clone ID: MRT4577_173743C.1
ccggccgggatcactaagaaaccccacgatcacgaagtgacgcctcgacgagccacgacgacgcatcccgaccttaccgcgagacctacacccctataactcaaaaagtcgcacggatacgctcgattcatcatggctgccgcagttgcgaaccagcccaagcacgactgggccgacgacgacgacgtcgaggagacctccaccgatctccctgagcctcagaccatcgccaacaaggatggaacaaagaccatcatcacattccgctacgatgacgacggccgcaaggtcaagaccgntcgccgc

SEQ ID NO: 80840 - DNA, 1114 bp, Zea mays
  Clone ID: MRT4577_173744C.1
ccggccgggtaagcccggatccaaacttccaaacgcatcttcctctcccatgctgcatcccgcagccagaaccctagccagctagcctcgtcgccatggcctcctccttgctccgctccggctacggcctcttccttcgccgccctcgcctttccgccgcattctccaccgctgctgccgaggagctcatcgacgtccgcaagctccccaccgactacgacccctccaccttcgacccgtcctccccgtcccgcccgccgccgtccgaccgcgtgtggcgcctcgtcgaggaggtctcctctctcaccctcgcggagactgcttctctgtcctctctcctcctccgccgcctcgacatcccctccgcgccacccatcgccatcctcaactccgccacggggctgggcggcggtggcgccacggccggcgcggcgggtgagaaggcggcggcggcagctgagaagacggtcttcgagctgcggctggaggcctacgatgctgcgagcaagatcaaggtgatcaaggagatccggtcattcactgacctggggctgaaggaggccaaggagctggtggagaaggcgcctgcggtgatcaagggaggcctatccaaggaggaggctcaggcgattgtcgagcgaatgaaggcagttggcgccaaggtcattattgactgattagaacaagccttttcagtggtgaggtcctgcaaatttatgcttcgtttcggatcaacttttaagtgcaaggatggatgagtggcttgtggagaattctcctctatgaacttgtggagaattgatgtggcattgcacaaataggttttcaagcgcgttaatcaaatgaacttgtagagtattgtatcaatgatcaatcactcatcattaagttgtcggatgtgacattagttgtggggctttgggatggaaatggactattatattgttatttgctatgaagattttgtgacctttgaattgcaaagtaaaaaatgagttactccatttccaaattgtaagttgtttgggcttttctagatacataacttctactgtgtatctagacatcatgtacatggagacgcatagaaaaaaaaagatatgtatctgttcat

SEQ ID NO: 80841 - DNA, 326 bp, Zea mays
  unsure (1)..(326): unsure at all n locations
  Clone ID: MRT4577_173745C.1
cggncacacacccgcctngccagccggggccctcccggccncccccaccngnggccgccggccncgccgccgcaaaacccgccgcgcaggccggnggcnnccgaggggagngccaancggagccaacagcgagggaagcacangcngccgnncgnccnagagnnccncagggggggggggggggagcagngaganccnccncncgggggnnangaacaacgccacacgccggcgccgcacccaccngggccagnccgncgccggcggcnnccccnacgggggcnagggcggcgcaggaacgacgcgcccccagcagagccacgccc

SEQ ID NO: 80842 - DNA, 765 bp, Zea mays
  unsure (1)..(765): unsure at all n locations
  Clone ID: MRT4577_173746C.1
atctaaccaagaaccagccctaaccgattgccgtctccatccgcgttcatccacccagggcatcctttgccgctaagcaagccacacctcgggttcgaggcggcgagggtttgcgcgacgaggatgactgtaatgctctggccccggtgatctctgccgtttcagattggggaactcgatttcgatttcgaccccagtgctggattcgtcgatggtgggggtgctgtcgaatcaggtgggccgggaggccctcgccgccggggatcacatctactcgtggagaaccgcctacatctacgcccaccacggggtatatgctggagatggaatggtcatccattttacgagagcggttggacatgaaattgggacaggaacattcttagacaagtttctgttcagctcatcgccgactacggcggatggccctccttgcgagaaatgtgggcacctcatcaagcctcagggcgtcataatgtcctgtctcgattgcttcctggacgggggcagtctctacctcttcgactatgctgtgtcgccccctttcttcctcgccaaagcgcgtggaggaacgtgcactatggcactctctgacgctgctcagcttgttgtccaccgtgccaaacacctcctcaacgatggctttggcatgtatagcctgtttaagaacaactgtgaggacttcgcgatatactgcaagacagagctgctcgtcgagactgcttacagcgntgggcgcagtgggcagctggcgtccctgacggc

SEQ ID NO: 80843 - DNA, 310 bp, Zea mays
  Clone ID: MRT4577_173747C.1
gggccattaaacgcacagggggggaaaactattacggggggggggggcccatataaaacccaggggcaagaaaacagtacataaaataggtgggaaacggggaagccaaaaacccgttttagggggaccaccataaatggggtttacacaaaatagccaaaatgcaaattattttaaaactgcccaaatgcaggggggggaatttttggggggggctaaaaaagggtgcaccgggcactggaatgcccaaaaacaagattggtgcaccaaacatggaaaaaaaaggggcggggggcaagggagcaattcc

SEQ ID NO: 80844 - DNA, 870 bp, Zea mays
  Clone ID: MRT4577_173748C.1
gcgccgtgttcctccatatcccagacaagcttgtttggactgggcttgagaggcttgcggggaagctgaggccacatagaggccggatttttgtctcacataacattaagttttgctcaagactgggaggcgatgagtgcacacgacggcttgccaaattgggccttgagtatgtggggaagcacactcatgatagcttgttgtttaaccactacgaggtctggtttgaattccgcaggccaaaagtttagatcttgatggtacagaaagagagagtggttggcttctgtgatgcaattttggcagtttcaagcacagattaagccatgccttgtactgtttgaacactactgggacctgacttgagattgagattgatgttcgctcggtgcctaattcaagcatatgcatatacaccaaaagtcatgattgagcaatgctgtggtgcttcagtgtgtcttcccagtttcattcggtgagtggtggatgaaggcttcagtttttattagcaccgattactgtatgttgtataacttcagtaacatttctggtagaaactatgtgggtagctgatgtcaaagtagtaggatacatgcttctattccgaaagctacctctgtgggctgtggccaaaatagactcttatgagcacacatggttttgtaagctgtaacaaggataacttcggttgtcttgtttttgcattttatagaacatgcacatttttatgctgctgtatcctggtgagtatttgcaggcatatgattttgtcaatttacagttacagtgtaaaaaaaaaaaaaaaataaaaatacccctttttcccccttccttctcatttcttcttaatcataaataataaaagggggg

SEQ ID NO: 80845 - DNA, 298 bp, Zea mays
  Clone ID: MRT4577_173749C.1
accttggcaaagcagttggaggagtcagagagaaccagttgacagactcactatgtgccatcagggcttaggtccgagcctgaaacaagcagatgatgactgttccctatgtggtactgcctggtggagtggggatgaaaggtggtgctggggcggctatgaaactctcacctgtgggacgctatggtagccgccctatccgtagggcagccaagggatatgcctatgtagcttgaaacggtccatctacagatggtgtgagggcgtttatataaagacccactcaccttctgaagat

SEQ ID NO: 80846 - DNA, 508 bp, Zea mays
  Clone ID: MRT4577_17374C.1
ccggccggggcagttatagcctcgttggcgtattcgcgccatagccctagactcaagccattagaaccccgtcgtgagagatatagcgcgtgcagcggaggcaagaagtgcgcccgccgtcgaggacctcttggcgccgtggttggacatcggctcacagttgggggcgctgcgcagcacccggggttcgtgttcgtggcctgggcgggagctgttgtgcattgggatctgacgaatttcacgtcgtcgttccatcgccaccacagatccatccttcgctgtggtcgctgaaccttcgtcgtgttccttggtcaagaacaggtaccgcaggatgaggcgcaaggaggaggatgcgatgagttcgtgagagatctaggtcgtcgtctcccagtcaactttgggttgctggaccgttgtctccttatatgtaattatttattttgtatagaactcctattatatagtaaagttgtgacattcgattaaaaaaaaaaaaaaaaaagcggcc

SEQ ID NO: 80847 - DNA, 813 bp, Zea mays
  unsure (1)..(813): unsure at all n locations
  Clone ID: MRT4577_173750C.1
aagttcatcgcgtacccggcgtcgctcgcgggagggtgtctggaagctgcgaaatctccccgaggcgcgcggtgccgaggccgcggcgaccggcgacggcgaggaaactgcaatacctaattgcctatagctgcagagctggatcgtgtttcaggccccggcacatttctatcgactgaaaaagcttactggatcatcttcccctacagaaaggttctacaaggcttgccctaaatctcccaggatcggcctatcagttcctgcagagaaggtcggtctgtggtcatcatcgatatgggcaaaacatctgcttctggtgttgttcaggagaatgaaaaagttgggaatggttcaccctcttctcctaccaaggggaaaaggggaaggaaagggtcccagattatagcaaataaaaagtatcccctgagatctgcacatagtagtaccagggtgcttcgatctacttcaaaagacaagagtaagacgcctaatgagccagtaagtccattgagatccgctcatagtagtcccagggttcttcgatctacccctaaaaacaagagcaagacacctaaaaagcaagtaaattcattgaggtccgcacatagtagtgccagggtgcttagctctaccttgaagaaaaaggtacctaatgagccagtaaacgacagtactgctgctcaaccagctgccaggaaaaggaaaagaggcaggccctcaaatgcagctagtcccaagaatgagtgncatcaaattcgccagcgagttagatacattttgaatcgaaatgactacgaacaaagttcattcagc

SEQ ID NO: 80848 - DNA, 284 bp, Zea mays
  Clone ID: MRT4577_173751C.1
attgccccaaattctaatcttctacatggtaccacgaactcaggtcccgatcccgatctaatctcgtgatctctcccctcagcccccctcccctccccatggcaaccgaatcagcccctacccccgtgatctgcccgcttcgccaccatcaacatcaagctccacgtccccatgacccttgagttgaagccctctaacttcacgaagtggtcgacggcgttccaggccacctgtgggaaattcgggctgcaacatcatctcgccaccgcctccacctcaaactc

SEQ ID NO: 80849 - DNA, 708 bp, Zea mays
  Clone ID: MRT4577_173752C.1
ccacgcgtccgcggagaacgtggaggtgaagatcgtggaccacgtgaccggcgaagccctgtccgtgggccagaaaggggagcttctggtgagagggcctgccgtcatggccgggtatgttggcgacgaggaggccaacgctagcagctttgattctgaaggctggctgaggactggggacctttgctacatcgaccaggacgggttcctgttcgtggtggacaggctgaaagagctcatcaagtacaagggctatcaggttccacctgcagagctggagcttgtcctgcagtcgttgccggaagttatcgatgccgcagtcatgccgtatcctcatgaggaggcagggcagatcccagtagcgcttgtggtcaggcagcctggtagcaaggtcacggaggctcaagtcatggaccacgtcgcccagagggtggcgccttacaagaagatccgcaaggtgctctttgtcgactccattcccaagtctccggctggcaagatactgaggaggcagctgaccaaccatgtgcaggctggcgctgtttctagaatgtaattcttctttatttacttgattgtgtgatgcgtgcaagagacacagaatgacgcgacgatgggttagaacgcgatcgactttttaaacaaataatagtggcatgctgtggaactctatctatgtatgtaaggtccgtttgcatccttggaatt

SEQ ID NO: 80850 - DNA, 385 bp, Zea mays
  unsure (1)..(385): unsure at all n locations
  Clone ID: MRT4577_173753C.1
tactgagcttcaaagaaaccttggcgtcctaccggagcgtatattatgttggcacaattgttcccattgtgtgtcttctgctgggcaatgttatcaagccagcaaggaaggcgaaggctcggaagaccgagtgaggaaatactcaatcaagtgacctttacatagaataaataaattgaaaactagaatgtccttatcttcgttgaagcttcaccatctttctttttgtacggtatcaaatttagcataaggataatgtggtgaccccggttctcctacctcggaactcgaatgccaatggattaatcattaaaacgtgacacaaccactggattttcctttacttaatgactactcatacgtgtgtgcgataaanagataaata

SEQ ID NO: 80851 - DNA, 1975 bp, Zea mays
  Clone ID: MRT4577_173754C.1
actcctatgggcgattggtaccctcgggcccggccgggtataccacccccacccacacacacgccgctcggaatcggagcttgcatccgaccgcgagcaagcggaccaaatcctcctccatattctatcgcgtgcacgcatctggccgcctcgaccctcggcggcggcggcggcgacgacgacgacgatggggctggagatggaggcgatggcggggtcgatcggcgtgtcggtgcccgtgctccggttcctgctctgcttcgcggccaccatcccgacgggcctcctgtggcgcgcggtgcccggcgccatggggcgccacctctacgcggggctcacgggtgccacgctctcctacctctccttcggggccacgtccaacctcctcttcgtcgtgcccatgacgctcggttaccttgccatgctcctgttccgccgccacgccgggctcatcaccttcctcggcgccttcggcttcctcatcgcatgtcatgtgtactacatgagcggggatgcgtggaaggagggaggcattgatgcaactggagctttaatggttttaacgctgaaagtcatttcgtgctcaataaactacagtgatggtatcttgaaggaagagggtttacgcgatgctcagaaaaaaaaccgattgactaagcttccttctctaattgaatattttgggtactgtctctgttgtgggagccactttgctggaccggtatatgagatgaaagattatcttgaatggactgaaaggaaaggaatatgggctagcccaactccttcgccattgttacctactttgcgtgctctagttcaggctggtatatgcatggggttatatttatacctgtcacctaaatttccactctcacggtttagtgagcccctatattatgaatggggtttttggcaccgactcttctatcagtacatgtcaggctttaccgctcgttggaaatattactttatatggtcaatttcagaagcctcaattatcatatctggtctaggctttactggttggtcggaatcttctcccccaaaagccaaatgggatcgtgcaaaaaatgttgatgtattaggtgttgaattagctggaagttcagttcaattgccccttgtgtggaatattcaagtgagcacatggctacgatactatgtctatgagaggttaattcagaaaggaaagaaaccaggtttccttcaattgttgggtacacagacagtcagtgccatctggcatggactatatcctggatatatcatattctttgttcaatcagcattgatgataaatggttcacgagttatatacagatggcagcaagcagcgagcagttcattcctgagcggtatcctggcctttctaaattttgcttatacattgctggtgcttaactactcctgcatcgggttccaggtactgagcttcaaagaaaccttggcgtcctaccggagcgtatattatgttggcacaattgttcccattgtgtgtcttctgctgggcaatgttatcaagccagcaaggaaggcgaaggctcggaagaccgagtgaggaaatactcactcaagtgacctttacatagaagaaagatggtgaagcttcaacgaagataaggacattctagttttcaatttatttattctgtctttttgtacggtatcaaatttagcataaggataatgtggtgaccccggttctcctacctcggaactcgattgcgattgatcaatcattaaaacgtgacataaccactggattttcctttaaaaaaaaaaaaaaaaaaaaaaaaaaaaaaaaaaaaaaaaaaaaaaaaaaaaaaaaaaaaaaaaaaaaaaaaaaaaaaaaaaaaaaaaaaaaaaaaaaaaaaaaaaaaaaaaaaaaaaaaaaaaaaaaaaaaaaaaaaggggggcccgtttaaaaagaaccaaatttaactaccgggggtttggaaagtaatactttttt

SEQ ID NO: 80852 - DNA, 444 bp, Zea mays
  Clone ID: MRT4577_173755C.1
ccggccgggatggatccatcccagccagcactataaagccttgcattgccctgcctttgtgaacatcatccgagagaaagcaagcaaccgtgtgccttttggagacgcgatgtcgtccggcaacaagatcagcgtggccttgctgagcgtggccctagtgggcctgctcctctgccacctcgccaccaccgcctccgcccaccagatacgcaaagtgtggccaagcctacccacatgcatgctattgcatgcctccgaatatatatatattatccgactcgatcctgccaaattgtttcgtcgacttcattatatattccatccctttaatttaatggagaagtgtgactgctgttcgtgatggttttgtatgcgcaaatgtaatgtaatccattcgtccaacataatccttgtttcccgaaaaaaaaaaaaaaaaaagcggcc

SEQ ID NO: 80853 - DNA, 751 bp, Zea mays
  Clone ID: MRT4577_173756C.1
ccggccgggatggatccatcccagccagcactctatagggcgattgcattgcctcgagccgcccggcgcgggcatcatccgagagaaagcaagcaaccgtgtgccttttggagacgcgatgtcgtccggcaacaagatcagcgtggccttgctgagcgtggccctagtgggcctgctcctctgccacctcgccaccaccgcctccgcccaccagaaagacatccacgtcctcggcagcgtcgacggctccagcgacggcagcagccccgagtccgaaggccgcgtcgtctacgcggacatgaagctggctgatacggaatccgatgcgccggcgccggcgccggggccgtcgtccggttgaactgagaagcgtgcgtccagccaagcaaggtggtcaaaaccgagaactaattaagggctcgattgtgtgtccggctactactgttcttgccataattatatatagatacgcaaagtgtggccaagcctacccacatgcatgctattgcatgcctccgaatatatatatattatccgactcgatcctgccaaattgtttcgtcgacttcattatatatattccatccctttaatttaatggagaagtgtgactgctgttcgtgatggttttgtatgcgcaaatgtaatgtaatccattcgtccaacataatccttgtttcccaaaaaaaaaaaaaaaaaaataggggcccccttatccagcagcaggtcacatggtacaaaaaaaaaaaaa

SEQ ID NO: 80854 - DNA, 353 bp, Zea mays
  Clone ID: MRT4577_173757C.1
gctgcaccaagaagcaccatttttttcttaagattaacttataatagagccagccggattgcacacttaccatcgctcccatgcccatgctgagcgatgcatgggtgtgaccaaactgaagatgaacgcccgactaacaacaaccacagagctggcaaaccccagagagcacccaattgaatcagcttacacgacacgacccattatcaaccttgtgtactagggaaaaagtcccgaccgatacacacttaccaacggtcgcgcagccccaatggctaatgggacccgccccggagggagtcatcaaacccggcggcagtggtggtaccgcccaaggcgaccgctacactagc

SEQ ID NO: 80855 - DNA, 756 bp, Zea mays
  Clone ID: MRT4577_173758C.1
gcggccgccctttttttttttttttttgcaggaatatggccacatgctcatctgatcatgctaaaggtgtgtaacagacatgatttttttttacatttatttgtttcaacacgcaaggcagccaccgctgctcgtgtgaagctggtgcgcggctgcacgcgggcacagcggccgtcgcaccgccatgcaggcgagtgcgctggccacgccgccgcaagccggcgcgggcttcgccgtaactacttcaggcaagaagtaagagcactccggcacgcaagcacaactctgctgacgccgctccggcacgccggcatacagccgtcttagccccgctaccccgctacgagggcatcgcgccgcctctgttttgaaggcgcgctgacgcacagacgtggccccgcccgccgcaaaacaagcacagactgtcgccgagcgcgcgggtgcgcaggccaccgtcgccgccgacgcaggcgagcacgcaggcagctgctgccgcaagaaggcgcgggctcaggccccgatgctgcctcaaagacgagtgtgcaggccgcgatgccgcagccatgggcgtgggccccacagctgccgccgccaacccacaggcgagcgtgtaggcgcgcggattgcatccttccgtcgttccatcgagccagagaagaaagaagaggaggaaaaatgggtagagaaagatttgacggcggccagcaagagcagccagcaacaggaaaccctaacaaggttcctcactccggccgg

SEQ ID NO: 80856 - DNA, 428 bp, Zea mays
  Clone ID: MRT4577_173759C.1
catggatctgacttataagtcattttcataaaccaatgccaaagatgaatccatgtttcttacttggaaaccccgaacaaacaccactagcacgaggcactcgcgttggcgtcgctcatcgacgatgagaagaaacttggcgactgctagttcgacctctggaagcagtcctatgtggcccatgtgccactgtgtatggcaagctccggcgcagccgccgcttggacgcagtccagagtggatgcaccacgatgtccatcgtcaaacatggggacctcatggtcgtcgccaatgccgacgactctcgggttgttcttggcaccgcaaccgacgatagcgccatcatgctgtccagctcgtcatccacctgaagcccaacctgccacgtaagtcgctactgaccgaccatgaattcttgggcgctggta

SEQ ID NO: 80857 - DNA, 288 bp, Zea mays
  Clone ID: MRT4577_17375C.1
atgtgggatctatcacgactaatgtgtgttatactctcacttgctaatcttgcacaattaaaacattttgtcaacgtcaacgagaagtcatactcccgaatacaagcaaaacatcatctagaacttcgtcagcataagctaactgatgttattgtttactccatcaaatatgtcttgcaacctcaaacactattgagtccattgcgccaatgtggtcttagaaacgacctaattcttgcaagagtcaagaacgtcgtgccgtacttgggttttaacctcggtctgtag

SEQ ID NO: 80858 - DNA, 387 bp, Zea mays
  Clone ID: MRT4577_173760C.1
cggccgctcaggcggcgggcgggctctccgagccgcagagcgcgccagcagctgcgcaaggtcctcaaccctaaccctagcctagcttacttccttcttctcgatctagtagagcatgggcgaccaggcgaggggcggcatcggatcgacctccaccacctactcgggcggggggagacgaccgcggagatcatcgcacgaccaggaaccgccacgccctcacgcgcttaccgactcggacgctcatcgggatgcgcaaaccaggcgcatgccccatcaacaccgcttcagaacgcttatcgaaaggtgtggccctgcaggctaatggcgcagtatcgcctgaaactatgagagaacagggacaattcatgaaaatttcttcctgcc

SEQ ID NO: 80859 - DNA, 169 bp, Zea mays
  unsure (1)..(169): unsure at all n locations
  Clone ID: MRT4577_173761C.1
acggagcgcgcggaaacaaancccgacaggagacacccacgccggaagggaccagccagcaccataagcccaagaaacggaggcacaaaaaaaagcccccgcacaaaacagaccggggggcacaaccccagaaaagagaaccaccctttcttcaggcaggggagggcaa

SEQ ID NO: 80860 - DNA, 325 bp, Zea mays
  unsure (1)..(325): unsure at all n locations
  Clone ID: MRT4577_173762C.1
tcgcgcgtttgcgccttgtttcctgggggggccgtcggctggggantttatggcgtcggcgtttggcagcggtcaccgtcgcctcttgctcgctggcgccgtgctgctcttcgtgctcgcggttgccggcgcctgcgccggttccttctgcgtgccggggtgggccatcccggcggcctgtcctccttctgccgctggttcttgtccaggctccgcctgcggtttttttccgcgccttccgtggccggtgctgttgtggtgatgctgttgggtgctggcggtcgtcctggtgttctgtcggtgcttggtgctgggcttccttttg

SEQ ID NO: 80861 - DNA, 229 bp, Zea mays
  Clone ID: MRT4577_173763C.1
aagacggaacgtggttcatttatccggacgaacccaaactgccatccatgttactcgatagaccgacaccatgaagcatcacagtatcacaagatgcaggggcacacatggggaaccgggacacattagcaccaccagaccagacggcgcacactttatatagcccatgccagttgcagtctcaaccggggactggtataccttctacacacactactgggcacacaga

SEQ ID NO: 80862 - DNA, 436 bp, Zea mays
  Clone ID: MRT4577_173764C.1
attgagatgccgatggcaccttttcaagaatttagggaaaatgacaaatataaagagtcttatataatgacattattagctatttttaataataactcaattaaatcagtaaccagcacaggtgatgaacttgggttgatagatttgagtgtagaagaagttggacttcttggcagcggcaacagcgtcggtgttaaggaaacattccttgtagaagttgtcgaagttaagagcatcaccagcttcggaggccttgaagtaggtgtaatagttggagcaagcagagagttcatcagcagcaccgtcccaaactaattgagagttagcgtaagaggcagcgtaacaggcagacaattcgtcttggttggtgagttggtcgcagatcttgacgggcaacttttggaagcagttctaccagctgtcgatggtgatgacg

SEQ ID NO: 80863 - DNA, 321 bp, Zea mays
  Clone ID: MRT4577_173765C.1
gggcgatgcgcgagggccacaactacgtgccctgagacgaggaggtattggacgagaagcaggggacgctcggggccaccacggtgcggtacaggctgaacacgctggtggcggatctcagaccgctgcttattaacaagaaggatctgcgattacggcactttcacggcatagacgaactgtacagagacggcatcccggtggcggcgcagaccgggttcgacgccatatcgaccgtggaaccgggcatggccaagctggtggaggacaccaccgaccacgtcctacgcttcgaggtgccggaaatgatagagagggacc

SEQ ID NO: 80864 - DNA, 424 bp, Zea mays
  Clone ID: MRT4577_173766C.1
ctgtgtactccaccatcacccttgccaggttcgacgagctcaacatgctactctgaacatgaagtgcatggagcccgtagagaaatggctcgtggatgcccatacgcacaggatcatggcacatgatggacaccttgcaggaggttcactaagatcccctgggtgcagcaggtcctccaggactacttcaacggctaggagctgacgcaagaacatcaatcctgatgaaggcgggactatggtgctgtgccatgccaatcctcagtggtgacggcgacgagactgcgcagacctgcttatgatggacgtgactgctctatgtatgagtccggagactgccgcaggagggaagaccgttcttatacagaggaacacaatcatgcgcaccaagaaagagcaagtggtctgcacctactggtacaac

SEQ ID NO: 80865 - DNA, 200 bp, Zea mays
  Clone ID: MRT4577_173767C.1
tacaggcattcggccactctctatcccacttctccaatagatcctacagctcttatactggggtaatggcaccctacaactggatcatcatcaggaacacagaccgcgactggagttgcagactgcgcatctacatgcagcattcttgccgagatcctcatagatccatactacccgatgctaaacaacatcctgaacta

SEQ ID NO: 80866 - DNA, 434 bp, Zea mays
  Clone ID: MRT4577_173768C.1
tttcctctcggtgcctgtctcgtcctaggtcggggacctgatctcgggggagttgtttgtttttacttagcatcatcatcccttttcatctcatcatcaagtgttctggcgccgtggtccagtgctgcgtggactatgaggaagagctcgtgctgagcggcggcggttgcatctgctccggcgacgcgctgctgcggacgcttgctcatctcatgccgaccaaccggtacatcatctacgcggcgctgctcgcggaccatgtgccgtgcaacatgcgcggcctgtcctactacaccaactgctcgtctcatactgcctccaacccctaccgtcgtggctgctcctccatcacgcgctgctcccgcatcatgaactgagcgccaaagcggtggccggcggtctgatctgcctgctggctggctgggcagggggca

SEQ ID NO: 80867 - DNA, 493 bp, Zea mays
  Clone ID: MRT4577_173769C.1
ctagctccgccactcacccacccgtccctccctcatctcgccgccgccagaggctacggccagtgaagctcggctcgatccggggacggcggcggcggggcacttcttcggctggcgcgtggaggcagggcgagctgtctctccagcgcactggtggtggcggtttccgctgcggatctcgctgcggtggctcggcggtcaatgcctgggctacgacagcggtggcggtcggcatatgtgctttgctggcccattctccggcgaccttgacctggttcgcgaggtcgagcccactcggatctggcgtccttcaaaggcagcagctcgactcggccggctccggccagtagccacggctgggtggatgggggcgtgttggaggtggtggttgtgtggctcgtggaggaggtttggctggtagtcggcggtgttggttcttgcggagctcagatttggcttgcttacaggggctgctctgctttgcttgtggatg

SEQ ID NO: 80868 - DNA, 349 bp, Zea mays
  Clone ID: MRT4577_17376C.1
tagagacttagcgtcgacgaagagggaggaagcggcggcccacatgttgagtgagcaaacaggcgctagcactagcaggagcggcggtggcgactagcgttaagacaggtggctgcagccggtggcggagaaccaggaggaggaggaggagttcacggacatgcacacgctgagcccgccagacagacagactgcgtaataccagcccgcgcgcggcagaaaaccgagcgcttgctgcagggcccgcagcacacacacgtcatgaagttggcgagctagacgaatcgcgccacacttggcgccccgctagctctaccaggacgcgcgcttgtattgcggcttccgccgc

SEQ ID NO: 80869 - DNA, 182 bp, Zea mays
  Clone ID: MRT4577_173770C.1
caggaaggacaaaacatgattccacggttccaccatacgtgcgcctgttatgaggagcggaagcaaacccgccctaacttctttttacagaaatcacaattagcgccactgcataggattactggcagatcccactggcatcacaggctcacttaattgcggaccctaggatccacccggaa

SEQ ID NO: 80870 - DNA, 376 bp, Zea mays
  Clone ID: MRT4577_173771C.1
gttctgcataagttcactgaacaataatggaggttcaattctgtttctgtcttgcctaatcccccgtaagatcaatggcttcagatacattaataggacaactggacaagacatacttgcatacggttacaactgagttcgtgtgaggagctggaagattggtacaaggtgtaaatccgatcataatgtcagtctcaatttgatttgctattgttaggctctgttttgttttgagaagccggactgcattgcaactgctttcctcacggcggaagctcatgcagggtgcagcaaaccattttcttttgtattgaaattatttcagaaagtttcttttttatatataattaccagttcgaatgtttagttggaacat

SEQ ID NO: 80871 - DNA, 329 bp, Zea mays
  Clone ID: MRT4577_173772C.1
catcccatggctgtactacatagagcagggctccactcgcatggacgcctagcacatacctgcaactgcaatgcagtggctgctatctatctatcgttcgcttcgctaccattccagtgctgcacttcaccgatggatgaagcatcgagcatgatatcatatacgacgcactcggtcgatttacatgcattcaccaattcatactataccattctgaaggtacgtttgaacttacttcacatgtattgcactatagctagctgcttaactaccggataaagaaccgaaacgtacacgatttctaccataatacaagtactactccattc

SEQ ID NO: 80872 - DNA, 395 bp, Zea mays
  Clone ID: MRT4577_173773C.1
aaaaagggcgagagaaagagagaacaccgagggagagacagggcttccaaggatagccaggatcgtgtcgagagagaagaagagttgccgggaccacggagctcttgcacgggcgactggacttcaccagtcgtgcatcagggaccaccgttggcagcctaccgcgtctagagaagatcgccggaaacacgaagccgatgcgcgcatcgtcggggccttagctgcgcagtccgagttcaatagactggggcggggtcgctgtgccatctcgatcccgcatggcgtcgggttcgaagcaagttcggcagaggaagagggcgaccagaatctgggtaggcagagtccctttcccgtttgctggtagcgagagcgagttctgagcacgggcgcgtctg

SEQ ID NO: 80873 - DNA, 102 bp, Zea mays
  Clone ID: MRT4577_173774C.1
acagatccggggactcttcaccagcctccgaccgccctccgatttcctatccgcttgccaactccgggagccatactttcggaccatctcctgcttctggga

SEQ ID NO: 80874 - DNA, 174 bp, Zea mays
  Clone ID: MRT4577_173775C.1
cctgtgtctattattatattcatatctctacactgcaaatttggggtctcaatttttactgtgcctttgtttttactagtgtctgctgttgcaaaaagaagacattctctgcctgagttttaatttttgtccaaagttaattttaatctatacaattaaaaccttttgcctatc

SEQ ID NO: 80875 - DNA, 2005 bp, Zea mays
  Clone ID: MRT4577_173776C.1
tccggttttctagggtttaaagagcttgccgagcccgccgtgcgccggccggcagctggttcaaatggagacaaataaaagatcatcagataccctcccggggtgtgtcttgggataaggagcttcactactttccgccatcgccggcgccgaccccttcgcctccgcacgcggctgaatcattctccttcgcctcgccggctgagccgaacccctccgagacgggggctgcgccgattctctttcaaacccggggtgcggcagcctaacaagaagcagccgccacaagggcccattcaaaactccacttccctcaccccgcgcagccacagccgcagttcgcggcggcggcgcaacctccgccgccgcaaccttcgccgcagccgcaggagctgatgctgtacgcgaccgctacggcttctgcggcagacagcaccgaatgcgaggagctgcacgccgagtcgcagaaggccttactccagatcgaggacaagggccttgccctaaatcaaggacaagagaagggactacagagacgagtgtgagaggttggatcagtgcagtcgcctttatgactcctcaatctcaaatgccaattttgagcttgatgcgagtcgcattgctcaggaacttggagggaccaccactgtaatggagagagagaaggcttccattcaagagttgatgaatgttgtcaatgaaatgatgtggaacacagaatttggtattaggtcatatctgatgttgaggccaggattcacccgtacatgtgctggagtggccaacgtattttctacaaatccttgaggtggtgctacaccctaacatccagtgttagattgtgactctagagtccacgagcgtccttccatttttatgcagcgcactgtcaacaagtttgagtgctatcttgcggagtgttgcaagtggatcggggagctagagcagctggttcaaatggagacaaataaaagatcatcagattctctagaatctcttccaaaagttatgtcaaatgtgcatgattacttcatctatgttgcttctaaggtggaaaatcttcatcaacatgtcgaatcaatgaaaactgaatatctcaatgaacaacgccgcaccggcaacgggagcgatccatttctggaggcaaacagacgagaagcagctaaacaagaagcagctgccagaagggtccatccaacactgcatctgcctacccccgcgcagcccacggcacagatcgctgcaccagctacaagccaaccgcagcaaccttcctttccgtccgctgcgacttcctcaagcgccttctcaacctttagcactccggcttccgctccatcctcgtctagtctgtttgcaactccaacaactccagctccatcgggcaacctttttggtgcgccaggatcggctcagttgaccacaccatttgggacaccttccactcctacgttagcatcgacgccagctcctggatttgggactagcgctacatctttgggtgggacgtctctattttctacaccgtttggaggtggagctacagcttcaggttccagctttggtggtgcatcgaaaggaaggtcgaagccccggggacgacgctagatagatgtaaatggaccaacgtgaaacgaggatgctcctggttcacttgactgctcccctttccctctatcctatgcaaaatttgtgactacttgtcgccagcaattctagtggagttttaagtgacctattgcatgactactacctttaagcctttgtatcagatataccatcgcattagttgtcataaacttttaatctttgtgccccttcacagtctcttgcctgggtgtcagggtgtgctgtcacaacatagggctgaacaaatctagagttagaacatgccagctggaattccagtttcttctttgaacatgagcgttagcagctcgttccttggtagacaatctcgttctttaatgcacgtatttgatcgtcattcctttgtttagaggtt

SEQ ID NO: 80876 - DNA, 248 bp, Zea mays
  Clone ID: MRT4577_173777C.1
gccactcgtccgatgacccttcaggctgcctgccgggggtcccactatcttcttagggggccacctctcctcaatatctttcacacataaacccctacgtaccacgtgatccagaccacggcctccctctgagacagtgcagatatctcgacacaagagcaagcaccatatgacagactgccgcatcacaaaccaacactgagggcatcaatccagaaatcgaaccacagcctaggtcgcccatatcc

SEQ ID NO: 80877 - DNA, 333 bp, Zea mays
  Clone ID: MRT4577_173778C.1
tttatttttgaaggacttgaatgatgtataatgacgcatcatacacacatgccacagcaattcttaataacacactgatcggtataagttgcgcatgaacagggttaataacactatacatcgattgactcggaccgaaaacaccaattggcgaacaagcagtgacgactagataccgttggaacaagcacatggctgaagagcaattgtaaacaaagcgtactacggggatacacactgcggatgtgtacaatggagaagcactgcatagttgtagtccttgggtcaggctacgaggaacaggatctaacaagcatcattgttttgtacggt

SEQ ID NO: 80878 - DNA, 115 bp, Zea mays
  Clone ID: MRT4577_173779C.1
aagacacaacatttccttttggaacaaggccttttgccaagacagccgtaccgcattctaggggcctttttgggcaccagcggggccccgaaaagtccgggccggctcctgcagg

SEQ ID NO: 80879 - DNA, 306 bp, Zea mays
  Clone ID: MRT4577_17377C.1
atggctgagctaacagatctccggtcacagctgccaagtttcttgtccgatgtgcctgcagatcatgccaaaatcatatggcaaccctataagagacagaagaaacaatactggacaagaggagcattcttctatgtagctgagtcttccctcaaagaacaacacaattattttacttgtgctcttaatcttagtatttataatgaccagggttcaagaaaaatcacaatggtttatgagcagcgacaaatgcaatacaacatgggaaaatgtacctacaagaagatcaatgggacgacgatctag

SEQ ID NO: 80880 - DNA, 212 bp, Zea mays
  Clone ID: MRT4577_173780C.1
atttcaagttcttgtaacatcgaaaatgataagatctcatatgctatcaatcggttctctgcccactctgtgaccgacatgatgactcaattaatcacttgctggtgggctgctcctttcgcacgtttttgctggttcgaattgttcaagtcctttggacagcatggcttcattccaggacaggatatcgacgattatgatctttggctggt

SEQ ID NO: 80881 - DNA, 286 bp, Zea mays
  Clone ID: MRT4577_173781C.1
cacaaaagcaaaaagcatcatcacaataatggcccgcgcgtgtgttttccggggtgggggtcctcctgggcggcgtggcagttgctcctattgcgggggctgcgcttgtggatgtcttggagggcatgtccatggcgttcgccatacgcgcctgatgcggttgatgacgcagcccgctcccggtcccgactccgtctcattcctggactcggcgtgggaggcgcgctccatgtggagcttattcggctagccgtgcacaacgcagaggttgggatgattctattta

SEQ ID NO: 80882 - DNA, 755 bp, Zea mays
  Clone ID: MRT4577_173782C.1
gtgtatagtaaatatatataacctggttgaaatgacacttaaattagcgtgggaaaaaacaaaatttgcttcagagttgagatgacaattggattggtgtgatgtgatgcgatatgatggatcggaattggaatttgggttgggattgcacagtggcggcgctccctgttttcaagtaccaaacttgagaacattggtaacgctaatcaggaactgttacaagcgcataataacaagatttcttcttttccaagcatctcgtcgtcatttgattctcttctcgagacatagatatctgactccgccagccttcttccgatcctgctgagctgagcatatgatgactggaagaaatctctcctctccccccactctcctctcacaccacccccggccgccaccagcatcagattacctaactgccagattttaagctttgaatgaatcatgatgaacactgctccctagctagctactccaagctttataggagtatacttctagcatcctgatgggctagcaactgctacagtagtaataggatgatcctaaagaaacagtgacgaacgcccgcgccggtgcttgtcagtttatgcatcgatcatggaggatgaacgagagaaggaaagaaataaaagctactggtggtaacaatttggtgatgatcgataatccttcttctaataaagcgaaatattgaaggatgcatggccatggcatgcccaaaagcccacgcggccgcggacgcgtgggca

SEQ ID NO: 80883 - DNA, 230 bp, Zea mays
  unsure (1)..(230): unsure at all n locations
  Clone ID: MRT4577_173783C.1
gggatgctttgatcantgagncacgcacgcgtacgtgcagctagtcgttagcctcgaggatttgcactactacgtttgtcctagtcgcagaatgtatcgatgaaggtagacatggctatgccctaagatgagacgcatatctataaagaaaaatgagtagcagcgggattctgaagctgcaccaaatggggatgccttcctgaggtttcccaggccattcaactcttgca

SEQ ID NO: 80884 - DNA, 534 bp, Zea mays
  Clone ID: MRT4577_173784C.1
gccggccgggccggggagactgactctgcatccctctctcgtctctctctcgactggatggggagaggagtacatgaaggagctgcggagaattggaagaatgaggcggaagccatgagcgtgtatgcagaagctcgagatctttgtcttttgggagaccgtacgcgtggccgcctgcctcatcgctggattcggtctctttcttccaggggctgtacggccaatcctggattcatggtagagcgtgcaacgagttcgctccgcctcttctaaatgatgtagcttagcccgtgtcacctgcgaagaaaaagcagggaacttgttttgccttcatcatgccaatgttgccccacattttcgtccccgtgttttttctggcgagcatattgaaacgctgttcccaccagactcggtcttgtagtctaaatggcatccttggaataatgattgtacctgaatcatatactgcactgtggcacttctgaacatgtttcccccctgaatgaaaaaagaaaatggccctagggacgattt

SEQ ID NO: 80885 - DNA, 314 bp, Zea mays
  Clone ID: MRT4577_173785C.1
cggacacgtgggcagcagcacaagcaagaaccacaccttctgccttcgcctgggatcatgggggcttgctacggaggaaagcgcggataccgttccagctgctcatacggcaccggatacaacggctgcggtatgtaccctgacgtggagaccgtcgctaccaacaccagcaagaccaccgtcctcgccgcgccgaccaccaacgccagtgccggcggcttcgatgccgccaccgatggcggccgctgctactgcaacacctgcaagtgcggcaccaactgcaactgctcctgctgcatctgcaactgagctgg

SEQ ID NO: 80886 - DNA, 266 bp, Zea mays
  Clone ID: MRT4577_173786C.1
cctcgaacgcctggcttggggtgtcattctgcctggcggccaggcctccagcttcccctgccccgggcctggggctgtcactggccctgatccgaacacctccaagttccggcttctacatgggacagacggggacgcacaggccaccttccttctggcagggactcttatttattcccaattgctctagggctttcggtttccccttcttccggtaggccgcgtagaggcctgcaccgagtcagtttccgcggtgccccgcggcg

SEQ ID NO: 80887 - DNA, 1111 bp, Zea mays
  Clone ID: MRT4577_173787C.1
cctcgaggccggccgggtactttctcgaaagctccccatttgctccacatgcccacctaatctagtagctgtcctatgcgctgtgtcaaaagcagagccaggtcattctaaatttccatacctactatcacttcaattaacatatcctatcaactccgccgatggaacatttctagaccattactcgtgctgacgctacagatcatattaaagacaaacttaattattatctattcataaaatagaatacttaagcaaatggtcggttcatgttcctcaataattcacaggtccagctcttctaccgttcttgtcctgtcattacaactatacaataccatgactagaccattgcgtatttgacttaataggggtcacatctgtgctcatagaaactatgttaagttatcgctgctttcgtcatacagtaaatgcttgtttgatcatgtggcatttgtgtgcacagatggaaaatcgatcctccatcgctgaataccggtgcccgtcagcaaactgttcaaccagagacgcaaccaatgcaagctactctagcaagcactgaagaccagcagaacaaccagagacgccgtgcaagctactctagcaagcactgaagaccagcagcactagaggacatttcttcctttttgtgtgtgtgtggactgccccaagattggccggaagtccccagttcccccactggccaccgatgcaccgtcggtgccaaccgctgccaaagtaacagaagccgcctccgctcagctcatttctttggactatacagataaagctaccagcagtgcatgtagtcttggacacttccgtcgtctaaaagtccctttgtttcgacgtataaaaacataggtaaaaagtttagttatccgtgcctccgctccccttgctgtagaataccattgttgtttcatgtaaaatagatgagagcagtgacttgcaaaagtcttgcggtttgggagtcggagcattggttgtacacttgtatgaaataatgacgaatccagttttcactccagtttgtatactctctatactttaatacttactctatgtcgatcaaaatgcccattggtgttggtgttcccaattttttaac

SEQ ID NO: 80888 - DNA, 383 bp, Zea mays
  Clone ID: MRT4577_173788C.1
ttgcgtatggggtatacaacagcctagatggaaggctctatgttttggtgacaaactgacagccccagggacatggacttgtccattaacctgttctctgaccactcatttatgcaagactcttatccatacacacattcggatcagctgttcagacacctgaccagatgcatgaactgctggctgcactgtgcgatatctgctgccaaatctgggccgtagttcgcatacaaatgctgatgcacttgccgttctacttgcaattatgtatgccttaatgtgactgttaatgtgactgttaaacatcatatgggacgtcaccctgaatgataccctatgagacatattaggagccaaataaactggcaattggaccggtacta

SEQ ID NO: 80889 - DNA, 472 bp, Zea mays
  Clone ID: MRT4577_173789C.1
actccatagggcgattgggtatctcgaggccggccgggacgtacggtcgtggagcactcggcacgcccgggcgacggcgacacgcaactgctgcctcgccgtctgggcgagggccgagggtgcatgccccgccccgcgcccggccgcgtattatttcccttgggcggcgatccgcgcgcgatctccccccggctggttgtttaatctagccaacagtcaacaggtgatcaccgcgacaggcaaaaggctaaccgcgacaagcggctcgatctccaccattatttattaattagagcatgtacaactttattaatctagagatctcttgaggagtctagagtgagttaagtgcaaaaaaaaaattaaagagatgaactcttcacgaagaataaccgtctctttactacgacattttatacatattatctattaactgtattaataatccaaaaaaaaaaaaaaaaaagcggcc

SEQ ID NO: 80890 - DNA, 402 bp, Zea mays
  unsure (1)..(402): unsure at all n locations
  Clone ID: MRT4577_17378C.1
cggaatttccggggggggcacgcgtgcgtcttgctcggcgccggcacggacgcgtgcacgtccagttgcagcacggcgtgcactgagggctccgccctggccgtgctgcgcagcacgtnnnccccggcccggcggagcgcccccgtcccgccgaccacggcgagctccctcaccggctgcgaggtgtcgtcgcggccggccaccacgagcgtgctcccgttgtagggccccgcggcgagcatgagcgtgacggcgaccacgaacaccgggcggctcatggagcccgtcatgtaggtcccctgcgcgcggccgacgggcgcggagccggcggcgaggcccgccgtcaggaggtcgtccaccgccaccgtgtcgccgaagcagttgcccgggtgcatcggacgg

SEQ ID NO: 80891 - DNA, 353 bp, Zea mays
  Clone ID: MRT4577_173790C.1
caaccggaacacgggttttttttcctaataaaaaacatgacatccaaactggacttttggggcttggtgaaaatccgcttttccgataaaagggggccccatccagaatttagtcctgaattgaattgaatgccccaaaaaaaaagtttgcccacaaaaggcaaaacaaataaacgatttgttagagtttttgggggaaccgaaattttacggaagggtacttagaaaaacccaccgtttttaagggcaatttcccccccccccggaagtgtttaaagggggtcccccccccggccccttcaaggggggtttttttttaaaaacccctgcccttggtaaatggggggctgggc

SEQ ID NO: 80892 - DNA, 543 bp, Zea mays
  Clone ID: MRT4577_173791C.1
cgccaccggtcctccctccgtacggtccccccgcccgcactggctggatccatggaggaccgagccaccagatacatagctcataggcccggactgggctaacaacatggaagagctgcaacactctgcaaccagtgacacccggtgcaatacaaaacatgtctggcaaggcactgaaagaaacggtttgaacacaagaatccaaaagcacaacttgttgcactaactctgtaggaaactggtataaaaaattggggggatatacttaacatgcatgttgcaatagagagatatatttgcatagataatggtgaagatagggaactaaaaagtctgatcctacagttaaagataaggtattggtgctgatagatacatagcaagacgtggttggaggatcacatgcaaacatatccacaatactatgcagcataccatgcagaggtgcgagctggagctgaattcccgaatagacccaataaacctgcacctttgtttaatggcaaactgtcacgcagcatggaatatgcgtagttctgacca

SEQ ID NO: 80893 - DNA, 762 bp, Zea mays
  Clone ID: MRT4577_173792C.1
gtggttcggcaacagcagcacaagaggtacccgagcgagtcgttagaggcgtgcgtgcgtgtgtgtgtgtgtgctagtgctacggcgtacggcgcagcagcagcagcggcagccatgagcaccgggcgcgagagcaccaccagcagcaggtggcccgagctggcgaccctgcgggcgctggcgcgcgacgccgcggagcagctgcagctgccgcgcgtcggcatgtcggcgtcggcgggtgcggcgggcgggagggagccgtcgaagcggcagccggcggggtggcgcggcgggcgagaccgggaggaccacgtccacggccacggcaagacggccaaggtgatgcacctgctgctctggggacccaagtgaaggtgaagtgaggccggccgggcatgtcctcctccgatccagtcctcagtacgttcctcaccgaggtcggtcttcgatctctgccgcgccggtgtttctggcgatcccggccgctggccgcacgtacggattgggattgtacctatactacgactgctgtaccatactagcagtgtacagtattattgtactagtagtaaaactgctgctgcttcttcttcttgcaccactttgctgtttgctcgatcgactgctcgtcgcatcggtcagtttggttttcaactgtaagctctctagctaataagctgtagtgtggtgttacagtactgtgttactgggtgtggttcactggtttggactctggagcagcagattattattaccctctcc

SEQ ID NO: 80894 - DNA, 326 bp, Zea mays
  Clone ID: MRT4577_173793C.1
gccgcggcgttattggggggtcgaccgactcgtgcgcacacgcttgcgggcacgcgtgctatgacgcgtcgggggcagtgtccatgcgtcagactactagattggcgctattagtcttctacgatatccacggatgctaaagcgcgcagtatctatgctactccgccagatgaaacaggatgctgcatggaggcgcccgacgcgccgtcatggtggcgtggacatcccatacgcgaccccgacggagtcgcgctggcagacaccgccatcgtgggctgtgacgaccgctgaggtggaggcggcggaggagaagaggctgaggatca

SEQ ID NO: 80895 - DNA, 178 bp, Zea mays
  unsure (1)..(178): unsure at all n locations
  Clone ID: MRT4577_173794C.1
ccaaatccgagatctagtgcttgattcgttcgttttcgggcatccactcgttcttgtgcttgtctccgccgcactacttctctcccagctgctcaggtctccatcggcctctcgncctttgccggcgacgagccctcccaacaccagatgcagccccataaaggtccctacccttgtc

SEQ ID NO: 80896 - DNA, 238 bp, Zea mays
  Clone ID: MRT4577_173795C.1
attccaaaccatatcacataattacattatctatgcatctggcaaagtttcaaatttttgtttttcccctaaaaaactcctcttttcctcaaatttagcattttatccctccaatactttttatatatactaaacaatttatctcacttcaaccatcacacaaatattctccaataattatttctttctcaacaattcattcacttaattatctctcttccatctacaattaatttcc

SEQ ID NO: 80897 - DNA, 205 bp, Zea mays
  Clone ID: MRT4577_173796C.1
agcgtttgttggataagactcggtaggttgttgttggtgacaacaagaggaaggttatggagcgagggccagttgagttaagacggatcatactctgtgcggggacagctccttccttgctattaccaggactggaaaggacactgatttttaagcagatgaacatatgacttagaggggggggagggagttgaggaaagaccgc

SEQ ID NO: 80898 - DNA, 374 bp, Zea mays
  Clone ID: MRT4577_173797C.1
ttttcgcggacgcgctgggggacggatcacagatcgtcgtggagaggctcaagagctggagcaacagggccgcatcggcgttacgtgtcgagggggcggttatggcacgcgtgcggaacaggagcctgctcagcctgtgcggttactgcgccgccggccatgagcgcctgattgactacgatgacatgccgaacctgagcatacactctcaggtccatgggcagcacgcggccgagtgtaaccttagctcgtagaggaggattaggatcgtcacggactggacatatgggatcgcttacccagaccacagcgtgacgtcgcatattatccacagagacgtgttagctagtctcagagcttctggtccaacactt

SEQ ID NO: 80899 - DNA, 462 bp, Zea mays
  Clone ID: MRT4577_173798C.1
tacgcctgcaggtaccggtccggaattaattcccgggtcgacgagctcactagtcggcggccgcccttttttttttttttttttttttttttttttttttttttttttttttttcaattcaagggacaacctaacggggaacagtttgattacattattccatttgcccatttaactgttacaccgcagtttagtcgagcaatttttgaactacaccataattggaactgtaaaagcaaatcctttgatggcaccataggaaaaactgttcagttttaaagcgctataggattatacatagccaataagtttcggcctaggcaaaaaattggcaaaacgtgccttagtaaacaatagcataccctgattgtctaatcatccagctaaatgatcttcaccacaaaggaatttcgagccgaatttcgagcttacgtacgcgtgcatgcggacgtataatttttt

SEQ ID NO: 80900 - DNA, 735 bp, Zea mays
  unsure (1)..(735): unsure at all n locations
  Clone ID: MRT4577_173799C.1
aattcggcacgaggaacgaggtggttcaagtgagaacagtccaaaaaatccagtgcccactctttcatcatcaaaatttttgactgataagcctgggggcacagatgctgaagcgaagttgaaccctggggtatctgccttgtcaaattcacaacacgtgcaaccaacaaatgttactaccaatttgaaggaccagccctgcaaatcaactggtgggactggtcctgagctgcctactgtaaaagaggagaaaaccagcagttcaagccaatcaccgaataacagccagtcaatatctagtgagccatcgaaggatgcaagaagttcaactgctgcttctggtggtgctagtaaaacttctgaaagttcttcacgaagccatcgaaaggcaaacaatggtcttgtttcagggaacctgaaggaagcttctgtaggaagatctgtctcccttgatcgatcattgctgcaggataagtcatctcaaactggaacagcttctgaaaaaggacctgatatgccacttgatcatggaaataatcatagattgattgttcgctttccaaatcctggtcgtagtcctgctagaagtgcaagntgctggatcgtttgatgacccatctgtaactgggggtagagcttcatctcctatggttgtggataggcatgatcagactgagcgcaaggtgaaagggaagacnntgaaatactcgcctcatttagcatctgatgctacac

SEQ ID NO: 80901 - DNA, 387 bp, Zea mays
  Clone ID: MRT4577_17379C.1
ttagcgttcggtttcaacagacacgcggggtgaccttgaatgggtaccagggaagctgtgcgaacagggacacgccgtgcaggtggatcttggagtggactgtaccccttaacggtgggatccgatgattgcataagcttggcttgaatgatgataacgagcagcgaggatcgctgtgctcgttaagaatgaaactactgtcgttggcgtttctgctggcagagctgacatcgacgattacgaggtctgattaatgccacgacacatcatgatctggtgctgaacttaattactatgatcgcattcaaatgaatacactggagatactgcggcgtttcttatatggtttaaaatgtagccaggaaattgtaaactactttattttag

SEQ ID NO: 80902 - DNA, 341 bp, Zea mays
  Clone ID: MRT4577_1737C.1
gacaagccgtctactggctcatgttcgtctttgtcttgatgcgattgatctctacgacggtcaaggtgacggcgacaacagttcagtcgcggcaggcggcgctcagtacctcccgcaaaagatgctctggattccgagcatgacggagggatgtactgtggccggacaggacagctggtgaagcttgggcgccaacggagccaaatgtcaaaggcaacgtcgcatgagggcacttcggtcgtcgttgactcatccacattcagtcacacccgtccaatcgacatcgtttcatgacagatcgaccagctagttaacatttcccatctcactggcgtgtgtta

SEQ ID NO: 80903 - DNA, 504 bp, Zea mays
  unsure (1)..(504): unsure at all n locations
  Clone ID: MRT4577_173800C.1
naaaaaaaaaaaaaaaaaaaaaaaaaaaaaaaaaaaaaaaaaaaaaaaaaaaaaaaaaaaaaaaaaaaaaaaaaaaaaaaaaaaaaaaaaaaaaaaaaaaaaaaaaaaaaaagggggggccgcttttaaagagaacccaatttaacgaacgccgggcttgccaacgtaaaaactttttttaatangcccccctaaagttgaatgccattgggccggtcttttaacaacggtgggaatggggaaaaaccctggggtaacccaattaaacccccttgaaaaaaatccccttttccccagtgggggaaaaagcaaaaaggcccgccccaatcccctttccaaaaagttgcccaccctgaaggggaaagggaaccccccctgaaccggcccattaaccggggggggggggggggttacccccagggggccccttacttttgccagcgccttaccccccgctcttttcgttttttgcctttcttttctcgccagtttggcgggttttcc

SEQ ID NO: 80904 - DNA, 894 bp, Zea mays
  Clone ID: MRT4577_173801C.1
atgaagacatcctccagctctgcggaggaggcgtcctccagccatgcgggggaaggcaaactgctgctgcctggccagggtgcagcattttgtcctctgtccgggcgactgtgggcggctgcaccgggggtcgcacaacacgtcgtacgccgcgagggcggtactcgtgttctgggacgatcccgttctcgttctcgtggcgagaacgggagtgaggacctgtcggtgcgctttggggcggccgccgctcgccggtgcggtgttggtgggcaggtggttgccgtcgttagtgctgaggtggtggtcaccagaggaggtttctccgccgacggcaccgtcagtgccacctgcgctcctggcctccagctctttggctttaatggctggttctcgtcccccgcgaggggacatgaacgagggccttccagcggtagcgttcgcactagggccatcgctgttgctgtcctaccgtccgagacggaggtgacgagtgaggtatccgtatcccggaggagtaggagtccctctgctcggtcggccttgccgctcaaggcttcccttgctcagtttgagaaccttcggccgctctgcgatgagctggagccggaggctgtggtgtcggcatggacagaggcggagtcggctcaaaaagaggcttcgtcggccaaggagcgggtggcttcccagggcgaggaggtgcagcagcggcggctggagcctggccaggtcatccgtgagtgggaccaaccacagagtcacgctgccgaggccgtgagccgggctgatgtcctcgggggacagctgggggaggctatggagcggctagccgaggtgtccgctcgggctgggaccctagaggagaccctggctgcgatggcccaagcgcggtgctga

SEQ ID NO: 80905 - DNA, 409 bp, Zea mays
  Clone ID: MRT4577_173802C.1
ggggacaagcggaagccttactaaaatatttaaaagtcgaggggagtgcacggcccgaacgccctcgatgaccgtatccctccataccgctatgcagagtatcggaagacggatttgatagggcacaaggccctgggtagggctgtcacaggacttgacggcacgaaagcagacgctgtagagccctgacgcgcaggaaccgcgtggggggcaaaccccaccttaatagggcccgccgatctctatgctgtggcctttatgcagaggggatgtctgcctcaccaccacgtatcccctgctggcagtccttggggggcttatgaacaactgcgcacccgacgctcgcggaggtccggacgatctacttgcccggacgctggccctgccctctggagcctaggccgacatg

SEQ ID NO: 80906 - DNA, 240 bp, Zea mays
  Clone ID: MRT4577_173803C.1
tcaagacctcgagtgactgccatcgccgcgcgctgctttgctcgcgggcccatcttggctggcagaggcggcttggtctcgaccaggcctaaggcagggcccggagggcgcgtaggcagcgggtttgggcatgatgaccgtctggccgggcggaggaggcgcggccacggcggtgctcggctgttggcatggagcggaagatgcgaggagggcgttccttgtgtctatctcattgtttct

SEQ ID NO: 80907 - DNA, 457 bp, Zea mays
  unsure (1)..(457): unsure at all n locations
  Clone ID: MRT4577_173804C.1
gggctcttcctgaggcagccttcaaaggaaagccgccggtgggacctcgacccggcgtgcatccccaagatcctgcggagcgtgtgcgacgcgaggcagttcacgtacgagcagctggaggaagcgacgangagggtcgacggcgagaaggcngtggacaccgccgacgacggcgcggtccacgccggcgtgctcgacgacgggtccctggtggcggtgcagaggatcggctacganacgcaggggaggctgangctggtcctggaccggatggagctcctgtcggagatctcgcacccgagcatcgcgcgcgtcgtgggcttctgcctcgactccagcagcaacgcgctgctgctggtgcacgagcattcgcggggggcacgctggaaggaacaactgcgccangtgaggcaccgcgtcgtctcagctggtaccaccgggtnaacatcnccatgtg

SEQ ID NO: 80908 - DNA, 287 bp, Zea mays
  Clone ID: MRT4577_173805C.1
ttctcctcagcctacggatacgttgcctctgaggctctccggtgtctgcccccgagttgagcgtattaatatgccgccgcatcctgctgagcaccgctgcttcatcgcctgcctcgtctgggtcacgcacgtacgcactacctccacaacgccttcagcacctacggtgaggtcctcgagtccaagatcctcctcgatcgcgagacgcagaggtcccgcggcttcggcttcgtcacctttctccatggaggaggtgatgcggaacgccatcaagggcatgaacggca

SEQ ID NO: 80909 - DNA, 402 bp, Zea mays
  Clone ID: MRT4577_173806C.1
gaatttttctccttctttaactcttggggcgcgtgttattcccctggcgcacaatgatgattctgtagagttgcctttaacttatggtccggaaaaaagaatgttcttcaaggaagcccccaagctataactttgcctgtggcctgagtagtattcctctattttaaagttgttcaggaaattccagggccaaattgttattgccctgggggtggttgttctggccctccaaggaaaatatttcaaaaactgcattaaaccatagaaggaccttcctggggttcctccccaaaacttacctttattacaatctttccgggggcaaaaggttcccatggatgggaatctgcaccaaggggttattaattgctttattaatccgtgattttatattgacaaaaa

SEQ ID NO: 80910 - DNA, 456 bp, Zea mays
  Clone ID: MRT4577_173807C.1
agtggggggaaacctgcaccgaaccaaaagaaaaaaggaagcggcgcaaggcggggggacaagcacaggccccaaaagccggcggaaacaaagcaccaagcaaagggaccccctgggtaaacaaaaaggggggaataaaaaggggtctccaagaaaacaaatgcaagctagggggtgcgacaacacgcatgcaatatccacaaaaaacaacaaagacctggcaacaaccaaaactcaaccaaccaaagggcaagggggaaaacggctaaaccttcaaagaggcaaaaaggaaaaatcgatacccaaggggaccaaaaagaagggccaccaccaaacaactgttagccgtaagggggtgcaaccccaatccccacaccattcacgagggtaaatccagcccagccaatgactaaggcgacccaaggagaggaggccccccaaggccccaccaagggc

SEQ ID NO: 80911 - DNA, 295 bp, Zea mays
  unsure (1)..(295): unsure at all n locations
  Clone ID: MRT4577_173808C.1
ggnaaggagagattttgacatgcncaggtgtatgctgggacgagtctaccgaccctgttggcaagtctgatacctgctggtccacaacatcctttcagaagaaaacgattcattggcaagtggagagaaaagcccttaatgttgatgtaacttgtgtatcatcctaaatgtctgttttaaaagaaactggttacaatatgtaaatgctatgtaaatgatatgcnttgacttgtgcattaaacttcacaaaaattctgcataaaaanaangctcctccgccatgatccaggcggtg

SEQ ID NO: 80912 - DNA, 343 bp, Zea mays
  unsure (1)..(343): unsure at all n locations
  Clone ID: MRT4577_17380C.1
gcggagcgccggggagacaacgaagaggagaagaacaggaggcccagcaagagcccgccaacaagacggcccgcacagcaccgcgccacanccagcagcaaagacgacgcaaccccaaagcccaggaacagaggggggaccacacaaacggacccggcgcaggacacgaacaagaacgcgacgagcccggccgagcagagcgcgaggcagaggaaggggcaggacagcaccaacacaaaggccgcgaacaaccgcagcggcaccgaccagcagcaaccgaaccaccccaagcaccagaaccgcggacaacgaaacgagccggagaccgaggacggccaaggga

SEQ ID NO: 80913 - DNA, 264 bp, Zea mays
  Clone ID: MRT4577_173810C.1
aggacgcgttggctgccactttggcatccttctatgcgctaacaaataggggaagggggtaacataccttttttactcttgtctcaacaagttccagccctattttgaaagctggcaactggatctacactaggtctgcatgatccgtacccacatttgctacctgcgaatcagcaattcgctctcttacaccaagggaggcatgccccggtaggtaaaagtctgcttttaacctactatatgcattgaactcttgctgcttac

SEQ ID NO: 80914 - DNA, 592 bp, Zea mays
  Clone ID: MRT4577_173811C.1
cctcaatcggccgggatgctgggtgtagggacggccgcggcggtgctgctcggggccgtggcgttggtgctcgcggatgccgctgcgaggagagcgcactggtggtacagggaggcggctgaggtggtgctggtcggcggcgtggctttggtggtggtggacgccgcggcgcggagggcgcacgggtggtacagggaggcggcggcgcggctgccgccgggggagatggggtggcccttggtcggcggcatgtgggccttcctccgcgccttcaagtccggcaagcccgacgccttctttgacagtctccctttcctggatacatgctcgatgctcctagtaaacactaaacacctctcaatggatggatgctgtcgttttttgcctttgcccgccctgaatggctgctgcaaagtctggaactgaaacagcttattaaggcagattaagcaagagctcgctcatcaccattaatcagttcggtcgcactcgcacgggcgtgtaccaaggcttcatgttcagcagcctgacggtgctgatgacgacggcggaggcgtgcaagcaggtgctgatggacgaggacgcgttcgtg

SEQ ID NO: 80915 - DNA, 387 bp, Zea mays
  unsure (1)..(387): unsure at all n locations
  Clone ID: MRT4577_173812C.1
acgcggaagacacacagcccggnccccggggcgcgaggcgggcgncgaaacaagaggcaggggggggggcaagacncncacnggaaagacnancacccgcgagggggagnccncngacaccagngacaacaggaagggcaagaaccaggacaaggaaggnanacccccggaccagcaacggcncaggggggggggggaagcannnnaaggacgggcgcacacnnggcgacgacaacagggagaaggagagcacccnncaccgagggnagcgncnaaggggaggaaagaagagcagaaggaagacccggacaggaaagaggnagagacnagagggggagncgngngagagcaacgacaacggcaaggnaaagagnaaggaaaaggagg

SEQ ID NO: 80916 - DNA, 1435 bp, Zea mays
  Clone ID: MRT4577_173813C.1
cgaagcttcatgttcagcagcccgacggtgctggtgacgacggcggaggggtgcaagcaggtgctgatggacgacgacgcgttcgtgacggggtggcccaaggcgacggttgcgctggtcgggccgcggtcgttcgtggcgatgccgcacgacgagcaccggcgcatccgcaagctgacggccgcgcccatcaacggcttcgacgcgctgacggggtacctgcccttcatcgacagcaccgtcacgtcgtcgctgcgcgcgtgggcggaccacggcggcagcgtcgagttcctgacggagctgcggcgcatgacgttcaagatcatcgtgcagatcttcctgggcggcgcggaccaggccaccacgcgcgcgctggagcgcagctacacggagctcaactacggcatgcgcgccatggccatcaacctgcccggcttcgcgtaccgcggggcgctgcgcgcgcgccgccgcctcgtggccgtgctgcagggcgtgctggacgagcgccgcgccgccagggccaagggggtctcgggcggaggagtggacatgatggaccggctgatcgaggcccaggacgagcgcgggcggcgcctggacgacgacgagatcatcgacgtgctcgtcatgtacctcaacgccggccacgagtcgtccggccacatcaccatgtgggccaccgtgttcctgcaggagaacccggacatgttcgcgagagcaaaggcaggttctttctttctttctttgttgtttaattttatcctgaaagctagctgaacaattaagtgccccatgccaccaggcggagcaggaggcgatcatgaggagtatcccgtcgtcgcagcaggggctgacgctcagggacttcaggaagatggagtacctgtcgcaggtgatcgacgagacgctgcggctcgtcaacatctccttcgtctccttccgtcaggccaccagagacgtcttcgtgaacggatacctcatccccaagggctggaaggttcagctctggtaccggagcgtgcacatggacccacatgtgtaccctgaccccaccaagttcgacccgtcgaggtgggagggccactcgccgagagccggcacgttcctggcgttcgggctgggcgccaggctctgccccggcaacgacctcgccaagctggagatttccgtcttcctccaccacttcctcctcggctacaagctggcgaggacgaaccctaggtgccgggtgaggtacctgccgcacccgaggccggtggacaactgcttggccaagatcaccagagtcggtagctagctgctagattgtgatggaagtacgaatgaaaaaaaagcccagcagaaactctagcggctgggccggctggaaattatgggccgggccattgtggttgccccccctgtctgtgcaaaaataaaacaagcagaaaggaat

SEQ ID NO: 80917 - DNA, 619 bp, Zea mays
  Clone ID: MRT4577_173814C.1
gctatgtccatgctttgctctattccacttcttgctagggagcctgctctgggcaggccgagaccaggcgcgcggatgctaggaggttttcaagagcaaggagggggaagtggctactgaactggtgctctctggcaggcatatcctaccgactatactaatgacttccatctctgggggtgactgctttggaccaattcaccggactatcagtcctgacagatgtcatagaccttttattctgaaggtcctaacattgattatttcttcgactggaccattctaaaatacacacagggacatatgaccactgatgccctctggacattgttccaccagtgagacaaagctctgggatggcctactgtggcaaacaacaatctacattcaagcactgaatacgggaggagaagcgaccggtctgacatggcacccagtgctgatgccaggctccaccaccaggtatatatgcatgcaggctattcaagccgaactccaactgttctgcctgagacatcaacatggaaagatgctgtgttctgcagtttgacttttttgggacgttcaagctgatcgtaaagctgcctgctgtatatagttaccgagagctaagcactga

SEQ ID NO: 80918 - DNA, 587 bp, Zea mays
  Clone ID: MRT4577_173815C.1
tttttttttttttttttccgcttctggaaacacaggtctcttttgtttcccttggggggtccgtcacctacaagcctgggcccgctgcaatcatgctctcgtgtcaggggcccgcctggaataatttcctggcaagcttccctaccactcatgtctgtgtgtgtgtatgtatgctccggtagtagcccgatactgtgtggtgtgtgtgagggatgcacgcagtgctgctgtacagcgtggacttggaaagtacgtggtagtcctttacagccagagccaggtactgctacggtctgagctgtaaataggccgagatctaatcccctccgtctcgagctgtcaccatgccgaggcagaggctaatgtggagctaccactaccccagcttttccttcctctatctaacgagcctgtgcttttagagacgtgccggtccttttccctggatgcgcaagctccatgaaagctaggactagatgcaaccccgtaaaaaagaaagacagttgagccctctagaagaatccaatccaaacccccaaaggagggggctaccactaccccagctttttttctcccaaaagggcaat

SEQ ID NO: 80919 - DNA, 215 bp, Zea mays
  Clone ID: MRT4577_173817C.1
tttgctttcgtccttcttcgatatctagccctttgttgctcaaagtttacaaagggattctgtttgttcagttgctaggccgcaggtaactcaattgaacttcatacgcaatttgctgtacatgttctcagatttcaggagtcacagaagtctgtactgtgccgctgcctccgggttcatgcgtttggtttgttaagtgatctgtggaatgttag

SEQ ID NO: 80920 - DNA, 659 bp, Zea mays
  Clone ID: MRT4577_173818C.1
ttgggaccctcgaggccggcacgggaagcaaagcaggcgcacgcgccacgcgcacctctgtctcgtctctcgcccgctctccactcttcctcccaaagcctgccgccgcgtggggggttgcttgcttgctgcccgctcctctccctgctcctgtgtctctgccgcccaccgcttccgggaacaagtccggttgccgccgccgccgctctgtgcgagaggagggagggacggagcgggatgggagggtccgggaagtgggtcaagtcgctgatagggctcaagaagcagcccgagaaggaagactgcaaggacaagctgcagctcccatcagtccacggcggaggattgcgaggcaagggccgcaggtggaagctgtggcggacctcctccggcgaccagggctccatgtggcgcggctccagaggcggcagccagcgctcggcggcgtcggaggcctcggacgacgcgtcctcggtggccgccgtccccgccgacccgttcacggccgccgtcgccaccgtcgcccgcgccccggccagggacttcatggccgtccgccaggagtgggccgccatccgcgtccagaccgcgttccgcgggttcttggctcggcgggcgctccgggcgctcaagggctggtgcggctcccagcgatcgtg

SEQ ID NO: 80921 - DNA, 235 bp, Zea mays
  Clone ID: MRT4577_173819C.1
tctggtttacgggaaggagtctcaggtcactctacagttttagtggatgtttgggacctggccttcctggtcgcttcagtccaggaggtcaaggccccctatcaaggctgtgggtcttcaccactaggagaggagtgtgaccatggtagaccacagagccccggaggctgcagccaaggccatcgtagacagaatcctttgctgtcagagctggaaggggtcttacgttgtgtgg

SEQ ID NO: 80922 - DNA, 156 bp, Zea mays
  Clone ID: MRT4577_17381C.1
tcgatcttaatagatctagatccaaagcggccgctttagccaccaaaatttgaagtctccgggtcttgcacgcttagacagctagcccagtattggcgttcatctatggatactatttacctgcatctagagcaagtttctaatagttctctttat

SEQ ID NO: 80923 - DNA, 1306 bp, Zea mays
  Clone ID: MRT4577_173820C.1
cccggccattccttgcctgcccgccgcgcggactctatataagccttgtgccccatctcatcagcatccatcaccaccatctccgatccatctcttcggctgcctgtgctacccttcccttcacctcacacaggaatactacaggataaagcagctccttcgatacatatatacttttttccagaaaaaaaaggctgagccggtgcgagcgaggcttgaccgcttgagcaatggcgagcgcttttagctcgagggcatgcgcgctggtggcgctgctaatggggctctgcaccgccggcgcggcggcgggcaggatcgacgacgggctggaggtgacgtggggcgacggccgcgggagcgtctcgtccgacggccaggtgctgacgctgtcgctcgaccgcacctccggctccgggttccgctccaaggacacgtacctcttcgcgcgcgccgacgtgcagatcaagctcgtccctgacaactccgccggcacggtcaccaccttctacttcatctcggaggggccgtgggatgtccacgacgaggtcgacctcgagttcctgggcaacgccagcgggcagccgtacacgctgcacaccaacgtgtacgccagcggcaacggcagcagggagcagcagttccacctctggttcgaccccaccgccgacttccacacctactccatccagtggacgcagcagcacatcctcgtgctggtggacgggacgccgatccgggagttcaagaaccacgcggaccggggcgtgccgcacccgtcgtcgcagcggatgcgcctctacggctcgctgtgggacgccgaggactgggccacgcagggcggccgcgtcaagacggactggtcgcgggcccccttcgtggcgcagtaccgcaacttcacggccgcgccgccggccacggcggcggacggccggtacgggcagcagatggacgccgcggcgcagcaggccatgaagtgggcgcgggacaactacatggtctacgactactgcgccgacaccaagcgcttcccgcagggcacgccgcctgagtgctccatggcgtagtaggcgtatagaggtgctgggccgctgaaccacggtgcacttccattgcgatgtcgatcagtgcacactatatacgtcgcacgggtcaattcattgtttataccgatcgatcgattctttggtgtgaaagaatactctagtataatttaattcatttggttggttgcaagagattcgttaaaaattaatcgtgtatgttgcaagagattcgttaaaaattaatcgtgtatgtttatactacc

SEQ ID NO: 80924 - DNA, 547 bp, Zea mays
  unsure (1)..(547): unsure at all n locations
  Clone ID: MRT4577_173821C.1
ttcgggtcttctcccctgcgacaaagacgacgcaagtccctactcctccaacccttgccgactcagatccagcttcctcgcaccgccgtcgccatgccgttcactccaggcccctactctggcgtcagcaccctcgcccttgtggcgagggcgtcggcctttggcgtcggtgtcgtctacgggagcatcaagctctcaatcctcaaggtaacaaaacctaaaaaggaggaagtgcatgatcatcactaaggacgacaaggctgctacattttaattcccacatatggaaggatgttataaattggcagtgcaccccttctccatacgtacaatttcgtttatgatttgtggacctgtctgtaacatacctgctttttttttgtgttgtaataaattcttatacaatgacatgaaatcaggaagtggaaaagcaagtcgttcgacaaatcttgattagttgggctggttgcctgttnaaaaaaaaaaaaaaaaaaaaaaaaaaaaaaaaaaaaaaaaaaaaaggaaaaaaaaaaaaaaaaaggcggcc

SEQ ID NO: 80925 - DNA, 359 bp, Zea mays
  unsure (1)..(359): unsure at all n locations
  Clone ID: MRT4577_173822C.1
tttttggcatgacatangaagatctggttgttattaaacacttcacaacacatgacatcaaataaagaagtgcaaacgaacagttacacaagagattcagagacgcatgtcacgcaacaacgatttgtaactattgttaccatgcgtaggtcctcaaaagttccttacatcagatggacaactcggtcgtggtcgtcatctcctccctcttctggagcgcattggcctccatcttgcagcacttgcacggtgggctcactatcggcaccgtgccgcgtgcatgcgcgatgatgacggagttgacgacctcattgtccgggtggtacacggcaagcacgtcgaacccgccgcgacggatg

SEQ ID NO: 80926 - DNA, 498 bp, Zea mays
  Clone ID: MRT4577_173823C.1
ccggccggggtcttctcccctgcgacaaagacgacgcaagcccttgcttcccggtactccaaaccctcgccgactcagatccagcttcctcgcaccgccgtagctatgccgttcactccaggcccctactctggcgtcagcaccctcgcccttgtggcgagggcgtcggcctttggcgtcggtgtcgtctacgggagcatcaagctctcaatcctcaagttaacaaaacctaaaaaggaggaagtgcatgatcatcactaaggatgacagggctgctacatgttaattcccatatatgcaaggatgttatcaaattggcagtgcaccccttctccatacgtgcaatttcgtttatgatttgtggacctgtctgtaacatacctgcttttttttgtgttgtaataaattcttatacaatgacatgaaatcaggaagtggaaaagcaatagtaataattgcaagtcgttcgacaaaaaaaaaaaaaaaaaaggggcggcc

SEQ ID NO: 80927 - DNA, 542 bp, Zea mays
  Clone ID: MRT4577_173824C.1
gccggccggtccggggaagtcttctcccctgcgacaaagacgacgcaagtccctactcctccaaccctcgccgactcagatccagcttcctcgcaccgccgtcgccatgccgttcactccaggcccctactctggcgtcagcaccctcgcccttgtggcgagggcgtcggcctttggcgtcggtgtcgtctacgggagcatcaagctctcaatcctcaaggtaacaaaacctaaaaaggaggaagtgcatgatcattactaaggacgacaaggctgctacattttaattcccacatatggaaggatgttataaattggcagtgcaccccttctccatacgtacaatacaatttcgtttatgatttgtggacctgtctgtaacatacctgctatttttttttgtgttgtaataaattcttatacaatgacatgaaatcaggaagtggaaaagcaagtcgttcgacaaatcttgactaaaaaaaaaaaaaaaaaagaaaactaaaaaaaaaaaaaaccaaaaaaaaaaaaaaaaagggccccta

SEQ ID NO: 80928 - DNA, 266 bp, Zea mays
  unsure (1)..(266): unsure at all n locations
  Clone ID: MRT4577_173825C.1
tactttcagtttgttccaaacatactaggcggttcttggcaacttcttggcaatgcatgtttgcgcaagggccttggcttagcccttggttttccggcctcttccccgactctcagatgcgggggggagacccctgaagatatgactactgcggncgaaattgtagggatgccggattcacactgggggttccgatgccatctgttattttgcgcaaaggcggcggcgatgagtctgtgatttgttacttttcttttttacaagaa

SEQ ID NO: 80929 - DNA, 364 bp, Zea mays
  unsure (1)..(364): unsure at all n locations
  Clone ID: MRT4577_173826C.1
nnnnnggggtntttttttnnnnnnctttttttttctcnttggtttttttttttttttaaaaaaaaaataaattatactttaaaaccaagagggtagcagcacaaaaaaagccttctacctcataaaaaaatgccccggccgggattggtacttttcctttttggtcgacgctataatcccctttttagagaagcgcctcaagttacccaaggatttattacttacccatcacccaagtatcggcaaattaaaggtgggcccccctacccagacgaacccagtcccttgttttggaagaacaaaaacccctaaaggcttccctaatgcggtttttaaaacgccttccaccaaagggaaccttttc

SEQ ID NO: 80930 - DNA, 257 bp, Zea mays
  Clone ID: MRT4577_173827C.1
agcgtggtcgcggccgaggtactttatctttctttctttctgcatgaaacgatgtatttgaacaacactaatatagtcacaagatcatcatgactaacacaactagcctagcaattcatcaaaccagctaacaaaaataataaatcagctcaccagagctaaatccgacttgaaaccatgaatttgacgacgctgttcggcttgcgcatatcaccgaacacctgctggggcatcgtacctgcccgggcggccgctcg

SEQ ID NO: 80931 - DNA, 246 bp, Zea mays
  Clone ID: MRT4577_173828C.1
gccggtgatgctcatcaagcatcacgcgtacggagctaagcgtgtgcggctagcgatactactgagggagcccgtataagctttcgtacgttcggccctcttcttactacctgtcaccgaaactccacgccgtgtcggtacatatactagcctgcctcgatcggcctccctcgcattccccctcccccaagatcctccactcgattccaaacaaaccaacaaatccaaaaaaaaaaaaaggccggc

SEQ ID NO: 80932 - DNA, 769 bp, Zea mays
  unsure (1)..(769): unsure at all n locations
  Clone ID: MRT4577_173829C.1
ccacgcgtccggatccgaaccctaaccctagccaatttggtcggtgatggaagagcacgtgcctcgaggcggcggcggcgggagcccccgatcccggcggcggcggcgaggaagccggcgctcgcgcggcactcctcttttgtgaggagtcctgcaaacaatacaaagcctgcaactgagagagcttttgaaggcatggacactgaatttatccctattgtacgatctggtgggtgggctgatattggctccaggcacacaatggaggatgtctttatctgctttgataatttcatgcaagattttggaattgaaagttttgaagaaggacccagtgccttttatgggatttttgatgggcatggtggaaagcatgcagctgattttgtgtgcagtaatttaccaaggtttattgtcgaggatgaggattttcctagggagatagtgaaagcaatgtcctctgcattcttgcaggctgatgcttcttttgcagatgcttgttctctgaactgctctctttcttctggtacaactgctcttgcagcacttgtggttggggagatcacttctggtcgcgaatgctggtgactgccgagcagtnactttgtcgtcgtggaaaggcaattgagatgtccagngatcacaaaccatcttgcaacagggagaagatacgtattgaggcattgggtgggatatggtcgatgatggctacctgaatgggcagcttaatgtcgctcgagcatttggggactggcatatggaaggcatg

SEQ ID NO: 80933 - DNA, 280 bp, Zea mays
  Clone ID: MRT4577_17382C.1
aaaggtgaagcgggtatttgatgtaaccaaacacgggtagaactgttccctcaagcagcagggaactgactacaccagcggcgttaatgtatacactttattgatgggctgagtctatatggagacccgtggatccattacaaatgtcactacatcgagaaccactatgctagccctgcggagatggcgcctgccactgccattgtgggtgcaagggagtgtgatcttgcgctcagttatgcacagctgccaccgttgcggatgacatagggggggatgc

SEQ ID NO: 80934 - DNA, 804 bp, Zea mays
  unsure (1)..(804): unsure at all n locations
  Clone ID: MRT4577_173830C.1
ttgggtacctcgaggccggccgggggataagttcgagcgaagatcaagatcactcactcccagttctaaaccctaaacctgacgccgccatggccgccgccgttcgccacatcgtgcgccgccgcctctccacggtcgccgccatcactgcaccggtgcccactgccggactccatcctcaacccgtcctcgtcgagcactcccctcacctcgcgacataagacccgactcgccatctccctcctcaagtcttccccgccgactccccccgaccagatcctctccatttggcgcgccgcgggactggaccccgaaagacacacatcgaccgcgtcgcgctgtcactagacgcatcgaagctctcctccgctccagacaccctccgagacctcggctccatcgatctcaccccgcggcatacatcccacgacatcgtgctcttgggacagggacacctgcactccccgacgccgtctcacagtttccaggcctccccctacacccgctccctcgacgacgtcatcttctgagtgcatcgtgtccggtaaacacacggagatcggcccgcggcttgcagacattgccagacgcacatgtttgtcaagcccaacactgagaccttcaatggcatcatcaaatcatgtcgacgagactggcaccataaggtccatttactgcgggtttcgatgaaaaggagcaaagaagggcttgaaggccaactccatcacatttaccactggcgctcgctgggtttctacnaaggaggagaagttcgatgacatcgagaaggtattagagctcatg

SEQ ID NO: 80935 - DNA, 401 bp, Zea mays
  unsure (1)..(401): unsure at all n locations
  Clone ID: MRT4577_173831C.1
gactacaaaagctggattacattcancttccatctctctcttaaggaatcaatgaccccgcatctaatatgcaaggctactctccttcatctctactggacaacttttaatggttcgccggcttcaccaaacattatttcattatctacatccaccctaacaataacttaactctctccattaatgaaatatccaacccctttatacataccaacactctctaataaacctctctataaaatttttaccccaccttataaatctgtcgcctcatgatgtgggtgcaacccataaaaaactctcgtgtggtttcgaaccgaaaattttcttttttttttcctcaccataggttctttaggcatactcttcatcacccgtgctaataacacattttttcattt

SEQ ID NO: 80936 - DNA, 1832 bp, Zea mays
  Clone ID: MRT4577_173832C.1
ggaggctcctacgtgcaggtagctcccaggaccagatccgaaccctaaccctagccaatttggtcggtgatggaagagcacgtgcctcgaggcggcggcggcgggaggcccccgatcccggcggcggcggcgaggaagccggcgctcgcatggcgcatagagtcgtcttcttcgcagcagacctagatctcgcctccagggagggaccccgtcgaggaggagagatcctaggctgcgtgccgcgagacgattgtgccaaggcgctaggatttgcactgagtactggtaggaagaggggcaagacgcttggagccatgcggtatatgtggatgcacgcaattggttcggagtctggaaaagcaattataattgattgtgatccgggggtgaggagtcctgcaaacaatacaaagcctgcaactgagagagcttttgaaggcatggacactgaatttatccctattgtacgatctggtgggtgggctgatattggctccaggcacacaatggaggatgtctttatctgctttgataatttcatgcaagattttggaattgaaagttttgaagaaggacccagtgccttttatgggatttttgatgggcatggtggaaagcatgcagctgattttgtgtgcagtaatttaccaaggtttattgtcgaggatgaggattttcctagggagatagtgaaagcaatgtcctctgcattcttgcaggctgatgcttcttttgcagatgcttgttctctgaactgctctctttcttctggtacaactgctcttgcagcacttgtggttgggaggtgggagcctttcctatttgtgttctggcccctcaaatttgcacatgcttttcacttaaatcctcagatgctgtcatatttctgtgtctggatgctcaacagatcacttctggtcgcgaatgctggtgactgccgagcagtactttgtcgtcgtggaaaggcaattgagatgtccagggatcacaaaccatcttgcaacagggagaagatacgtattgaggcattgggtggatatgtcgatgatggctacctgaatgggcagcttaatgtcgctcgagcaattggggactggcatatggaaggcatgaaggcatgtggtggtcttggtcctcttactgccgagcctgaggtaatgacaatggatctaactgatgaggacgaattcctgatcatgggctgtgatgggatctgggatgtattcctcagccaaaatgcagtagattttgctcgccgtaagctccaagaacacaatgacccggctgcctgctgtaaagaactagttgatgaggccattaagaggaagagtggtgataacctttctgtggttgtcgtctgcttcaactctaggccgcctcctgttctaacaactcctaggcctcgtgtacagaggagcatatctgcagaaggcctgagagagctgcagagcttccttgatagtttggccgattgacatggggttctagcagccccactataagttttgaccttttccatagcttagcttggaaaataggtttagcatgtgctgtctcataacttcgctgagatggctgctgttgagtaatctagagttgtaaaatatgctgcggctaactgtgtcagcagttgagagcgtttatcagttgagagtatttatcagcatgttgactttgtgagtcctgaatgattagtcggcatttcttaggtctccataaatcggtggttcatcgttgtaaaaggctgttaatgcccttggatattttcctgtattgttcgctttggacaagttattaactgggaaaaaaactgtttttgccccccccccccc

SEQ ID NO: 80937 - DNA, 549 bp, Zea mays
  Clone ID: MRT4577_173833C.1
gccaacccattcacactgacgaatccagcggcggcggatcacaccaacccaactgcaagccctagccatgtcccccgccaccgccgacgaacccagcgtcgcaatggaggagcagcccggaaaggagagcgaggaagccgccgatgcaatggaagagcaactcggaaaggagagcgaggaggcggcagagtccgccgaggcagcgcggcaagtcgaggtggagccagaggagggcgtcgaccccgccgaggcaatggagaaggctggagaggaggcggaggccgaagagggggcgtcgctgcggccggcgctgccggtggggagggtcaagcggatcatgcgggtggaccgggacatcaagaaggtgacgagcgaggcggcgctgctcatcgccgccgccaccgagctcttcctgggcagcctcgcgacaggggcccacgccgcggcggcgcggcgcagccggcgcactgtgcgtgccgtgcacgtccgcgccgcgggccgcgcgcacaggcccacggcggacttcctgcttgactgcctcgctgccga

SEQ ID NO: 80938 - DNA, 660 bp, Zea mays
  unsure (1)..(660): unsure at all n locations
  Clone ID: MRT4577_173834C.1
cattgggtacctcgaggccggccggggccagctcatattcggcggggatctcaggcaagttgttgcccagccagcctatatgagtctctgcgcaccactatcttcgccataccccgtgcaaccgcctcgctgcaaccgccgagatacccggcgactgcagagggccgtacgccgagcgcaacgggaggaacaacgatacactgtcgtctacaggcgagaaggaccaccctccgtgctcggtgtgcgtgctgggtaatccccggagtgccctgnagcgcggatgtcaccgattgtggtggaaagcgggactgggtcgggtggaattcctcgacggagttgtcttcaccgccaagccgcccctcacgccgaccagatccctgcatccccctccaccgacgggcaagtgactgaggactcagaagctcagcaggtggaaactattgagcaggagctcgttgaaggagaagaataggtggtccaggaggaggcctacaatacggagtatgagctaatctaggcggcatctcccagtcaccttgatggtgccaatgaataattatttagttcgttttattgttatcatttatttttgtaagactcttccactatgtaataatgattatgacatttatctccgaaaaaaaaaaaaaaaaagcggcc

SEQ ID NO: 80939 - DNA, 374 bp, Zea mays
  Clone ID: MRT4577_173835C.1
acggcaccgcagaaaaagaaaaagataaggcataggcaaaggaatcccaatcaggcaagcgaaaggatgaaccagttgctgtggaatgcggagatatcgatgcatctgatcaaggagccattccatcgaacgcgtaggtgctcgtcgggctcaagctgtgcgagcgcaagtcgcgcgagttcatggtggagcttgtcctgctcgacctactccttccgctgcccagactggaccaggtgggctacaaccggtcgacggctttcgtgtcactgcgagcaggccgtcgcctgacccacaccttcggatacatcggcaagcaagtgtggtacgacagggaggttacggactttgatgaacctgagctgatgcacagc

SEQ ID NO: 80940 - DNA, 309 bp, Zea mays
  Clone ID: MRT4577_173836C.1
agaataatttcacaaagcgagggatggatttatttggtgacagatagagtaacaccggacattattaagaaaaaaaatgtcacaggtcgaggcggacgttaaaaaaaataacacgctgttccaacaaaccatgtgaaatggagtcgggggggggggggcggaatatatcccgggctgtggacacgtgacctgcgaggaaggggtccacggacgaaagcacgacaacgtggataattgcagtcgcaacaggcatccgtaggacgccggcccccatgtgcacgccgtagactccgtcataagacatgcctt

SEQ ID NO: 80941 - DNA, 731 bp, Zea mays
  Clone ID: MRT4577_173837C.1
ccaaaacgatcgctctcaacatggtgccgaagctagggttgttggcgtggtggtgaaccggcggcgaggtgccgaagacgccggcaacgaggaggggaggaggacgcgctgggcgcaagcacgtcgccgaggacatcggcctcgggctccgacaagcccagctacactgcgacgagaagcaacacaaggcgatgaaggtgaaggagatgctacagcagcagcgcgtcaatgttaggctggttggcgaggatgagcgcacagccgcacagtggaggagactggcaacgcaacatgcgaaggaggagcggctgagctgcggaatcccatcgtcaggggcaacgcccgcacgagtaagctggcactgggcttgtgtcgacttcaaggtatctaaaccttaaaggttgtctgctattgttgtgagtgaagagaagcagagtctagttgctgctaggaaattgagagaaaaccaagggattgaacaaattcctggcaagttggttcaactactgtcggtaagaagggaggaagctccatcttcaagtaaagaaaatattgctcgtatagagccaaatcataagttagagctaatgtcaaatgagattaaattagaaagggtaagagattatttggcagggtctaggagagccttgcgactattaaaagcaaaaagactcgagggctatgttgacggaactatcgttgagcccaaatacaagctgaatgttgaatgg

SEQ ID NO: 80942 - DNA, 1016 bp, Zea mays
  Clone ID: MRT4577_173838C.1
cattgggtacctcgaggccggccggactgctctttaaaaaaaaaatatgttaattcgcgctatactaccctaaatatcatacaaaacatgcgctaatctatattgtacttatcaaaacttatcttgtcatcataattactaactaataatataacatagtaatgatctttaatttatttagaaaacatggatgagctcatcccccagttttgtggtgaccactgtatccagcatctagtagaaatattccctgctgtggatatctatgttcagtcaatccactaaacaaaacgccatctaaccatggatagctatcttccatctatggacatccacctgaccaaacacacccttagcgacccaaatatgtaaattattagttcaggaacttagctgacacagccgagcaaatctgaggactgttgatgtattttaatctatgataacaaaattgtgatgggcaaaatactaatctgcttggtattatgtgcgcgcactcgtgtgttggcactttcctatttgtgtctatttattgagattgatgtcctcttgtacatagttgcacggagttgatgacaacattggcaagagcaagaagatcctggctgcaatgtcaaagaggatggataggaacaagtggatcattgggggaattatcacggctctcgttctggccatccttctcatactctacttcaagctcgctaattaagcctgcctgcaggtaacagcaaaaggtttgaggacgctgaaacaagaaaagaggcgggacgggacgggacggggggctagcgcgtacgttttggtcttgtgcggttgtgccttcagccttgtgttgttgtgaagcaaaagcctggaggtagtaacaagtaaaacctgtcacaacttgtcccctgtgacagcacgggcagcaacttgtgttacatcgatcgatcggatatccctttgtttgacgaaacattcaatgcgtaacgaccgtgatgcgacgcgcaagtgctctggagtctggacagatg

SEQ ID NO: 80943 - DNA, 752 bp, Zea mays
  Clone ID: MRT4577_173839C.1
ggaaaacttaaattcgattccttcaaattaaagacggttgtttggactgctacagatacaatctatagagacaaaaatattgtagttgcagtagaagtcggtacagattaatgtcaagtgaacgggctgcaacactccacagaagacactcggcaaagactctctttgccgagtgccagatatttgacactcggcaaagagaagactttgccgagtgccggctttcggccctcggcaaagactgacggccgtcagctgtagacggctcacggccatgttgagtgagcatggtgctcgaagtttccggtccgctcctgaaatcggtcgtaacttgtgctatgtagcatggatatcatttttgcatgcacggttttccaagtttcaagtgacctgcagttcaaattctcatcactccgcgccgccgctgccctgtccacgccgccgcgcccgacaccgtcgtgctcgtgccctcggcggtcgcgccctcgggcccacgccgccgcgcccctgcccccacaccgccacgcccgacgctgagtgccggccaacgccgccgcgccccagcccaacgccgccgcgcccgacgccgagtgccggccaatgctgccgcgcccctgcactcgcccgtcctcagccccacgccgccgcacccctgcccccacaccgtcggcgtcctcagtcgccgcgccctcggcccccacgcctacgccttcctcggccactgtcctcggcccacactcatccccgctcat

SEQ ID NO: 80944 - DNA, 601 bp, Zea mays
  Clone ID: MRT4577_17383C.1
ctgtagaaaccctacccctctgttactgtatacctgcgtcgacacatcccgtacatacaccgccaccgccaattgcataccaccctgcgccacctgtgctgaaagcgagaagagatggcaagcaaggctaacggtccggctattgggatcgatcacaacaagacgcactctggcgtgggcggctggcaccaccagcgtgtacgacatcaaccccaacgaccaggtaaccgacccacaccctgagaccgatgccttaacccactgcgcgcgcccgatgggacatgcggacaagaaccatggagtgcatgaaccccattgacaccgtttttgatggcaaacgtcctattcgcacgaggtttactgacgcccctgatcagagggatattaagctggggcccttaaaggtcattccaggggccggtgagaaaccaatgatagttggtcagcacaagggggaggagaaacagcttgcagcccaagagatctcctctatggctctcatcaagaagcgtgagatcgctgaagcttaccttggcagcacgatcaagaatgctgatgtcacggtccctgcctatttcaacgactcgcaggggcaggccac

SEQ ID NO: 80945 - DNA, 359 bp, Zea mays
  Clone ID: MRT4577_173840C.1
gtgcttgcacatcttaacatttcttgtcaacatcttgacagatagtcttgaaccatattttggctccacaagtagactagaaatatagatcttgtcagagccaactcaaatagaataaagctttctgttgtttttttaagatcttgtcagagccaactcaaatggagtaaagctttctgttgtttttttgtacatcttaatgagttgattgttagactgttgctaatgttctatgaaatgtttcccccccattaggtttcttgagcttgttctgcaatgtttctactattttcctaatgccataggtcatttctattgtgtaatgtggggtttaccttgttttgatttgcaggttcaca

SEQ ID NO: 80946 - DNA, 159 bp, Zea mays
  Clone ID: MRT4577_173841C.1
atatatgatcaacaagttcaacctaaaagctaagctgatagtgaatgtggcatttcacattctacaaatcccagcaatggtgatccaacaaactttgacttgatgcctgaatcatttgattcagagatagcgcttattgtttgccatgcaaatcacatg

SEQ ID NO: 80947 - DNA, 390 bp, Zea mays
  Clone ID: MRT4577_173842C.1
cggcgggcgggattcaatctccccccactgatgccctcatcctggacggaccaatgccggccatctccaaggttccatgacggaggccatgtccacgtggagtacacgccatcacggcgcccgaccgcccgtcgataatctggagcccacggacgacatgggcgtgaagcgccctagcccctagcccctagctagctggtcagaatgaattcattgccaacgtcgcgtcgcgtcgcgtcgcgtcgcgttaatgtgcagccgtgcaggagggcaaccaccagctacccctctcttactgcttcgaacttcacactcgaacaatactactactactataaatacaggagaatgttttgcccaaaaaaaaaaaaaaaaaaggcccctagggcc

SEQ ID NO: 80948 - DNA, 681 bp, Zea mays
  unsure (1)..(681): unsure at all n locations
  Clone ID: MRT4577_173843C.1
cggacgcgtgggggtttattgtcaaggaaatgcttgggcagggaacttttggtcaagtagtcaagtgctgggacacagaaactaatgactatgttgctgtgaaggtgataaaaaaccagcctgcattttaccatcaagctatcatggaggtttcactattaagaacgttaaatcagaaatttgatcctgatgatcagcataacattgtccgtatgcttgattatttgtcatttcaaaatcatttgtgcatagcttttgagatgcttggtcaaaacctgtatgaactgctcaaaaggaatcacttaagaggtctgaaattgaaatatgttcaagccttctcaaaacagatattggatgccatggttgtgatgagagaagctggaataattcattgtgatctgaagccagaaaatatactactgcgatcgacatgtggtcattcggctgcatagttgctgaactgtttctaggcttgccattgtttcctggagcaacagaatatgatgtgcttcagagaatggtgaaaattctcggaggccaaccaccagatgaactgctaagggaagctaanaacactgtaaggttttttaaacatgttggaagtatatatgctgggcatgcggcacctattggtctttctagtgcatacagaattttaagtgaagaagaggctgaagcgag

SEQ ID NO: 80949 - DNA, 254 bp, Zea mays
  unsure (1)..(254): unsure at all n locations
  Clone ID: MRT4577_173844C.1
gagctcgagaaaaccagaggagcgacgacgcgctgcggagtaccagcggggcgaagccagcggacggcggaaggatcataatcccaaaaagctcgaatttaacacaagatccccgccagcgccgccgcacgaccaccccttcttaaaccccgacgaccaccaaccatggccttcaccgctaaaccctactgctccaccaccgccaaaccgcccaccggggccgcccaccgctcgccgnccggcccgnccccctg

SEQ ID NO: 80950 - DNA, 294 bp, Zea mays
  Clone ID: MRT4577_173845C.1
atggacaggcacggctcggttcggctgcccacccccgaggatgtcttcacggatttccgcgcccgccgtgacggcattctcaaggcactcaccaccggcggcggttcgttgtttcgctctggatttcgctgtgggattcgtagcttacggtttcgtttgcctggatgtttccgcgtggtgcggcagatgtggaggagttctacaagttgtgcgacccagtgcaggggcgaacagtccgccattgcacacccacagatccgccactggtatagtggtagcctggcccgtacctaa

SEQ ID NO: 80951 - DNA, 758 bp, Zea mays
  unsure (1)..(758): unsure at all n locations
  Clone ID: MRT4577_173846C.1
natgtcaaatagaaggtttattgtcaaggaaatgcttgggcagggaacttttggtcaagtagtcaagtgctgggacacagaaactaatgactatgttgctgtgaaggtgataaagaaccagcctgcattttaccatcaagctatcatggaggtttcactattaagaacgttaaatcagaaatttgatcctgatgatcagcataacattgtccgtatgcttgattatttgtcatttcaaaatcatttgtgcatagcttttgagatgcttggtcaaaacctgtatgaactgctcaaaaggaatcacttaagaggtctgaaattgaaatatgttcaagccttctcaaaacagatattggatgccatggttgtgatgagagaagctggaataattcattgtgatctgaagccagaaaatatcctgttagctcccagcgtcgcaacagctgcagcagtgaaagttattgattttggatcagcgtgcctggagggtaaaacagtttactcgtacattcagagccgctattacaggtctccagaggttctccttggctatccatatactactgcgatcgacatgtggtcattcggctgcatagttgctgaactgtttctaggcttgccattgtttcctggagcaacagaatatgatgtgcttcagagaatggtgaaaattctcgggggccaaccaccagatgaactgctaagggaaagctaaaacactgtaaggttttttaaacatgttggaagtatatatgctg

SEQ ID NO: 80952 - DNA, 106 bp, Zea mays
  Clone ID: MRT4577_173847C.1
cggaactctctaatctgagtcgtagtactcgtgcatgctacctcatcactcttccacagtgtcacctatgttcacttcactggctgtctattgccaacctcgctga

SEQ ID NO: 80953 - DNA, 367 bp, Zea mays
  Clone ID: MRT4577_173848C.1
gaattttacagcgtcgcaacagctgcagcagtgaaagttattgattttggatcagcgtgcctggagggtaaaacagtttactcgtacattcagatatactactgcgatcgacatgtggtcattcggctgcatagttgctgaactgtttctaggcttgccattgtttcctggagcaacagaatatgatgtgcttcagagaatggtgaaaattctcgggggccaaccaccagatgaactgctaagggaagctaaaaacactgtaaggttttttaaacatgttggaagtatatatgctggcaatgcggcgcctattggtctttttagtgcatacagaattttaagtgaagaagaggttgaagcgagagat

SEQ ID NO: 80954 - DNA, 398 bp, Zea mays
  Clone ID: MRT4577_173849C.1
ggaaagaccggacgcccgcaagtacccatcccgaatttccctgtccacccaacccttcctttttaacccttcctaaccctccaccccctcgggtttctccttcaatccatgcctgcctccctccttccctccctcgctcgcctctggagaaccctcgccatcctgcccaatcgcaccaccaaacccccaccaaccgccctttttttcgcccctctgcgcgtcaacaccgtcacctgctgcgatggcggtgcaggagcgtaggacaatcgatcttgaggaggaatgggcgttcatgcaaaatggcatcaccaagctgaaaaacatcctctaggtcaagcccgagccgaaatcatttcctaggactacattattctctacacgacaatatacaacatttt

SEQ ID NO: 80955 - DNA, 298 bp, Zea mays
  unsure (1)..(298): unsure at all n locations
  Clone ID: MRT4577_17384C.1
agttctagatcgcgagcagtcgnaagntctgtctagagataggcctagttccagatcgcgactactgatctgtagtggcatcccaggtgaatatannanggacatttcagactatagttttagatgcttgctgagttagncanaagcccccttgggccttgtagaggtggtatggaccctctgctagcttcttgagttctgcctgaagattcccactgcactggttgggaacaagggctgattccatgattgctgggcaggcctatgagctggggtcagaagccaggcaaacttctgg

SEQ ID NO: 80956 - DNA, 2555 bp, Zea mays
  Clone ID: MRT4577_173850C.1
gtccgtatgcttgattatttgtcatttcaaaatcatttgtgcatagcttttgagatgcttggtcaaaacctgtatgaactgctcaaaaggaatcacttaagaggtctgaaattgaaatatgttcaagccttctcaaaacagatattggatgccatggttgtgatgagagaagctggaataattcattgtgatctgaagccagaaaatatcctgttagctcccaggcgagttacccttttgatcattggaattttccatcatagtttttgggttactactttaaagaataccgtagcttgacagcgtaaaaagatgaattttacagcgtcgcaacagctgcagcagtgaaagttattgattttggatcagcgtgcctggagggtaaaacagtttactcgtacattcagagccgcttttacaggtctccagaggttctccttggctatccatatactactgcgatcgacatgtggtcattcggctgcatagttgctgaactgtttctaggcttgccattgtttcctggagcaacagaatatgatgtgcttcagagaatggtgaaaattctcggaggccaaccaccagatgaactgctaagggaagctaaaaacactgtaaggttttttaaacatgttggaagtatatatgctggcaatgcggcacctattggtctttctagtgcatacagaattttaagtgaagaagaggttgaagcgcagagagattccaagaggcaaaagatgggaaagtggtacttcccacacctgaagcttgacagactcatatgtacctatccttggaacaattctgaactggcagagacagagaaaacagatcgtttgggattagttgatttcttgaagggactccttgaatttgatccaaataagcgatggtcaccattgcaggctctacaccatccattcataacaggagaatcgtttactggtccatatgagccaatacccgagactgcaagaattcctgttgctcgtgcagcagcaattgatcacaatcctggaggggggcactggctacattcaggtctttccccgcaggttggaagtgtaaacagatacctacctttgaataatgtctaccctccaaaggttcctttttcttatgggagtagttatggaagctttggtagccatggcagctatactggtaatgctggttttggtaacagctatggaagcattggtgatgctaatgctatcaatatgtattactcacccttaggttcttctggattaacgcaaattggccctagtccagatgttagactaaggatgcgtctctcacatgatagaggaattcgattgagccctggtagtcttgggcctatgtctgttggagccagtccatcacagtttaccccaccgaactaccatatgcaaatcccagctaattctgctgggacacatggttctggttctcctgcaagtggagtcattcatggttctccgttaggaaaagctgcagcagtgggcccatacaacatgaggaggaacttgccaatgccgccacatgattatgtatctcagcatggacacgggcgttgtagagatggtgtcagctttagtcattctgatgcctgtgctcaaggacatacaggccactctcataatgcagcggtacctagttcttatcattctggttggagaccaaaaataggttcaaggagtggtatttccttggaggcctcgtctagtcatgtgctttcttaggctccgtcacaatcatttgacttttcaccttcatcgacacttgatcctgctaattgggaccctaattatagtgatgagtcactattgcaagaagacaattcactgtcagctgatctaagcagcaacctccactttggagatgcaactggccaagaccacatctttgctacatctaaccctgtaccgacaaaccaaagaggagatcaattatttcatgtgtcctctcaaggagtgagtgcccattccagtgttctcatcaactacggtggttacaaccctcaaaattatcctcagcaaaatgcccgtcctcgtcatggacagccaattctccatcagcgatataatcaggcaacttccagtccaatgcggccaatgggaagccatcacaatgggcagcctgcgtggcctagtagttttggcatgggcgatggagtgccctggggaggaacaagagggcactcatttacgacaaggaaggattatgggagcatcttttagggtggagttgtggaccggaggaacgtcattgattcattgcaggcgtaaattatttgtatcagcgaaattggagtgcgatgattctggttgattgttttcgatgttgttactccatccctccacttggtcctttgtgaacacactggatatatacactatatgatcggtgacattagcactcctttgtaaccttttttaggaatcagaagtttgggtgttcccctaattgctgactgcattgtggctgtactgaatactgtaccattgtcaccggtgtaatatgaaggcgtgatgtaggtagactaaaaaaaaaaaaaaaaagtggct

SEQ ID NO: 80957 - DNA, 540 bp, Zea mays
  Clone ID: MRT4577_173851C.1
gactgcaatcctagtgggcagcagagtattaatagagatttgtactcggtaccaagtgtcaaacaccgtgcgggccttgaggctctcttaggagaggcctcggctccggtgcactttgaggaacattcccatcagcattgtttccaaagccagggcgctgcaacatcagaaagaaggctcataaaggcaccaaacctgctcgtttatcatagaaaaaagaagcataataagccgctagttgaaattgctgaggaaacaacggaaaataataccattccagccctgcagatggatggcgtggaccctgtaacagccaagaaagaggtatttcttaaacaaattgtgaaagaaatatctggtattctgccagcaccagcaaatccaactccaaagcccataatctccgagcggtctactgctgtgtcccttcgccgcagccgccgcattgctggaatgcgagcagaaattgcaaagcagatctttctcaagagcaacaagaaagttatgaaggctctcaggtggtgggggaactggaagaga

SEQ ID NO: 80958 - DNA, 393 bp, Zea mays
  Clone ID: MRT4577_173852C.1
ctagcagacttgctggttgatttctgtagcaacagtcaaagcaagttggcggagtgggggcatttgtttctgttgttaaagggcgccagcgtcaggtgcagtgtgctcgtctaacggctgcactcgcggatgagttaataacgttcaagcatcagacaagtttgaagtgtgctgggtatttacaggagctgctactactaagattgagagagcaaagtggtgagagccctgatgccttatagagacaggggcagtgggtggagagctagctgaatggtgggcctagtggtggcacattataacaagtgtaacagttgctggcatggcagccaggtagatattgtagacgctgaaggtggtaccaaggttcgataatacgaggtgccctatttg

SEQ ID NO: 80959 - DNA, 196 bp, Zea mays
  Clone ID: MRT4577_173853C.1
gtcatcggttcgaatccgataaagtacttttctactagattcattcatttcttttttgaaaatgtctccatgtgggtcttttgttggacttgtatgactggttttagggcggtatgcccacatttttggccggaacactaaacggagcacggagttaagtttccaaaggagaattgagatgggccccttttcccgg

SEQ ID NO: 80960 - DNA, 408 bp, Zea mays
  Clone ID: MRT4577_173854C.1
aaaaacaacaacaataaaaaagctaacccagagggaattcgatcgattcatcattgaacaacaggggaattaaaaaaagacgctggggggggcaaccctcctttttggttgccgaactaaggggtccacaacctcggggtccttggacccaaaaaaaaactcctcgcgcaacggggggaaaatggccccgtccacggggttgggcctgcccagggccttgagcgccaggggcccccccttttggccggaaaaataatggggccaaacggggggcccatcctgggggcgccgtaaatttcggggacctccattccggggacaaaaatgccgggaacaacctcgcgcgggaggggcacaaactcgtcctggggggggttaatggggagcgccttcatccccgggacgggg

SEQ ID NO: 80961 - DNA, 278 bp, Zea mays
  Clone ID: MRT4577_173855C.1
cggattcgtgggcccacgcgttcggaaaatggggattatatgatagcttggatataactatgggaaacaaactcataattagaataaggcataatgattgctgaaaacaccgttacttgcttttgatgaaagcgataaattgtgacatggtggtttagtatctaaaacaacatgattgagatctggaccgggaggaaagctgacacaaggtttcaggcccaatttattaatgtacaacaagggccatgcatagcaatttcattattacttttaagcca

SEQ ID NO: 80962 - DNA, 190 bp, Zea mays
  Clone ID: MRT4577_173856C.1
gaattgcagaatcccgcgaaccatcgagtttttgaacgcaagtagcgcccgaagccttctggcggagggcacgtctgcacggacgtcacgccaaaagacactcccaacacccccccgcacggcgagggacgtggcgtctggaccccagcgcagcacgggcacgtgggccgaagcaggggctgcaggcgaa

SEQ ID NO: 80963 - DNA, 106 bp, Zea mays
  unsure (1)..(106): unsure at all n locations
  Clone ID: MRT4577_173857C.1
ccgtccgctccattnattcggaccctcacctcaccttggccacccagccatgggctgtccgtgaacccgccgcggcgcatactcttctggtgccttccttcctccg

SEQ ID NO: 80964 - DNA, 1216 bp, Zea mays
  unsure (1)..(1216): unsure at all n locations
  Clone ID: MRT4577_173858C.1
ctccgcacctgaacattaggtatagtagtggtgtccgcgtgggcggccggtgctgctgcgtcaatggcggctgacctcttcatcgatgactctggggcctttaaattgggcgacactaagcgtgtcataagttctagcctctcggcgccgcagttccctattctaccggtcaccgaaccaagacactgaacggaagaagcttcgaaccccttctggccatctctcgtcctcctttcaattattgagctccgtgccccaatcaggtacctcctcccggattccagtctttaggccggctcgaggtgccgcgcatttcaacgggtctcgcatggggtgcaacggaataagaatggcgtcgccgtcagcgtcaggagagaagaagactacgatcctggtggcgaggaagggccggctgcggcagcgctacgacggcgagtaccgcctggtggccgggtgcgtgccgtaccgcgtggacgcggacggccagacgcagctgctcatggtgtccacgcccaacagggacgacctcgtcttccccaagggcgggtgggaggacgacgaggacgtgcacgaggcggcgtgccgcgaggcgctggaggaggccggcgtcaggggcgccatcaaccgaagtgcgctcgggatgtgggtgttcaggagcaagagcagcccggtgagcagcgacagcccccggggcgcctgcaagggctacatcttcgcgctggaggtggcggaggagctggagcagtggccggagcaggacacccacggcaggcagtgggtctccccggcggacgcgtaccgcctctgccgctacgactggatgcgcgaggcgctgtcggcactgctcgaccgcctcacggaggagcccgagccccccaagtcccccgccgcggagggcctcggcgatcacgcaggcgtgtgcatgatggtcaaggcgaccacagccgctgcggatcgagcggtggcgctctgctagtggcatcattctgaatatgtgcaaatcctcatcatctgggtcgtctggcacggcagttcgttcgaacttggtgtgatgcagtgtatggaaacttgtctcgtcaatccagggcttataaatgatgtcggttacgccacgttttaaatcaaatggctacaactgtccgtagtgcgtagctaaaagtttcctgtcaaatctattaaggtttccactgtnnnnnnnnnnnnnaaaaaaaaaaaa

SEQ ID NO: 80965 - DNA, 486 bp, Zea mays
  unsure (1)..(486): unsure at all n locations
  Clone ID: MRT4577_173859C.1
ggccgcttttttttttttttttttggcgggggggcgggggggtctcttccgttgccctgcggggggttctctttccgggngcntggcctctggcctggtnnccttcngtgctcgggtgtcccgtgtccacttgcccctgccccncgggggtgctggcggtctgcttttcatctttgncggccctcgggggggggcgcgttgtgntccgttggcntctcgggccgccttgccttttgtatgccgtggtacgggctcagggtgtggtagctacgcgtcctgatgcctgtttgaggggatgtcctcaagcctaagaatacctgcaatcaacagctccctgaggagaagacgccggggccacttaatgaccggcctgcagtccatgtgagctgcccgcatgtgaaccctgggctgatccatgcgggtcgaggcaatgcattggagaatgccataagcgggaacgggcggtgaaatatgctgcatgaaaac

SEQ ID NO: 80966 - DNA, 358 bp, Zea mays
  Clone ID: MRT4577_17385C.1
gatgcccttcggactgactaatgcatcaccaggaattcgaagggtgctcggtgcgtgcggaaggcggtcttgtcgatgtctatggggtgcatgctcacctggtggtagccgcatgcggaggtcacttcgaattcctggtgatgccctacggactgactaatgcatcctctactttacaatcactgatgaatgagatcctccactcgtttatccagaaatttgtgttagtcttttttgatgatatactggtatttattagaacatgggcagaacatcttcatgtgaagcaggttttccaggtgctacgcacccacaagctcgtccttaaaagatccaagtgcttcttcggcatggagtc

SEQ ID NO: 80967 - DNA, 373 bp, Zea mays
  Clone ID: MRT4577_173860C.1
tttttctttttttattattcaaataaacatgacgctcatgttggggacattttcattgttttttacgcgacaacaagcacgcccgttggaaaggacaaagctagcaataaaggggacctccaaaaaaacggaggggcctaacagaacttacgactaaagaggtgttgctacaggaaaaagcggtgccttttggaagcccggaccggggcccaaaaggggcattttatttccatggaaacaatggtgcccgcaaacttggtctcctttgatatgaggagcgccttcctcaccctttttgaaagcgctttgaacacccaatcctagggggtaaagctggctaaagccttccccatgagaacagggtatccctttt

SEQ ID NO: 80968 - DNA, 496 bp, Zea mays
  Clone ID: MRT4577_173861C.1
gtgcaaactgcattcaacattagctgcaaccagatacagaatctttcaacatatctttgcttgagtttggctgctgttgactgaattgacatcacaaataggggatgcaaatcctcaacgtatttacacctttcggaggtctaaaaagctacctaagcccgcactcctcgcctaccaaaaaagccatagggagagcacctctcgtcgcaatggggcatggccgtaccatgtcataagaatccatagccaaaggtgtccatacggttcgagacaggtgcagcctccatctccttgtatatcgacgaccacaacatgtgatgacacgaatgtcttggccaccgacacaacggtgctacaagcaccatctgaccaccttggtggggtcaaggataccaccatccattacggcctcgatactgtccagcatgaccattgcaaccatacttgaaggtctcattagaaaggaccttttcagcgacaacactgccattgacac

SEQ ID NO: 80969 - DNA, 469 bp, Zea mays
  unsure (1)..(469): unsure at all n locations
  Clone ID: MRT4577_173862C.1
tgcgttttttanccactatgaacgaaaataacagcagacaatgccgttggcacaacacatcgcaagattaaacgtatgtcatagcaacgccatttatgcattggctccaggcaacagggactaatcgatggcggccgacccatttttcacgcacaaacggttggcgcattaaaaatatttaatatgagatcatttgaatcccaagagcgcgtactttgaacaccaccataaccggcgacgctgctgtcaccgacatgatatgcaccaccgtatcctgaggatccgggatataaagagccgccacctactgagtaggatcgaccaccatatgctgaaccactgtccctatgtcgccggagctcacggtcaccaaatctggcactgatacgttgtgtgcgggttctactcaccttcacctgggtaggctgatcggacggggtatagattaatccacttaggaacctgctgg

SEQ ID NO: 80970 - DNA, 275 bp, Zea mays
  Clone ID: MRT4577_173863C.1
ccttcactgatggtggtcctctcaattatgctgtcaccttctaaaccacagcattgtgaacgaaccagatacttatcaaggaatgtttcaactctttttgatgtaggaggagactatacttcacaatctactactatcggtgcctttgaattcttgggtgtgggggcatccatcttgttgcatcagcacatcatctgcttcacacctagtgtgaaagcatggagagcgtgctcacgggtctggccatccttggagatgccagcctcgaaaccacc

SEQ ID NO: 80971 - DNA, 978 bp, Zea mays
  Clone ID: MRT4577_173864C.1
gaacgaacaggacagcgagagaaagcaaagcgagctgctgcttccttatccggttcttcgccgtgagcgctccacagggaacggaacgggaactgggggatcgggatccttacgttgttgtgtgtattatcgagcaagctaagagccatgggcagcgagtgcaagggctacggcgtcggcgtcgccaccagcccgcagcaggagcaggagcaggctggcgccgccgtcgcaccgttcgtggccaagacgttccacatggtgagcgacccggccacggacgccgtcgtgcgctggggtggcgccagcaacaccttccacgtcctcgacccggccaccttctccgactacctgctgccctcctactcacgcgtccgcaacttcgccagcttcgtccggcagctcaacacctacgggttcaggaaggtggacacggaccggtgggagttcgcgcacgagtcgttcctgcggggccaggcgcgcctgctgccgctggtcgtgcgcaagaggaagaaggcgggcgccggcgccggcgccggcggccgggagctgtgcgaggccggggaggaggtgcgcgggaccatccgggccgtgcagcgcctgcgggagcagcagcgcggggtggaggacgagctgcgggccatggaccgccgcctgcgcgccgccgagagccggccggcccagatgatggcgttcctcgccaagctcgccgacgacccgggcctcgtgctgcgcgccatgctcgccaaggaggaggagctggccctgatcgacaaggggtcggaggcgcagccggccaagaggcggcggatcggggctgaagccgtggacctggcgcacagcaggggcgggggcgccgtgccgtttccgttctctgttctcggccaagtgttctactagggtagatacggactggtgtatatatgacttgcactgtattatagctttgcctcggtttcaaaagttactgccttccgtttt

SEQ ID NO: 80972 - DNA, 2605 bp, Zea mays
  Clone ID: MRT4577_173865C.1
tttttttttttttaattacaagaatacttgatcttttgtttttttttctggaacacgctggaagctgtgtatcattgtcttaaaaagaaaaaggagtagaaccttaccagcacacaccatgcgctactaaacctttgacaaaacatgaaaagtacgtccagcgctgaacaagtaacgatgctacacctttttagcaaggaaagtcactggttaataatacactagacagcataatgcaaatgtcagttacatattcagacccccagaatagctcctaattctaccagacttccacagtggtcgtgccacgtgcatgtgcctgtagaccaaccatctggcatgaacggctgaacctgatcctagtagcctagcgttagatgcataactatggaactccatacatgtttgtcaggaaagcaattagcagcgaagttgttgccaaatacagcgctcaaacaactttcacccatgaacccccacacattgggcaagcatggctccaccgactgatccaccaagcctcacgttcatttgtctgatttggggcaccaggatgcgcaaatgcacaagtttgccgcaaacaacgtatgcacttgtaccaatcaccatcgagacctgttctccacacagccgtgacaacatctcttcgagatcccatgacacctagataacctccaagacctacagatgttttcagaccaaatgcagcatctctttcagataacctacgctttcttggccaaagatcaatcccaatggaactgacagcatccacttccatgtcagacaaatgagagttgatggaaccactaatttttagacgaggcatattgtccaatggaccaaaatcatctggttctgaccagggtccaccaaacatgttgcgtctatgccattcttccgcaggaggttgcagttctaattctcgaagtagaagtccagcagcatcagctcctcgtggacgaggcatattctgcatatggggaccaagagacgcttccactacctcagggagcactgtgtagttgccgtcaatgtagtgcagccttatgataatgctactggaaccaacctgagaggcaggcaatggatgcggcaaggtagatgtccttcgacataggtcaaccagtataagaaaaaggaccttgacctcatctgaagtataaccttgcccagcgttgccagaacctattctaacagatttgccaattggattttcttcaggaccctttgcaccaccaagaacaaattgtccaccacgcgcagagtgaccttcttctactttggcagcccctagaccagatcttactgtcgtactgttatcttctgtcttagcattcatcatgtgttgtattttctgcatggcagaatcttgatttttttgcgaactggcaagtaaccttggtgattgccttcttcggaaaagcagacaaaatagcagtaattgacataatctatgaagaaaatggcaatccccaataagtctcacagcaggtgtgccagggaaagtgcccgtattaatgctgatgggcataaatgatgtcctcgtgctcattggattctgtgttgcagtggcagcaccatcagaattgttactaatcttagcaattgcaccttggacccactcctgcatttgtgagttccctgttgcagatgttgatcccccttgattaccttgattatttgatggcgaaggagaactgtttgttggacttgtaaccatatttctagaagtgcctgtggtagaagatggtcccacatggctcgccagagttcgacagaaactcgcataacgccgcaagcgagttatgaaatgtgatgctaaatcaagaacagcatcaacgtaaccctggatgtttggaagcagagctggctcaacagtcattttgtcagcatcgatgctggataacatatcactggaagcttgccagggctcaggtagcagagttgatggatttgtaagggcagactcgattcctttgcctagcatatccagaagtaatcttgcttgcatgtccaacacaagtgcccgtacatcttgggcatttgttccttccaacaacctacacttaatcctatcaaggttaggacagtgctgctgcctctgttgcatagtcggaagagaatggaagtccgcatccagaaaagctatcacactgttaagtgaaactataccatcttcggcagcactctgtgtacaaccaacagcatcccaccaatcaactccagccaataaactccaccaaaatctatctgctattgcacgttcccatgctgctgagctgatctttgtttgtgtgctaagaattgcaggaggaagcacacgtattatcttcaatatggttcgatctttgagcgtgtcatgccaaactgatgctaagcagcaactgcttgatgaaaaggctggtggagcaatagcagagccaacattgacatggtagctgtcaacctgatcaaaatttggacctgagaaaatgtgcactcctccacggaggaaagcaacagcaacttcaccaccatgagcagaataaactatttgagccagttgtcgaacatctttggaagatcgtaagggtcaaagctgacccggagagccggagggtac

SEQ ID NO: 80973 - DNA, 315 bp, Zea mays
  unsure (1)..(315): unsure at all n locations
  Clone ID: MRT4577_173866C.1
ccacgcgcccgaagtctgacatcaacactggctgcacagccagctgcacaaccaactgngttgntgntattcctaacgtcatcaatgacaaggacggtctggtggaaggtctgaagaccaccgctcatgccctctattgctagcgaggtgaccgnagatggggcctgatctaaggacaaagacgggtggaagggccgtcattcccaacatcattcccagcagcaatggagctgccaaagctgttggcaaactgctcccagagctgaacggaaagtcgaccggaatgccttcccgtgacccaaccggcgatgattc

SEQ ID NO: 80974 - DNA, 252 bp, Zea mays
  Clone ID: MRT4577_173867C.1
ggcgactggcgtgctgcgtgcctgcagggatactccgtctcctccacctccactcctcctccacgatcccgcctcccccacctctcgccggccgacgacgacgacgatccgccggcagcagcccgcgcgccgcagatctcccgttcggttccttggagccgacaagacgagggcagcatgaagcccacggccggcgccacggcaagggcggcgcgtgtatccttctctgccgcggctcaagtgccaggagtg

SEQ ID NO: 80975 - DNA, 260 bp, Zea mays
  Clone ID: MRT4577_173868C.1
ggcacagctatttatagggtttgacaagaggccaaatatagtaatggaggtgccaaatagttatgtgcactttgcactagaagactttgttagacaattactaataaacttgccataggtattacagcagaagtgcttcagtcattcacatgtgttacgtgtaattttaggttgctatagattgtttaagacagcttattttaaatgtagaaaactaggagattttgtaactgcttgccattaacttgctgctaaattcc

SEQ ID NO: 80976 - DNA, 414 bp, Zea mays
  Clone ID: MRT4577_173869C.1
gctaggatcctctacagcggccgcccttcatctataactattccttttttttggtcaacccaagatttctctaggggtcggaagatagcgtaccactctatgcatatactaaatcgcattagagcttcacctaattatcgcgatcgctgactccctagcctaagctctattgtctaacacttacacacaccattcgaggcagtatagacaagattaacacctgcaaaaacctaatgagagagcttactgacactaattgccataatctcactggcccctatatacaacgaaaacacgacaagcccacttcattaatcaactactcaacccccagagaaaacccaaaaagcgcacgcactctactgaggatttactttttatcactgccacaagttccagcagattatgcttcaa

SEQ ID NO: 80977 - DNA, 1584 bp, Zea mays
  Clone ID: MRT4577_17386C.1
gggtcgacgcacgcgtccgaccacgacgtccggttttttgaatattatatcaacaaatattattaacatgggcacctactgctacaaaaaactgtatagttcttttccaccacgctattcacgtttcttgctattaagtgcttacagaaaatactgtggttttcttacctccatacatggtaaggtcatgttaactctaaatacctaaattttttaatttatacatttcgaattaatctttgttgttatttataatacggaatttagttagaatagaaatttcttaatgaagtacatctagcacgaatttgtttctacatttctactaaagcagaaaatagcgactactctacttcgcggcctaagacctcaagatatgttggcaaccatcgaagtacaggtttcaagaaaatgggaattccatgaaaatacagacactgggtctatattacacattgatatggtttaagctgacaaagaggcaaggactcattatcctttttcctaataacgtgactcctgcttagccagttacaatttcaagtatgcttagccagttaccatcacacaccaaacatttatcttaaacatctctactatcactttgtgccaatactattttaccttcaattgcactattctttccatttgtttcttaaagaacgtaagctccacacgctgccaacaaatactcaaaaaatgaatatcaattaataaattaccagaattttattaaactcttcgttatttttgcttttgtttgttacgtatgtttgcaaacctgcttctctgtctatttttctttaaaaatgatttgattacaaaaacagtcccttgccgctattctataatgtcaaagaaaaacgaatcctccgtcacaaaaagtcacggactttgacgttcccatgtaagttttattttctcctgacaaaaaacacttaaatttcctttactatgtaactctctaactctctattggacaatgatgtaggttgttaagtctgttacgttctcagatgtagacaacactattctcgaagacgtttttagctcagcgtggactggccttgataggttgctaaatctattgcatttttagatgatgtctataccatgaacaatttaattgatgcccgcacttggatatgacatgtgatgattttattgactgtacgtcaaactgaaattgcgaacaacttattgtaatacacaactactatattttgtacgatgtttacttttgtcttctgtgcaatgtctgctatgctcctacaataacatcagccgaccactttcgaacataaataagctaaaaaattttatgaatataatccagataaagacttgctcaaaaaaaataaaaaaaaagaaaacaaaaaaaagcaacaagaaaaagaaataattctaagaaaaacaatgataaaacataaaatggctacaaaaatcactgactccctgccaagttacatggcttgataacattttgtcaacgcgaatctgcatgaggatacttcacctagacttacctctgattcagcagacaaaaactggtacactctgcttgactctctttagttcgctaac

SEQ ID NO: 80978 - DNA, 816 bp, Zea mays
  unsure (1)..(816): unsure at all n locations
  Clone ID: MRT4577_173870C.1
attgggacctcgagccggcgggagtctaggctcactatcaccttacaccatggcgtccacccacgacactgttacctctatccccaaggatgccgagtacgatttcgttatcgttggcggcggcacagctggctgtgttattgcttcccgcctcaccgagtacctgcccaacaagaaggtcctcttgattgaggccggacctagcgatttcaaggatgaccgtgttcttcttttgaaagactggttgaaccttcttggtggcgagctcgattacgactatggcacaactgagcagcctaacggcaactcacacattcgccactcccgcgcgaaggttctgggtggctgctcgtcacacaatactctcatctctttccgaccatttgagtacgactgcaagaggtgggaggagcagggctgcgttggctggagcttcaagaccttcatgcgtgtccttgataacctccgcaccaccccacagcccgtccacaagaggcaccgcaaccagtggtgcatcgattgggttgattcctgctccaaggctatggacatccccattatcgaggacttcaaccacgagatcaagactactggtgctnctgaagggatctgttggtttcttcaacgtttcctacaacccagataccggtcaccgatccagtgccagtgttgcttacattcaccccattctgagcggctcagagaagaggtcgaacttgactgttcttaccaacgcctgngttagcaaggtcaacgtcagtggcagcaaggtcactggtgtcaacgcccattccaggacggttctaggcggacact

SEQ ID NO: 80979 - DNA, 801 bp, Zea mays
  Clone ID: MRT4577_173871C.1
ggatcgcgagcggcgcacctttttttttttttttgacagcgccatttttggcgttttagaacctggctctgagtaagtgccatttcagcttcagctcataacgtcagacggtacgcgacgcaacctccccaccaatttcttcttcttcttcttcagtgttaatttattagaatcatcatggtggaatgaacacaagaaagaacgggacggactagcagtaactaaagaagcagcagggattgaatcgatccttcgccttgttcttgtttccgtccgccgggcggtccaggcctatttacaaaaatattacagcagcagcagccgaatagctgatcatccaatccaattcataggtcctttgtgctggcggcgccgctgccttcgtcgacgccgcgcttgccgtagcaatgaaagaagacccagagcagggcggcgttgagcagcgtgttgaagacccatgcgccgatgccgctgcacccgccgccgacggcgccgaagtgcatccacacgacgccgacgtggcaggcgaggttgcagccgaggacgcccccggggccgatgagcgcgccgcgggcggcgcccctggcggggagccccgcgccgacccagaacctgtagccgagcgcgacagcgtgcgtgagcgtggacgcgaagatggccagcacctggaacgactgcgagaactcgagccacaggaacgccatggccacggatgcggcgtgcgcgaacacccgcggggcggcgcttcgtcgtctgcgcagtaccggcagcacgccccgcgccgcgtggaggtagcgggac

SEQ ID NO: 80980 - DNA, 294 bp, Zea mays
  Clone ID: MRT4577_173872C.1
cgctctacatagtattggcctatgccgggagcagactgcgaccaccagcgccgaaccgtctcgaccattcttgcctctctagctatggccctgactgttgcgctcaacgttggcatgttctgtgagggctatgcaggagctgacaagcggatcctcggcaagatggaaggcgtcgagtcctacgacgtagacatgatgcaacagtaagtcaccgtgaaggtcaatgcgacacctgacgccgtcctgcaaactgttttcaagactggcatgaagacttcgttctgggaggctgat

SEQ ID NO: 80981 - DNA, 1772 bp, Zea mays
  Clone ID: MRT4577_173873C.1
cccacgcgtccgcacctatggtggtgcctagtgggcctaaggtgccagccttgctcgcgtttggagattcaatcgtggacacaggaaacaacaactacctggtgaccgttgtgaaggccaacttcccgccgtacggcagggagtaccctaaccacaaggctactggcaggttctccgacggcaagatcaccgtggactttctagcgtctgcgcttgggttgaaggagacgctcccgccatacctgaacaagagcctcaccctggaggacctcaagaccggcgtcagcttcgcgtcggcggggagcggctacaacaacgccacgtgccggacgtcgtcgaccatgacgatcgagcggcagctgcagttgttctccgagtacaaggcgaaggtggggggcatccacgagagggccctcttcgtggtctgctccggcagcaacgacattgtggagcacttcaccctcgccgacggtatgacctcgccggagtacgccgacatgatggcccgcagggccatcggcttggtcgaggcgctgatcggccaaggcgcgcggcagatcgcgctgaccggggcgccgccggtggggtgcgtgccctcgcagcggcgcatcgccggcggggttcggatgcagtgcgccacggaccgcaaccagctggcgctcttgttcaaccggaagctgagcctggaggtggccaagctgtccgggaagtaccgcggcgtcaacatcttctacgtcgacctctactccgtcctcgccgacgtggtccagcgctaccaggctctcgggttcaaggacggcaaggacgcctgctgcggctacgtcggcctggcggtgggcccgctctgcaacatcggcagccgtacctgcccggacccctccaagtacgtgttctgggacagctaccaccccaccgagagggcgtacaagctcatgatggacgacttcctcacaagatacatgagatacatacactagctagctagagctagtcgatccgccatgttaatttgcgctttaattatagcttgttgctagccgctcgctttatattttcttatcatatatacttaggttctttaatttaacgaataagtaagtaatcgaatcgataggcatacaggcgctcgcgcatcatatgaagttctgtatgggttttccccttaatgtactgcttaatttgctcccaataaaattggatggttagggacctaaaaaaaaaaaaaaaaaaaaaaaaaaaaaaaagggcggccgccctttttttttttttttttgcttgacaaaatctcagcatggaacaaacagtatttgctttctacttacagcgttgggtggaaccaaatcatcatacaaatgagccctgtaatttgcgttctcatacgatttggcaggactggcctaaactatgtttttttgtaaagattatgcttatatatttcgttatcaacatgaagccataactctgaacttcacttctagcagtctctgtgtcctgaagaccagcagccacgcacacatcactaggagtcctaagaaaacctcaaatcataaaaaacaaaattcctcgcggtagttagccacttgatctgaaagcacgagtcaatgcgttatacgcttccacgcaccgtctgaatttttcttctgcttcagcctgggaaggcccttgatgtttgtctgggtgccacttgagagcagatgcacgaaaagcagccttaatatgatccagctttaagggacctaaaactggcaatccgagagaaatcctatagcttc

SEQ ID NO: 80982 - DNA, 366 bp, Zea mays
  Clone ID: MRT4577_173874C.1
cgaaatgatgcgagtaaggacaatgagatggttcaagcaacatctaggttagattgggattctatggttctccgtgatgtttgggaggaggaatggggacatgatgtttgagatgcagatgtattctcaacttggacttgctgaagaggacaatgctgaggaaagtagaagagaggaagcctttagaggtgttacaagggattttgaacaatctgagcatgttatgtttttggaagagagccttatagaccaagctttaaataaaaaaacacaaaaaaaaaaaaaataacaaaaaaaaaaataaaaaaatatactaaaaaaaaaagaacataaatacatacaaaaacgatgataaaatcaataaag

SEQ ID NO: 80983 - DNA, 582 bp, Zea mays
  Clone ID: MRT4577_173875C.1
gagtttttatatttctttttttttttttttttttttttttttttttttttttttttttggaaggcccgccggcggccgaaatttcattgaaccgactgtttttagggaggtaaaaaaaaatacccacaaaaaacgtaccaaccaaccataaattatgtttaagcggacccaccgaaccaactgaaaatttctttgggaagggggtgggccagccagtagctgcaactcaataaagactgaaaacagattgtttaacccactttttttttgttgggggcaggcccgccgctgcagggaggggctttttcttgcatgccgccagggccatgtattttttcacccgcggcctgatacattttgggaaggagggggaaagaaaggctatccacttccttttttttggcaacaaactcgcccggctgagcgagttggttggcatccaaccaattgatggccggatggatggcttcctcttttttttttttttgatcggccggtaggacggaaccatttttttcttgcttgatcgaggcacgcaggaggaaggagtatttctccagcgattggttggcccccaccttt

SEQ ID NO: 80984 - DNA, 743 bp, Zea mays
  Clone ID: MRT4577_173876C.1
ccaccccgcagcccgcctccgactcgcacctgcccctatgtcgcggcacgcgcctcctggtgctcgccgttccgacgcgcgtttcgccggaggactttgttcgcttctgcggcccccacctcgagtgtgcagccgacattcgtttcatcagggatgatggagtggaggaccggtacagcgttctagtggagtttgaggaccagagtagcgctgaatggttctacgccgatctcaatggctggaggttctcaacctctgagagtgaggtgtgccatgttctgtttatagctgctgtgcagtatacaccttcctcagaggttgccacaactccaccggctggatccactgaacttccaatgtgtcctgtttgcattgaaagattggatcaggacatcagtgggattttggcaactacttgtgatcactctttccgttgctcatgtgtttcagtgtggaccaattcatcctgtccggtatgccagttttgtcagaagcagtctgaaaattctacatgttctgtttgccaaaccactggaaacctctggatatgtgtgatatgtggttttgttggatgcggacggtatcaagaaggacatgcgaaacagcactggaaagatactcagcattgctattcgctagatttggaaacacaacgtgtttgggactttgttggtgacaggtttgtacatcggctgaatcaatccaagagtgacgcaaagcatgctaagttcaaatcaaaaagt

SEQ ID NO: 80985 - DNA, 513 bp, Zea mays
  Clone ID: MRT4577_173877C.1
gtctggctgcagtgaggggcgagacagccgcatcacgcggaacgccagagagtggttctgctgcctcgaagcagggtccagatctctctcccccggctccggggatggcttcgccttacaccgccggagggaaggcttcttcttccgcaggggccgggctggaatacaggctggaaacgctcgctgggagctggactgcctcgagcatggaactaaagctgatggccatatgcccggtgaccagaccattgcggaaggtgatgatgctttcaacaccttcttcagtgacactggtgaacgagaagcacgtaccccacgctgatctagatgaccttgcacccactgacatcgatgaagtgaggactggcacctaccgccagatcttccatcctgagcatctcatcagtggcaaggaggatgccaacaacaacttcggtcgtggtcaatacaccattggcaaagagattgatgacctgagtcttgaccgcatcaggaagcttgcagataattgca

SEQ ID NO: 80986 - DNA, 651 bp, Zea mays
  Clone ID: MRT4577_173878C.1
cccgcagcccgcctccgactcgcacctgcccgtaattactcttcctcgggttctctcttattgccttccgcgcacttacgccatttgctttctgtctccgtctcgcagctatgtcgcggcacgcgcctcctggtgctcgccgttccgacgcgcgtttcgccggaggactttgttcgcttctgcggcccccacctcgagtgtgcagccgacattcgtttcatcagggatgatggagtggaggaccggtacagcgttctagtggagtttgaggaccagagtagcgctgaatggttctacgccgatctcaatggctggaggttctcaacctctgagagtgaggtgtgccatgttctgtttatagctgctgtgcagtatacaccttcctcagaggttgccacaactccaccggctggatccactgaacttccaatgtgtcctgtttgcattggtgaacttactgttttgtattttttttttgtattttggggcctctgcaatacaatttatagtcatatgtacgtgtcaccatggtgtcacatttgaattcaatttgtgatctccgttgaagagatttaagcacctctgttctatcctggccataggtttaactttaaaaccattctgtttgatgcaacagcaacccttcatcta

SEQ ID NO: 80987 - DNA, 2535 bp, Zea mays
  Clone ID: MRT4577_173879C.1
gtatccagccgggatgttcgtcctgcgaatccagtccgtcgacttccccgacgccgccgtggcagcagtcgccgccgacgaagtcggcaccagcagcggcggcgttaccacctctcgtccgctctccagccaccctcccccctctaccaccacatcgtccatacttactctcgagctccccggcgcaaaccccgtcgcgcccagccgaagccctaggatcctccacacccgcggcgtcatccacctctaccactcgtcgtcctccacttccacctcctcctcctacgcctcggcggtcgcagccacctcttcctcctcatccgggccggccaccccgcagcccgcctccgactcgcacctgcccctatgtcgcggcacgcgcctcctggtgctcgccgttccgacgcgcgtttcgccggaggactttgttcgcttctgcggcccccacctcgagtgtgcagccgacattcgtttcatcagggatgatggagtggaggaccggtacagcgttctagtggagtttgaggaccagagtagcgctgaatggttctacgccgatctcaatggctggaggttctcaacctctgaggtgtctaatcttcttaattgaattccagtttattcactgatcatatttgagatcgttgttggcgattaactctcgtttccatggtgtagagtgaggtgtgccatgttctgtttatagctgctgtgcagtatacaccttcctcagaggttgccacaactccaccggctggatccactgaacttccaatgtgtcctgtttgcattggtgaacttactgtttttttttgtattttggggcctctgcaatacaatttgtagtcatatgtacgtgtcaccatggtgtcacatttgaattcaatttgtgatctccgttgaagagatttaggcacctctgttctatcccggccatagttttaactttaaataccattctgtttgatgcaacagcaacacttcatctattattttcacttttcatattttgttggttgtttaagttgtctgccttgttctaactattttctgccatcttaatatgttaatttgtcagaaagattggatcaggacatcagtgggattttggcaactacttgtgatcactctttccgttgctcatgtgtttcagtgtggaccaattcatcctgtccggtatgccagttttgtcagaagcagtctgaaaattctacatgttctgtttgccaaaccactggaaacctctggatatgtgtgatatgtggttttgttggatgcggacggtatcaagaaggacatgcgaaacagcactggaaagatactcagcattgctattcgctagatttggaaacacaacgtgtttgggactatgttggtgacagttttgtacatcggctgaatcaatccaagagtgacgcaaagcatgctaagttcaaatcaaaaagtaaatattctggggatgaatgtgtaaactgctcgtgcaatgatgactctgatatgggtggagctatgttcagcagcaaagctgaaacaattgtggacgagtacaatcgtctcctggcaagccaacttgaaactcagagagagtattatgagggcctgttgtctgaggctaaaagaaacaaggagcaccagatttctgaagctgctgataaagctgtaagtgataagcttgaagagatgcaacttaagctcgagaatcttattgtggagaaaaagaaagttgcagatatgaacgaaaaactcactaggagccaagacatgtggcgccagacactaagagatatagaggaaagggaaagagcacagttgaagtcgaaggatgaaatgattctcgatctggaagaacagataaaggatttcaaattttccatcaaactgcagaagtcaatagagaagaacgatggtgtcaagggtggtacgctggttccactccctacggtttcagattctggaggcaagggtaaaaggtcatcaagaacaagcaagaggaggaattagtatcctttgctgagtagcaattagtcttgactggaacagacgtatacgaaccttattggcatgtatttactagcctgttatgatgaactacagcgtgatgtttgatttgtcacgaaaattagtacgatcataaactgcttcgaagatttgaacttggatactacatgtggaaaatacaatctaaatcgaagtacagccagttatttcgtaaccacatatagccaaatcttgaagcgtttcctgtcaaacggtagaatacaaacaagattgcacatgaaactttgacagccagttagtcactccatggtttcagaacaagcacataaccatggtttcagaacaagcacatgaaggatgggatcatcagatgtctgagtcgtgcgtcgttcctgccccctccgcgcgggcgcgcgccgctcacctgcacccagtaaatattagggacaatccctgtatggcatcaggaattatattttgtgccactggctctacatgtcatccacgtaataaatatctcctatatgctattcaatg

SEQ ID NO: 80988 - DNA, 1289 bp, Zea mays
  unsure (1)..(1289): unsure at all n locations
  Clone ID: MRT4577_17387C.1
gaaattgtatgagtgacaatatataacagtactcatattgtataatagtcacagttgcaaacaaaaatacttagcatcgtaggcacaatacaacatgtatagcgtggaaccaatcaaataaagatcactacaacaattgaatgaacacataatccaataacataggtcaagaaggtcgtctctaatattgaacttatgagtcgatctgctaactcagtttgccaacttttgcagaggtctgtttgagcctttttgcagggttttctaatgtgttggaggaactttcaggagtattggatggtaaaaaatctttgccatagtgttgtctacatccgagaatgtaacagatttaacaccctacatcattgtccaataaagagttagagagttacatagtaaaggaaatttaagtgttttttttgtcggagaaaaataaagctttacatgggaacgtcagagtcccttgatttttttgtgacggaggattagtttttctttgacattacagaatagcggcaaggaacagttttttgtaatcaaatcatttttgaagaaaaagtagacaaagaatagcggcaaggaacagttttttgtaatcaaatcatttttcaagaaaaagtagacaaagaagcatgctgcaaacatacgtaacaaacgaaagcaaaaataacgaagagtttcataaaatcccgttaaattattaattgatattcattttttgagtatttgttggcagcatgtggagcttacatgttttaagaaacaaatggaaagaatagtgcagttgaaggtaaaatagtattggcacaaagtgatagtagagatgtttaagataaatgtttggtgagtgatggtaactagctaagcatacttgaaaatgtaattggttaagcaggagtcaggttattaggaaaaaatcataatgagtccttgcctctttgtcagctaaaaccatatcaatgtgtaatatgggtttggtgtctgtatttccctagaattctcattttcttgaaacatgtcctttgatggttgccaacatatcttgaggtcttaggctgcgaagtagagtagtgccatttcctgctttagtagaaatgtagaaacaaattcgtgctagatgtacttcaataagaaatttctattctaactaaattccgtattataaataacaacaaagattaattcgaaatgtataaattaaaaaatttaggtatttagagttaacatgaccttaccatgtatggaggtaagaaaaccacagtattttntgtaagcactcnggacgctgg

SEQ ID NO: 80989 - DNA, 239 bp, Zea mays
  Clone ID: MRT4577_173880C.1
gagcggtttcctccttagatgagtgtgcataggcatgcaggtctgtggtaaatcacgagatatagacccattcgcccgtggcggccagctaaagacacgggcagatcgggcagaaccaggggaagtcgaagggcaatacatgagcggcacagcgggcaactggataaacatcatgaaggagagaggatccacgattacaagctagggaagaggcaaatctcttgggtgcggaaggagac

SEQ ID NO: 80990 - DNA, 617 bp, Zea mays
  Clone ID: MRT4577_173881C.1
aaaaaaaaaaaaaaaaataaaaaaaaaaaaaaaaaaaaaaaaaaaaaaaaaaaaaaaaaaaaaaaaaaaaaaaaaaaaaaaaaaaaaaaaaaaaaaaaaaaaaaggggggggcctttttaaaaaatcaaattttacttccccgtccttgcaacgtaaaattttttttttagggcccctaaatttaatttaattgcccgccttttaaaaacgtcggaatgggaaaaaccttgggttacccaaattaaatccctttgaaaaaaatccccttttcccaagttgggaaaaaacaaaaaaggcccgacccaatggcctttccaaaaatttgcccaccttaaagggaaaagggaacccccctttaaccggccattaaaccccgggggggggggggtttacccccaggggaacctttaattttgcaagccccttagcccccgttcttttcgtttttttcctttcttttttccccattttcccgggttttccccgaaaagttttaaatggggggttcctttaagggttccaattaagggtttaacggcccttaaccccaaaaaaatttgtttaggggaagggttcacttaggggccaatccccttaaaaaacggtttttcccctt

SEQ ID NO: 80991 - DNA, 1265 bp, Zea mays
  Clone ID: MRT4577_173882C.1
ttaaccggctcctggtgcagcggacccgcgctgtaccgcgagcgaagacgaccccgaccgggcgcgcgggcccggccagatgcggcgggcggtgcggagcgtcgccaagcacttcccgacggcgatcgtgagcgggcggtgccgcgacaaggtgttcgaattcgtgaagctggcagagctgtactacgccggcagccacggcatggacatcaagggccccgccaaagggtcccggcacaccaaggccaaaggaggcggcgttctctttcagccggccagccagttcctgcccatgatagagcaggtgcacgattctctggtggaaaagaccaagtgcatacctggagccaaggtggagaacaacaagttctgtgtgtctgtccacttcagatgcgtcgatgagaagagctggatcacgttggcggatatggtgaagtcggtgctcaaggactacccgaagctgaagctgacgcagggcaggatggtgttcgaggtccgccccaccatcaagtgggacaagggcaaggccctggagttcctcctcgagtccctcgggtacgccgactgcaccgacgtgctgcccgtgtacatcggcgacgaccgcaccgacgaggacgccttcaaggtgctccgcaagcgcgggcagggcgtgggcatcctcgtgtccaagcaccccaaggacacctgcgcctcctactcgctgcaggagcccgccgaggtgatggagttcctgctgcggcttgtcgagtgggagcgcctctccaaggcccgccccaagtggtgatccaatccacgacgacagatgacgatcgagctgggattaattatacactatatatgctcaatatataagttagttatactaagggtgatggattaattagagggatcgggggagccgggagcgagggagtaattaagaccgtacgcacccactccctacttgagctgagctgagctgagctgagacgagagctcgctgcgctgtgcacggcacagtcatgtgcgtccagtccacggcgcctccctatgtttttacgggagccatgtggcggctgctgcgcggcaagggtgaagaatgtacgtgcggctagctgtaacactccagtaattacttcctactctactccagccatgaaccttggctctggatcctgaattctgattgtgtacaagtacaagagagcaactgctgtcgatgcctatgtatgaaatcatctctataaattaagtagccagctttcctctgtacaaaaaaaaaaaaa

SEQ ID NO: 80992 - DNA, 608 bp, Zea mays
  Clone ID: MRT4577_173883C.1
cccctccctcgagtttttttttttttttttttttttttttttttttttttgttttttttttttttttttttttttttttttttttttttttttttttttttttttttttttaaaaatttaacacccccggaaacccggggggaaaaaaaaaggaaaaaatttgggcccccgggtttaaattcccccggcggttgccccgggggggccccaaagaattaaatattttgttttttaaaaaaacaaaaaaaagggttggggcccggggggttttttttttttgaaaaaggggtaggggcgtcttcccccctgaaaaattcctcccacttgggtggcccgggaaattaaaccccacccccccaaaaggaacctttaaccaaacttttttttgggcccctcggaagggaaaaaaaggttccactttttttcttccccaatcccttttttgaaaaattgtccaaggcctccccaaggggttggaattccgaaaccccttttaaaacccggccctttttttttcccggttaacccctgccttagaaacaggggggggaaaccaccgccccagggatctgggtattaaggacaccgggtttttttttcccccccct

SEQ ID NO: 80993 - DNA, 208 bp, Zea mays
  Clone ID: MRT4577_173884C.1
gcgctcaaggactgaccgaatatgctagtcccggttcgactccggcagccgttggtctcatgcgcgatgcttcccaccgcggccttggcgatgctcggcgccgtcctgactgcccaggaaatcagatgccatcagtggcaccaataagagagcttaccccaccctaaacggggatggggtgtataggcacattttgttgcggaacaaa

SEQ ID NO: 80994 - DNA, 873 bp, Zea mays
  Clone ID: MRT4577_173885C.1
atgtctggagatcacgccaagagggagatcgtgaccggtgaaaaccccgcgggcttggggaagactctctcaagagagtccgacaacaagtacaaggaggaatcatcttcctccatcaagtcacataggaggggtgacaagaagaagaagacgatgaagaaagtggtctactacgagaccgactcttcatcaccctccacgttcggcaccgagtctgataaaatgaggcagcatctaacctcactccacgaaagtatttgggatattgttgagtttgaagcgcagacacctcaagtgggggacgagaactacgactcagacgaggccgcccaaattaggcacttcaactcccaagaaacttctatactcctcgcctccttgtgtcgagaggagtataataaggtgcaagggttgaagaacgccaaagaaatttgggacgtcctcaaaacgactgttgggggccttcttcttcgccgaaggtcctctaagcaaaaacaccttcggcaagataacaagcaagcgggggacgaggtggccaagatcaccaagcgcgagacgatcgagggagagctcggtcgattcgtcctcaacaaagaggaagagccacaagctatgtacaactggctcaagacaatggtgaaccaagtgcgcaaccttgggagaaccaagtgggatgaccatgagacggtcaaggttattcttagatcacttgtttttcgtaatcccactcaagtgcaactaatccgaggagaccctagatataaacagatgtctcctgaggaagtggttggcaagtttgtgagctttgaacttatgatcaaagactccaaacacattgtcaacttggagcaaggtgccacctctacacccaag

SEQ ID NO: 80995 - DNA, 543 bp, Zea mays
  unsure (1)..(543): unsure at all n locations
  Clone ID: MRT4577_173886C.1
agccgccgcgggatcttagccggctcgccgcatcgcggcgagcattgccgaggcgaaggcgcggacggacttgacggcgtggcgcagcgcggtgtggaagtgggtggcgttgaggccggagaggtggaggccgtcgagggccgccagggtgcggcccgggcgggcgcgctcctctaggccccgctcggcgcggagctcgtcggccagcgcggcgcgtgcgcgctcggcctcggcgtcccgcgcacggagctcggcctccagcttgcgcgacgtgatctcgtaggtccggagcaggtggcgctgctcgtcggcgtgcgccgcgagggcgccggcgctccgtgccgcggcggccgggtccctcgagtaccgccgcttgagatttgacagcttggtgagctccgccaccaggccggcgtccgcggcctggatggcctcggcgtcgtaggggtgctgcgccagctgcagctgcgcgtacgccgncttcaccgcggacgccctcgcgaatagggtcgccacgaacgcgtgcttcgcggcgtgctgcgc

SEQ ID NO: 80996 - DNA, 169 bp, Zea mays
  Clone ID: MRT4577_173887C.1
acgcggaagggagcttcgaggcggtccgccacttctcgttgatcgggcgggctgagccaatgtgacaggcctctatggcgcgaacgcactatacatcttcctggctggctgcaagcagactcccgctcttctaagctccattggtactctaaatcattaattcctcata

SEQ ID NO: 80997 - DNA, 323 bp, Zea mays
  Clone ID: MRT4577_173888C.1
cgacggcgtctggtacccggacgagtctctgctacggcggatccgggcggcgttctgctacaccgagcccggcctgaggggggcgtaccggaactacaagcgggacctggtttagtggaccaagcggggcaacagacttcacaccatactcgtgattttgggcgggacaataacgcttataacattgactgggcttctgacctttatgttcttcctattgggtgccactggtaatgcgaacatttgctcaagcttgatgtcactggcctctgaccgaggaatcttggacattttctttgcttgcttgggtggagaggatattg

SEQ ID NO: 80998 - DNA, 356 bp, Zea mays
  Clone ID: MRT4577_173889C.1
tccggcactcgagccagccagccagccagtaagccgcttgggcgccatctctctagagcttcgtaccctcgaagagagatccggcgcggcccaataaacacccggcttactacagactcgcagatggccggcctcaggatgaagttcgtcgccgccttcggctacctcttccgctagatccgcgctggatacgtggttcctgctccaaaatatgattcgtctggtctggcgcgcgtgagtccagctcgtgcgcgtggtgggtggtacgtgcttcgacgcgccactgtttgtcgcggcgatcatgtaccctgctgcgttttctggttatcaatgagatgatttatttgattctttac

SEQ ID NO: 80999 - DNA, 1909 bp, Zea mays
  Clone ID: MRT4577_17388C.1
taaaaaaacacaaggccgcttttttttttaaaaaaaaactaaacccatgcgattttacgtgggtcacattcattcacattgctagttcaacatatacatggctgatggctgtgaatgaaataacatttgaaccccgcgcgcttacactgcggcggctacactccaggaagaaagtgagtttcaagcaataaagcaagcaactgcttgagacgcaagatgactgctttactaaagaaaaaaagcttacttatgtatcaaggcatagcatggcgctcacagtcccttgaggacgccaagcatagcatggcgcggcttgcagatggcctccagagggacagccctcgggagcgtgattccgcccccttcggccatatcgacctcggcgccgccgaccgtgtcccagtcgaagcactggatcaacgtccccaggaccagccccagcgtccgcagcgcgagggcctctccggggcatttccgccttcccatcccgaacggcatcacgaacagcccgtcggcacggccgtcctcgaaccgctccggcctgaacgcggctgggtccgcccatatcgcggggtccctgtggatggcgtacacgttgacgaggagcatcgtcccgctcggcacacggtggccgccgaccgtgcagtcggcggtggactcgtgcgggaccagcgtcggcacgaccgggtacagccgcagggtctcgctgatgatgcagtggaggtagccgaggcgcggcaggtcgtcggcgccgagcagccgggagtgccccacggacgcgtcaatctccgcctgcgctttcttcagaacatcggggtggcttagcagcagcgacatcgcccattccgccgtcgtcgccgttgtttcagaacccccagcgaacatgctcgagcacagagccatgatcatggtatccgtgtacacctccggttctgacttctgcagtgagagcagaacaccaatcatgctcttcttatcgttgttctcgccgccttcctccagcctccgccgctccgcgtcgatgagccgccgtaggaacgcgtcccttgcgctcaccgcgcgcaggatcttgttcctcacgccgaacacgtcgagccaccgtagcaccggcaggtagtcccacgcgttggccccgctgagaagcggaaggaacacgtccagcgccttcatgaattcctgggcctccggagacatgtccgtgtcgtcgtccgccacggcacgggacgtcttggttcgcgcgatggtctccatcagggcgctgtgggagagctcgaacagcctccgcttcagctcgaccctcgcggcgccggcgggggcggcggcggcggattggtacatcctccgcgccattgcgcgcacctcggcggatatgacggggagcatgcagctgacgcggtgcgcggacaggagctgcaccgtggcgacgcggcggaggttgcgccagtacgggccgtagcggcacattgggagcgtggcgccgccgaaggaaaccagcaggagcgtggggaaccgcgggcggttcgcgaagcagacgtcattctcggtgaagcactccgtggcgcaagccgcggacgacaccaccacggcttgccgcgagccgagccggaggaagaacaccggcccgtagcgctccgcgaggcgagcgagcgccgcgtggataggcttccgtaagaggtggaggtgacccaagaccgggatggcgggagggctcggtggcagctgcgttctcttgttcttgccgttggtcctgcggcggtggcggccgaggagatggtggagcaagaagaggaagaggaaggagagggtgacgacataggccggctccatggattcccggtgttgggagtaacgactaacgagtgggctttctcagttctccggcccggccggcctcgatgatagccaatgt

SEQ ID NO: 81000 - DNA, 490 bp, Zea mays
  Clone ID: MRT4577_173890C.1
cccccccccttttttttttttttttttttttttctttttttttgacaagaatcaaataaatcatctcattgataaccagaaaacgcagcagggtagtacatgatcgccgcgacaaacagtggcgcgtcgaagcacgtaccaccaccaccactcgcacacctccgccgccgccgcggccgactgtccatacatacacacgcccgacgacacctcacacagagacacgcacgacacacgagctggactcacgcgcgccagaccagacgaatcatattttggagcaggccccccccccccgcgcggatctagcagaagaggtagccgaaggcgccggcgggcgtgtgtatgtatggagtcggccgcggcggcggcggcggaggaggtgtgcgcgtggtgggtggtacgtgcttcgacgcgccactgtttgtcgcggcgatcatgtactaccctgctgcgtattctggtttcaaataaatcatatcattgccgg

SEQ ID NO: 81001 - DNA, 215 bp, Zea mays
  Clone ID: MRT4577_173891C.1
tgggttgtggaatataaagctgggggggacaaatgaataccttgcttccgctgaaatgctccatccccgcttaggtccaatttccctagcattacacgcacagctatttctactaccttaatacacccactgttctggcacatgcacgggatgtctcgaaatacagtatatgcggcaacacactactttgtgcgccggtcaacctacaaatttct

SEQ ID NO: 81002 - DNA, 824 bp, Zea mays
  Clone ID: MRT4577_173892C.1
cgggtccgcctagttttaagaattcgcgaacggcccgcccctttttttttttttttttttttttttttttttttttttttttttttttttttttttttttggttttttttttttttttttttttagaatcaaataaatcatctcattgataaccagaaaacgcagcagggtagtacatgatcgccgcgacaaacagtggcgcgtcgaagcacgtaccaccaccaccacgcgcacacctcctccgccgccgcggccgactccatacatacacacgcccgccgacacctcacacagagacacacacacgacacgagctggactcacgcacgccagaccagacgaatcatattttggagcaggaaccacgtatccagcgcggatctagcagaagaggtagccgaaggcggcggcggcgagggaggccgcggcgaggggtacggcggccacggcgtcggacgcgggagccggggcgggggcctcggcggctgcggcggacgccacgagcgcggcggccatggcggcgacggcgacgaacttcatcctgaggccggccatctgcgagtctgtagtaagccgggtgtttattgggccgcgccggatctctcttcgagggtacgaagctctagagagatggcgcccaagcggcttgctggctggctggctggctcgagtggggaggtaagtcaatttataatccttaacaccagctttaaatccaacacttgctttagtttctgtttgtggtgacataagtccctccctacaactcatgaattaagaattctcacaacgacagggtctactcgatacccggcccggccggc

SEQ ID NO: 81003 - DNA, 1949 bp, Zea mays
  unsure (1)..(1949): unsure at all n locations
  Clone ID: MRT4577_173893C.1
ccggccgggatggatagacagaccatccgcggcgccgaggcaggggcccggcaagcgtgagcgatcccggcgctttccccaaaaaatccttcgcttttcgggaaagaaccccagcgccgagaggaagaggagggatctcgtcgacacgccgtcgggaacgcgtcccccgttccctcgccgctgccccgacacggtgccgttctcgcccgaatcggcgaatccctcccaccgcttcgcctataaatctccccctctgtggccctgatcctcccgtacaacagtgcccagtgcccaccgcggcagatcttcgacgcctccgagggcgatggaggaggacggcggctccggcagcgatagcatggagttcgtcgcgggagcggagactagcgctggcgcaggcacaaacgccggcaggaaccgcggcgtgggtgcagggaccagcgtaggcggtggcggcggcacgaagctgccgcatgtgctgcaaaagagtttcggcgaggtgcaagggattctggagcacaaccgcgtcctgattcaggagatcagccagaaccaggagacgcgcgacgcggacggtctcagccgcaacgtggcgctaatccgggagctcaacactaatatcgcccgcgtcgtggacctctacggcgacatgtcagggtccttcgcccgcgccgtcgccgccaagaaagacgccgcaggcgacaagtcgggccctaagaggccccgctccgccggcgctggagggcagcagcagtagagccggcgtcttatccagttaatccatcagaggaggctccgtcgtgattgacggcgggggtcaggaaacttcggggttggggtgggtgcactgcattggaaacctcctctctcttttttttctccgtccggcgaaaggtgacttgaatgatttactgctggattaactagtttggtgttgagaattgagatggacatggcgtggacaccttcttgttgtcagtcggtgttgattgctgaatcacagatgcagctaaaaaaaactgattcaggttnnnnnnnaccatcattgttggcgccagcatcactgtcgtaatagggtagctcgtgccgaattcggcacgagttttgaatcaaataaatcatctcattgataaccagaaaacgcagcagggtagtacatgatcgccgcgacaaacagtggcgcgtcgaagcacgtaccacccaccacgcgcacacctcctccgccgccgccgccgcggccgactccatacatacacacacgcccgccgacacctcacacagagacacacacgacacacgagctggactcacgcgcgccagaccagacgaatcatattttggagcaggaaccacgtatccagcgcggatctagcagaagaggtagccgaaggcggcggcggcgagggaggccgcggcgaggggtacggcggccgcggcgtcggacgcgggagccggggcgggagcctcggcggctgcggcggacgccacgagcgcggcggccatggcggcgacggcgacgaacttcatcctgaggccggccatctgcgagtctgtagtaagccgggtgtttattgggccgcgccggatctctcttcgagggtacgaagctctagagagatggcgcccaagcggctggctggctggctggctggctgtggagacaggatcgagcccgccagcgtgacgcccggctttgtcctggcctcgtcttgggcaagtcctaggcggaggagggcgcacacgggtcgcgctcgcgctccatggcggaatccgcggagcagggcagggcgaacggaaggcaaaagagaacaaaccggcctcgtcaggaacccggtggcattgacgccttgctgccgctattttgtactaaatgctgctttcggcgggtggcggcactggagatcctgctgctgtgatgggcgaaaaaaaaaaaaaaaaaatttgcggcc

SEQ ID NO: 81004 - DNA, 275 bp, Zea mays
  Clone ID: MRT4577_173894C.1
aagggggaagtccaaaccccccctttatttttttggggtgcttttcttttaaacaattggtggggtgaacgggttaggtttgtcccaaattgccctttttttggggacgggcttgagtttttttaaattttttttgaaattggggaattatccggtgcttttaaaaaggggccaattttaatttttttctttactttatggccctttagtttatctttggtaattttaaagggaaaattttacacgtttttttttatttttttttttttagttta

SEQ ID NO: 81005 - DNA, 266 bp, Zea mays
  unsure (1)..(266): unsure at all n locations
  Clone ID: MRT4577_173895C.1
ccgtcacgagggcggagttgcggagaatatgcagagcagcagcatgaagagggagatcagcgaggcccacgacaccattcgcttcggcatcaacgccggcgtcaaagccgacctcgccccgcctttttttttccaggggggcatccaaccggagaccaagnnctgggcggacaagaagaagaccgggacagaagccagagaaggaaccaccctcaacaaccgcaaggaacacgaagcccaaacccccaacagggcccaaaaggccc

SEQ ID NO: 81006 - DNA, 414 bp, Zea mays
  Clone ID: MRT4577_173896C.1
gaaggccccccaatcgaacagccctaaaaaaatttttggtttggtccccgggggggggggggggttaatttaaagggggaaacttttgggttcttttggggtttttacggggccccaacgggggggggggcccggtgttttgttacaaacgttttttaggggggggtgaaaaaccgccccggtggtctagagaacccgaattttttttaaatgggttcccaatttttagggggggtggggttcacttagggcgcccctgattggttttggattttactggggccagaattatttgggggggccccctttaaaggaacctttgtcacaggatccgggggacttgaaccattcacctgggttttaccaattgtcttaaagggatttttggaggggtgttttggaagggcctttggt

SEQ ID NO: 81007 - DNA, 1441 bp, Zea mays
  Clone ID: MRT4577_173897C.1
ccacgcgtccggtctcctctccccatcttctctcctggaagccgcctcggtcggacccggacaagatggccgccttcttcggtgctgcaccgccgccggctctcgcttcgttccgccacgaggaggaggaggagcagcatcaggacgccgccgaggaggtgtaccacgtggacgatgtcgacgagggcagcggtgacggccgtggccacggcggcgccggccaggggaagctgtgcgccaggggccactggcgccccgccgaggacgccaagctcaaggagctcgtcgcgcagttcgggccccagaactggaacctcatcgccgagaggctggacggcagatcagggaagagctgccgcctgcggtggttcaaccagctggacccgcggatcaaccggcgcgccttctcggaggaggaggaggagcggctcctggcggcgcaccgcgcgtacggcaacaagtgggctctcatcgcgcgcctcttcccgggccgcaccgacaacgccgtcaagaaccactggcacgtcctcatggcgcgcaggcagcgggagcactcgggcgcgctccgccgccgcaagccctcctcgacctcgccctcgccggcgccggcgccggcgccgcacctggcgcccgtcgtcgtcctccaccaccaccaccactacgccggcggctcccctcccatgccgccgttgcacgccgccgacgcccacacgcagtacacggcagcggcggcggcagcggacacccgcgcgcacagcggcggcgagtccgacgagaccgcctccacgtgcaccaccgacctctccctcgcttccgccgccccctgcttctaccagagtggctacgacgtggccccgcgcgccgcggcgttcgcaccgagcgcgcgctccgccttctccgcgccgccggcgacggcgcgctccgacgacaaggtctcgctgcccttcttcgacttcctcggcgtcggcgcggcgtgatgggggggccggcccgggccggccaggcggcggtgtacaggagggcggaggcggtcaaaggacgagagccccggcggcggtgaacccgtgcccgcgcgtagtttagctttagagcccgagttaaatcatcgagaacagaacatggcctgagcctgagagaggaggagaatggcgatccaccattgaactggtgcccgtggcattgcagactaacagctccgcatccgttcggctgctgatgttgctagtagtaatggtacggtgattactctctgctttgggttgggagagacgaatctgcaagcaccaccagaccaagcaagggcgacgatgggtatgggtggatgtttgcagaagaagaaaaaaccgcttgtaacacaaactgcaggacaaaggcagatcagagatcctctgctaactctctttttacaaaaaaaaaaaccaagggcggccgctctagagga

SEQ ID NO: 81008 - DNA, 1974 bp, Zea mays
  Clone ID: MRT4577_173898C.1
acctccggacgaaatctgacccgggccaccgtcggcactgatctgacatggcgatccgctccaaggcctggatctcgctgctgctagcgctcgccgcggtgctctccgcccgggcggaggagcccgccgcggcggaggctgaggccgtgctcaccctcgacgtcgacagcttcgacgaggccgtcgccaagcaccccttcatggtcgtcgagttctacgccccatggtgtggacattgtaagaaccttgctccagagtacgagaatgcggccaaggaacttagcaagcatgacccaccgattgttctcgctaaggttgatgctaacgaggagaagaacaggccgcttgctaccaagtacgagatacaagggttcccaaccctcaagatcttcaggaaccaggggaagaacattcaggaatacaagggccctagggaggctgatggcattgtggattacttgaagaagcaggttggccctgcgtccaaggagatcaagtcagcagaaggtgtggccgcccatttcgatgacaataagatctacatcgttggaatcttcaaagaattcagtggcactgaatttacaaacttcatggagcttgctgagaagctgaggtctgattatgactttggacacactttgcacgcaagccacctcccacgtggtgatgcatctgtggaggggccattgatcaggctgctgaagccttttgatgaccttgttgttgacagcaaggattttgatgttgctgctctggagaagtttattgatgctagcagcacccctagagttgtcacttttgacaataatcctgacaaccacccatacctcatgaagttcttccaaagctcagctcccaaggctatgctgtttttgaacttctccacggaacctttcgattctttcaagtctgcttactatgctgccgctgaggagttcaaggacaaggaaatcaagttccttattggtgacattgaagccagccagggtgccttacagtactttggtctgaaagaggaccagacaccccttatcctcattcaggatggtgattccaagaagttcttgaaggatcacattgaggctgaccagattgtctcttggttgaaggagtactttgatggcaaattgacgccgttcaagaagtctgagcctattcctgaggtcaacaatgagcctgttaaggttgttgtggctgacaacatccacgatgtggtcttcaagtctggcaaaaatgttcttattgaattctatgccccctggtgtgggcactgcaagaagctggcgcccatcttggaagaggcagccaccactctcctgaatgacgaggaagttgtgattgctaagatggacgcgaccgccaatgacgtgcccagtgagttcgaggtccaaggctacccaaccatgtacttcgtgactcccagcgggaaggtcacctcctacgacagtggcaggacggcggatgacatcgtcgacttcatcaacaagagcaaggagaccgccagcgccgtccaggcgacggcgacggcatctgggaaggcagctgacgcagccgagaagaccgagcccgtcaaggacgagctgtaaacagccttggcgtggacgctgtgggtatgtaagcatgggacagagtggggagaaaagctggcgccaacgtactcgccaagcctgcggctttagtttttgcgagagggaacagggcaaaggaagagaatgggagggaggggtctgtccgtctgtggcgtgttttgctctggtgcggtggtgcggcatgcctgtgtatcccattgagattctgtacaattgcaaacagagagcggtacctttttagttaattatcagagatgactgtagaaagagactgattgtggtgaggttgagtggacgaataaatggcgagtctgcctcattggatgcatcatgaaacgggcacttttgaggagggatggtaatggggaaatttcctgtggagaat

SEQ ID NO: 81009 - DNA, 2038 bp, Zea mays
  Clone ID: MRT4577_173899C.1
cattgggtacctcgaggccggccggggaactcgtcgcgtgccccgccttatttaacgccctctccccgcagcagcagcggcacctccggacgaaatctgacccgggccaccgtcggcactgctctgacatggcgatccgctccaaggcctggatctcgctgctgctagcgctcgccgcggtgctctccgcccgggcggaggagcccgccgcggcggaggctgaggccgtgctcaccctcgacgtcgacagcttcgacgaggccgtcgccaagcaccccttcatggtcgtcgagttctacgccccatggtgtggacattgtaagaaccttgctccagagtacgagaatgcggccaaggaacttagcaagcatgacccaccgattgttctcgctaaggttgatgctaacgaggagaagaacaggccgcttgctaccaagtacgagatacaagggttcccaaccctcaagatcttcaggaaccaggggaagaacattcaggaatacaagggccctagggaggctgatggcattgtggattacttgaagaagcaggttggccctgcgtccaaggagatcaagtcagcagaaggtgtggccgcccattttgatgacaagaagatctatatcgttggaatcttcaaagaattcagtggcactgaatttacaaacttcatggagcttgctgagaagctgaggtctgattatgactttggacacactttgcacgcaagccacctcccacgtggtgatgcatctgtggaggggccattgatcaggctgctgaagccttttgatgaccttgttgttgacagcaaggattttgatgttgctgctctggagaagtttattgatgctagcagcacccctagagttgtcacttttgacaataatcctgacaaccacccatacctcatgaagttcttccaaagctcagctcccaaggctatgctgtttttgaacttctccacgggaccattggattctttcaagtctgtttactatgctgccgctgaggagttcaaggacaaggaaatcaagttccttattggtgacattgaagccagccagggtgccttccagtactttggtctgaaagaggaccagacaccccttatcctcattcaggatggtgattccaagaagttcttgaaggatcacattgaggctgaccagattgtctcttggttgaaggagtactttgatggcaaattgacgccgttcaagaagtctgagcctattcctgaggtcaacaatgagcctgttaaggttgttgtggctgacaacatccacgatgtggtcttcaagtctggaaaaaatgttcttattgaattctatgccccctggtgtgggcactgcaagaagctggcgcccatcttggaagaggcagccaccactcttctaagtgacgaggaagttgtgattgctaagatggacgcgaccgccaatgacgtgcccagtgagttcgaggtccaaggctacccaaccatgtacttcgtgactcccagcgggaaggtcacctcctacgacagtggcaggacggcggatgacatcgtcgacttcatcaacaagagcaaggagaccgccagcgccgtccaggcgacggcgacggcatctgggaaggcagctgacgcagccgagaagaccgagcccgtcaaggacgagctgtaaacagccttggcgtggacgctatgggtatgaagcatgggacagaggaggggggacaaaagctggcgccaacgtactcgccaagcctccggctttagtttttgcgagggaagagggcaaagtaagagaatgggagggaggggtctgtggcgtgttttgctctggtgcggcatgcctgtgtatcccattgagattctgtacaattgcaaacagagagcggtacctttttagttaattatcagagatgactgtagaaagagactgattgtggtgaggttgagtggacgaataaatggcgagtctgcctcattggatgcatcatgaaacgggcacttttgaggagggatggtaatggggaaatttccgtggagaat

SEQ ID NO: 81010 - DNA, 362 bp, Zea mays
  Clone ID: MRT4577_17389C.1
acccacgcgtccgataaggaaaccggatctgttgttcgcctatcaaaagctgcgcagcctactgttcttcaatcaactaaacgacttgccctctatcaagcagcaggagatcaggacatcttcctcaaaagaacagccctgcttctctggtaggaacgcagaagctgttcaactgcaggatactaatcactccctgtcagatatgatcaacatccgcaaagcttagaaaaagcatacgaagttcacagatcagtttgtaacctgtaatccggtaatgatacataatgaaggttcagatattggtgatgaatacaggctgttcaacagtaaaacgaactccaatgctatcatggttcatagca

SEQ ID NO: 81011 - DNA, 418 bp, Zea mays
  unsure (1)..(418): unsure at all n locations
  Clone ID: MRT4577_1738C.1
gaacaacataaacaattatgtttcattatcatgtataaacagaagtaatcgatagattacaacatgtacctttaacttgaaggggatgaaagtacaagcgtgacgcaaaagcaaatgccaaatcagcgtgaacaatacgtgggtactgttcacctatttataggcacaggacacagcctatgcaaaattacattcatgccctttacatttgataataattctattgtaatctatcgaggtctgaatagccttttcatctttagagtcggtttcattttngttggtatcgcgccgaagctttcctgctcacaccttcggcgttgtatcgaccttcgtattattctggccagctgtgataccaatttgagtccgaagatacctgttcacacattaaactccagaaatactgttaaatcct

SEQ ID NO: 81012 - DNA, 1312 bp, Zea mays
  Clone ID: MRT4577_173900C.1
cctcgaggccggccgggagcctcgaggcacgcgtgcacgaggcgccggcctggagtcgcggtcgctgccgcatggccctggcctccctcgcggcctcgctcccagtcgccgccaccgccgccgcggtgagattcccattccgtttccgcatcggtcgcgccatggcctccgccgccgcaggggcctcgccggcgagggtggccgtggtacagatgacctccgtgggggacgtcgacgccaactacgccacctgctcccgcctcaccaaggaagcagctgcttctggagtgaaatttctttgcttccctgaggtcttctcattcattggatccaaggatggcgaggctatgaagctagctgaaccattagatgggccaataatgcagagatactgctcacttgcaaaagaatcaagcatgtggctatctcttgggggttttcaagaaaagggacctgatgattctcaccagtacaatactcatgtattaattgatgacactggaaaagttaggagctcatatcgaaaaatacatttgtttgatgttgatgtacctggcaatatggtgtacaaggaaagtcgtttcacagccgcaggtgatactattgttgctgtggatagcccttttggacggttggggcttactgtttgctatgatttgagattcccagagctttatcaaattttgcgttttaagcatcaagcacaggtattactagtgccatctgcattcacaaagataacgggagaggcacactgggaaattctcctccgagctcgtgcaattgagacacaatgttattgttcgaaaccatttgcaggttattgctgctgctcaagctggaaagcacaatgaaaaaagagaaagttacggtgattctataattattgacccatgggggacagtgatagctcgacttccagaaaaatgtggttgcagatcggctctccactggatttgcagttgcagatcttgatttgtcaaaagttgaggctgtgagaactcgaatgccaatttcagagcaccggaagttcgacagcgattggaaacccacgcctctttagtagctgagggtttattttgtgtttcctatgtttaatgtgcgtatacacatatagttgatatattcatctatgcataattattaccacaggtttggtcagtttgtgactgggaactcgcaagagaggttgctgaactaaataaggttcctaaattgccaaacgatgggactaaaacatggactaaattgtttgtctctaaaaaaaaaaagggagactaaaagggactaaaccatataaattttacttttc

SEQ ID NO: 81013 - DNA, 245 bp, Zea mays
  Clone ID: MRT4577_173901C.1
atcatagtttgctttatacaaaatctggcaactactcatctacatttgtttacatggacgcgggtattcagctctgccgagggtttccgataattgtgggcacttaagcgttatcgggtcgaagaaaaaagctagcatgccgtgcatattattaagagggcttgggtgctggggttcaagagttgcaatccactccattcaatgaactgcccaaataaaaggtaaaagaattttttctggtctta

SEQ ID NO: 81014 - DNA, 487 bp, Zea mays
  unsure (1)..(487): unsure at all n locations
  Clone ID: MRT4577_173902C.1
ctcgagtttttttttttttttttttttttttttttaccaggttcaaaattttgaacanagagaagaagctgctgtttgactcagcccgactactttagaacacatcattacatttggactaaacctaccagttctgatagccagattgggccattctaggaatacgtctgatggtgcaccgagactttggagtacattcaacaagaggcccaacgaaacacttttgaaggctcaatctatagcctcatcagactatatacagacaatgcaaaaccacaaaactaataacagcgacacgggcaatgttaggtgcaaagaagtggcggcagaaacgtgaattgtgagaggaaacaaacaattgtcgacagatggatcgacagtagttatcaaacctaggccattgaagtagcaactatcctcattctgatcatgctgctggtagtagttgttgaacgcgtatgacacattgccaggccaggcaagacct

SEQ ID NO: 81015 - DNA, 1148 bp, Zea mays
  Clone ID: MRT4577_173903C.1
cggccgcgtgggcggacgcgtgggcggctacctacgtcgctgttcatggaagagtcccaatttgaagttggggaagttcatgttgacggacttcggctgtcgtcgtcgaagtagcactctggacagtaccttaggtacagaattagcattcccttcacagcaaaagagtagggaagaaaccacggcatacattgcacccaagatgaagttttgtacagcctttactacaaaatctgtagtaacgaatacgggactgaatggacacatctgcattagattgagtgactatcatctctaccatgaaaaatcttacatcaagttaagaagaatcggtgaaaaatagattgcatgtagagggaagagctagcatccatctactctacgccgtaaatcttgcataaagctgcagaacaatgttgatgttaggcatccattttctaatgaaaatagatctgatccatttgactaaatgattttgttgtttgatgatcaacataacatgtgtactaatggttttgcaagtgtttgtgttctgtagctcacatgattcaaagtgtcttggactaaggcaccgaaggcaccgaggaaaaacacctcaaaagaagacaatagaagattcatataagacttttaagtattcagcacaagtccaaaacacacttgaagagtccaagcgagaaagattgaagaaaatgaagagggctgcttctgggtgcacccgaccagtttgccagagagcacttttcaggcactcgaccagttgacgcgccggaccttggccaaccagtggcgaagctagagtaaaatagaggagggtgtatggtaataaccggtagagggtacatatatggtaaaaatctggtatgaatcactaattttgtaaaatttcgtgggtgcatatgcacccccctaccttctacctagcttcgcccttgtggccaacagtcggcaacggctagctctaacgatcatctggtcaccgcaccgagccggtggtgcaccaaacctcgtggacggtaaagcatgccaacggcagaaaagtctacttttctccaacgactactttggagttggagctctatataaacccctaactgtccatttgaagctgtgagagcccaaacacattactatcgagtagaaacaca

SEQ ID NO: 81016 - DNA, 653 bp, Zea mays
  unsure (1)..(653): unsure at all n locations
  Clone ID: MRT4577_173904C.1
gtcggattccacatccaaactacagctagatagcctctgcatgtctacgtacagcatgggcaaggacgagctgctcctcgacctcacggattcgctcgtcgtgctgacattctcctccctcgccacgcaccaggactctctgtatcgacaacctatccgccgccgacacgccgggtggttacccgagcaagacctcgaaagaagtgaccgccgaagacttccactacggcagcctcgccagccccgatacggagctgaaacccttcaagatctcactggtttcgaacgtcgtcaccacgttgaccggactgaacgtgctgtgaatctccgccgcgtggatgatgatggacccgggcgtcgacccgtcgttgtgctcccactcgtgaggcaccgagctcatctgctgcatctaggacatcgtctgctgcagcttcttcaccgcctcgttctacaggatgtacaccaagacgttgtacggcggagacctgatgtggttcccgtaggaccagttccgcttccagtacagccacatgaacaccacgagggagacgctgtcctcnatcaggagagacaaccccggcctgtatatcctcgacttctggctcgtcggcaaggacctgcccacggaggtacagaacaacgtgatctacctg

SEQ ID NO: 81017 - DNA, 239 bp, Zea mays
  Clone ID: MRT4577_173905C.1
ctcacgcctgcccatacacaccgggaagggcccgctcgataattcttttgaccacattgccgaccccgacaacagcaacgcttgggcctacctcaccaacttcgtccccggccagcgagggaggcgccgtcggggaccttgaggtgtccagatgcatgtgagcgcacgctggttttcggatcgtgccatgatgtatactattgttcaatcgacaaggaatgattgtggtcattgtcatt

SEQ ID NO: 81018 - DNA, 266 bp, Zea mays
  Clone ID: MRT4577_173906C.1
gcagcccgtacctaagctcggaattcggctcgaggcggttccagaagatattttgaatgggatcgccccattcctgtctatggtaagcatgacgagggcaacaccatcgggcaagaaatgtcacgccattatgtgcccaaggagatttctgtggtcccacatgctggctcagcgggcatggtacttcatgtatacctgtaatataactgatgctgcacatgcttattaccacaagctccgaatgtggtattatttttgagctttcc

SEQ ID NO: 81019 - DNA, 293 bp, Zea mays
  Clone ID: MRT4577_173907C.1
ctagcttaaccttgcaccggacgcacgctcgcttaaaatgctgaccaccggggcccactcaaaccggccgccggggttgaggggcaccccacggacgaaggcgaagttgtacttggaagcaaaacgcttggcctgggcccccttgggggggggaaaaaactcctggatctcgtgggctggggggacaataaattccccaaccggggttgcccccggtagcaacgggccaattttgtgccccgccaaatccgactccaaatcgctgagctcgccgtgcgcccggctcgatgggg

SEQ ID NO: 81020 - DNA, 385 bp, Zea mays
  Clone ID: MRT4577_173908C.1
tactcggttctcgtgaattcccgggtgcgacgccacgtcgtctcggtgcccactcattgtgcgtctactcatgacatcgcatcatcagactcgagaggacatatgatcaaagcggggccagattaatgctgacctatcaacaagctataccaatgactacccacactgatacacgacatcattcatcgcaactcaaacgtcagcgaaccttacactctttcaacaacatacttctgcagcagcaagaactgtgcttgatgtactaacaggacatgcagaggctgacccatacttactcatctgtatcacttgaaaatattgctcattctgatcaacttgtcccaacaagggatcctgaaacacacttactatccatgatcgaata

SEQ ID NO: 81021 - DNA, 393 bp, Zea mays
  Clone ID: MRT4577_173909C.1
ggggggttacttaaacacaacaacggtttttgaccttagaaaacgctgaccgtcaccatggtatgcacccccgtgggtcggggggggggcacatctacccaaaagaagaagggggaacgctaaacacgcacgcacacatgggggtcggtcaattcaaccaaaaattaacaacgaatagggatcgacggcacgatttggacagacacgtgtacaggttttattttttttcacggatttcctcccctccctgcttttttccttgggggttttttacttgatgttgatgggcagctgtttgccgtcccactttttggggcacttcagcatggggtccaccagcttgccctgggtgatgccgacaaacaccttgttggactcctcggcgggggactt

SEQ ID NO: 81022 - DNA, 644 bp, Zea mays
  Clone ID: MRT4577_17390C.1
ccctccaagcccaagccggaagccccaaccaccttccttttccacatccacaccgccccgggtttcctcacgcctccgccctcccaagtcccacccgctcactcccgtccctatccaccgcgatggcctcccgcctcgccgtcgccgtcgccgtcgccgcgcccgcgtcgtctccttccccgatcgccacagtcgccccgccccgcgtcgacctccgccgaggtctcccgacagagagatacgctctccgagccctcactcgatcctgtgatgcaccctgcgcgtggctggaccagggagtctagtaaccgccatattgttcttgaggtgacgaaatccacgtggtaaagcaccttagtggagaagtagcgagattacagctgtagctaaggtcgggagcgcttggtgagcaaggactgctgtgacaaaaccattaccgacttctttaaggtgtaccagttcgagaacctcttcgcgaagcgcaacacccccggagcgcacgccgtcgatctctgggactatcaggacttcatcaccgccgaggatgtcttcaagcaccaagggttctgaaccagcggcggtgattggatgcagatgatgagagctctgtgctttcctcgatcacgtaggcggcaagagttcat

SEQ ID NO: 81023 - DNA, 749 bp, Zea mays
  unsure (1)..(749): unsure at all n locations
  Clone ID: MRT4577_173910C.1
cattgggaccctcgaggccggccgggttttgtttggacagccgctgactcctatgctttccactatgggtatgacccccctactggcagccgtttatgtgggcgccatgcagaacatatttagcaagagtgcaaagtacagtttatttgacccatgcaaggaaatggcttatattcctttggatgaagatatgaaggtaaaagggaaggcagccattgatgttgtttgcaacccactgggcaagtccggcggtgcacttatccaacaattcatgatcctgacgttcggatccctggcgaattcaactccataccttgggggcatactgctggtcatcgttctcgcgtggctaggcgcggcgagctcattggacaagcagttctcgagcttggctaaggaggatctgaagaaggataaggctgcccgagagaaagtagaaccctcgctgctcaaggcgcctgcagagggcagtgatgatgtactggcggagcagacaaatggatctgtgacgccccaagcaaccggaaccgagagctcgccgtcgaactcatcccccattcaataatagctccagcatcataagttgtactagctaggagagcgattacagtgagcagaaataattggtactccctccggtttttttttatatttggcgttggttagtgtaaatttgaactagctagcgtcaaataanaaaatggaaatggagataatattanaataaaaaaaaaaaaaaaaaagcggcc

SEQ ID NO: 81024 - DNA, 1309 bp, Zea mays
  Clone ID: MRT4577_173911C.1
ctcgagccgaatcggctcgaggggcatactcctggtcatcgttgtcgcgtggctaggcgcggcgagctcgttggacaagcagttctcgagcctggctaagcaagacatggagagggagaaggctgcccaagaccaagggaaactagaacgctcgctactcagtaagcctgcagaaggcggcactggtgatgtactggtggagcagcagacaaatgggtcggcgacgagcaaagcaactggaacagagagctcgccatcgaactcatcggccccattcaatagatcgtagttaggagagtgattacagaaagcacagatacccagcatttaaaataattccttactgggtgatttctcgactgcaactgggattgcaactttgacaatgatgctgttaggccgtactagactacggacatttggctggggtgtggctgcaaagatcacccccaccgttctgttgctgactggtgttggattcttctctctgattttgtttggacagccactgactcctatgcttgccactatgggaatgacccccctactggccgcagtttatgtgggtgccatgcagaacatatttagcaagagtgcaaagtatagtttatttgacccatgcaaggaaatggcatatatccctttggatgaagatatgaaggtaaaaggaaaggcagccattgatgttgtttgcaacccactgggcaagtcgggcggcgcacttatccaacagttcatgatcctgacgttcggatccctggcaaattcgactccataccttgggggcatactcctggtcatcgttctcgcgtggctaggcgcggcgagctcgttggacaagcagttctcgagcctggctaagcaagacctggagagggagaaggctgcccaagaccaagagaaactagaacgctcgctactcagtagtaagcctgcagaaggcggcactggtgatgtactactggtggagcagcagacaaatgggtcggcgacgagcaaagcaactggaacagagagctcgccatcgaactcatccctccccccccattcaatagatcgtagttaggagagtgattacagcgagcagaaatagtcggcatttaaaataattcgtggctttcgagtttgtaacagcgtgcggcttcaagcctgcccgtaattttcctttgtaataataacatgagcaaaatcttgacagccggcagcgaatgtcgctctggagatggcaaatgtgtgttttgaactgaatggaaaatgtgcggttctcttctgaagaatatgcggtttctcttcaatagtatatttggcg

SEQ ID NO: 81025 - DNA, 175 bp, Zea mays
  Clone ID: MRT4577_173912C.1
tccacacctgctctctctcatttgtgagttttccactctctatcactacttctgaccggggtctcattctctggaatttcggacacctatctcacttctcatcttccctactacgtgatatcacaatttccctaaaactcctatcatcccttactactctctcctttatatcaca

SEQ ID NO: 81026 - DNA, 340 bp, Zea mays
  Clone ID: MRT4577_173913C.1
gcggccggcccgacggactccatgcaacattggcaatcgctacgacaagtgatgacatcaccttgggaccgaggggtgcagacttacataattagtataccaaggatcgtatttaagactgtaagatcgcatccgagagatcataagcgacatgcatgaaggggcacacggttacatgcacaacagttatatactgtgatcgggggccttacatgcgttgacctatagcctcgatgcgcgccatcggaatacatagttgcctattggctacttggagcacatcgctgacacaaagggtaggatcacgtgtcggagcatcgacacatggtggtggaagctg

SEQ ID NO: 81027 - DNA, 426 bp, Zea mays
  Clone ID: MRT4577_173914C.1
acaaacaaacagaaaaaaatgacacatgcacacacaccacagccacaggactccaacactagaacggtcaggagcaggtccgaggagtttccctggcgctgcatcggcaaccgttgtccgtggacgtcgtacaagtctgccgccgtgcccgtgtgcctcacgaagcacggggaggacattcaaaccgtctcccgcgccatggtctctggccaacgccgcgaagcgaggcgcttcacgtctccaagccccgccaccggccgcggtggcgacgtcacggcgacgcactgccgccgatgaggctccagagccgtggccttcggatttggttcgctagcgcggcacaggtggcggccttcacgaccatcgccgctgcaacataggccaagaagcgcggcccccaggctcgcccagcacccgccggcgccg

SEQ ID NO: 81028 - DNA, 277 bp, Zea mays
  Clone ID: MRT4577_173915C.1
catagggggttgttttttttttttttttttttttttattttttttttttatttttttttttttttcttccaaacttccacgggaaaaaaaaatttttggggtgtttaaaacccccccattttacaaggcttccctttgacagaaattcgcctgaatttcatggggggggaaaccccaaaattgcaaaaggggttttttctccccccccccccctcccgcttaaaggtcttgttttaaggatggggtttcaaacaaaggggaaaaccctcttgggggg

SEQ ID NO: 81029 - DNA, 520 bp, Zea mays
  Clone ID: MRT4577_173916C.1
gccggccgggccggggctgcccctatggctgccacgggcgagtgccctagtgcagcggccaccctttccccaccgccttcggtcgtatccctctgccctgcctctccgccaggcctctactgccccctcctccggtgcctgcagtggaaggtaaggagaaggacggcggtagccggatctgatgagcacgcgactgcaccccgcctgcgtctaggcggcgcccggattcgtgtcgctttgcaacaccccgcgagtaggtctattcgagggacaatcggatggctgcacatcgcctagaggctggttgttggtgaggagcttgaagttttaactggaatggagtcaatctgtttagcttagctcttcaggaactcctaaacgtttctcaactggaaggattaattaatatccagattttgatgtggttgtgtatgatgtactttatattttgtcatactatgcacaaaaacaaatgccttctgtgaccaaaaactaaaaaaaaaaaaaaaaaaggccccta

SEQ ID NO: 81030 - DNA, 375 bp, Zea mays
  unsure (1)..(375): unsure at all n locations
  Clone ID: MRT4577_173917C.1
ggttcgtggtcgtaaaattttctcaggtcctggtcctggttcttggtaattgatggccgaagtacaaggcctcgacgacgccggtcagtggtctcctgaggtagacgtttctcccctctccctcccctcctccagtacatttcaacagctaggttggaggcgttgttgctttgagagtttgagtagtgacttgtgattgtgagcactcagctttcaccggggcatcaatgccacgagactgagaagtgtccccctccgctctgatgccgctagaatcaggcacagtagtacagtacagagtacgctgcggagcaacatgcggattctgntcaaaaaaaaaaaaaaaaaagacaactaaagaatacaggggcggcc

SEQ ID NO: 81031 - DNA, 375 bp, Zea mays
  Clone ID: MRT4577_173918C.1
gtcaataaagagagctaaagacaaccgaagtgtgccctggtctggcgcaccggactgtccggtgtgccagagaacccaactccgaactgctcaccttcgggaattctaggagccgctccgctataattcaccggactgtccggtgtgtcagcggagcaacggctacttcgcgccaacggtcgtctgtggagagcagtaaatgcactaaagtgcgcgcagaagtcagagaagcccagaaggcgcaccggacagtccggtggcccagaagatagaagctccaacggtcagaatccaacgccgggggacgtggctggcgcaccggactgtccggtgcgccatgcgacagaagccctcaccaacgggtcttttggtggc

SEQ ID NO: 81032 - DNA, 332 bp, Zea mays
  Clone ID: MRT4577_173919C.1
ccagaaaatgcactggaagacccagagtttcaccgactgcgacatcacccaactccttcgcctcactgtcacgctcatcggagcagcgaccgccgtgcccactgttattcttactttcccgttctaccccacctattgctcctccggctcggcagacacctctgactcgctcttctgtgacaactggatgctgcccgtagagacagccaacacaggcccctgaatctccataccctcgcgctgtggagcttcccccaacactacatggacagacctcactacacatatgactcctccgtcacctacgccgacgccctaaccttcacctccaa

SEQ ID NO: 81033 - DNA, 230 bp, Zea mays
  Clone ID: MRT4577_17391C.1
agctttaacttaattatggatatatacgtacatctggaacctacgtgtctacaatacacatacattcatatgtaaaatctgtgtcataagaaaaactgaatggtatgcacgttaatcaaagaaggttaataagcgtcatcacctgcgagtgcggcaaatcttatgaatgatactgtagacaccatgtccaggatttacaatcattatatatgccgtagaatgcctatgac

SEQ ID NO: 81034 - DNA, 300 bp, Zea mays
  Clone ID: MRT4577_173920C.1
aggatgcttttctttattataatgtaaataaagcatacgctgcgtccctgtgtgtgtttctagtcagtctcccatgtagttgcgtgccatgtcatgctctgagtctgacatgatgatgatgcctgatggcggcgtcctgtcctgtagtcctcccctgccccctcgggcgcttctggcggcgagcagtgcgttgtgttgtgttgtgtgggtgcagcacggtagcaggctatccatgtgccctgctgtgttgtgtcaccatccatctataataatcttatatctataccccaccttttgtgg

SEQ ID NO: 81035 - DNA, 151 bp, Zea mays
  Clone ID: MRT4577_173921C.1
ttaagggaggcctgggatgccagtgtgggggatagcctcttactcagagggcaccgaaccttcattgtcgggactgggttaagatcggctttcattgccaagatgaagggtaagaaaagagcacggcctttgggggccgtttcgaatgaac

SEQ ID NO: 81036 - DNA, 440 bp, Zea mays
  Clone ID: MRT4577_173922C.1
gtaaaaatagtgagttgcttccaagtgttgcccgtcacatacttattcaaaattggataggtaaagagattcatggctatttatatggttctatgaggaaaatgtctcggcctatccaaacatttatatttgatgggtatggtagtgaatctgccggtgtgcaacatttatcaagatatagttctttgcgagtactttctgtgccaagaatttggtttcattatttaacaataaaaccaaagcatcagtgccaccttaggtttcttgatatcacggacagtgccatcaaagaacttccagatgacattagcgtcctttataatcttcagacacttaaactttctggatgcagcaatctcattagacttcctgagcaaatgaagcacatgagtgcccttcgtcatctgtacacagatgggtgcaccaggttggagggcatg

SEQ ID NO: 81037 - DNA, 535 bp, Zea mays
  Clone ID: MRT4577_173923C.1
ccaagcttttttttttttttttttgttttttttcctttttatttttttggtattctgttgacttatttactctattagctagtttcactcgtttagcggcgaagagaaacggagggccacccatcaccaagggaggcagcgggagcaacgacccgaaagaaccatcgaaatggaaaggaaaacacataggggaaaaaggatggttgggaaaaaaaaaaaaaaggcccaaaaaagggggggggaaaaacgggcaaaaaaaaggggaaaaaaaagggaaaacacagggggggggggggggggggcccccccggaaaaaaaaaaaaaaaccgccccgggggggcccctgggggggggaccccagggaaaaaaaaaaaaacggggggggcgtggggaggggccaaaaggggccccacccccccggaaagggggggaaaaacaaaaaacggcgggcgaggaaaaaacccggggggaggggaaaaaaccgggggaccaaaaaaaaaaacccgaaaagaaccgccccctttcgggagggggg

SEQ ID NO: 81038 - DNA, 466 bp, Zea mays
  unsure (1)..(466): unsure at all n locations
  Clone ID: MRT4577_173924C.1
ggggcgcacacaatgggcgcggcgcgctgcacctccttctcgccccgcctctactcctacctgccaagctacgcgccacacgacccgtccatggaccccgcctacctccccgccctcccgcaacanctccctccttggggtagcngggcggncaacccncccctncccatggaccccgtcacgcccaccgtcttccacaccaactactacaccaacctctacgccaagctcggcctgctcgcctcccaccaggcgctgctccacgacctggtcaccgacccgcacatgctcgcctacaccaacagccacaccaccttccagaccaacttcgacaccgacatcatcaacatcattaccatacaggtgctcacccacacagtcagcaccatacggaccaactgcagggccactagctagctcattcattatttacatctacctgtacactcatctgcttatataaaat

SEQ ID NO: 81039 - DNA, 246 bp, Zea mays
  Clone ID: MRT4577_173925C.1
tttttctaagattttcaaatttctaatgcaaaacacaaggagtttgcttatgccttcacagaacaacagaaacaagggggacacgagcgccttgtaaggttacaagactaaaaacctgtgtggctaatgactttgtttggatagttgactaaataccacaattgttcatggctaatatgcgccccactatgcataagcttagtcgttcacaatggaaaaactaagctgaaaaataatagttggaca

SEQ ID NO: 81040 - DNA, 344 bp, Zea mays
  Clone ID: MRT4577_173926C.1
cccagacatcatcgtagcatacaccgctgcagtttctagagccctctctgccactcgtgatcccactagtcacgatgcctgccctcgctaagcccgcctcccgcagcgccaagcccgccgcggctccgacgccgaagcctgccgccgccaatccgattgcggccatcgctggtgcctcgcacactccttacttccagatgatcaacgaggttatcacggcgctaaagtgaatgaccggctcgaattcgcaagcgatctccacgtaagtgggggaaaagcaccgtgcgtctcggcctgttaacttcaagaacatgccttccaatcagctccgttggtccgcagtc

SEQ ID NO: 81041 - DNA, 424 bp, Zea mays
  Clone ID: MRT4577_173927C.1
gtaacacacaggcccaaagcggctcgtcccgggaaggtttaacagcgagctctgactattgccgccacccgggaggaaaggcgaacgccacaagacctgccatgatcggtctgctggcatagtgacacagcgccacaagcagctacagcgtgaagccaggtgggaagctgaccgggaacggcgtagcctgcccctgacgagaaggaacacacggaggttagctgctgctgcggcgaaacagacaggcctggctctcgcagatgaaccatgtaaccgagaggaccatccaggcacaagagagccaacacggtgagatcttctagtagatgctggaggacaaactgaaggaggctggcagaggcggaagcggcgcaggcgggcgggcgccgacggacggtgctcgacggacgcgcgttgcgcccta

SEQ ID NO: 81042 - DNA, 381 bp, Zea mays
  Clone ID: MRT4577_173928C.1
cattaaacaagcataaataccgacttgtcgaggaatacgcaccagccatgcagtcactgagagttaacagtgtgggagagcccaagcaaggtttaatgtgtcagcttggcacattcgttggctgtgcaactgtagatactggatcggatctagatcttatcagtcccacattcgcaaagtcaagggcttacaatattgagccaggagttgagaaagttgagtttgctgactgtagtgtgggctacactgttggcgttgtcaaaacttcatttgtcgtgggaagcatgaatgcatcagagttccatccttgtggaagggcaattgatcttgacctcttcgtgctggacaatctcactgcagacatacttattgggcaagata

SEQ ID NO: 81043 - DNA, 423 bp, Zea mays
  Clone ID: MRT4577_173929C.1
cgaacgccaccggaaaaagcctaagggggcaaaaacattgtcaaaaaaccgacaacgagaacacacaatagctttagggaaccccactgccggaagctaaaaaaggcttgaaaagaccccgtttaaaacaacaaagcgatctttttggcaccgggacacggttcccggaaaaccggcaaaccacaggggggggagacgtgccgcgcgaaaaacaaaaaaaaacaacaatgtgaaaaggtttttggcccagaacacccccaaagggctaaaacaggggggggacacccccaacaaaggaaaaagagggggctaaatcccggggggggcccccccttggcaaccccccaccttcttaggcggaacgggcccccagaaagggggggtcctcttccaaggaaagcggggggcccacccccaatgggg

SEQ ID NO: 81044 - DNA, 536 bp, Zea mays
  Clone ID: MRT4577_17392C.1
ggccggcccgggaaaaacctcgtcacgaaagccaaccatgagggaaccaccaaatcaccgtcgtagctgttcctcgcgctcaacgttgcccagcggcccagccttggtcggggcgacaagcaagttcgcgaagttgcgccaaacatgtacgtggtcaaccgggtggggaaccgaggcgggcctgatcggcatcgctcaccgaaggcaaacacggtaccgacaggaatcctcccttcttcgtggtcggcatcctccacctcttaaatcctggtgaggaaaccgcaaacttttgttgtttctgttcaaaggtggtacccaaggaagagccccatcagtgaagttggtcgcgggaggaagtttgcctcccactttgaaaacaataaacttttgtgcgggaggtgttttgccttcctggcctgtactaataccttatgcactcgtaataccctggtattgtaataataatactctctctatatatttaatgaatgtaaattaagttattgtacaaaaaaaaaaaaaaaaaaggggcggcc

SEQ ID NO: 81045 - DNA, 518 bp, Zea mays
  Clone ID: MRT4577_173930C.1
gcctacgtcctgcggcggtctcccaagcacgcacccgcactcgcagtcacaccgcctcatggcgaccgacgacggcgagggccagcagccggtggtgctcatcacggggtgcgccaagggcgggatcgggtacgagtactgccaggccttcgctggcctcggctgccgcgtggtggccaccgacatccccgaccaagtccccggccttgccgccgacctctcgggcacgccggccgcggaggcgctcccgctcgacgtgacctcggacgccagcgtgggcgccgccgtcagcgacgtgctggcgcggcacggccgcctggacgtgctgctcaacaacgccggcgtcggctgcacgggcccgctcgcggagctggcccccgccgccgtgtcgcgcgcgctcgacgtcaacttcctgggccaggtccgcaccgtgcgcgctgtggcgccccacatggcggggcgcgggtccggtcgcatcgacaatgtcggcagcgtcatggacaaggccgtcacgccct

SEQ ID NO: 81046 - DNA, 1430 bp, Zea mays
  unsure (1)..(1430): unsure at all n locations
  Clone ID: MRT4577_173931C.1
cgggcactggcatcgtaattactgccgatacgcccgagacagcgcgggcggagacagcgagagggaaggccatgaggtcgcagctcaacgcgtccttctcgccgcctccctcgctccggcgagctctcccctccgccacgccccgcgccctcaggttccacgcgttcccgtggcggttccgcgctcctcggcaccacggccgtggcgctggagctcgctgcgctaccaatctgcccgcgcccggcagccaaggagtcggagtgctcgcctccgagaggagggccgacgatggcgacactaccgtgaaaaatgcagaggtcgcttattacttcaacggcgacgcagggaaacctcaacatggccgccattgttagcatagcattctgctttctacacagaattgtttctggacggacgcagtcgatgatgaatttgttcccttggatgtcaaacggcattgcaagtttgccatttgcttgcatatctgatcctaccagaaaacccatgcctcttaagctagatttgactcttccaccactgcctgatttcggatggaatttttcgcgactgtactatcggttcaattctcagcttgatcggaacattgccttgtctatcattaccttgctcatcacttgcttttcatttgtcattgttggaggattactgtttcataagtccaggaagcaacaacaatccctggaggactgcttttgggaagcttgggcatgtctatgttcatcatctacccatctaaggcaaaagaacgtgttgagcgtgtcattgggttctttcttgctatctggggtatattattctattctcgattattaagtgcaatgacagaacaatttagaaaccagatgcataaagtaagggaaggggcacaggtgcaggttattgaggatgatcatatcattatttgtggagtcaatagtcatctgatgtctatattgaaccaattgaataagtaccatgaatcatcaattcgcttaggtttagctacagcaaggaagcagaaaatccttcttctctccgatcttccaaggaagcagattgataaacttgcagatagcttggccaaagatttaaaccatattgatgtattcaccaagagttgtagtcttagcatgtcaacgtcatttgagagagcagcagcacacaaagcaaaatctataattatcttgccagcacagcatgaacgatatgaagtggatacagatgcatttgtctctctattggctctacaaccctgtaaacaaattgcacctgttcctatcattgtcgaggcttccaatgcaaccacttgtgaacttctgaaatcaatcactggcttaaatgtgcaacctggggagatggttgcttcaaagttattngngcagtgctctnggnaaagggccttcanaaaatctnnnagctttgttaagcgg

SEQ ID NO: 81047 - DNA, 262 bp, Zea mays
  Clone ID: MRT4577_173932C.1
cccactctttcggactcgcctcagtatgccagctaccggggagaatagcaaagcagggggcgggaacgacccactctccgtctccggtaaaaaggtacgaactaatagttccacacactttcttcaagctgaaatagtgcagatattcgtaggcagttgtcaccaccaatcgaccaacggcctgaagacgaactaggaccttgtttctcaatccacatcacgaagcacagtatgggaggaccatttcacaatcgctgcccgg

SEQ ID NO: 81048 - DNA, 1577 bp, Zea mays
  Clone ID: MRT4577_173933C.1
ccttcccaaaaagcccccccttttcaagggccttttgggtaaacatttttggcgggagcttgaaaatgaccttccctttttcccgggcggctcccccatgattttttgtggccatgccccgtataatgttcggttttcatggtccgggcctccctcgggggtcggaacggggaagaacatagttggtgcttccctttaagtccctcttccttacgtgccttatgattcgaaatagttgatcattcttccggtggtgtccagtaatcgtgtggttctctctccttttccgtgcatttctgttcattttttatttttttatttttttcaaacagcaacggcaagcacgtgtttcataattcacagaatacaggaagtcaatcaggcatacaaggcacacagctcagcagctccactgtcacactcacacaaataacagatgctcggacaggttgggaactggacaaataatatataatttcgggtaattcaggcaccgagacatgttaccggtttacccaatataattttgggttttgagacctaggatccgaactagtgtttgggtaatttaggttcgggtaggtcgggtacaggttcaggtagttcaggtttggataatggttcagataatgggttttggtcctactcccttggaataccgttcagcccatcttaacagtggagccattgacgtgcagctcaatggattggaaactccaggcaccgcagacaagcaccatactaacaagaaactgtaccatacgccttgatcgttcaaagtgtctaggcaactttggtagtaccggcattacagacagttttggttccacttcctagcgctaacagatactcatcccttgctcgtcgcaatcaatccatttttttacatcacatcagttatatccggtgcagtcgccagaactcattgcgggcaccggattacatgatcgcgacgctcaggtaatcgccaatctggaacccaagctctgcaagagttttggcatcatcacctcttccatggccataagcgaaggtcgaacccacctgtctgacaacaaaacgaccattcttgtctgggtatacaaatgcaaaagaaagcctcgcgttccttttccttgctggaagagcaacctctttcacaagatcagtaagctcacggagagtggcatccttccatgtgtaaatctgaacttcatcctttggttctttccctctcacagaaaactcttcattttggtggtgaccagcaacccttgtgaaaaccctgagcagcagagggcaggtcttctcgcggtcgattggttcggggcggaggcgcgccatcggcggagggccccggtgctgcatcggcgggcccggccgcgccggcctcatcggcatatcggtcatgcctgccatctcccctcctcagcaacgaggctctgctctgccgccgggtggattttgacaagggaaggcgctcgccgccgccgccgccgccgccgattcttcggcggagagaggtggacgtggggagggcaggaggatccgacggcgtggagagcgtgggtgtgtgcgaatagggccaaacaaaccct

SEQ ID NO: 81049 - DNA, 591 bp, Zea mays
  Clone ID: MRT4577_173934C.1
tgtttgggtcgatggttggggagcacaaaaaatcacggagcgaccgagcatagtccatctctgtgaaccgtggcagtgagtgcacatgtgtagtgtgcaaggtgtgtgtttcctctccggtgaaaaacaatgcaagtagagaatatactagtttatgaccgagttatgtgaagttatgtggtcataaatgtatatttggagtacttacaagaccactaggtgtctgattaaaaagggggcccgtgtcagtttgagtgtcatgagatgcatcaatgtcacctccatgtttttgcggtgtggcgtcaaacatcggcaagtgtgaagacgtatatgagctcataatgttgcagtctggtatatgttgaggtgggatgtttatgtcccttgacagtttgttgccaacattaaaatggtaatcctgctttttagagtttgagtcttagttcgtctccatgggcgcagtaacgtccaaatcatcagggcagtcctcaaatgcacgacgcatttgttgttgcatttcatgtatttcctcgaactgggtgcctgccaacttcgtagtcggctgcgaagttggcatagtcgggtccgaag

SEQ ID NO: 81050 - DNA, 298 bp, Zea mays
  Clone ID: MRT4577_173935C.1
gaagggcggtgcatggtatggtgctccggaacgattcccaatacgacggcttgggtggaacatccatcagtaacatgtatgtgaaacgtggaaacaagtgcgctgacatgaatgagttctgtaggatgcgcatccgaaatgagtactattggaccactgagattgatggaatcgtgcaacatgatggacccagaaacgcaatgctgctgctaacagaaatgttgcggtaaggtgtggaaattaacaagtacacggctactagcgtattgctcgcctgctgttaaacgagcatgatacg

SEQ ID NO: 81051 - DNA, 484 bp, Zea mays
  unsure (1)..(484): unsure at all n locations
  Clone ID: MRT4577_173936C.1
cgggccgaccgacgcgtccgcccaggcgttctataactttcagncgcctaatagatcactcgacaaaccccgnccangggggagcgctgtttctaacgcaagcggaacacctaagcacgactcaaaaagctcgatgagtaccttctcactcgcagctacatcactggctaccaagcttacaaggacgacttggctaggtacacttcgcatacgtctgctccctcgaccaagtatatcaacgtagaaaggtggttcaatcacactgatgcgcacgagaggctgagcagaattactgcagagggccacggtgtgaaggttgaatcctcagcactaccttcagccccaactccaaaatgtgcttgaagcacaggccccagctgctgaggaggaagacgaggatgatggcgacccttttggtgaggagaccgaagatgagaagaaggctgcttaaaagcgtgctgcaactggcaaggcttctggcaag

SEQ ID NO: 81052 - DNA, 396 bp, Zea mays
  unsure (1)..(396): unsure at all n locations
  Clone ID: MRT4577_173937C.1
gggggggggggctcctggctgttcctgccttccgccctcgtccgctggtctctctgcccggtggcgggtggctgcttctgtcgggccgctggccggcctctgcctgcttttgttttgtgcttccgtccgcgcatggcctttttttcttgggggggcgctgntcggcccgtttctctgcctgcgtggggcgggggcgggctgcttatgccttcgcgcccttcctgcgctatcctccggcggtgcgtctgtcccttatgggctccgtcttgttgttggcgtcttggctcttttcgttgcggtcgctgcgctgtgctctgctcgtgctcttgttgtcggtggcgggctcccttgtgctcttcttttttctctctttccccggtggcttgttgtgggcgc

SEQ ID NO: 81053 - DNA, 1483 bp, Zea mays
  Clone ID: MRT4577_173938C.1
ccggccgggatgaactcttgctttgattgtagatggtaacagtcttgtttaattctggagacagatttgcaagacgagcttttcaaactagcaactgaatgtagtgttgtcttatgttgccgagtggctccattacagaaggcagggatagttgcccttatcaagaacaggacaaatgatatgaccttagcaattggcgatggcgcaaatgatgtttcaatgattcaaatggctgatgttgggattggcatcagtggccaagaaggtcgacaagctgttatggcatcagatttttctatgggacaatttagatttttggttcctcttttattagttcatggtcactggaattatcaaaggatggcctatatgatcctttacaacttttacaagaatgctatgtttgtcttggttcttttctggtatgtactttatacagcattcactttgacaactgctatcactgagtggagtagtctcctgtatactgtcctgtatacatcccttccaacgattgtcgtcggcattcttgacaaggatcttaataaggcaaccctgatagcttatccaaagctatatggatctggccagagggacgacaagtacaatgtgaatttgtttgtgctcaatatgcttgaagcactctggcagagtttggtcgttttctacttgccgtattttgcatatagacgaagcacaatagatatgtctagtcttggagacttgtgggcacttgcacctgtcattgttgtaaatatgcaattggccatggacattattaggtggaactggataatacatgcgtttgtatggggcacaatagccgcaacaacagtttgtctctttgtgatagattcgatatgggttcttccagggtatggggcaatttttcatataatggggactggtctgttttggtttttgctgcttatcattgttgttacagcaatggtcccacattttgtgttcaaggctttcacagaacactttaggcccagcgatattcaaatcgcccgtgagatggaaaaatttgcaaatgtcaatcaggtgaaccggttggaatttccaacgagaggactttcatgacaatagtagggaaactatagtatttcgttcttttcttattttcacgtctttcccccctactggtgtgaataggagctgattcatttagctgtaaggtgataggtttaatctctaatgtgcatgtatgtattcgtataaaatttacagaaaaggaaatagaagtccacgtacaagttttcatctgtttgttgcagcattattgcaggctaaatttgtggagagtgtattgtaaatatgggatactgatgcttggagattcaattttcaagtttgtagagagaatgtagatttgggaacacacggatgccaggaaatttaagttccagttttgtttcttccgcaaaaaaaaaaaaaaaaaaaaccaaaaaaaaaaaaaaaaaaaaaatctagatcgcga

SEQ ID NO: 81054 - DNA, 516 bp, Zea mays
  Clone ID: MRT4577_173939C.1
gcttgcaattcgcttgttcccacaatcaactgcgttatgctaatttgtagtttacacaatatttaaataacttttttaggaaatacactacatgaaaataaaacagagttgctgctaccagttaccaccaacaatgctaatttgtcaactttttacatgtcctcatcgtgatcaagaattaaaaatacaaacatctccaacaacccacaattctaggctgttgttaccagttgccaccgagttgctagggcttctaagttcaaaacctgagatagtaatagcagaagtgatctacagatgcaaagcctaaaggagagggtatagggtcccaagacggtggaagctcgtcttctccaactcgaaccgatgcagggataatcggggagaaggtggccatcgacgccggagtggggaatctcgcgtcgccgccaccgtcttcgcttgccttcacgcgtgatgcttcccgttttgacaacgccaagtcgaaatttttcccgccgcctcgaggtcccaatg

SEQ ID NO: 81055 - DNA, 297 bp, Zea mays
  Clone ID: MRT4577_17393C.1
tctcgttcgccaaggcagagctctcacgcgggcggcgtacctggccacctggggggcgcaaacagagccttatctttcccccctcccctccctttcgaacgactaccgaagaggcatccgaggtggccagccacgatgatggccgcagcggctctgatgccgcacaagtctttgtctgcccgggtgcccacacagagcgtggccccgctcttttccgtctgtttccttcgacagtgttggcattatcaacaggtactgtcactgttcctgagccttatacccgttgccccgacaagg

SEQ ID NO: 81056 - DNA, 394 bp, Zea mays
  Clone ID: MRT4577_173940C.1
gcacaaaaaggggacctaaattttaaacaactagggccatgggacattggggggggggcaaaaacgagctgggttcaacccaaagcaccttggcagaacgacactcccgtttttgacttttgggcaaagtagctaaaggaacccaactttttttttttaccccagcgttcacggagcgcacccacacactgcccacaacggggggggtaactttccaaacacaatcacaatttggaataaaactgcggcgtccaccacttgaaaaaaggcccccgggggagcttggggggccccaaaagcggaagccccgcgggaaactcggcccccttcttgggggggggcttcccccaacccttgggcattccccggcccctgaacccggggcaaaaacaat

SEQ ID NO: 81057 - DNA, 542 bp, Zea mays
  unsure (1)..(542): unsure at all n locations
  Clone ID: MRT4577_173941C.1
gcggcggcggcggcggcgngggcgaggccccngcgacnnccagnacnccccgacgaggaggaagncncnacagcggagggggagggagagncgnacacgcggggggacccgcngacgagggagcggaagcnggngaagggccncgccaggcccgagccccggnggcncaaggccggggaacgggcnccgccagngacannnccncgcccagaggggaagaacaagacncnggngcnnccngaggangngnangncacgaagnncaacagaanacanccagaaacgcnnnaccangangcaancaagaaaagnggannnganccaccgccagcncgagngnnngcnnggcgngnccnggagnngaaagagcaaggagncgangaagaagnngcaanggcngnagcaganaacgagncccggacagagaagaaggcaaagaagaaagcgnacaaggagccgaaagaaancgcccgcagcgaagggaggaagccaccnccggaaccaacccgngggccanannggaaanacaggcgggggaaaag

SEQ ID NO: 81058 - DNA, 339 bp, Zea mays
  Clone ID: MRT4577_173942C.1
atacaacaggggcgcgctttgtttttgggaagcaactaacaagcttttctgctacacatgaggttcaacacctttcatgttataagggatctaaccggggtaaacacaagctctactcatttacaccaaagggggtttgtttatgccacctgcctggccaaggaaggtgtcatgggcttctgccctttccttttccaattaaaaaggactccctttttacacaaacaccatccgggtttgaaaacaccgggggcgaccctgggttcgagaagaggttccctgtcctttgggaaaacctgggccactttaagacatgcttgctttgaaccaagttcttgg

SEQ ID NO: 81059 - DNA, 189 bp, Zea mays
  Clone ID: MRT4577_173943C.1
aacgggaggagaacaaatttaattcataaacaaaaagggcacacagatatttatccatacaaacatgctcatttggggaagacacaacttaccacataaagttgtttactttcttatttaaactgaaccaacatggggaaacgctacgaattaaacatcttattgacccatcgtccgacacttacttct

SEQ ID NO: 81060 - DNA, 759 bp, Zea mays
  Clone ID: MRT4577_173944C.1
atggatcctaagggaaaggggaatgtggtcaacgacaatgagaaggagtccatcttcaacgagccaagggacgacaaagccaatgactccagctcaagtcaaaagaagaaggacgaaaagaagaagaggcgcatcaggaaggttgtctactatgacgacagcgacgagtcctcttcttcccaaaaggacaacgacgacaacgactacgagaaaaagaagacggttaactcgaacttttcttttgattactctcgtatgccgcaaagttcaaatgcacatttgctttccattcctcttggcaaacctccacactttgatggagaggactacagattttggagtcacaaaatgcgtagtcacttgttctctctccatccaagtatatgggagatagtagagaatggaatgcaatttgatagtacggatagtcctttgtttgttaatgaacaaattcataaaaatgcacaagctactactatgttgttagcctcattgtgcagggatgaatatcataaagtgagcggcttggataacgccaagcaaatttgggacaccctcaagatctcacatgaggggaacgatgtcaccatgctcaccaagatggagttggtggagggcgaacttgggagattcacaatgataaggggagaggagccaacccaaacgtacaaccggctaaagaccctcgtcaacaaaataagaagctatggaagcacgcgatggactgaagcgtcccaatcctctgggactcaaatgtga

SEQ ID NO: 81061 - DNA, 522 bp, Zea mays
  Clone ID: MRT4577_173945C.1
ctccccccccccccccccccccccccccccccccccccccccccccccccccctgggttccccccccccccccccccccccccccccccccccccctttttgggttggctaaacccattgttacaatccctggggcaaaaaaaaaaccccccaaccctttgggaataaaaaaaaaaggaaatccctaaccgggggctaaaaaaaaccccccttgaaagggggggaccctttttttttttacaggaaaaaaggtttttcctttttttttgcccaaaggcacccttttcgatggggtaaaagaacctaaaactgggcccccttaaaggtttggccaaattgccccccccccggaacaacccctttttttggaacggggccccccccctttgcgggaacctgaaaagacaggtttttgcccccaaggaacaaattttttttccatttttggccccaattgggggacatgggctgccccccggggctggagcccttgatggaaacggattggacgtccccggggcc

SEQ ID NO: 81062 - DNA, 544 bp, Zea mays
  unsure (1)..(544): unsure at all n locations
  Clone ID: MRT4577_173946C.1
cccttttggttnaatgaaggntgctagnatcctatgtcatagctagagacagatccttgctccagatggtaaaatgtttccaacaacaggaaggtatatttgacacttagttgcatactacatttaaatgattcttgaatcttgatagtttttttatccatttggtaaataaaaaaggctatatcatctccattttttgcatgattattacttgtgtgcctaattaatatttatatccgtttcatataacattttttactttctgtatgcacttagtttacatcttgcctgtatttagtttgcattctacttgtatttcctgtttcctggatatttatgcttacgcggggtaagtttacttctattgttgagcaattttgcaacataccagtttggtggctctcttgatcatggtttgcaaatgttaaagcctttaataaatcaagtcattatctgtgtcatatgacatgacatgttattgagtcataaaagtacatatattaagtatgatctcagacaaggttattaaagcaataaaacgttg

SEQ ID NO: 81063 - DNA, 366 bp, Zea mays
  Clone ID: MRT4577_173947C.1
tatagaggcagctagcgcgctccttgaacccactatagagaggacatcagcgctgatgggggtagccatgagctccaccaaccacgacgtggccgcggtggtggacgaggaggcgttcatgtacgcgatgcagctggcgtctttgttcatcctgcccatgacgcttaagaacgccatcgagctgggcctgctggaggtgctgcagaaggaggccggcggcctaaaagcagcgcttgcgcccgatgaggtggtagcgccgatgcccgcggtgcccagtgaccccgacgccgtcgcgggcatagtggaccgaatgctccgtctgctcgcctactacgacatcgtccggtgccagatggaggaccggga

SEQ ID NO: 81064 - DNA, 421 bp, Zea mays
  Clone ID: MRT4577_173948C.1
agcagcatctcctccagcggcagcagcagcagcagcggtggcagcatcacctccagctccggcagaggcagcaacaacagaaggtacaggggcaattgcaccactgcttgcaagtgcagtcaaaacacttccaattgtctttttggcatcattgtgaacgtcatccgcagtagtatctgaagcatcgatcacaccaccgctagggccaaggagagtgatagcagtcaagatgtcatcgttgaaatcaatgggatggatgccgttagtgtccaagacatcattagcagttgcaacagcagcaaccaaagcagtgtcaaaagcgggggaaccgatggcctgagccaaagtagtggcaagagccagagttcttgaggtaacatcagcaatatcatcttggccaactccgacactgccagcgaca

SEQ ID NO: 81065 - DNA, 674 bp, Zea mays
  Clone ID: MRT4577_173949C.1
ccggccggggcgaccgccacctccccgaagctgccgcgaccgatcgagcgaagcgtcgctccccgcgccgccgccaaaaccctagcttctcctactccatggccactgtctcgctcaccccgcaggctgtcttctccacggagtccggtggcgccctggcctctgctaccatcctccgctttccgccaaactttgtccgccgccgctccgcggcggcggacgtcggcgcaattcccaacgctaaggttgcgcaacgcgtccggccgccgcattgcgccgaggcgtagacctgcgtcgggcctccgacgcgcagacctcagccggtccacggcaggagggagagagctgggagagaaggatgcggcacgcgatgcagagcacgcacacgcggcggtcgaacaccggcggcctactggatgaacaagctcgcaagagctagtccactataaggaggggaggcatgctagctaggagtatgggaggtatgggaacccaaccacggaggcattagagaagaagatgagcgcactggagaaagcagagtccacagtgttcgtggcatcggggatgtatgcagctgtggctatgctcagtgcacttgttccggctggtgggcacattgtgaccaccacggatgggtaccggaaaacaaggatttacatggaaactgagct

SEQ ID NO: 81066 - DNA, 423 bp, Zea mays
  Clone ID: MRT4577_17394C.1
tggctctggaacctttgggctgatttatgtgcttgggcgagaataaagagtcgtgggctggggccccgacccgccggacgacactccgccgggccacaaagtcgaacgattaacggacaccggtaccataacagatatatcaaaaacacacgtcgaaagctagaaataaaacataacagagccgcgaagaaggcacccccgataatcacgtactgcattcactccggcggtgaaactaatcctatcgacggactcaccaatttaaaactcatagcgggaatcttcgtacataccgtctacgaggcctcctcggagaaggaacataacggaaaggccgtcgacgcgcggctacgtggagcgatgttacatgcgacgtcgatgactattactttcgagacaagaaattacttacggcctccgaag

SEQ ID NO: 81067 - DNA, 679 bp, Zea mays
  Clone ID: MRT4577_173950C.1
ctcccggacggactccgcttttcgtcatcatcccgagtcttctctctgctcctgctggcgattctcgtgcagacacacacgcatcgcatacatgatggggatccagcccaacctgctgaaccagctcgtgtcgctcctcctcggggcgtccgtcgccggggtgctcatcttcttcatgtcctcggacgggatcggggccgggccgtcctcggccggcatatccagctgggtcaatggaaccatggcggcgccggttgctcctgcccaggagcaggaggctaaccacacgagcgcaagcaaggtcgacggcgttgcctcccctcaggaggccagccacaacactagccaggcggcggaggacgagctggagcggctgctgcggacggtggcggacgagcacaaaacggtgatcatgacgtcggtgaacgaggcgtgggcggccgagggctcgctgctggacctcttgctcgagagcttccgcgccggggagcggatcgcgcacttcgtggatcacctcctcgtcgtggccctcgacaccggggcgctggagcggtgccgggccgtgcacccgcactgctacctcctgccgcccctggtcggcggcaaggacctctcggacgagaaggtgttcatgagcaaggactacctggacctggtgtggagcaagggccggctgcag

SEQ ID NO: 81068 - DNA, 1330 bp, Zea mays
  Clone ID: MRT4577_173951C.1
gctcgagggaggcggggccgggcacagcaacctcggtaccagcaggcttaacggacggacggacgtcatgggaaactcctcatctcgcggccgatcagagccgaggcagggcgagcagaggaccatgaagtggagcgtcgatgggttcgcctcactcctggacaagggcgacggatggacctactccagagtgttcgagctcatgggctacaactggtacctgaagctgaacccgagggacaagaagagcggtgacgacggcacggagtacgtctccctcgtgcttcagctggatgacctctcggtgaagccggatactgtcgtgaaggcctccttcaagctgctgatctacgaccaggcgtatggaaagcacagcgagcatcaagttcggcacagtttccagaccgcaagcacgagctcgggagcctcgtgcatggtttccctcgaaaagctgaaggaacggccgtctaagttcatcgtcaacaacagctgcaccttcggtgtcgagttcatcaaagtcaaggcttccaaagtgagcacgacgtctgaaacgctgtttgtgcggaagccgagcgtcttcgacgaggccaggacctacacctgggacatcgaggacttcttcgcgctcaagaactccggccactcgccggagttcgaagtcggaggacacaaatggagtatcggtgtctatacgtccagcgatgggaaccacctcaccttggacctgtgcatgaagaacacagatggtgtccagcatgacggctctgcaaacctggtagaattcagcttggccatcaaacaccaggagggcggcaatcactggaaagcaacaggccggagccagtttacaagcaacgctcgttgctggggatggacgaagttcatctcgctggaggatttcaaggactcctcgaatggctatctcgtcaaaaacaagtgctgcattgaagctgaggttgcactcgttggttcctcaaagatgaagtagtgtgtcctctgtccttgtctatatatgtgtgtgtgggctgaatgactgaatcacacgatagatgtgcagaggtttggacgtgcgtgtgacgtgtcttgtgttgtgtgttcgttttgttcgtgctgaagacactaaaagtgtgcatgccaaataaggttcgatcggcgcccaagatattgctcagttttgttcccacacgcatgtcttcgctggtgcatgcggtatatcatcaactgttatctatttgtagtaactggtggcagtgtaagtgctacacacacggtaaaaaaatattatatatatacatgatatatatatatatatattattttttggtcttcc

SEQ ID NO: 81069 - DNA, 793 bp, Zea mays
  unsure (1)..(793): unsure at all n locations
  Clone ID: MRT4577_173952C.1
cggccgggccaggactcgaccgccacctccccgaagctgccgcgaccgatcgagcgtcgctccccgcgccgccgccaaaaccctagcttctcctactccatggccactgtctcgctcaccccgcaggctgtcttctccacggagtccggtggcgccctggcctctgctaccatcctccgctttccgccaaactttgtccgccagcttagcaccaaggcacgccgcaactgcagcaacatcggcgtcgcgcagatcgtcgccgccgcgtggtccgactgccccgccgccgcctccgcggcggcggaggtcagcgcaattcccaacgctaaggttgcgcaaccgtccgccgtcgtattggccgagcgtaacctgctcggctccgacgccagcctcgccgtccacgcgggggagaggctgggaagaaggatcgccacggatgcgatcaccacaccggtagtgaacacgtcggcctactggttcaacaactcgcaagagctaatcgactttaagatgactgtcattaggcctgctgacatggatgctctacaaaatgcgttggacaacaataatgtatctcttttcttcacggagactcccacaaatccatttctcagatgcattgatattgagcatgtatcaaatatgtgccatagcaagggagcgttgctttgtatcgacagtacttttgcctcccctatcaatcagaaggcactgactttaggcgctgacctagttattcattctgcaacaaagtacattgctggnacacacgatgttattggaggatgcgtca

SEQ ID NO: 81070 - DNA, 873 bp, Zea mays
  unsure (1)..(873): unsure at all n locations
  Clone ID: MRT4577_173953C.1
cctcgaggccggccggggcgaccgcctcctccccgaagctgccgcgaccgatcgagcgaagcgtcgctccccgcgccgccgccaaaaccctagcttctcctactccatggccactgtctcgctcaccccgcaggctgtcttctccacggagtccggtggcgccctggcctctgctaccatcctccgctttccgccaaactttgtccgccagcttagcaccaaggcacgccgccgcctccgcggcggcggaggtcagcgcaattcccaacgctaaggttgcgcaaccgtccgccgtcgtcttggccgagcgtaacctgctcggctccgacgccagcctcgccgcccacgcgggggagaggctgggaagaaggatcgccacggatgcgatcaccacaccggtagtgaacacgtcggcctactggttcaacaactcgcaagagctaatcgactttaaggaggggaggcatgctagcttcgagtatgggagcgcactggagaaagcagagtccacagtgttcgtggcatcggggatgtatgcagctgtggctatgctcagtgcacttgttccggctggtgggcacattgtgaccaccacggattgctaccggaaaacaaggatttacatggaaactgagctccccaagaggggaatttcgatgactgtcattaggcctgctgacatggatgctctacaaaatgcgttggacacaataatgtatctcttttcttcacggagactcccacaaatccatttctcagatgcattgatattgaacatgtatcnaatatgtgccatagncaaggggagcgtgcttcgtatcgacagtacttttgcctccccctatcatcagaaggcactgacttttagcgctg

SEQ ID NO: 81071 - DNA, 801 bp, Zea mays
  Clone ID: MRT4577_173954C.1
ggtacccccggagctcgccggggcgaccgcacctccacctcctcgaagccgccgcgaccgatcgagcgaagcgtcccttcccgcgccgacgccgaaaccctagctcctcttacgccatggccaccgtgtcgctcactccgcaggcggtcatctccaccgagtccggcggcgccctggcttctgccaccatcctccgcttcccgcctccgcggcggcggatgtcagcgcaattcctaacgctaaggtcgcgcagccgtccgccgtcgtattggccgagcgtaacctgctcggctccgacgccagcctcgccgtccacgcgggggagaggctgggaagaaggatagccacggatgctatcaccacgccggtagtgaacacgtcggcctactggttcaacaactcgcaagagctaatcgactttaaggaggggaggcatgctagcttcgagtatgggaggtatgggaacccgaccacggaggcattagagaagaagatgagcgcactggagaaagcagagtccaccgtgtttgtggcgtcagggatgtatgcagctgtggctatgctcagcgcacttgtccctgctggtgggcacattgtgaccaccacggattgctaccgcaagacaaggatttacatggaaaatgagctccctaagaggggaatttcgatgactgtcattaggcctgctgacagggatgctcttccaaatgcgttggaccacaataatgtatctcttttcttcacggagactcctacaaatccatttctcagatgcattgatattgaacatgtatcaaatat

SEQ ID NO: 81072 - DNA, 300 bp, Zea mays
  Clone ID: MRT4577_173955C.1
gaaaaatcgcgccgctccagccgtcgttatccccagctgagcttcttctttcccccagcacgccgcacttctctgctccctccagtccacagaagctcccagccgtggcgttctctctgctcggccgcgcccctgcgcttgccgagctgctctctggcgctcgcccatggccacgcctgcccctgctcgcgtccttcagctccagcgctccctcggctcgcctggccggagcgccctgcgctctgctcgcccatcctccgctcctatctccatggccgtggtgcttctccatggctgtcg

SEQ ID NO: 81073 - DNA, 872 bp, Zea mays
  unsure (1)..(872): unsure at all n locations
  Clone ID: MRT4577_173956C.1
ttgggtacctcgaggccggccggcacgcgtccgccacctccacctcctcgaagccgccgcgaccgaacgagcgaagcgtcccttcccgcgccgacgccgaaaccctagctcctcttacgccatggccaccgtgtcgctcactccgcaggcggtcttctccaccgagtccggcggcgccctggcctctgccaccatcctccgcttcccgccaaacttcgtccgccagctcagcaccaaggcacgacgcaactgcagcaacatcggcgtcgcgcagatcgtcgccgccgcctccgcggcggcggatgtcagcgcaattcctaacgctaaggttgcgcagccgtccgccgtcgtattggccgagcgtaacctgctcggctccgacgccagcctcgccgtccacgcgggggagaggctgggaagaaggatagccacggatgctatcaccacgccggtagtgaacacgtcggcctactggttcaacaactcgcaagagctaatcgactttaaggaggggaggcatgctagcttcgagtatgggaggtatgggaacccgaccacggaggcattagagaagaagatgagcgcactggagaaagcagagtccaccgtgtttgtggcgtcagggatgtatgcagctgtggctatgctcagcgcacttgtccctgctggtgggcacattgtgaccaccacggattgctaccgcaagacaaggatttacatggaaaatgagctccctaagaggngaatttcgatgactgtcattaggnctgctgacatggatgctctccaaaatgcgttggacacaataatgtatctcttttcttacggagactccctacaatccatttctcggatgcattgatattgaacat

SEQ ID NO: 81074 - DNA, 625 bp, Zea mays
  Clone ID: MRT4577_173957C.1
cccccctctcgagttttttttttttctttttttttttttttttttttttttttttttttttttttttttttttttttttttttgaaaacacaaagaaccttttttttgggggaactgaataaacccttattacaacagccctcacgaaccaatttccgaagggggtccttggttttttccacaaacccgcccaggggaaacccccctttccgggaacggaacgggaaaacccaaacaattagggcaacacccgtccttccttttttaaaacaaaactaaaagggaaatccttttggaaatccccttggggggaatcccgggggggtccccttttgggtgggaggggtgggggaaaaccaccgtgaagggaaactcgcccggcccttttcgttttttggggggagggccccctttaatgggaacaaccctttttttaattttggaaaccccccccccaaaccgtttaaacccctcctgccctttggggtccaacgcccactctttggggtccccctgcccgaggaacccctcttcgaaggaggggttggacaggatctccaccaccaaaatcccaacaaggccctgaaactggttggggatggcccacacaaacaccttttccggt

SEQ ID NO: 81075 - DNA, 2067 bp, Zea mays
  Clone ID: MRT4577_173958C.1
cattgggtacctcgaggccggccgggactggcctcgaggccggccggggccaccaccacctccccgaagctgccgcgaccgatcgagcgaagcgtcgctccccgcgccgccgccaaaaccctagcttctcctactccatggccactgtctcgctcaccccgcaggctgtcttctccacggagtccggtggcgccctggcctctgctaccatcctccgctttccgccaaactttgtccgccagcttagcaccaaggcacgccgcaactgcagcaacatcggcgtcgcgcagatcgtcgccgccgcgtggtccgactgccccgccgctcgcccccacttaggcggcggccgcccgcggcgtggcctcctccccgccgcggctgcatcggccgccgccgccgcctccgcggcggcggaggtcagcgcaattcccaacgctaaggttgcgcaaccgtccgccgtcgtattggccgagcgtaacctgctcggctccgacgccagcctcgccgtccacgcgggggagaggctgggaagaaggatcgccacggatgctatcaccacaccggtagtgaacacgtcggcctactggttcaacaactcgcaagagctaatcgactttaaggaggggaggcatgctagcttcgagtatgggaggtatgggaacccgaccacggaggcattagagaagaagatgagcgcactggagaaagcagagtccaccgtgttcgtggcatcggggatgtatgcagctgtggctatgctcagtgcacttgtcccggctggtgggcacattgtgaccaccacggattgctaccgcaaaacaaggatttacatggaaaatgagctccctaagaggggaatttcgatgactgtcattaggcctgctgacatggatgctctacaaaatgcgttggacaacaataatgtatctcttttcttcacggagactcctacaaatccatttctcagatgcattgatattgaacatgtatcaaatatgtgccatagcaagggagcgttgctttgtattgacagtacttttgcctcccctatcaatcagaaggcattaactttaggcgctgacctagttattcattctgcaacgaagtacattgctggacacaatgatgttattggaggatgcgtcagtggcagagatgagttggtttccaaagttcgtatttaccaccatgtggttggtggtgttctaaacccgaatgctgcgtaccttatccttcgaggtatgaagacactgcatctccgtgtgcaatgtcagaacgacactgctcttcggatggcccagtttttagaggagcatccaaagattgctcgtgtctactatcctggcttgccaagtcaccctgaacatcacattgccaagagtcaaatgactggctttggcggtgttgttagttttgaggttgctggagactttgatgctacgaggaaattcattgattctgttaaaataccctatcatgcgccttcttttggaggctgtgagagcataattgatcagcctgccatcatgtcctactgggattcaaaggagcagcgggacatctatgggatcaaggacaacctgatcaggttcagcattggagtggaggattttgaggaccttaagaatgatcttgtgcaggccctcgagaagatataagctccaatccatttgcattaataaagttatgaggtgatggttgtctggatcttgtagagatttgtgatgatacatgagctgttgactgcgaataagttctcttgtgcttattttattctttgaattcaataagctgtggttgctgcatcttgcatgtagtgttggacttaattttacttgtcaaattacaatagtttggtcccatgtacttgtgtccgcgcctccgcggttgtgcccctagtgtttttgtgtcatttgctgtgtagtgtgagattaaggcacgatgtccttaatcaccataataaatccatgccttaaatgtaaggatctggttggaatgataaagtgcggttgaagaaagaactatatataatttttctcagtgaaaaaaaaaaaaaaaaaagcggcc

SEQ ID NO: 81076 - DNA, 426 bp, Zea mays
  Clone ID: MRT4577_173959C.1
caaaacagggggggaaactttattgatacaaaatgtattgacacaaaagggggaaacaagatgccttatcccaaattttgcttcatggtattagaaacgggagcttgaccttccacaaggaagggtcccctttactatggggggaaaaaaaatgatcctaggtccagaaactaattacagggcaactgaaaaagagcatttgtcctccaaaaatttttttggacaaaaaaaagcgctgatgacaacccgtgaataaagggttccactttcctaaaggggccaagaccaccttctttaaaaagcggatgacctttggcacatcacccgtccctgcaagggaaaggggttaataccccgcccaggggttcattgaatcccactttttaaaccccggacccaccaaaggggggccaagccaaaagccct

SEQ ID NO: 81077 - DNA, 868 bp, Zea mays
  Clone ID: MRT4577_17395C.1
gatcgatcgagatggagcagctagttgttgatgtgtttactactaaggcggactatagctatagctacaagctaagttgccgacagggattcagaacttgattctggaaaagctagcgagcagtcgatgaacacggggggtggtttaattaattatgagaagacgtagaaccagtagaggaagacgacggagaaggactggacgagcacagtggatgttatcataaacacgacagcagcggcaccatcaaataaagcctaggctgttgcttggttgcacaaaacgcatgcaaagcaaatcacggcaagaaaaaaaatccagcagagttttcccttgaacaggcaaggtgaaatcttttgacagggtgccgcgcgccctggacgtacaagcaggttttggagctggaaatttcggcagagtgacgccctagacagcagcgtttctggcgaaaaatttcggcagagtgacggcctgaaaagctagctaggttcttcttgtaaaaaatccggcagagccttgctctgatcagtaaagctaagctggtttgtgacggcaaaagggttttagtttggctggacaacaggcagttgctaataactccgacgagaagagaaggtcgatcgaccggggacagaacagaacctcccagggcacagggaacaaaaggcacaggcggtctgcaggcaaaagggccggggatcacggcagtgtgtggtaggtgaggtgagggcggcggcggtggtggtcgttggcaactgctgctagtcgctagcttgcagtgcagcgggacagcatgcggctgcaaggaaacctagagaggcgagtcgagagaaggggaaaagggcccggccggcctcgagggtcccaa

SEQ ID NO: 81078 - DNA, 2118 bp, Zea mays
  unsure (1)..(2118): unsure at all n locations
  Clone ID: MRT4577_173960C.1
cattgggaccctcgaggccggccggggaagcgatgaacgcactctgacggtcttgccagtttgccactacaaataagccgcaccgcatttcggaagaccacgcgaccgccacctccccgaagctgccgcgaccgatcgagcgtcgctccccgcgccgccgccaaaaccctagcttctcctactccatggccactgtctcgctcaccccgcaggctgtcttctccacggagtccggtggcgccctggcctctgctaccatcctccgctttccgccaaactttgtccgccagcttagcaccaaggcacgccgcaactgcagcaacatcggcgtcgcgcagatcgtcgccgccgcgtggtccgactgccccgccgctcgcccccacttagggcctccgcggcggcggaggtcannnnnnnnnnnnnnnnnnnnnnnnnnnnnnnnnncgccgcggctgcnnnnnnnnnnnnnnnnnnnnnnnnnnnnnnnnnggtcagcgcaattcccaacgctaaggttgcgcagccgtccgccgtcgtcttggccgagcgtaacctgctcggctccgacgccagcctcgccgtccacgcgggggagagnnnnngctgggagatcgccacggatgcgatcaccacgccggtagtgaacacgtcggcctactggttcaacaactcgcaagagctaatcgactttaaggaggggaggcatgctagcttcgagtatgggaggtatgggaacccgaccacggaggcattagagaagaagatgagcgcactggagaaagcagagtccaccgtgttcgtggcatcggggatgtatgcagctgcggctatgctcagtgcacttgtcccggctggtgggcacattgtgaccaccacggattgctaccgcaagacaaggatttacatggaaaatgagctccctaagaggggaatttcgatgactgtcattaggcctgctgacatggatgctctccaaaatgcgttggacaacaataatgtatctcttttcttcacggagactcctacaaatccatttctcagatgcattgatattgaacatgtatcaaatatgtgccatagcaagggagcgttgctttgtatcgacagtactttcgcgtcacctatcaatcagaaggcactgactttaggtgctgacctagttattcattctgcaacaaagtacattgctggacacaacgatgttattggaggatgcgtcagtggcagagatgagttagtttccaaagtccgtatttatcaccatgtggttggtggtgttctaaacccgaatgctgcgtaccttatccttcgaggtatgaaaacacttcatctccgtgtgcaatgtcagaataacactgctcttcggatggcccaggttttagaggagcatccaaagattgctcgtgtctactatcctggcttgccaagtcaccctgaacatcacattgccaagagtcaaatgactggctttggggcgggttgtagttttgaggttgctggagactttgatgctacgaggaaattcattgattctgttaaaataccctatcatgcgccttcttttggaggctgtgagagcataattgatcagcctgccatcatgtcctactgggattcaaaggagcagcgggacatctacgggatcaaggacaacctgatcaggttcagcattggtgtggaggatttcgaggatcttaagaacgatctcgtgcaggccctcgagaagatctaagcactctaatcagtttgtattgacaaaatcatgaggtgatggctgtcttggatcttgtcaagatctgtgacaatgatatgagctgatgactgcgaataagttctcttgtgcttattttattcgtcaaattcaataagctgtgattgctgcatgatctagtgttgggcttagttacacttgtcaagttaaattggtctggaaccatgtatacttgtagttttgctttagagtggtgacctggctatgtgggatgaggtcacgcttcccttcaattactgtgagattcacacatttaataatcttgataatnnnnntgaaaatcctcannnnnnnnnnnnnnnnnccggnnnnnnnnnnnnnnnnnnnnnnnnggccgcgaattcgga

SEQ ID NO: 81079 - DNA, 691 bp, Zea mays
  unsure (1)..(691): unsure at all n locations
  Clone ID: MRT4577_173961C.1
caatgcatgcttgtgacttagttctgattagcgcccgtctaattagtctttttgctggttagtttatctcctctatgatacgccttttaactgtttccagttcctctgatggacacacctgattgttttctgatagcatttacttttctgattagtacctgtaagaagtaagatacaccggtctcgtgatgtcttggtagcgctgtcttaatggtcaactgcctttagttatactccgtatttcactatttgcctttcagctgtaagatgtttaccatgtgttcttatccggccaattcaaataggatgtatgtgattagagtctgctatcattagttgatgtgatcgtttttgcggtgggaccataatcccagattttaggttagcgagcttgaagttccatgcatagggtagaacatatgtttgtttgggacttcatgtctgccccgatggcaagtccgtagtgcctgtgggatgaaaatgtccctgacacgtacaaccatttatttactttgtcagttgatattntgttatcagctgatcatgaaggatgggaaatttccatacgtggatttgatccatgtttctatctctgcctgtcaacacatgccacagtattttttttgtaatacttaaatataactttaaattgctaaagagcaacctttgcttactgtctgacctgacgtgc

SEQ ID NO: 81080 - DNA, 1957 bp, Zea mays
  Clone ID: MRT4577_173962C.1
cattgggtacctcgaggccggccattgggtacctcgaggccggccgggccgccacctccacctcctcgaagccgccgcgaccgatcgagcgaagcgtcccttcccgcgccgacgccgaaaccctagctcctcttacgccatggccaccgtgtcgctcactccgcaggcggtcttctccaccgagtccggcggcgccctggcctctgccaccatcctccgcttcccgccaaacttcgtccgccagctcagcaccaaggcacgacgcaactgcagcaacatcggcgtcgcgcagatcgtcgccgccgcgtggtccgactgcctcgctgctcgcccgcctccgcggcggcggatgtcagcgcaattcctaacgctaaggttgcgcagccgtccgccgtcgtattggccgagcgtaacctgctcggctccgacgccagcctcgccgtccacgcgggggagaggctgggaagaaggatagccacggatgctatcaccacgccggtagtgaacacgtcggcctactggttcaacaactcgcaagagctaatcgactttaaggaggggaggcatgctagcttcgagtatgggaggtatgggaacccgaccacggaggcattagagaagaagatgagcgcactggagaaagcagagtccaccgtgtttgtggcgtcagggatgtatgcagctgtggctatgctcagcgcacttgtccctgctggtgggcacattgtgaccaccacggattgctaccgcaagacaaggatttacatggaaaatgagctccctaagaggggaatttcgatgactgtcattaggcctgctgacatggatgctctccaaaatgcgttggacaacaataatgtatctcttttcttcacggagactcctacaaatccatttctcagatgcattgatattgaacatgtatcaaatatgtgccatagcaagggagcgttgctttgtattgacagtactttcgcgtcacctattaatcagaaggcattaactttaggtgctgacctagttattcattctgcaacgaagtacattgctggacacaatgatgttattggaggatgcgtcagtggcagagatgagttagtttccaaagttcgtatttaccaccatgtagttggtggtgttctaaacccgaatgctgcgtaccttatccttcgaggtatgaagacactgcatctccgtgtgcaatgtcagaacgacactgctcttcggatggcccagtttttagaggagcatccaaagattgctcgtgtctactatcctggcttgccaagtcaccctgaacatcacattgccaagagtcaaatgactggctttggcggtgttgttagttttgaggttgctggagactttgatgctacgaggaaattcattgattctgttaaaataccctatcatgcgccttcttttggaggctgtgagagcataattgatcagcctgccatcatgtcctactgggattcaaaggagcagcgggacatctacgggatcaaggacaacctgatcaggttcagcattggtgtggaggatttcgaggatcttaagaacgatctcgtgcaggccctcgagaagatctaagcactctaatcagtttgtattgacaaaatcatgaggtgatggctgtcttggatcttgtcaagatctgtgacaatgatatgagctgatgactgcgaataagttctcttttgcttattttatccgtcaaattcaataagctgtgattgctgcatgatctagtgttgggcttagttacacttgtcaagttaaattggtctggaaccatgtatacttgtagttttgctttagagtggtgacctggctatgtgggatgaggtcacgcttcccttcaattactgtgagattcacacatttaataatcttgataataaaaatgaaaatcctcacaaggaattaacataaaaaaaaaaaaaaaaaagcggcc

SEQ ID NO: 81081 - DNA, 438 bp, Zea mays
  Clone ID: MRT4577_173963C.1
gcagctttagaataatctgatgaaagtatctccatccaccaaattgatatagggaatgctaggatatgctagcccaaaagagacttatgagagaggaaagtttattgtcaaaaattcaccaccccaaggatagatgcaggaagggtgtaaagcctatctcttggatgattcagctgcttcactgttcatgaggtgtcatacatgcagtaaaggtgtgctggacttttttcttgtgcttccaccttgcgtggtagacatgcaggtgtgtgttggggattgttaattctcatttcccctctgaaatagccccagctcgacctccatcaagccacctcttgttatgctagtttggagcccaaactgaattgcttgtgctctcgacgatttcctggtttcccctatgtgccttgctactcatctacacccacgtcacccccc

SEQ ID NO: 81082 - DNA, 851 bp, Zea mays
  Clone ID: MRT4577_173964C.1
cgggaaaaaaaattcaaaaaaaaaaaagaccgccacctccccgaagctgccgcgaccgatcgagcgaagcgtcgctccccgcgccgccgccaaaaccctagcttctcctactccatggccactgtctcgccaccccgcaggctgtcttctccacggagtccggtggcgccctggcctctgctaccatcctccgctttccgccaaactttgtccgccagcttagcaccaaggcacgccgcctccgcggcggcggaggtcagcgcaattcccaacgctaaggttgcgcaaccgtccgccgtcgtcttggccgagcgtaacctgctcggctccgacgccagcctcgccgtccacgcgggggagaggctgggaagaaggatcgccacggatgcgatcaccacaccggtagtgaacacgtcggcctactggttcaacaactcgcaagagctaatcgactttaaggaggggaggcatgctagcttcgagtatgggaggtatgggaacccgaccacggaggcattagagaagaagatgagcgcactggagaaagcagagtccacagtgttcgtggcatcggggatgtatgcagctgtggctatgctcagtgcacttgttccggctggtgggcacattgtgaccaccacggattgctaccggaaaacaaggatttacatggaaactgagctccccaagaggggaatttcgatgactgtcattaggcctgctgacatggatgctctacaaatgcgttggacaacaataatgtatctcttttcttcacggagactcccacaaatccatttctcagatgcattgatattgagcatgtatcaatatgtgccatagcaagggag

SEQ ID NO: 81083 - DNA, 508 bp, Zea mays
  Clone ID: MRT4577_173965C.1
gtgtacctcgaggccggccgggaactcgtttcatacggacgcgaactgttcagagcgttccgctgaccattccgcggccttctctgtcactgactatcgaagcgaggtgcgcgctgaagccggaacgccagtgtgtcgcctcctatcgcggcagcacgttgacgcgagccgccgaggtgcaacctgctcgcgcatgctgcgttgagtgcactccaccttcattgccgaaagtgtgtccaccttaggttcccgggtgcagaccaccttaactgcacacatgtttgcagggaagctggatggcaccctctcaatggagctgatcataagattcctggaacgggaacacagcactctgaaccgctgaggatctaggaactgagataatggcattcgcgggcagtgcatctacctggccaaagattggacttcacattcgcacattacagctccataggagatacgtcctgcggtggagatatataatgcgaaaagcctcgattgatgcgtg

SEQ ID NO: 81084 - DNA, 447 bp, Zea mays
  unsure (1)..(447): unsure at all n locations
  Clone ID: MRT4577_173966C.1
gggaagcataattttccattggttggagggaaataaggaaaaaaaataaaaattaaccctttgtcccaataccttatgtttacttatggaacaaaaatagcctgataccttttttttttttggggggggggcctaaacacggggggaaaaaccttttaagggaggtacctaaattgccacgaccttgtcagtcaccccccccagataattacaaggcgggaaggggggaaatgaaacaaacatatcgtttttgaaagcctcgacttgcttaaacccccaataaaatctaaggggggggggggtgggaaaccaccaatggttgtttcttttaaaaatagttcctagtgataataaaatctagggaccccttgcccttgattattttttctttacggccaatttttagaaaacaaaatggggctctcccctncttttcggttttttttt

SEQ ID NO: 81085 - DNA, 590 bp, Zea mays
  Clone ID: MRT4577_173967C.1
cattgggtacctcgaggccggccgggatattcttcaccggcctgcctaaacatatattcgcgcacattagcagccgataatgccactcccgtcatatagctccgtactcttacgcttcatctccccacgaactcgtccccaatccacctgcacctcacgggtagccgcctcctggggagccgtcgccggcaccagccgaaactctacctcccccagaccatagaaggtgaaaacgactggtgccaatcacataagccgcaggatgctaaagataacaagggatatctaccgcacgggccatgggtggatatcggttgacatgcgctctccactgacatttcgctgctgataatacatcttttgcttccggacgtattcagatagatctgctattcgtcatagtatgaactagattctaataatttctgtggatgcaatgatcctggctgcttttgacatctatccttcgtaatattcagagaggccttgctatactgtgctgactacatcaggaatgatgagttccttcaggtgttcttcatacacctgggtagctgatctagtgcgacgctcatcgatttgtgactggt

SEQ ID NO: 81086 - DNA, 823 bp, Zea mays
  unsure (1)..(823): unsure at all n locations
  Clone ID: MRT4577_173968C.1
ggcagataggttggatgatggttgtgcgtctgttatctctgaggaggccaacataatggggcttcctggtaatgttgagggaccaagagaacaaactcaaagatgcttcaccttagaagaggctacggatacaattctcttctgcagctccattgcccatgacattgcatacagggctgcaacaattggactggagcatgaacagcattcagaacttgcttctgctcgtcgcccaacagttcccatggcaggacaatccattcccaggggtgatggttcacggaaaccaccccacagactagtgccaagacataggaaaagatcagaaggtgaaacagttacagaacctgacaagatggaagtggtcgctgaagatcctatacctgttcggccagttcctgaattttcaaggacatcaggcagcttcaagtctccaaaggtcgattcaaagtgcaactgtgcaattatgtagagttatgcatcaactcaagttggcaactatacttattatgatcactaaaatccatggttgcttgttattatttcagcgcatgtgagttaacaaatgaatctgcacccacctggttcagtaagcagcagcgacctacaattttttttttggttgtggtgcatttgccctttatttctgggtcatagagtgctcaacgagccattcttttgtaaattcttgcttctccagtcagttctatggtttgtctatttttttttcctgagagtcaacatctcaagcttaagcatatttatataataaaataataacatttatgataccaaataagcatcattagatttttcgttnntt

SEQ ID NO: 81087 - DNA, 3024 bp, Zea mays
  Clone ID: MRT4577_173969C.1
aattcggcacgggggcatctcgccattcgcaatcggcagtcgccaccggcaccaccacacccaccctcgcggccgcggacagcagcagacgcggcgagcgaacgatccactgaccactggcgggcggcacggcagccatgtctgcgccgaagctggaccgcaacccgagcatccgcgaccgcgtcgaggacaccctccacgcgcaccgcaacgagctcgtcgccctcctgtccaagtacgtgaacaaggggaagggcatcctgcagccgcaccacatcctcgacgcgctcgacgaggtccagggctccgggggccgcgcgctagccgagggacccttcctcgacgtcctccgctccgcgcaggaggcgatcgtgctgccgccgttcgtggccatcgcggtgcgcccgcgcccgggagtttgggagtacgtccgcgtcaacgttcacgagctcagcgtcgagcagctcacagtctcggagtacctccgcttcaaggaggagcttgtcgacggccagcacaatgatccctacgttctcgagcttgacttcgagccgttcaatgtctcagtcccacgcccaaatcggtcatcatctattggaaacggtgtgcagttcctcaaccgacacttgtcctcaatcatgttccgcaacagggattgcttggagcccctgttggatttcctccgtggccaccggcacaaggggcatgttatgatgcttaatgatagaatacaaagcttggggaggcttcagtctgtgctgaccaaagctgaggagcacttgtcaaagctccctgctgacacaccatactcacaatttgcttataaatttcaagagtggggcctggagaagaaaggttgggggtgatacagcagggcatgttttggaaatgatccatctccttctagacatcattcaggcgccagacccatctaccctagagaaattcttggggaggatccccatgatttttaacgttgttgtggtatcccctcatggatactttggtcaagctaatgtattaggcttgccagacacaggaggacagatcgtctatatactggaccaagtccgtgcactagaaaatgagatggttctccgtttaaagaaacaagggcttgatgtttccccaaagattctcattgttactcggctgataccagatgcaaaaggaacatcatgcaatcagcggcttgagagaattagtggaacacagcatacttacatattacgagttcccttcagaaatgaaaatgggatacttaagaaatggatatcaagatttgatgtgtggccatatctggaaacatttgctgaggatgctgctggtgaaattgctgctgaattacaaggtactccagacttcataattggaaactacagtgatggaaatcttgtggcgtcattgctatcttacaagatgggaattacccagtgcaacattgctcatgctctggaaaagactaagtatccagattcagacatattttggaagaatttcgatgagaagtaccatttctcctgccagttcactgctgatataattgctatgaacaatgctgattttatcatcaccagcacataccaagaaatcgctggaagcaaaaatactgttggacagtatgagagtcatactgcctttactctgcctggtctgtaccgagttgtccatgggatcgatgtcttcgatccaaagttcaatatagtctcccctggagctgacatgtccatatactttccacataccgagaaggccaagcgactcacctctcttcatggttcaatcgaaaatttgatttatgacccggagcaaaacgatgaacacattgggcatctggatgaccggtcaaagcccaccctcttctccatggcaagactcgacagggtgaagaacataacggggctggtcgaagcttttgctaagtgcgctaagctgagggagctggtaaaccttgtcgtcgttgccgggtacaatgatgtcaacaagtccaaggacagggaagagatcgcggagatagagaagatgcatgaactcatcaagacccacaacttgttcgggcagttccgctggatctctgcccagacaaacagggcccgtaacggcgagctctatcgctacatcgctgatacccatggtgctttcgtacagccggccttctatgaagcgttcggtctcaccgtcgttgaggccatgacctgtgggcttcctactttcgcgacgctccatggaggtccagctgagatcatagagcatggcgtctcgggcttccacattgacccgtaccaccccgaacaggctgctaatctgatggccgacttcttcgaccggtgcaagcaagacccagatcactgggtgaatatatctggagcagggctgcagcgcatatacgagaagtacacatggaagatatactcagagaggttgatgacactggccggggtctacggtttctggaagtacgtgtcgaagctcgagaggcgggagacgaggcgctaccttgagatgttctacatactgaagttccgcgagctggcgaagaccgtgccgcttgcaattgaccaaccgcagtagcttgcgcaactgcgactgcgtagcacttggtacaagactgaaacctgaaggaccttcagtaatttaggcgcggcagacggtagccaataaaatgtgccggagctgaactggtttttattatgtacataaggcagtataacaaaattactgaaggcaggtgggttgcagttgtgtgttcgttactgtttactgtattatgtcaagctgtcggctgcaatttctttgctggcaagccgcaggcactggtgaagtgctgataaatacatcatattctgttgacctgtgaagaagcttgttcaaggtagattccattgtactagctctgttgctcagcatctccttgtttgggaacattaacaaccagccctcgcccctcaataaaatagtcgcatcatgtagctacagttttcatctgaaaaaaaaaaaaaaaaaaaaaaaaaaatagataaaatt

SEQ ID NO: 81088 - DNA, 577 bp, Zea mays
  Clone ID: MRT4577_17396C.1
cctcgaagccggccgggatgttgtcttgatcctgtggtgcgtgctcatgcccctcttactggtctccgttaccaccatgccactccagcattttgtcgagctgtcatagttctccgtgatcaggagctccgctgctttgcccatgcgcttgaatgccacctcagacaacttcatgtgcacaatgtccttcactactaccgcgagatcctcgactccaagtcctcaccgaccgccaaacgaggagaacctgaaggcttccattaatgtaccttctcctatcagaactccacttttctgacgctgattgacacaatgaacgggaaggctctcccctcgacgtacatactcacactcaaaaacaccgccagtcccaagcaggcgtcccacctgctcaagactactccacgctccgcatcttcgatgccgactataatgccgtccgccacaacgccatctatgtcgacggtaaggtcatacaaggtcctgtccgaccgcaaccccagcaacctaccgaggggcgagctctacatcgacctcgtcatcgagggcaccggcgtctacgtcgaccgcgacggcg

SEQ ID NO: 81089 - DNA, 352 bp, Zea mays
  Clone ID: MRT4577_173970C.1
ctattctccaatatgatggtactaacatttaattctctctctagatccaaacggcccctttgtttttggtaacattacctcttttgagagattctgtgcaacagctgatgaacagggaaagctcgagagctccaccatctttgttttggcaacattaccctctccgagaaattctgtccaacagttgatgaacagtagaagcttgagagctcgccagtccccacctgcgaaggagaggcaaagaacgaaaggaggggcggtgcccatgtactggctagaggaggaatcaacgaggaaggcgtacactgtgcaactggacggcgacaccatgttctccttcaagcaacgcgcc

SEQ ID NO: 81090 - DNA, 172 bp, Zea mays
  Clone ID: MRT4577_173971C.1
cgggcgggaggaaccatctacaccgactagcgagccacagcaaacacacgtagctagtctacgagcagcaccagtggaggcggcgatggcggcctccatgatctcctcgacagctctggcgggggcgcctcacgtcctgccggccctagagcgccgccgctcctccttcgcc

SEQ ID NO: 81091 - DNA, 359 bp, Zea mays
  unsure (1)..(359): unsure at all n locations
  Clone ID: MRT4577_173972C.1
tcggctgcgagaagacgacnagagggcgatcgcaatgttaataatatggattgatgcttagtatctcttcctctcatgtatgtctatngcactattatattntgcttcagtggatatgaatgtacgctctcgctttgctcgttcacatgacctgcactccagagctgacagtagagtctgccagatggaaatcgcacatttgatgatgggggggccaaccgtataaataaaaacactgcgtgtcctaaaagaatcaattcactctttattaagtgaaagaatgtttgctacactcacaaagactcgggacaggtaaagaaaaaaaaggaggagcgttttaatttgaagttggtgaaata

SEQ ID NO: 81092 - DNA, 251 bp, Zea mays
  Clone ID: MRT4577_173973C.1
catcccatgaatccgctgtaaataatattatccttttaataagaagcactagttatttacagcggattcatgggacggtaacagtacttgtacaaacatatagataatattatttgtcaaaaaaaaaaaaaagggggaccccctgcctggtgaccccgccgccccgggatttattccgggcccggaccctgcgggggtacaggtttccccaatggtgagccgtataggagctgggcgaaaccatggccatg

SEQ ID NO: 81093 - DNA, 255 bp, Zea mays
  Clone ID: MRT4577_173974C.1
attcctgggcaaacgagaaacatccaaaaaccgaacttctcttattacaactattacttataggacattagatgaggccaccaataatgatgcatcagctacaacaacgctggctagctaacctaactgcgctactctgagtggcagcagttgcttccattgaaccaaggtgccagcttgaagtgctgttgcttttgcaacggcaacaatcgccgttgcgtcaggaatgttgctggcttccccccgccttgcttt

SEQ ID NO: 81094 - DNA, 354 bp, Zea mays
  Clone ID: MRT4577_173975C.1
cgacccactcctactcacgaactagccatatacatacacaattttctttcaatcataacaagcaacttacctttatcacttataatctttcgacggtctccaaccctatctttcctacactcattgctacaaaccatcacaaccacaacatattcagcaactcttgctaccacttatcatccaattagccttcacaaacctttacccctactcttaaaaacaacaatttcttccattcaaccaactcactatacttaacccttctacttatttgcaccaacaacaactactaccattcaaccatctatctacttcctacatttaacatcaacaattttttccatttaaaccaat

SEQ ID NO: 81095 - DNA, 654 bp, Zea mays
  Clone ID: MRT4577_173976C.1
gggtacctcgaggccggccaaagaaaatcctcacccattttcttcgtagccaaacactctgaaattctcagttatgtcgtggcaagcgtatgtggatgatcacctactgtgtgaaatcgaaggtaaccacctcactcacgccgctatcatcggccaagacggaagcgtttgggctcagagcaccaacttccctcagttcaaacctgaggaaataactgccatcaataatgactttaatgagcctggatcacttgctccaactggattgtatatcggtggcaccaaatacatggtcatccagggtgagcctggtgctgtcattcgagggaagaagggtcctggtggtgttactgtgaagaagaccggtgcggccttgatcattggcatttatgatgaaccaatgactccaggtcaatgcaacatggtggttgaaaggcttggcgattatctcattgatcagggtctctaatctttgctttatgtcttgttatcgtgcatatttcattggcttctgtacaagtttttgcatcgacctggactggaatgctttgattgcagtgtaataatcttgttgtgagtatgaaaagtcacgggatctgcgtgtagtgaagaaagtgtttgatgcttgagaaaaaaaaaaaaaaaaaagcggcc

SEQ ID NO: 81096 - DNA, 117 bp, Zea mays
  Clone ID: MRT4577_173977C.1
ggtaatgttcaagatgaaagacaagattgatacacaatgtacacaatacctctagctcatgtgcgtgttgcatcccaccaactcatacgcatgcttactcacagaaattaatgaaaa

SEQ ID NO: 81097 - DNA, 492 bp, Zea mays
  Clone ID: MRT4577_173978C.1
atggaccaagtaaaaaggaacttcataaagacaagtccaaaagagagcaaaagaaaacagagaaaaggtgctggaccgcagaccaccggacggtccggtgccacccaccgaacagttcggtatgcaccagacagtccggtgcttggtccgaccaactcgatgctctcggggttttcagcctacgtcggctataattccccagatgtggtgacttccgctgccaccagcggggagaagattgttcagtggcccaacggcaacggcgtgcgagagaagggcgtcggggtaggcgatgggggtcgtcatggagggagcaacgcactaggggagtccgacgatgggaggcaccgacgggaagggggcgatcggtttaaatcgctaggcgcacgacagtgcaggttgggacaggctggcgaggaagacgccagggagtggaggaggctcaacgaagacaacagtgttggggacttgttctcaaatgctatgaattaa

SEQ ID NO: 81098 - DNA, 248 bp, Zea mays
  Clone ID: MRT4577_173979C.1
tttttgttcctatcacacagggatgggattccaatctcatgcgggaaatcactttaatcctcattttctaaagtatccaactctcatattacatatttccattcactaccacggttagctacatacattggctgttcttacgtttacaggtcacttattaaattaatacatatacagcgttctttatatgggatgggttatacaacacatgttccaccgattattcccattcagcctttaaataaccc

SEQ ID NO: 81099 - DNA, 720 bp, Zea mays
  Clone ID: MRT4577_17397C.1
ggccgcttttttttttttttttttggacgagcacagtggatgttatcataaacacgacagcagcggcaccatcaaataaagcctaggctgttgcttgttggttgcacaaaacgcatgcaaagcaaatcacggaagcaacgctagctgtgtgtgccgcgaaagaaagaaagaaaaatccagcagagttttcccttgaacaggcaaggtgaaatcttttgacagggtgccgcgcgccctggacgtacaaacaggttttggagccggaaatttcggcagagtgacgccctagacagcagcgtttctggcgaaaaatttcggcagagtgacggcctgaaaagctaggttcttcttgtaaaaaaaaatccggcagagccttgccctgatcagcaaagctaagctggtttgtgacggcaaaagggttttagtttggctggacaacaggcagttgctaataactccgacgagaagagaaggtcgatcgaccggggacagaacctcccagggcacagggaacaaaaggcacaggcgcgcggtctgcaggcaaaagggccggggatcacggcagtgtgtggtaggtgaggtgagggcggcgcggcggtggtggtcgttggcaactgctgctagtcgctagcttgcagtgcagcgggacagcatgcggctgcaaggaaacctagagaggcgagtcgagagaaggggaaaagggcccggccggcctcgagg

SEQ ID NO: 81100 - DNA, 405 bp, Zea mays
  Clone ID: MRT4577_173980C.1
tttggtgaccactgctgaagggctactagagaagctagaaaaacagaacgtgcggcagtcgagcgagcaactgctcgaagcctcgggaacgcgggcaataggaaaaggcaaaggctcgagaaggctcttgcagaggcaagagagcggaggtaacgatacaaatgctctttaaaggggagggggggggggacctattttgatattcgacaggattcacactttcatagggcaacttctaggaattatatccgaaacccagattacagcaacagagcaatggatcgatgtatgattccaggttacgacatataccaccatagagaggaatgaacgcacagctgggcctgttacaaaagctttttctcttaagaacacgcctaacttggtggctcaatatgagcatgc

SEQ ID NO: 81101 - DNA, 588 bp, Zea mays
  unsure (1)..(588): unsure at all n locations
  Clone ID: MRT4577_173981C.1
caatttgatctttggnatagattggttagaggatcacaatcccatgtcagtgcattgggcccagaagtggatggaatttaacgatcacagcaagaggatttatataccgagagggttgtcacaaattcagtattgttccagcatcaacaacttacagttggaggccttgctgagaagggacgcagtcaaccaattattggaacttcaggttgtaactgatgacaagatgtctgaagtgcccaaggtgatcattgatttgattagaaaatttgaacatctgttccacaagccccaaggtttacctccaaagagaagcgttgattccaggttaaagcatattggggaggagatgtgggctatggccgtggcagttgaggatgacaatactaattcagatgatatggaacctaccaaagacagcactgaagaaaatgtctcagccatagaagttgccgctgtcaaagacagtgagagtaacatggcaatcagattctgggcttcagcccaaggacagcaggtcctaactctggtgaattctgatagatcaaccaattctattagcagtcacctgaaagatagcttgcacca

SEQ ID NO: 81102 - DNA, 255 bp, Zea mays
  Clone ID: MRT4577_173982C.1
gggggatcaagaagcctcgtggcctatgccagtggcccgcattgcacatggtgggtgcggtggcttaccatctccccaagtgggagagtggacgtcataatttgtggtagagggggtacgcgttcgcgcggcccctgccaaatcttataaattttatttaagtcccctttagagaagggcttgaaatgtaatctttgttattagttcccttcaatgaaaagcttggaaagggaacctttgttccccccattttat

SEQ ID NO: 81103 - DNA, 3495 bp, Zea mays
  Clone ID: MRT4577_173983C.1
caaaggctgaatcatagactgcgccacccatccattgctgacccttagcttccattccatccttcatatcgcgcccatggatcatcgtcagccgccgccgaataagacggcggagcttgaccccgtgctgcactccatcggcttccagatcgaggaggtgtcgccgtcgcaggtcaccggccggctccccgtcacacccaggtgctgccagccgttccaggtgctccacggcggcgtgtcggcgctggtggcggagggcctggccagcatgggcgcgcacatggcgtcgggcttccgccgggttgccggcgtcagcctcaccatcaaccacttccgcagcgccaaggtgggagacgtcgtcctcgtccgcgccgccccgctccacgtcggccgttcgacgcaggtgtgggacgtgaagctatggaaggaggatcagcaggggaagaaggggagtcagatatccgagtcaagggtgacgctgctatgcaacctgcccgtgccggacatcctcaagcacgctggcgatgcactcaagaagtatgccgacgcccccgccgcccaaaaacccaccgccaccagcagattgtagatatatagttaagttattagtagaggtgatatgcagagatttatttattttaatacataacgatataaacactcattactcatacatgtatatctagtatacaattgtacacctacatgaactaaaaaaaatgagaaaatgaacacaactgacaaaagtaaagaagaatcagcgcctgaggccagggcgaaaaggagtagtctatgaacagcaggtcaatattcttgtactatcccttgttggtacggagggaccggtaggaggtctaggttatgccgataagactgggttataggtttaaggacacaaggtgaccctgctttttcagggtaagaaggggtagagaaaatgcctcgagccgaggtccgagtaccaagcgctgcagcgctgaagtatgagccccgtggactagccattgcttctccacgaggctcataccaggcgctacggcgctgaagtatgtaacccatgccatactcccaggaaaagctcgaacgaccttcaacaaaagggtacctgtacccgaaacagacataggtgggtaggtatagaataccgaacgtggaggtaggcggtatggagatctcatgtttgttcttgcgcttattggagccagtctgagaccggacgtgcaggatcagaaacctctagcaacaatgaacaagcaatttggcgtattcatccgacctttcatcaaagcagcacagtagcatataataggattggaaaggccctggcccctctcaagggagctttggattaatcagatttcaaggatgttgatatggttattgaggctgttattgagaagattcctttgaagcaatcaatatttgctgacattgagaaaatctgtccaaaacattgcatacttgcaacaaacacatccaccattgatttgaatgttgttggcaagaagacaaattctcaagatagaattataggggctcactttttcagccctgctcatattatgcccttgcttgaaattgttcggacggagaagacatcaccacaagctatccttgatctcatcaccattgggaagataataaagaaagtccctattgtggtcggcaactgcacaggatttgcagtcaaccgtacattttttccttacacacagggttctcatcttctagttagtcttggtattgatgttttcagaattgatcgagtaataagcacctttggcatgccaatgggaccttttcaactccaagatgtggctgggtatggagttgccttggcagtaaaggatatctacgctgatgcctttggagaaagaaatttggactctgaccttgtggatttgaagtaaacgcatggaggacgaggtaaggtgatgagccagaggttactattttgcatgtgatcggggagtaccgaaagcaagcaaacacaattgcctgttggaaagcctgttactttaatggatcaagatattttggagatgattttcttcccagttgtgaatgaggcatgcagggttatggatgaaaatgttgtaattcgagcttccgatcttgatattgcttctgttcttggaatgggctttcccaaatacaggggtggtcttgtcttctgggctgacactgttggagcgccttacatacattcgaagctaagcaagtgggccgaaatgtatggtcccttcttcaaaccttcatcgtatttggaacaacgagctaaaagtggtgtaccattgagcgcaccaggaacatcacagcaaggttcggcgaggtcgcgcatgtgaggtgctgtccagcattgggaagaagaattcagaatacttgcggccgggatgagccatagacggctgcttcgcagatcaaaaacacctccttgaatacaaataggaggcacagaaatgatgaaaaataaatggttttgcatagctgtaacagttttggtgccttgaactgtaactatggcagagtttctgtgaacagagtggcatgcattaattatacttgaccactctatatgtcgctgtttgtataattttcaatacgtacaagaactaaaatatattattggatagtattttttataataaactcatctgttgctatactttatttcaactctcaatctatgacatgtccgatcattgtcgaggatcttgaccgacctcgtcaaatgcttgtggagatgctctgcgaggatagaggaatcttcttggagatagctgatttcatcaaaggacttggactgactatcttgaggggtgtgatggaaacacgcaaaagtaaaatctgggcacgattcactgttgaggcgaaccgggacgtaaccagaatggagatattcctatcgcttgtgcgcttattggagccaaattgtgacggcagtggagcggcggacaacactaacaacatgaacatgcatcttggtttggtgcaccaacctgtcatcccagcaacaggtctcatccaatgagattaagactaagaggaaaccctcaagcatcttccaagtgctaagagcaggaggagctcagctaactcctgccatgactagcatcaccaatacgccatgcagtgcaccacctgctttcccgagacaccttaatctgtgcaaaagtgacgtccttcagtccttgagaccaggtcgcagaaatggaagaaggaaaacaacgcaagagtgatcatcaggcagtgttttgttcgtatgatctttagattgtttgttagttagcgctgtttggtcgtatattagtggttttttttgggtactgttattcagaatggaagttcttgggttggtttatttcacacacacagaaagatggaatgccacctttgttatgtctcttcacattagaaccagtgagcatagctagtgaaaaaatatttgagaagattcttgagtcaaaaaaaaaaaaaaaaaaattgttattactc

SEQ ID NO: 81104 - DNA, 819 bp, Zea mays
  unsure (1)..(819): unsure at all n locations
  Clone ID: MRT4577_173984C.1
tcgagggccggcccggtatatttgccttgaataaatcannattcttacacttttcttaagtcaaaaaatttaaagcttgtctgaatttatagaaaggagtgtcaagatttatggcactacattagcattattggattggatgcaccatgaactatattttcactttttcagaatatgctcatttggtgtcacaaatatttgtagctttttttataaactcggtcaaaaatgaaaaagttcgactggcaactttaggtattattcatttatcgaggcaagattggaaatgaaggtagtagttacttgaggttaaacttttaagtggcagccaatcagtaaagccgttgtatcaaggtttttatgagttctaaatcctggaatatttgaccagtgttcaactttgtctccgatttcagttgaagcaaacagtgtttatccttgaactgcaaatgtgtaacaaaatatggagaccacgccaatgtcgctctatggctatcaatgttaggaaacctgagctcagcgtcagctatacattattcataatgtacatggactatgtgagcagaatcagccgcctgcaaaaatgtggttagcctgaaggaaccagtagtgcagtgttttttgtattaactgttgctgtacttcaaacctgtcatgagaagtgctgctatgtttctcctgatgttaatttattctgcattgcagacgggttgtttctctgtcacatgtgcaaaagtcagtgccattagctttgcgattggtgtttgtggcagggttcacactcaagaaaaggctgcgcagatgggctgctagactgct

SEQ ID NO: 81105 - DNA, 966 bp, Zea mays
  Clone ID: MRT4577_173985C.1
cggacgcgtgggcggacgcgtgggtgatgttttcagaattgatcgagtaataagtagcttcggcatgccaatgggaccttttcaactccaagatgtggctgggtatggagtggccttggcagtaaaaggtatctacgctgatgcctttggagaaagaaatttgaactctaaccttgtggacttgatggtaaaggatggacgacagggaaaggtgaatggcaaaggttactacatttatgagaagggcgggaagccaaagccagaccctagtgttaagcatgtgcttgaggagtaccaaaagcaggcaaacacaatgcctggtggaaagcctgttactttaacggatcaagatattttggagatgattttcttcccggttgtgaatgaggcatgcagggttatggatgaaaatgttgtaattcgagcttctgatcttgatattgcttctgttcttggaatgggctttcccaaatacaggggtggtcttgtcttctgggctgacactgttggagcaccttacatacattcgaagctaagcaagtgggctgaaatttatggtcccttcttcaaaccatcatcgtatttggaacaacgagctaaaagtggtgtaccattgagtgcaaaaggagcatcacagcaaggttcagcgaggtcacgcatgtgaggtgcttcattgggcagaagaagaatacagaatactggtgggatgagccgtcgacggctgcttcgcagatcaaaacacctccgtgagcacaaaaggaggcacagaaacgatgaaaaaaaataactggatttgcatagctgtaacagttttggtgccttgaactgttaactttggcagagtttctgtgaacagagtggcatgccgcatgcattaattgtacctgatcactctgtatgtcgctgtcatgtgtacaatgttcaatagtacgcacgtaataaagaatggaaatatatgccgctatc

SEQ ID NO: 81106 - DNA, 1004 bp, Zea mays
  unsure (1)..(1004): unsure at all n locations
  Clone ID: MRT4577_173986C.1
cttgtactgcgcccgtcacgtcggttacttatatacatattggtttttatgccttttatatggatcaaattttgaaacatacagattatatttgtaccatttacatgatgattgcattatattattgaattatttttttttagatttaattgttatctttatttgattaattgattttatttattatttttttatattttgcatatgatatattgatattttatatatttgatagtctttatgattgattttttatacattgatttattgtttttattgatttattgattgattattttttttattttgattgtattatttattgttttgattttttattatttttattttttttatattgattgtcttttatatttcttattgtatgttgtttttgttgtgtggtttgtggattttgtgtgtctattttttttgtttatctatttatatttttgttctttttgtttttcttttgtgttttttatatttgtttttttttttatgttttttgttttttttttttttattttttttgtttttttttttttgtttttttttttttattttgtttttttttttttttttttattttttttttttttttttttttttttttttttttgttattttttttttttttttttttttttttatttttttttttttttttttttttntatttttttttttttttttttttgttttgtatttttttttttttttttttttttttatttattttttttttttttttttttttattttttttttttttttttttttttttttttttttttttttttttttttaattttttttttttttcttttttttttggttttttttatttttttttttattttttttttcttttttttttttttttttttttttttttttttttttttttttattttttttttttttttttttctttttttttttttttttatttttttttttttttttttttttttttttttttagtttattttttttatttt

SEQ ID NO: 81107 - DNA, 305 bp, Zea mays
  Clone ID: MRT4577_173987C.1
ctgacctattaccttttcttctcctaactccactcgaactaaccacgggggtactccggggctaaaattacccaatccatcataccttaaccctaaataaattcttcatccacctccaacataaatcaacgtatagcaccgataacctcaactccaaatcgtatatgacacgctcggttcgcggttcacgcgactaggctgacgactggctacccgcctctcgagcgaaacccagcatgacagaatcacattgaaataacgacacgctctgcaacaatagctccatttcacgctgacgcagcagc

SEQ ID NO: 81108 - DNA, 255 bp, Zea mays
  Clone ID: MRT4577_173988C.1
gatggaggaatggagacagttggcttaaccagatgctatatacagattattactggctccaaaggatgagcagataagaccataagacttggatcaatgtaaatcctcacctgccctttgaagagccaataagggcatctttgtctttaaatacagccaatgttattcagattttgtacttgtctatctgtttacctcagtgtagatgatatgaggatggtataactatgtacattgtttttgaacatactttgt

SEQ ID NO: 81109 - DNA, 465 bp, Zea mays
  Clone ID: MRT4577_173989C.1
atttctcgttattttttttgcaatgtgaccaaatcgcttatgtggcagctaaattaatgctatagaaactagctgacgtggagggttaggattgctctaaatgatttttagagatgaatgtttctgactcgtgagttcccttaactatttatagaggcggtcattacatgtgcatgcctggagaaatggttcgacctatgtcctaaaatcattttctagtagtgtcatacgagcaaactttggccatttcattaacctataaaactagtcttaggtggaagtttcatgtgagtataatatgcatttaataaactatcacacaaataatttgatgatatgataatgtttttaagaagagagagatgataactatatttacactattaaaatatacctttgtgtgatattcgggttcaaagcttaataatattgaaataatactcaaaaaaaaaataaaagggcggg

SEQ ID NO: 81110 - DNA, 933 bp, Zea mays
  Clone ID: MRT4577_17398C.1
ttttttttttttttttccttctttttatgcgtctcgacgacgattaattacctggttaacgatcgatcgagatggagcagctagtttgttgctgtgtttttactactaaggcggactatagctatagctacaagctaagttgccggcagggattcagaacttggatctggaagagcgagcgagcagtcgatgaacacggggggtggtttaattaattatgagaagacgtagaaccagtagaggaagacgacggagaaggactggacgagcacagtggatgttatcataaacacgacagcagcggcaccatcaaataaagcctaggctgttgcttgttggttgcacaaaacgcatgcaaagcaaatcacggaagcaacgctgtgtgtgccgcgaaagaaagaaagaaagaaaaatccagcagagttttccttgaacaggcaaggtgaaatcttttgacagggtgccgcgcgccctggactggacgtacaagcaggttttggagcgccggaaatttcggcagagtgacgccctagacagcagtgtttctggcgaaaaatttcggcagagtgacggcctgaaaagctagctaggttcttcttgtaaaaaaatccggcagagccttgccctgatcagcaaagctaagctggtttgtgacggcaaaagggttttagtttggctggacaacaggcagttgctaataactccgacgagaagagaaggtcgatcggccggggacagaacagaacctcccagggcacagggaacaaaaggcacaggcggtctgcaggcaaaagggccggggatcacggcagtgtgtggtaggtgaggtgagggcggcgtcggtggtggtcgttggcaactgctgctagtcgctagcttgcagtgcagcgggacagcatgcggctgcaaggaaacctagagaggcgagtcgaa

SEQ ID NO: 81111 - DNA, 533 bp, Zea mays
  Clone ID: MRT4577_173990C.1
gctggggtgggggggtttttttttttttttttttttttttttttttttttttggtttttttttttttttttttttttttttttttttttttttttttttttggcccgggggaccctttttggggggaaaaaaaaataacacaccgggggaggggcggggggggggggacagggagctcgttgcggggggcttcccccaaaaggccacacacaaacacaaaaaattagccggtccaggtttcccaaattttcgggccccttaaaaaacggggggccaacccgaaccaaaccaggtttaaccagcaaaccaaaaaccgccccggtgggggtttcggcagggcctgcccccccgcgggatgagggggcccaagcccccccgcgcggcaacgggcctggacccccgcttgcagtccagcggggggggcagggggggctcccccacccccccccccccgccgagggccaaaagggtttcctccagcttggccccggtggcccaggggtgcacccccccctgcagcccggggggccccc

SEQ ID NO: 81112 - DNA, 179 bp, Zea mays
  Clone ID: MRT4577_173991C.1
attgaaacagggaaacccatcccttaattaatcgcatgcataacaaggccaaactgaataggaacaatgcgtaataagccccggggctggagaggatgcctccttaacctcgaagggcgcaaaaacccccaaaattttctggttcgaacccgccgaccaaactctttatgggctacacc

SEQ ID NO: 81113 - DNA, 333 bp, Zea mays
  Clone ID: MRT4577_173992C.1
actctgtgatcaaccgtattattgagaccaacaagcaacatctaaagtgtagtactatagctactataaagcatcaatgacgacaaagacattgaccctccttatgctcatcgctgtttctgcatgcgaagctaacgcgacaattgtccctcaatgctcacaagctcctatagctccccttcttgccccatacctttcatcaatgatagctaactgatgtgaaaacccaactgttcaaccctatacactacatcactcaatgaatggaagcaacataccttgatgaccctaggctcaacagtccacagctctatctttggtgcatgcattaga

SEQ ID NO: 81114 - DNA, 289 bp, Zea mays
  unsure (1)..(289): unsure at all n locations
  Clone ID: MRT4577_173993C.1
tcagtatgtgaaacccagctcttaaccctataggctcaacaagcaatcgcagcagcaacatactctttatcaccctgttaacaatcgcttccctatctgtgggcagtcattgtacaaaccatagggcacagcactgagcaactcgtgctacctggncaaccaagtagctctggcaaccttctcctactctagcaacacaattcttcatcaaccactgctacattgaccggctgttattgcagcacactataccattcagcagtagctactgctactctagaacaacaac

SEQ ID NO: 81115 - DNA, 385 bp, Zea mays
  Clone ID: MRT4577_173994C.1
gtcaatatgtagattttcttatttccaaatagcagacatggatagaaacaaaaaacaacgcaaagaatatggcccaaaaaatatctaatagctgaactattagctaagatgtttgaatgtctctagctaaatttagtcactaactattatctctagtgcattcaaacatccctgaattgttttagtcgtcaaccagactcgactaaagtatttgcacagcgcgcgtgcgtagggatactattagtgggtggtgaattcctggccctgtcctcgattcccagcatagtagcagagcttcttgtaagcaccttttagaagtagattgtcccgttagaggctagctcaaagtgcatatatatagcgctgggcctgaaatcatgaaata

SEQ ID NO: 81116 - DNA, 1255 bp, Zea mays
  Clone ID: MRT4577_173995C.1
aaacgagacgagaacgaggtccctgccgccgccaaagccgatgcatcagctccagctgcgtatggtcacgcccagcgagagctccgaggttttttcatcagaaacaaaggattctggtgtgaaaagaaaggcacatgcgatttctgcaactactgaatcaacaaaaatacaaaatgctgcaagggactggagctgtgcactctgtcaagtgagcgcaaccagtgagtctggtctgaatcagcatcttcaagggaaaaagcataaggcgaagctggttcaatgtggagcgatcaaggtgatggatactaataaaagtggtttacaagtaaccactggaaataacaatggtgcaggcccaagtgacgcacctaagaaaatccacatcctggtcgatggagaaatgcaccaggtcgtccaaaaaagcaaccgtgtatggtgtgagcgttgcagggtcagctgtaccaatgccggtgccatggctgatcatctgcggggcaagaagcacagtctattgaataaagtctgggcgtcgataaaagccgtgagaaggaacaatggagttaaggaagattcagctactgctacatgtgagagagaggtaaatgaaagcggacctactggaattccagaggacgaggaacgtaaggaggagggagacgcatacatggctagcgaattcagcggagatggttcttccgaaattcctatggaaacgaaggaaaccactgacatggccgaagaagcagatgcagatagtcacagcgtaactcatgtgggaatcaacaaggaagacaccgacactgcgagcaaagcaaccggaaattaccccgcgggaaccaagcaggaaggcactggcgtggtcatggatgtaaacaagaattctccgccgaaagttcatcagaaatcaaggaaggcatttccgttgaaagtccatcaggaatcaagaaaaaggaggcaaaataagaaatttctgtcgaaagtgcatcagaaggcaaacgagaatttgctgccgcaatgtgcatcagaatccaagaccaaaggattcgggaagtaaatggaagtagtagctctattgagattccagctgggggaagacataatgacgaaaccatagacgcatgcactgattttaggcaagaacctgtgcgggaggaggaataacacgccgcaccagtgttgtaatttggttagcagtaagctttcagtatcgtgcgacgaactctagtagaatccatccgtattatgggccttctgt

SEQ ID NO: 81117 - DNA, 589 bp, Zea mays
  Clone ID: MRT4577_173996C.1
aaataccaacgaaggatcttctcctccttcctgacgcaccatgaggtcatcgtcgatggcgaccgcgatactatccatcgccgccgttgtcctcctgctcgccgtccaggacagccatggcgcgaaactgtgcatggactcgacgttcccaagggcggtcaacgggtccctttccttctgcggctacaacggcactgcttgctgcaacacgacggacgacgccgctgtccggaggcagtttgccgccatgaacatctcaggcacgccgtgcggcgacctcgtcaagtctatcctttgcgcgagatgcaacccgtacgccggcgagctcttcaccgtccggacaagccctcggacggtgccactgctatgcaacagcaccggcgtgtcgagccgtgtcagcggcgtggccgcggcgacggggtactgcgcgaaggtgtgggatacctgcaaggacgtgtccatcccggggtcgccgttccagccgcccaagggcggcgcatcggcgccgaagctcgccgaggtgtgggagtcagagggcgacttctgcggcgcgctgggcggcgagtccatctgcttcgacggtgaggcc

SEQ ID NO: 81118 - DNA, 420 bp, Zea mays
  Clone ID: MRT4577_173997C.1
cgggtccggatttccgggttggaccacacccttccgatcgttaaagcacccctaggtcctggtctttgttagaccggctttttttcctgccggggccgccttaagatagtgctgcgacccgtttcggcctctgttggcagggaaatttccccccaggaaacttacccgattcaacctttttttttttaaaaaaaggcccccgtggtttttagcttgatgcacctggatttaagctagctgttgctgtaccggtccctttgtttttataattttatggcccagcaattcttattttgacctaactgttccatggtgtccgttcccaacttccttggtggctggggcttttgtttacccattgcaggaaaggactggaaaatggctgctttaaaaaaaaaaattttccaattataaatttaa

SEQ ID NO: 81119 - DNA, 647 bp, Zea mays
  Clone ID: MRT4577_173998C.1
aaggacgagccgcgggacgacctgttcgtcgactcgctcctctgctagcgtcggggacgcggagtcggtcggtccacccaatctcgctgcggcgggcgtctgtagagcctgcgttacgtgtacggcgcgtgtacgtatacggccgtagcccgtagcgtacatgctcgccttcgcactctcagatgcacaatataacacacacacgcacacacgacacgctgtatacactggatcctaggtgttttttttagcttagctaggaatgcaaatttcttgattcgttggagggctttttttttttctaccacgcggcgcggccggtgcccatctgtctcgctcgcatcgcacgcctcttcatacactctctcctgtactcgactactgctacagtgctactgcagtactgcatgtagacatgtagatgtagtgaatgtgaagtacaaagaatacaccgaagtatactagtgtagtctggtatgcatatgtaaacgtagattgtttgagtttaaaagaggcaggtgtttgggtcgtacgccatgcatttgaattttatatattgaacttgagaggtgaaaaaaaaacggacgcggaccctactatactctgttttaccaaatgggaaaaacgtagattgtttgggtttcccc

SEQ ID NO: 81120 - DNA, 227 bp, Zea mays
  Clone ID: MRT4577_173999C.1
gcggctccatcagatccaacgccaccagctagcagcagcagcagcagcatggccaccaccagcacgcctcgcctcgccaccctccttgtgctcctggcggcggcgtaaccgctgctgatcgcatatcaaaaggccgcccccaaggctcctgcggcggctaacgcggccccagggccggtggcgtcgtattgttcggcgcgggcgcagaggacgctgaccctcccaca

SEQ ID NO: 81121 - DNA, 853 bp, Zea mays
  Clone ID: MRT4577_17399C.1
ctcgaggccggccgggaacccaatcacaggagaaccagcttagctttatttgccagagcaaggctctgccggattttttacaagaagaacctagctagcttttcaggccgtcactctgccgaaatttttcgccagaaacgctgctgtctagggcgtcactctgccgaaatatccggctccaaaacctgcttgtacgtccagggcgcgcggcaccctgtcaaaagatttcaccttgcctgttcaagggaaaactctgctggatttttctttctttctttctttcgcggcacacacagctagcgttgcttccgtgatttgctttgcatgcgttttgtgcaaccaacaagcaacatcctaggctttatttgatggtgccgctgctgtcgtgtttatgataacatccactgtgctcgtccagtccttctccgtcgtcttcctctactggttctacgtcttctcataattaattaaaccaccccccgtgttcatcgactgctcgctcgctcttccagatccaagttctgagtccctgtagctatagctatagtccgccttagtagtaaaacacatcaacaaactagctgctccatctcgatcgatcgttaaccaggtaattaatcgtcgtcgagacgcataaaaagaaaagaaaaaaaaagaacagtgtgtgcatatgatggcctctcctcccactcccagcacggtgtctacgaccgtgaccacgtcgccgtcgtcgaccggcgggtccgagctggggcccgacccgcagctggccgccgagaggaagcgcaagcgcaaggagtcgaaccggctgtccgcgcagcggtcccgcgcgcgcaagcagcggcagctggac

SEQ ID NO: 81122 - DNA, 260 bp, Zea mays
  Clone ID: MRT4577_1739C.1
gttaactgttctagaaaggtgctatatttttacgtgaaactacgcttatattcctgtgggttaaagggcgtccaatgaactcgtctacacgccttggacggaggttttaagcctgaaggattctgtcgtctggacagcaacagagtaaatattgattttacctgattcagattagaaaaatgtttggaccacatacctgcattctgtgtaagtaggtgagattgagggggaccacaaatgttaaccaatgattggcggtg

SEQ ID NO: 81123 - DNA, 431 bp, Zea mays
  Clone ID: MRT4577_173C.1
cccacgcgtccgcgcagagataggcgtcttcgtactcgcctacctccgcggctcaaacctttgccccttctcccaattcccgccgccgctccatcccgtaacgcgacaccatgagggagtgcatttcgatccacatcggccaggccggtatccaggtcggaaacgcgtgctgggagctgtactgccttgagcatggcattcaggctgacggtcagatgcccggtgacaagaccattgggggaagtgatgatgctttcaacaacttcttcaatgagactggtgcttggaaagacgttccccgggctggttttggtggccctggacccaatggcaatcattaagggagaaccggcaccttacggcaggtttttcaaccttagcaggttattaatgggaaggaagattcaacccacaactttggccgtgggcac

SEQ ID NO: 81124 - DNA, 1151 bp, Zea mays
  Clone ID: MRT4577_174000C.1
tgattattactggtgtaatggccatcataagaagtgtaggagacccagcttccccagcatcatttggtggatggcttggctatacagctataaaccattcttgggtggtgtcttttgtcataatggacctcctccttttccttggtgttataactctaacagtaattcaagcatcacagatatccaggaacattacaacaaatgagatggcaaataccattaggtacagttacctcaggggaccaagtggcagattcagaaatccatatgaccatgggctgcgtgagaactgttctgacttcttgctgaaggggtacaatgaggatattgagagcactgtacagacattgcaatctgacgaggaaatgggaccaattcagatgagcagcccagtctcacagaatggcgagagcattccaccacatgtgaatggcactgaccatggttccaccatttcacatgccaactcaaaatcccatcgccaaagtccatccaattgtttgggcctagggctgggcactgggcataacaacccctctagccgttatgcgcgatctcttcttcccttatgatttgtcttgaggatatccagatgtgctcctttatatttgtgcatacttgttggacaaccagtcaaccacagctttgtttgggctatttcttcatgggtgctcggtgatttctctctggttgcacaaacgtgaaggcttcagaaacatcttcagcttactgcacctatgacacacgatagaaatagtgtcaatgtcaaggttttgttcttgttttcttggcaaaaggcaccaaggctctatgcctactatccaatatgtatgtacatggatggggctagtagttcatgcactaacccgttttgacttttgaggcatagttgtacgcttagggctgataacggcctataatttttgcactataagatttaagtatcaaatcgggttaggatcggactctatttctagtcatttttgaattataatttatttagggcattgatattttttgaagaaccatttggatcacgatccattaccacccatatgtacgctacgagagttgtaaaatgtacagtaacagaactacatggcatgtttgttcctgcatacgtatttatagaaaaaaatgatttgtctcca

SEQ ID NO: 81125 - DNA, 709 bp, Zea mays
  Clone ID: MRT4577_174001C.1
ccggccggacccggcattgtcatcgacggggaggcctcacccacccctatctcccgcgatgagaaactacgcatcggcggcggcgtgggagggtccacggccgcggagctaaagacaatgggggtcgaggtgattgccgacgacgtgcatgtgaaggggtgggtcatctagtcccacaaaggccccatcctcaacgccgcctctctcacacggtgcgagcccccggcgttgccgtcggtgggcaggtcttatcagccaatgtggtcctgcctcctcactgagttatgccacagaggcggacactggtggtggtgtcctcctcgttccagctgtggttggcttcgctcatcgctgtcgggggccctagcttcagatccccagcacagcgaggatgacattgaagacatccaaagggttattttttcgaaagagcgcaggaggactgcgcacccatatattaaagcagagggaaaatacagggccataagacatccaaaagggttgtgatgtcaccttatgctttatactgtatgctaggctgtaacagatcaacttacctagttcatatatgtagttcctaaaaggctttatttcctgttgtaggagatatatgttttgtcacaatggttggtgtattattactgactattatgggtcttatcttcagcggactaaactgtggatagtaatggaatacatatgactgggt

SEQ ID NO: 81126 - DNA, 1613 bp, Zea mays
  Clone ID: MRT4577_174002C.1
aattcggcacgaggcctctgcccatcgtcgtcttatttcggccgcaaccacgaatcccacgcccctcccaaaaccccccttgcctcacagcgctgccgccggcttggtgtggcgtccgaccatgtcgtccccggggccacagcaggcgccgccggcgcagcctcccccgccgcaggccgccgcgccccccaccgccgctcccgcaacggtctccgcgacctccatctcggtgcagctgcctcctatccagccgaaaccgccgccgcagccgcagccgccgggccccacttccggcccgcaaccgccgacgccggcgcagctcttgaatctgggtccgcagccgccgctgtacaggggcccgatctgctggaactcctattgtaaggaccccgaccccaactccttcggccgccgcgggtggaaggtccgctcgggcccaccctactccgtgtacgccgacctctgcgggagatgctattctcagtttgaacaggggatatactgcgaaacgttccattccgaagagggcggctggaggaactgtgaatcctgcgggaggagggtacattgtggctgcatcgtgtccatccacaagtatcagctccgtgacgctggtggggttgactgcgccaagtgtgctcggagcacccgtgctgccatggccccaccaagtcccgtatggacaaatcctattcatagttctcaaaatgtatctgacagaaaagacattactgtaaagagctggagacctcctgctgggcaaatttcaagtcagtggaggcagactaatctgtggagcgtgtccagtatacagtcagacttgcagcagcgtctagcttttgagtttgataggcctagcggcagtgaaaagctacttcctgggcgcacttttattcattcccaggaaaggaaatttgatgacatgcatgacagaccagcaactcctgcgggcatgatccacattatgagggagagagatcccaatgggcacggtcagaccactaatatggatccagcatactcttataccctctatcacagagatggatcgcatccaaataatcttcatgattctaatcaccattgtggagaaaatgactctttgtcttctaggaaagtggcaatgccagaagcttctacaagtgtggatgctggtttcaagcttgattcacatcatacatctaatttaaaggatgatccaccatccctttcagttggtctggcttctaattttgcaccacagaatggaccgaaagaccatatcagaattgcacctactcagcagcaatcacaaatgacttcctcctcattgcagaaacaattctattctcatgctgtaactggttataatgaattccaagcacagatgcgcaatggaagacccagaatggattcaaaggctagatcacaattacttccccgctattggcctagaataacagatcaagagctacaacacttatctagcgagtatccgacacattctacttatgttaataagtaattttccttggcattactttctgtagtcataattcccaacttccatagatatgttattcgtttgaactctattgagttttacttaactttcaaacagttcaaattctgtt

SEQ ID NO: 81127 - DNA, 235 bp, Zea mays
  Clone ID: MRT4577_174003C.1
cacgactccaagttcggctccgccgtcatccgctactccggctccagcggcgccccgccggggcccaacatgaccgatccgccgggcggctgggcctggtccatcaaccaggccaggtcatttcggtggaacctgacagccagcgtcgatcgccccaacccgcatggctgctaccactacaggcacatcaacatcacccgcaccatcgaggtcatggtcatccgaggacacatcg

SEQ ID NO: 81128 - DNA, 483 bp, Zea mays
  Clone ID: MRT4577_174004C.1
gttccagaaagatagtgacctgcctatctatctaccgagagagagagaggatcgctagctatctagcatggagtgcggcagcaagaacgcagcatcgagcgagtgtctgcctgctcgcttgctatcatcacagctgtgtgtctagcatcctgactgacgagcctacgatggccgacctcgactgtaggacgagatagccatccatacgatggcttgcgcctgggactatcatcgtcgagggcagtttaggacatccagtcgagaggcatcctctgtggtgaaacctgtgtcttcctaccatgctatacgggagtcatgagttgccaatgcattgcccaaatctgcatgatgtgatatctggactagcgctatttgtcatttgtggtgggagaaacaccaggacgacacggtggtgtacaacttattgtatgtgcatggtgatctaataagtaaagataataaaaagggatatgctgcatgtgt

SEQ ID NO: 81129 - DNA, 271 bp, Zea mays
  Clone ID: MRT4577_174005C.1
gccggccgggatcagaacaccacccaatcactcccgtctctttctgcaccactcaaacctcttcttcctttccggaaaccacaccagcagtcccctggtgttgtgattgtgacctgctgtgtgcttgtgagtgattttttttttgtagagaaaagaaagaaatatgggaggtttgttttgctctgaacgttcaaaaaaaaaaaaaaaaaaaaaaaaaaaaaaagaaaaaaaaaaaaaaaaaaaacaaaaaaaaaaaaaaaaaaggccccta

SEQ ID NO: 81130 - DNA, 355 bp, Zea mays
  Clone ID: MRT4577_174006C.1
agaccattagctttatgtactacagagcgcagaagaacccgatcgacaccatgagggtgttgctggatgccatctgtctcctggctctcgctgcgagcgccacctacacgcatacaagcggggggtgtgggtgccagccaccggcgacggtttatttatcgcctgaggggcatctgccacctacggatcacctgccacctctgatgcatgtggcaccgccggaccacctgccggcgacggtccacttggcactgccggtccatgtgccgccgccggctcatatggcgccggcaccatgccagtaccctactcaaacggcgcggcctcagactgatacgcagccacatgcatgccc

SEQ ID NO: 81131 - DNA, 802 bp, Zea mays
  Clone ID: MRT4577_174007C.1
ctgcaagatttcaataaatataaatgtcgtgcaaatcacaggcaaaaaaagaagctgggcgaagccagcaacacgcctgcactgcgacgtgcagcagttctgagtgagaatctatgaatcgagttggagtttctttttttattcaaaacattggggtggcaattgctctctgggtgtggtagaatttactcgaggcatgagtaagcaagcgtcttctcctccgtcagctcttgggcagtggcatccatcttcttccttgagaactcatcaatcgggaggccttgaacgattttccattcaccaccactgcatgttactgtgtactctgatggttcatacggtgttccttctggactcatttattcattcccagtaacatccagtggtggtgaatggaaaatcgttcaaggcctcccgattgatgagttctcaaggaaaaagatggatgcccctgcccaaaagctgacggaggaaaaaacgcttgcttactcatgcctcgagtaaattctcccccccccagagagcaattgcccccccaatgttttgaataaaaaaaaaaaactccaactcgattcatagattctcactcagaactgctgcccgtcccagtgcaggcgtgttgctggattaaacaagctcccccccccccctgtgatttgcccgccatttatatttattgaaatccttgcagaatcgcttgccgatgaaagtggtagcatacttttgttgctaaaaaaaaaaaaaaaaaaaaaaaaaaaaaaaaaaaaaaaaaaaaaaaaaaaaacccccccccacaccccac

SEQ ID NO: 81132 - DNA, 548 bp, Zea mays
  Clone ID: MRT4577_174008C.1
ctggatggtgatgtaactggaagcagacatggaagcgagctgttgatcgtgctgccgctgggcaagtcctgtcttgaacctgaaagtaagtggctctgccttctgtcttaggagttggtgaaatccttgggaacggacaagacacggatttgaataacctgtttgatggcttgtgcgtaatgatcagattgcgggatgctacttggtgtgcgatgaagatatggctctgcaggatactggtattcagcaaatgtgactatcattgtgccaattggatgaccattttgtgtacgtcgacactgtcattgaaggccagctccttcaaacacgcagatacaagaacctgcagaggtggtacgaagggtctttcactgctagctacattacagtttctgaggtgcttcaagcgactgatcatctcttcagcaagtatagggttggatgccagggctttcgaactatacctttacagatacgaaacattaaggaggtactattgtgctcatcgaactgcttaactcattgagtgatgggcgctcaggttgctt

SEQ ID NO: 81133 - DNA, 592 bp, Zea mays
  Clone ID: MRT4577_174009C.1
ctgataccatgttgaaccaaggagtaagtcgtactccggcacagtgcaaatctctatggacatcgctagttcagaaatatgaggaaagcaaggatacggaaagcatgaagacttggccgtatttctcggccatggataagattctatcgcagcaaggggagatggcaaccaaaggatagaaaaaggcttgtagcttagtggtagaaatttagaatattgattggtatgttgcagcagagcccagtcagtctagtaatataaagatgaaatatctgtctacagtgcctggtgatctattgggatcggattcttttgttttgtgtaagacatgcagtagcacaagatcgagatgcatcgactggcttggaattaagcttcagggcccgtggactcagagcggggtagccaggagcgctctattcttagcaacaggcagacatgtgtggttttatctgccagataacgtttgtaactcctataatgtaatagcctacacggtaggcgaacggcgaacccctaaaagacaactgatgtatcatatgttttgaggagttatgtaatcgcctgcacggcatatacgtgactttttttc

SEQ ID NO: 81134 - DNA, 600 bp, Zea mays
  Clone ID: MRT4577_17400C.1
aaaaaaaaaaaaaaaaaaaaaaaaaaaaaaaaaaaaaaaaaaaaaaaaaaaaaaaaaaaaaaaaaaaaaaaaaaaaaaaaaaaaaaaaaaaaaaaaaaaaaaaaaaaaaaaaaaaaaaaaaaaaaaaagggggcgggccgttttgggggaaccaagtttttttttctttgtgcttgcaaacgtattgggtgtttttttggggccccttaaattaaatttaatgggcccggggtttaaaaacgtggggaatgggaaaaaccccgggggtccccaaattaattggcttgggaaaaaatccccttttcgccggtggggttattaccaaaggggccccccccgttcgcctttccaaaaattggcccaccctaatggggaatgggacccccccttgtgggggccctttaagcgggggggggggggggtttccccccaggggaccctttactttggcaagccccttagcccccgttctttgggttttttccctttcttttttcgcccttttcgcgggttttccccgaaaagtttaaaatggggggctcctttgggggtcccatttaagggttttacggcccctcaccccaaaaaaatttgttgggg

SEQ ID NO: 81135 - DNA, 1160 bp, Zea mays
  Clone ID: MRT4577_174010C.1
ccggccggaccaacaccaccgggcaagcacagctcccgacatcgtccaatccagcactcgaattgtacccactgcacaagcagagtggctgtttgagcacgacttgaacacgacaccaattacacacgaccgtcataaccacccacttcctccaccatgacgtcaataggcacaggctatgacctgtccaactcggtcttctcgcccgacggtcgcaatttccaggtcgagtatgcagtcaaggcggtagagaacggcggcacagctctgggcatcaggtgcaaggatggtgtcgtgctcgctctcgagaagcttgtcagcagcaagctgatcaagcctggcgccaacaagcgcatagcaaccgtcgaccgcaacatgggcgtcgtgtcttctggtctcctccccgacggtcgccacttcgtctcccgagcccgtgacgaggcggcgcaatggcggcagctctacaaggcccccattccttcctcgtctctcgccgaccgcatgggaagctacgttcaggcatacacgctttactcgagtgtacggccattcggcataacggccattattgccggctgggattccgaggccgagttgcccgtcgacggacaagttggctcgggtccttctgttggctcgggaggcaagagagagggcgccaagcacggcggcccatctctctacatgattgagccgagtggcctctactggggatactacggtgcagctacaggcaagggccgccaggttgcaaagtcggagctcgagaagttgaatctgcacgagggccagctttcattagaagaaggcgtcaaggaggcagcgcgcatcatctacgtcgcacacgatgacaacaaggacaaggaatttgagcttgagatgacgtggatcagcaatctcgacggaccgaccaagggtagacatgaggaagtgcccaaggacattcgggaagaggctgagaggcttgcaaagaaggcgctcgagggggatgatgatgatgacgacgaggaggagaagatggaagagtaaatgaatggctgctcgagtcgagccagtggataaaagtacagaccctgacgatgcgtaacgagcggcttttgcacaagccttaacgatcaatgaacaagattcacactaaaaaaaaaaaaaaaaaagcggcc

SEQ ID NO: 81136 - DNA, 2450 bp, Zea mays
  Clone ID: MRT4577_174011C.1
caagccggggtgcgcgtgcggtgcggacgcttcccctccacctccgcacacatctccaactaaccttgccagtctaccgcagtactgccgacttctagcagttgttttataggttagtttcgttgccttgtgtctttgttagtgtatcaaaaccaattcgcgacatcacttaggaaggggaaagcaggggccggaaaaagaagaagagacgggaatggcaagctccgactcaaatcccaccgatgcattcgagtacatgctgcttgagaaggatcctgatctctaccggacggttttctctggtccgagccagacaagcccatggattgacccgagtgtgttaaagctgaagcaccggatagggagaggtccatttggggatgtatggatagcaactcaccaccaaaggacagaggatttcgatcagtaccatgaggttgcggtgaagatgctgcatccaattaaagaggaccagctgcagatcttctcagcgaggttccatgagatcttcagcaaatgtcagggtctgggcaacgtttgtttcttgcatggcatctctacacagaatgggaggatttgtatagctatgaagttctatgaaggatccatcgggaacaagatggctcggcttaaaggtggaaagctccctttgtcagaagttctaagatatggggctgatttggcacgcggtgtactaggcctacacaccagggggatattgatcctaaatatgaaaccttgcaattttctcatagacgaaaatgattgtgctgtgctgggggattttgggattccatccctgctgtttggcctttcattacctaatccggaccttatccagaggcttggaactccaaattacatggctcctgaacaatggcaaccaaacatcagaggtccgattagttatgaaactgattcgtggggttttgcgtgcagcgtccttgagatgttgactggcattcagccatggcgtggaaagtcagcagatgagatatatcagttggttgtcttgaagaaagaaaagccaatattcccgtgcagtctacctccagacattgaaaatgtgctttctggatgttttgaatatgactttagaaaccgtcccttgatgaaagacattttgcatgcatttgagagtgctaaaggtgcagatcatgacaacattggttggggcaattctgaaaatgctatggtagacaggataaccatgccaaatcgcatcaattggttacactttaaggacaagcttcaagtgggcgacaaggtccgttcaagaaagcttaaaaactcttgcggtcctgaaactatggaaatccctgatggaaccatagttggcattgaggacgatggcgagcgtgacgcttacgttcttgtacgagtccacgcgctacacaaccctttaaaggttcgcttttcaacggtggagagggtaacatatggttttgctgctggagactgggtgcggctgagggaggaggacaagaagcgctctcaggttggcattcttcacagcatcgaccgtgacggtgcagtggcagttggtctgataggagtggataccccttggaagggcaattattcagacctccagatggctgaagcctactgtgtcggacagtttgtgcgcctgaaggccagcatttcaagcccaaggttcgaatggcagcgaaagcggggtggattagcttctactggccgaatttcacagatacatccgaacgggttgctcgtcgtgaaatttcctggcaagtttaaccttggcgaagtgtgcagttgcctggcagacccctccgaggtggaggtggtgagctttgacaaatgcgaggggattgtgaagaagtacgagcatctcgaggacttccattgggcagtgaggcccctgttcgttgctattggtttcctcacggcgatcaagctgggtgtttttgttggcaagagcatttcgaggccgaggagccggaaggttgccagcatctctgatcagagtggagattattaccaccaccagcaccagcagcagcaccagcagcaggtagtccaacaaagtgctaatgcggcgtggcttcctccaccagttgcaaacatgttcttcggagatagtgttgggacttctggataagaaatcataagtggcccggagttttgcttaaaatagcaatttggaattgtggttcctagttgtgtgcatatttaggcctgaaatggtttatcccttatctaagcatctgtaaatatctgccttatgcaccacaagttctgtaaataaactctagaattatcgtcttaaacatacaagtatgcgaagctatttcttgcttggtggactgtgtttatgccttcccagaaatgtcttatctcccgagatctcatgtgggtctgtgtataataattccagtcgtggactagttgaaatcctaaagcttctctctgcattttgtttttccccc

SEQ ID NO: 81137 - DNA, 518 bp, Zea mays
  Clone ID: MRT4577_174012C.1
aagaaagagatgcctgcactgatgggcaaggccaaggctcagcataagctgctcgacgggctggatcaacagttcgccaaggtccagaaggagctgcacctgccgccaggggacttcccgagcgtagaggagtacagggagctcctgagcgcctacaacttcgacaggttcgagaagctgaggcccaagatggtccagggcgtggacgacatgctggcctacgacatcccggacctcctgaagaagttcaggaacccctacgactgaagccggacgaggaggacgtgccggtgcagcagcggttcatctggtcagggaagagaaagatgcggcgccttttcacgactccatctctcttctggattactcagtgctgcagcgtaaactcgcgcgcagttccctgtaaaagctggagcttttctgagcgtgtaggtgcgttggtggaacttgggcccccacccaagatctcacctatctgcactgggctggccggctgtgcccgtcgccaaccaccgtgc

SEQ ID NO: 81138 - DNA, 2529 bp, Zea mays
  Clone ID: MRT4577_174013C.1
cccacgcgtccggtggcattcctcgaggcccgagttggccagctctccccgtcgtcgtccgtccctctcctcgtctccgcctccccggactccgtcagggagggagggaggtgaacgggccggggagagagatggggccggactcgtcgcccaagaagttgagcctcaaggagcagcgcgctgcctacctccagtggttcgccctcgccgacgaagacggagatggccgtctgacggggaacgatgcgctcaggttcttcgccatgtccaacctctccaagcccgagctaaagcaggtttgggcgatcgctgattccaaacgccaaggatatcttggattctacgagttcatgactgccatgcagctggtttctctcgcacaagcagggaacgaaatcaatcaagacacccttccgaggatctcgagaagttgcagctccccacaatggaaggtctggctaaaaaactaaactctgggagcaagatcgagtctgctattgttgcatgtcatccatcagaagcacctactatgactgccagctggtttaactccaagtcaggaaagaagattcctttgaaatcagtcacttcaatcgtcgatgggctaaagaaatcgtacattgagaagttgaggcccttggaaaaaacctatcagttccatgacttcgtgtctcccttgctgactagcagcgatttcgatgcgaagccaatggtcatgctgttgggtcaatactccacggggaaaacaacatttataaagcatttactaaaaacaagttatccaggcgctcatattgggccagagcctacaacggacaggtttgttgtcatcacttctggaccagacgaaagatgcattcctggaaacaccatcgccgtccaagctgacatgccatacagtggcctgtcatcgttcggaacagcatttttgtccaagttcgaatgttctcagatgccacatccactgttagagcacgtgaccttcgtggacactccaggagttttatcaggggagaagcagcggacgcagcgcagctacgatttcaccggagtcacgtcgtggtttgcggccaagtgcgacctcatccttctcctgtttgatccgcataagcttgacatcagcgatgagttcaagcgtgtgatcgggtctctccgcgggcatgatgacaagatacgcatagttctcaacaaggccgaccaagttgatgcacagcagctgatgagagtgtacggagcactgctgtggtcgctcgggaaagtcctgaacacaccagaagtcatgcgtgtctacataggttcattcaacgacaagccgatcagggagacagcggctgggccgctgggcatggagctgttccagaaggaacaagatgacttgctctcggacctgaacgacatccccaagaaggcctgcgaccgtcggatcaacgagttcgtgaagcgggcaagggcggctaaagtccacgcgcacataatcagccatctgaagaaagagatgcctgcactgatgggcaaggccaaggctcagcagaagctgctcgacgggctggatcaacagttcgccaaggtccagaaggagctgcacctgccgccaggggacttcccgagcgtggaggagtacagggagctcctgagcgcctacaacttcgacaggttcgagaagctgaggcccaagatggtccagggcgtggacgacatgctggcctacgacatcccggacctcctgaagaagttcaggaacccctacgactgaagccggaaacccactctcttgcctcctctggggaggggtggcagagcttcagcgacggacgaggaggacgtgccggtgcagcagcggttcatctggtcagggaagagaaagatgcggcgcctttttcacgactccatcatctctcttctggattactctcagtgctgcagcgtaaactcgcgcgcagttccctgtaaaagctggagcttttctgagcgtgtaggtgcgttggtggaacttgggcccccagtcccccacccaagatctcacctatctgcactgggctggccggctgggcccgccgccaaccaccgtgcttccgccattgcgtcgccgcataaccttggctaagcgtgaactttgtcacaacaaccacgtttggcgtttccatgcttgtcctgggttcctggcaatccctgtattaatccgtctgccattgcattatcttgcactgactgatcttttccaaccgaaggatgtggtggtcggtagagctaaaagttaagttggaccctgtcgagccgagacactccgggacctcgggttcatcgtgtttcaggtaattttttttcggggccaacacgatatggaataatttcgggctaagtcgccatgcccagaagctaagactagtccagtccaaacacggaacggcatgaaaaaaaaacctgtatatatctagaaaaatacatcatcacattattcataactttgttatagattaaaaaaaaaatcaaatgagaaaagagacatcaatgtttaaccattttgttatc

SEQ ID NO: 81139 - DNA, 147 bp, Zea mays
  Clone ID: MRT4577_174014C.1
gttggaaacacaatgctggatgattgggttcgcttcttccttggttaaccgggcaaaaattttttccagaagcacctacagtttcttgttaattgcattggagcaccttttcaatttatttcaaagtccttcctggatgaagattta

SEQ ID NO: 81140 - DNA, 1035 bp, Zea mays
  Clone ID: MRT4577_174015C.1
gggtacctcgaggccggccgggcctctaaagtttgctctggccaaacacgtcaatagtagagattttggactagattcgtgcaaaacactaaaaaagaaaaggccatcgaaaacgccgccgccgcctctgatgctttccgccgtgcgatgtggtgcccttcgccggtggcgcccgccgccgcacctcctcccacgcatcctttcctcctcctttggtacatctcccgcgcgaccacaggtgggggcgctgctggagctcccggaggtggagaaggtactgcgcgacgtacgagcgggtgacgtgcgcgtattccccgtcggcgagagcggtctgcacggcggggcctgcgccgactacatggtcgtcgccacaggccgctccgattggcacgtccgtaacatcgcgcaggcgctcctctacaagataaagcaaaagcagaagggctctgatagaatattgatgccaagtgtagaaggtcagcaagcgggaaaatgggttgtcattgattctggaagcataatcatccatgcacttgaagaaagggcaagagagtattatgatttagagagcatttggtcaaaagaggtgtcccctaacacttccattcaggagttggagacctcgctggtgaagacacgtcgccggaacctatcacagaaacccatgaagagcatctgaactaggggatctggtacgatgatccgtgaaccgagataaattacgggaggtcgagcttttatctctttccattttgtagcatcttttacttacctaaacttgtcttattatggtggtagttaatgtaagattcactgcaaacattactgagttcaccatggcgtaaatccagtctcacatgagtcatctagtgcatcctatagcgattacacaaatgacacatgcaacgcaaacttgaaatgtaggacattgttgttaccttggctttttaccctccatctagtgcatcctatagcgattacacaaatgacacatgcaaggtaacaacaatgtcctacatttcaagtttgcgttgc

SEQ ID NO: 81141 - DNA, 202 bp, Zea mays
  Clone ID: MRT4577_174016C.1
gaaagagtagatttgagtgcattagtaaatgatcaaagttgtgattttactagattgtgtaaatatagtgcattagtaaatgatcaaagttgtgctttgaggactgttgattcaaaaagcagtacttttttttagactggaaagagtagtagcgaaatccaaggtcctgaacttatgcattgtttagcacacagagagctaa

SEQ ID NO: 81142 - DNA, 288 bp, Zea mays
  Clone ID: MRT4577_174017C.1
atggcggaaacgaagggaaggcggcgggacttggcagcgcggacgatggcggcctgggcgtggggctcggtgttgcagtgcacgacggcggcgatgccgagtgatgccatggccgcggccatagcggcctcggagacagtgtccatcggggacgcgacgcaggggatggatagcgggatgcggcgggagaggcggtggagagcggcggttgacgtctgggagagagagacacagggagacgaagggaggcatgagagagctctgcttgtgttcgtgttggtcttgtag

SEQ ID NO: 81143 - DNA, 211 bp, Zea mays
  Clone ID: MRT4577_174018C.1
ggccgggaaactcctctcccacttcacctgctcgcgatccagtaggccgctctctgttgagaacaagcttaccctgcgtctgcctgtcggacggatacctcgtctaacaaacaatctacatgacgacataccccacgggtgagtttgctggacaagaatactggagatctcctaggcgctgctctagaggcgctcctacactgctgccaag

SEQ ID NO: 81144 - DNA, 435 bp, Zea mays
  Clone ID: MRT4577_174019C.1
aggacacgtggggttagatttagatcgtgagcgtgccagcacattagttgtagtatttatatttcatgcttgggcggtgaacacgaagttactttctgacatgagtatagagatgtaccttttcggttttatgaagattatgtcaaagcataaaaacttgaaaatttgatggagctaaggtggtaatttttgagttacaaaattaaagggacatgcttgttacaacaccagatataaagatttaaagagttgcttaatcctaagttataatagggggcggtggtggattttataatcaattcaaaaaaattgttcctattcatactcttaaatagtttatatgttttttggaatctttttaaaaattgtgttattatattttttattagatatatatgaaatatatatattttttttttttttaataatataaat

SEQ ID NO: 81145 - DNA, 557 bp, Zea mays
  Clone ID: MRT4577_17401C.1
cctgcgctgcccttacaagcctgtccaccagccctcttcttctgggggccccagttgcagccttcagcccagagcctggcctggagccctggaaggaggccctggtgcggcccccaggcagctacagcagcagcagcaacagtggagactggggatgggacctggccagtgaccagtcctctccgtccaccccgtcacccccactgccccccgaggcagcccactttctgtttggggagcccaccctgagaaaaaggaagagcccggcccaggtcatgttccagtgtctgtggaagagctgcgggaaggtgctgagcacggcgtcggcgatgcagagacacatccgcctggtgcacctggggaggcaggcagagcctgatcagagtgatggtgaggaggacttctactacacagagctggatgttggtgtggacacgctgaccgacgggctgtccagcctgactccagtgtcccccacggcctccatacggcttgccttccgcccgcctggagctgccagagctgctggagcccctagcacctgcctagtccctgca

SEQ ID NO: 81146 - DNA, 447 bp, Zea mays
  Clone ID: MRT4577_174020C.1
gcagacaggaagtttcatccgtacagctgcttccggtgatcataacagcaggacgaatgccctacggttctcttctatattggtccgagccggaaaaaaaacaagcctccgggggcggatctggaagagtataccacgcctttccgtttacctggttaaaacactggaggcaatctaccgccagaacaaaggcttttacacatagcctttcattggtactttcccatgccatggcctgagcttaaaatgctcttagggcaccgatgggctgacacccagagcgaggatgatgaacccacccgtcgctatccttgggggcgacagcttggaaaccaccttgtgcccccagtaggcctcctgggacacgtggaaagcctacgttaagtttcacggggcctttgtgaagtccaccttccccctttagagccctcgctgggccagagcctg

SEQ ID NO: 81147 - DNA, 372 bp, Zea mays
  Clone ID: MRT4577_174021C.1
gatataaactgtaatattagatctccggacccgggggccaacccgggaatcccggcccggaacccgaaggggaaccaactcccccaaaaaggaccccaaaaaaaccaaggggaaaccagggaaaaaccagtcccccggggaaaacggaaacccccccaaaaacccacaaaacaaacaacccggaagcaaaaagggaaaaacccgggggcccaaaagggggaccaaccccacaaaaaaccgggcgggcaaaaggcccgaatccaagggggaaaacccggggggacaggggcaaaaaaaaaccgcccaaccgcgggggaaaggcggatagcaaaatgggcccaaaggggggtccccccaccaccagggaaacgg

SEQ ID NO: 81148 - DNA, 2405 bp, Zea mays
  Clone ID: MRT4577_174022C.1
acccagaagcggacaagccgccggctatggcattggtgtgactgaagactatgtctgaataggatacagccaagagattcacaatttatcaccgagacctaagcttacaactgcatgccgatcgccatgcatcttgatttcaaccaaacagcaacacggatccattgaacgcgccggcccgaacgatgcatgcaccgttgacatagacaaacccaccgaatcgtcatgggcaccgccgcgcgcgacaacggacgagcctagcagcacacgaccggcgcgacctcatccttgccgtcgctctccacctgcgcccgccggtcgccgaacaggccggccctgaacgccaggaagcccgcggcgtggcccgcgactgcaacgaggagcacgccgccgttaacgacatgagcgccagcatgagcaggtacgccccacccacgcgcagggcatgtaccccccgaggggccgggtctccgcgcactccacccaactcgccgccgccgctgccaacgccgcctgctgccgcagccgccatgggggcgtacaagtatgtgtcggaactatggaggaggaagcagtcggacgtgatgcgcttcgtgcagcgcgtgcgctgctgggagtacaggcagcagccgtccatcgtccgcctcaccaggcccacccgccccgacaaggcccgtcgtctcggctacaaggccaagcagggatatgttgtctaccgtgtccgtgtgaagcgtggtggcaggaagaggcctgtgcccaagggtattgtctatggcaagcccaagcaccagggtatcacccagctcaagttccagaggaacaagaggtctgtcgctgaggagagagctggacgtaagcttggtggactgagggttcttaactcctactgggtgaatgaggatagtacctacaagtactttgagatcatccttgtggacgttgcccacaaagccatcaaaaccgacccgaggatcaactggctatgcaaccctgtgcacaagcacccgcggcctccaccccactcgccgccgccgctgccaacgccgcctgctgccgcagccgccatgggggcgtacaagtatgtgtcggaactatggaggaggaagcagtcggacgtgatgcgcttcgtgcagcgcgtgcgctgctgggagtacaggcagcagccgtccatcgtccgcctcaccaggcccacccgccccgacaaggcccgtcgtctcggctacaaggccaagcagggatatgttgtctaccgtgtccgtgtgaagcgtggtggcaggaagaggcctgtgcccaagggtattgtctatggcaagcccaagcaccagggtatcacccagctcaagttccagaggaacaagaggtctgtcgctgaggagagagctggacgtaagcttggtggactgagggttcttaactcctactgggtgaatgaggatagtacctacaagtactttgagatcatccttgtggacgttgcccacaaagccatcaaaaccgacccgaggatcaactggctatgcaaccctgtgcacaattctccgcgcactccaccccactccgcggcggccgctgccaccgccgcccgctgccgcagccgccatgggggcgtacaagtatgtgtcggaactatggaggaggaagcagtcggacgtgatgcgcttcgtgcagcgcgtgcgctgctgggagtacaggcagcagccgtccatcgtccgcctcaccaggcccacccgccccgacaaggcccgtcgtctcggctacaaggccaagcagggatatgttgtctaccgtgtccgtgtgaagcgtggtggcaggaagaggcctgtgcccaagggtattgtctatggcaagcccaagcaccagggtatcacccagctcaagttccagaggaacaagaggtctgtcgctgaggagagagctggacgtaagcttggtggactgagggttcttaactcctactgggtgaatgaggatagtacctacaagtattttgagatcatccttgtggacgttgcccacaaagccatcaaaactgacccgaggatcaactggctatgcaaccctgtgcacaagcaccgcgagctccgtggcctcacctcggcaggcaagaagttccgtggcctgcgcggcaagggccacacccaccacaagaacaggccctcaaggagagccacctggaagcgcaaccagaccctctccctccgccgttaccgctgagcacctctcccaatcaggacaagaagggtgcctggctctggttgcattttcaaagttttgctatttgtgttcttggcacttttaatgtagaaagtcattatggagcatatgtcatatgaactatttgcaattcggctgtattatcagacaacggatggttagtgatcaaatgctgcctgctgctgtggacc

SEQ ID NO: 81149 - DNA, 414 bp, Zea mays
  Clone ID: MRT4577_174023C.1
acaaccctctagaataagtcctattaacgggcacgcagtcgtggtcgccctggcctcgccacggtgttctagtgcggtggcgctgtgccttggcgctccgactgccttcgtggtgtagttcgtggacgggaaccgaatggcgctggggcaattgctcgccagacatggtgtaccgccgtggtgtagttcggcgacgggaaccgaacccacctcacccaaatcaccggtatgcgttgttcacctgtgttcgcctaagactcaaaatacgtaggatcgtgcgggtcgtgtgtcggttgccaggggacggttgtgcgtgcaccaaccatggcgccgccgggggctggaaagctggagctccgtcgagctcgagaattttgcaaacatgacaccatctacggagggcttcaaactttt

SEQ ID NO: 81150 - DNA, 437 bp, Zea mays
  Clone ID: MRT4577_174024C.1
aaaaactcaaagcaaggagccattactgatacttgcataaaaatcaagtccatatttcaaaggagccattatattggctacctcaagagctagcaccacaactcgtttgccataggattcagcagggcagccgtctctggggatagtttactttggggggaacgactccatcggtgcccattcctccggccttgggccttatgtgccgttagacgagtccatagccaacatgagaaagatcgcggagcacctcaagggatgttagttactgtctgccatgcatggaccatggggcaggggtctatagctagctactagttgttttgacagtttgttgtgtttgcctttgggtgcatggtcgtcgtacgtcagagcctctccgagaagacgcgggtcattttcctgagctgcccgcctttgaacgaggagatgcttcg

SEQ ID NO: 81151 - DNA, 424 bp, Zea mays
  unsure (1)..(424): unsure at all n locations
  Clone ID: MRT4577_174025C.1
gaacctttgggctgatttatgtgcttgggtagtgggagtagtagccttgttctcggcctgattttattggtgatccttatattcatggtacttctcggaattttaagtatgctactcctacggcggatgatacgtttactagggatccttgtaattcggagagtaagggggcggtgccttttaagagttagttgacgtggtctcatcttagttcgcggaatgtggatgatcgggtgatgtagggtgggtgtgctaagatggatcggctttatgtttttcctcttgttcttcattgtgggcctaaggttgatgtccgtgctgttgctgtgggtggttggatttgtcgtggtgttattgctggtattgagggtattggtgtttttgctcttgctgntggtgttggggatcggcataattaggagtc

SEQ ID NO: 81152 - DNA, 147 bp, Zea mays
  Clone ID: MRT4577_174026C.1
ggtaccctcgggtctcggccgggccgggaaataactaaacaggcatgggcaaagataactggccttgattgtatttacggtagtttaggtctccgtgtatgtagagtgtaaagcatttgtggcggtatatcctgtgtcattcgtttt

SEQ ID NO: 81153 - DNA, 242 bp, Zea mays
  Clone ID: MRT4577_174027C.1
atttgagattttgacaaaatgtttgagtgtggctgtacgttctaattctactatcaatatgctactacttcagtttgaccaaatgttttattgtggatataccttctgattcgatctactatcaacctgctactctttagtttcaagttataaagcggttcaggctcttgtaggtgtgtggatagattctaactcttctatttatcttaatcccttgttctaaattataaattattgctctc

SEQ ID NO: 81154 - DNA, 505 bp, Zea mays
  Clone ID: MRT4577_174028C.1
gaaaaaaaagcctgcggatgcggtccttcagtgtcatacatttgatatggccttctccacaggacagcagctgacccctattgtacacgatcatgcccaacgtgcagacgcaatctcatcacggacacacagtatactgactactactgcatgaataatgggacacttagccgcattatctgctgcggtgacgcagcttttcagcaaacgcacaaaggcgacaatgcactttcacatggatgacctactacatgctttactgaggcgctcgggacaagttgaaacacagatcatcactgatttctagcaggaaagggctcatcagtctgaatctttcttaacatacaccgcggtgatattgggggcaaaatctgggccctctaaagagggacctaactcaagaaaaccgtcaatatgctcatttgtctgctagctatgcacaaaaggtgtgcgttcacagaaccttcatgaattattcaactgctagagagagcatcgtttgata

SEQ ID NO: 81155 - DNA, 344 bp, Zea mays
  Clone ID: MRT4577_174029C.1
ggaccccagacaaaacattcccattttccccagggaaggaggggtctaaggattccaacaagccctgtttaaagttcaaaagggtttaaatgggccccccccccgaaatttttaaaaaaaacctaacttttttgggcagtttccccaagcttttttttcccttttggggcccctgatgtttttattgaaccatcggtcaaggagggcacaaaacctgaatgggggctaatttatacaggtgtttaaacctccttggggtttaaaagatgttttttttgggcccaaaccccctaaccctaaaaaagcctttgccccccggtccaaatccaccctggggccaaatt

SEQ ID NO: 81156 - DNA, 479 bp, Zea mays
  Clone ID: MRT4577_17402C.1
ggccccaaaattaaaaaccccggaaaaaagggggggaaaaaaggcttacaacggaaggtggaaacccccccacgcccgaaaaaaaaaaacccccagaaacctaacccggtaggggcccccccggggaaaacccagggaaaaagggggacaaaaaccccaaaaccccccgccaaaaaaagggttaaaaatcggcacccccgggggcggcctcccccccggaaaaattaaaaccgacccccccggaattcttttcggggggaggcaaaaccccccgagcccctggaaaatcccccccccccaaaacccccccgaagtaacaagggacaaaggggggcttggggaaaaagagggccaaattgggggcaaaggggggaaaaaaccccccaaaaccggggggggggggaaatatggacacgggacggtggaccttgggcaggtcacccccggggaaaaccctgggggggtgggaatttattccc

SEQ ID NO: 81157 - DNA, 569 bp, Zea mays
  Clone ID: MRT4577_174030C.1
cattggtacctcgagccggccgggagaggcagcccttctaatctgaatgaattcactcataacctcttcctgaatcttcgattagattctcattgacaagaacactaaaaacgaacctgaccatgccattgatccgtcgcgatcacgctctctatcccttctccctcgacctctgctaccactttgagggatacctcttctgatcctcaaataaaaaaagtatcttcacctcgtatccctgcgaaccagatcagaagaccaagcacttcgctgtggagaagatcgactgtacaaatactccatatgatgacttgttcaactctcacccacagaatgattgcaaagatgagctcaatgagtatgactatgacactgacgacaatgagatcaacagcaagagcatcttcgatgactaggacaaaacgaactcctgcatacgcgcgaagatgatgaactccacattccagcacaggatccgactgcacgataacgccaacacctagcagatcaaggccgccatgcagaacggagtgcttactcgaactgctcccagagaggactccctgaag

SEQ ID NO: 81158 - DNA, 613 bp, Zea mays
  Clone ID: MRT4577_174031C.1
aattcaaaaaacaatctggccttgaacctgaacatgttgataaggagtttttaaggctttggttcaagaacaactgcaacccatatgaagacgcggttctgccagaagctccagaagagttggtttgtgagctggcctggcgatacattttcctgtttgaaacaatcacgaagacaaaattcgagatcctagaagcgcaggaaccaattcatgaaaggatatcaaggaatgtcgctcaagccttacgggacctatgattgctgatagaggatctggggcagagtttgagtgcatttctggaaccaattcatgaaaccatctgatagggttttgggtgcatttctggcactaatattcccgtgcgaatagcaagtagtctgcgcagatgccatatatccgtcctgtgagggttgccattgcgtcttgatgaagcagaactatccaccacatttcttcatgatctgtgatataatgtggtaataaactcaaccgccatgctccgctggtgagatttgccgtgtttggagcagggggggagacaaactgagaaatttaacaagcatgagaccgacagatgctgtattcaaataaaaaaaaaaaaaaaaaagcggcc

SEQ ID NO: 81159 - DNA, 263 bp, Zea mays
  Clone ID: MRT4577_174032C.1
ggagaagcaggggcggggaagaagaataccgtatcacttaaggtttgccagaagccgtgataacattgaaccgaccgagtatcactaggttcaaaaaaataaccaccacaaaagtaccaaccaaccacaaatgttttttatgcggacacacggggcggactgaggataactctcaggtacaactgggccagccagcaactgaaggacactcaagactgacaacaaaccgcttggagcacctcctgtatcttggggccagggcc

SEQ ID NO: 81160 - DNA, 566 bp, Zea mays
  Clone ID: MRT4577_174033C.1
ggcaagccgcgcccgtccccaatcctcgtgccgccgccaccatcgtcgccgcctccccgcctgaacctcctcctcccgagatccctcctcgcgctcgccgcgcgcgccatgccgtcgcgccgcccctccccggtcctcctcctcctcctcgcgctctcgctcgccctcctcgcctgcacccgtcaagatctacctgtacgacctgccggccaagtttacctacggcgtcgtccgtagctacaaggctgcgcgtgcgacatctggctccgcgaacgccgctgctactctgcccgacgagcaactgcggtacccgggacaccagcactcggcggagtggtggctcttcaaggacctgctccgacgcaggccgcaggaccgccccgtggcacgcgtggacgacccgagcgacgccgacctcttctacgtgcccttcttctcctctctcagccttggtgtcaaccccatccgctctacgctggcagcaaacgcctctggggcggggacagcgtacagcgacgaggccttgcaaggggagttgctagagtggctggagcggcaactttact

SEQ ID NO: 81161 - DNA, 280 bp, Zea mays
  Clone ID: MRT4577_174034C.1
caaatggaggggccacgtatggacttgctgataacaaggtatcacagacatttgttgaggtagaagttggcaatttgatgagaaaaacaagtaccagtaagggtctaaatcctacatggaacagtacatttaacatggtacttcatggagagacaggcattgtcaagtttcttctgtatgaattggattctggcggtgtcaaattcaattacttgacaagctgtgagataaaggacactgaagcagtaatgtaaacaggtaaagtatgttcatgatggtt

SEQ ID NO: 81162 - DNA, 2018 bp, Zea mays
  Clone ID: MRT4577_174035C.1
aattcggcacggaggccacgacgtctactcgcatcccaatctccgtcgtcccccgcggccccgcctcactccttccgccgcactccacttccacatcgccgcccacaccctacctcgaggccggcctcatgtgggagcgcggcaggccgccccgcaagccgcgcccgtccccaatcctcgtgccgccgccaccgtcgtcgccgcctccccgcctgaacctcctcctcccgagatccctcctcgcgctcgccgcgcgcgccatgccgtcgcgccgcccctccccggtcctcctcctcctcctcgcgctctcgctcgccctcctcttccttctcctctccccttccttcccctccacctcccgcttctctcgctccctcagctctggctccgctttcgcctcctcatctccggcgtcaacctccgccccgcctgcacccgtcaagatctacctgtacgacctgccggccaagtttacctacggcgtcgtccgtagctacaaggctgcgcgtgcgacatctggctccgcgaacgccgctgctactctgcccgacgagcaactgcggtacccgggacaccagcactcggcggagtggtggctcttcaaggacctgctccgacgcaggccgcaggaccgccccgtggcacgcgtggacgacccgagcgacgccgacctcttctacgtgcccttcttctcctctctcagccttgttgtcaaccccatccgctctccgctggcagcaaacgcctctggggcggggacagcgtacagcgacgaggccttgcaagaggagttgctagagtggctggagcggcaactttactggcagcgccacagggggagggatcacgttttcatctgccaggatcccaatgccctttacagggtggtcgatcggatcagcaatgccgtactcctggtttctgatttcggcaggttgcgcagcgaccaggcatctctcgtcaaggatgtcatcctgccctactcacatcgaatcaactccttcaagggtgaggtcggggtggatggtcgcccctctttgctgttcttcatgggcaataggtaccgcaaggagggagggaaggttcgtgatgcactttttcagattcttgaaaacgaggatgatgtaaccataaaacatggaacacaatcgagggagagtcggcgtgcagctacacaaggaatgcactcatctaaattttgcctgcatcctgccggagatactccctcagcatgcagattatttgatgcacttgtcagtctgtgtgttcctgttatagccagtgattacattgaacttccattcgaagatattatagactacaataaaatatcaatatttgttgggacaagcaaagcagtacagcctggatacttaacttcaactcttcgaagaatcagttcagagaggattctggagtaccagagggaaataaaaaaggtcagacattactttgagtacgaggatccgaatggaccagtgaacgagatttggcgccaagtatcccttaaagcaccactgataaagttgttgactaaccgctacaaacggttgcttgaaagaggcaccaatggaacagattgttcgtgcatctgctctacaactccaactgacataactgcggcaagttaaacaagatggaactcatcggcctacaagctctgtgcctatttcctgtgatcacattgcctgaattttttaggttgtacagttccatgtaaaacgagattaccagccactatttttgaacagtaaatttactaatcaccacaatccttgagttttcactagatttgtataggaggagcggatagtcaggaaccttacagtgccctttttgtattgtaagttacattagctattttttgttgtcggcagttcgctgccctagtttttcgacctacataagcatcaatccccgtgccagtgcgtggcccaaaaaaaaaaaaaaaaaaaaaaaaaaaaaaaaaaaaaaaaaaaaaaaaaaaaaaaaaaactcgaagagggggcccgtgtacc

SEQ ID NO: 81163 - DNA, 412 bp, Zea mays
  Clone ID: MRT4577_174036C.1
ttgtgttctcgctcaccttgtccgaactcgggagctacatctgccttccctttggacagcttcagccttcaaccatttttccccacctgtacacaagtacaaagcttggcactttgcaggttgcaattgcatgctctttggcccctcgcgcttaccggtggcccgccttccgacttggcgcctacgactagcttctggctttacaatggccttcatgcttggcattcttaaggcctcggcgccgggcccgcttgcgggacgcccggccaaggctggccagccagctaccggtagggtggccctatttaccaaatcttggtatttgtcaggcatggtggtgctaggcttccaaggttcagtgggcccccaaccgctctttaatttatataaattcaaccacgatttgctattt

SEQ ID NO: 81164 - DNA, 166 bp, Zea mays
  Clone ID: MRT4577_174038C.1
gacgttttatgcacgcgtgcgcgcgctcgtatgctgtaaaccggtacgacggccgcccttttttttttttttttttatcaatcacacgggggcaatgcgtggatattaacaactgttctattctcaagtggacaaaggccacgaatggtcatgaacacacacacat

SEQ ID NO: 81165 - DNA, 400 bp, Zea mays
  Clone ID: MRT4577_174039C.1
ggggaaaaccccccccgaacattttgggttccctttcctttctgaaaaaaaaatttgaaaaccagggaaaaaggatttgggggttaacggcaaccaatttggaaaaactgggggggggcggtgaaaacccgctattaaaaaaaaaacgccgacgccgaagtgctattacggagcgggggcgcatccccaaaccaaatgtttgagcaaacagggccaaatggggaacggaacctcctttagggaaacaaaggggttgggggggcccaagtttttcataatgcccaccttcctggggaaaaaaaacccgggggggtccctggtcagctgaaccaggataaaagccttgggggggatttccaacaaaaaaaactggaaaaaggtctccccgggggggtccttg

SEQ ID NO: 81166 - DNA, 611 bp, Zea mays
  unsure (1)..(611): unsure at all n locations
  Clone ID: MRT4577_17403C.1
tcacggctacctcccgncccgtggctctcgtcctgttacccggcgtatctcagcttgccgcgcgcgcgnncttcttcctacgcatcgcacgtgggcgcgacgtcnnggcggtgagcaggggcggtgcggcggcagaaaacgcgatcggcgtcccgggnaccgaccggcngagtggtagctggcngnncctggnntcaaggggtgcgtggtaggtgagggcgcggcggcgcgcgcnnnagtactnnacccgggnagccaccactctnacnncccggnagtggtgccagagtgtacctggcagaaacccgcctgcagggnnatgatgacagaagnnctccgcgccctattctgtgggtgactagcnnatcggcaaccccgcgnagctcatgcaagctaaccggatctcacggaaaggcggtgcgcaagaaaaaggcaggnngcccaattcaataacatccaagtaccaggctccatctgttgctgtttaannagtcagctttcgagaacctttacacccatnntgaacttctttcattttggttctgagccctctttggagaaaccannacagatcgagaatgttgaccctgcttgggtgggtgttagtccaa

SEQ ID NO: 81167 - DNA, 210 bp, Zea mays
  Clone ID: MRT4577_174040C.1
cagaaagttagctagctgctatcgtggaagtgcccatatgcgagagagagaggcaagctagcggggagggtctttacaggctagccagccagctggtagctcctgcggacaaggcgatggttggtgccaactttaactttggaccgagcttcggcttggtctttccggaagaagctcccttgtggtcaataaagacaccatttaccttaa

SEQ ID NO: 81168 - DNA, 158 bp, Zea mays
  Clone ID: MRT4577_174041C.1
tcgcggcgactacctaagagcaatggtgggacggaagccgatgcgccggcgccgaaacgaccggcaaccggcggcgcaatcctttggcacgactgcaatcgccaacggactggacgagctggtgctgactgggccggcggcgttcgggttggaacccc

SEQ ID NO: 81169 - DNA, 641 bp, Zea mays
  Clone ID: MRT4577_174042C.1
aagcctttggcggactaccggtggtcccacgcgcggtgcacaaccacttgcacctgcgccctgtacggcgagcgccggtcgtgctgccgcgtggccgccgagtcctacgactaggagtcgtgcacgcggacccctgtgacacagcggaggccgacggagcacgtggagtgcgccagcagccaagcgtggatgcactctgagtggaatgcgtggcgacaggcggacatgacgcgaagcacctcggcggcgttgaaagcgcccaggcacaccgtagcactcagaggcgcggaccacgttgacgtcaccagagccgaaccggaccgtcggaagcgcgcccaccgtggagctgctgagcccacaccggcagcggtcgtacgaggagggcgcgaagccgaggcccaggccgtcgggccgctcgccggggccgcgctgcttgcagtgcttggcgtagatgaggaagaggaagagcgccagcagcacggccgtgagcacgcccatgatgactgccgcgtccactgccggcagcggcggcggtggcagcggcggtggtcccaccttcgtcggcggcgacggcgactgcatggcctggcgcgcaagcgctcgcagcggcgtcggcggggacgtcatcctgtctcgatcat

SEQ ID NO: 81170 - DNA, 253 bp, Zea mays
  Clone ID: MRT4577_174043C.1
agcttttcgctcctcagcccaggagaaagggccgttctatctatttttctttctatctctccagtcggcaccggcaaggctaaccctaatagccattacctccacctgcggcacacaatcccgccggtaaacaaaaattcatacctatcccctgtacaagtggcaccagacttcaccctccccatgactctgaagaacgccatgcacctcggactgcttgatgtgctacaaaaagatgacgccaaagtccatg

SEQ ID NO: 81171 - DNA, 244 bp, Zea mays
  unsure (1)..(244): unsure at all n locations
  Clone ID: MRT4577_174044C.1
aggcaactccctanattttgcccagaaagtgacacgctggtcgtcaaacccacagtgaagtttagatcaatcatgcaacctaatttggtgccggagcaggaattagaatcgaatttatcattcgtatgcactggccattacactccatacatgaaaaacacggcattctattgccggctgtcaatccatggtgatcctgcccggaccttccttgagtgagctgtacaccggcctctatcgtttg

SEQ ID NO: 81172 - DNA, 703 bp, Zea mays
  Clone ID: MRT4577_174045C.1
actccatagggcgattgggatcctcgaggccggccgggaaaaactacctaacccaagcacacggcccaaacactcaaacagacaggaagcccgccgaacatcacaaggctgcgaacctcctagaagctcgaggagatgctctccaagctgtcggcgtggttcgtgaacccgcggaggaatccgctcgcgcgtctccaccggaacgccgtcgcctcccgcctccgcaaatacgggctcaggtatgacgacctctacgacccgtaccacgacctagacatcaaggaggcgctggcgcggctgccgcgggaggtggtggacgcccgtaaccagcgcctcaagcgggccatggacctctccatgaagcaccagtacctacccgacgacgtccaggctatacagacgccattcaggagctacctttttgacatgcttgctcttgtgaaaaaggagagcgcagagcgtgaagcattgggagcgcttccactctaccagagaaccatcccataaagtgcctctttgcatgatccaatcaatagtgcacgcgatgatcagcagaggctgatactgtaatgtgtattgtgttttttcgaggaaatctctactacttattaagacgataagggtagcctgccgttctgacgttatacaaacttagtcatatgttcttgtgcgatcaaaaaaaaaaaaaaaaaaaaccaaaaaa

SEQ ID NO: 81173 - DNA, 103 bp, Zea mays
  Clone ID: MRT4577_174046C.1
atcgagagacgggcagtgtatattgagaatgaaatctaagcctatcatccgcatctgtatgggttctgtggttgcgatggcggctgctgcgagacagcggttg

SEQ ID NO: 81174 - DNA, 114 bp, Zea mays
  Clone ID: MRT4577_174047C.1
tttctttatcgtcatcctcgctagcttctaatagccagagcctcttgctcctggggcggctttcccaccgctgtctacattgactgcgcaagaggtgtagacctctgttgctgc

SEQ ID NO: 81175 - DNA, 422 bp, Zea mays
  Clone ID: MRT4577_174048C.1
tttttgcgaaagtttttttttattatgcttaaaagggctttttccttgggagcaggtgagctcccatgcaccaaagctaatataaaacctgccacaatttgatgatcaaaattcaacaggtggataaaaaaccattgaccacctcaataaagaaaagcacaggcacaacacaatggaaccccaaagagtgcaaacaaaacacgttcgctggtaggtatcacgatctgttattgtggagtctgctagagggctcatccttccgactcggatcccctcgggtactgaggctgtacctctggctcacacgcttttcttctttatggaaggaccaccggtcacagaaccctgtgataggcgtagggcccaacagagaaacatgctttgcccgtgatacttcggtcagcccttacctttctaacccc

SEQ ID NO: 81176 - DNA, 308 bp, Zea mays
  Clone ID: MRT4577_174049C.1
ggggaaacaacacccttcccctgttttagggggatttacgggctacaacagggaaaggtcggccatttggccaaaggaaaatgcgccggaaccacacttcaaaaaaccctggggcgaggggtttaaactttttttaaaaccttagggtaacccccaacccttaaataaaatggactttttttaaaggggtttttcgggccttggaaacaactttgacagggccgggtgggcacaacctttactttgggaacatttggtcattggggggatcacccttaatttcaaattggggtttttttggaacttag

SEQ ID NO: 81177 - DNA, 460 bp, Zea mays
  Clone ID: MRT4577_17404C.1
attcatacacattttttttggcctagccccttggggaggaaaaacaccccaaaaaaagaaagccccaaggcggcgtctgaggaccagaacaaaaaaggggaagaagccccggggggggaacaaaaaaaaccatgtgttggggacgccccccaggaaccggtgcgcgcaggggggggaggggcgggccaaggggccagatgcggcgggcgcggggtcggcgggagggaaaaaaagttccactgagagggcgggtccccccggggctggcaccgggggggggaaccaaccagcccgaggggcacccaccacgggggggggacctcctccggggcgggcaacccccactggtttgtgcagaaacggcaggaccacccccccctgatcctacacccccggttgtagtagaaaacgctgccctgcccccccgaggggggccaaccccttccctgcgggcgcgaaa

SEQ ID NO: 81178 - DNA, 157 bp, Zea mays
  unsure (1)..(157): unsure at all n locations
  Clone ID: MRT4577_174050C.1
cctcgggtcccccggtatgtcctacagatcagcgtttttcttgctagtttgcctctttacctaaatccctccctctccccccctntgtcattgcaaaaaggcgcagtgctctatcacaatatccatcattcatcacatgtcattgacagagcggcat

SEQ ID NO: 81179 - DNA, 344 bp, Zea mays
  Clone ID: MRT4577_174051C.1
cattcacattatatattgggggaggtttacatttaaagagagaaccaaacctgcttgggggccgaatcccaaacttttacgtcaaagccgctcagtgaaatgctgtaagacaagggggagaaacatgccgaacgaagggcgcatgatgatcaacgagactgctacccacaacacgagagcatggtgcctcctaattaattactgtggccgccggttcctgtacctggatgcagttacaggccttgctctacgatatcttaaccgagcgtttcaaccacaatactgctctgacaacgggtcatggtcttgtcaaccatacacttcaccaaagaacggccagcttt

SEQ ID NO: 81180 - DNA, 2010 bp, Zea mays
  Clone ID: MRT4577_174052C.1
atggaggaccgtgagtggatgtacacgggccgcgttcgacgtaatgatgtcaccccagaatggattaggaagaccgatgctttcgtggaacgggcatatggcgaagctgctaaaggagctagcctagtcccttgtccgtgcagcaaatgtgacaaccggaaaagaaaaccaaagaaggccatggtagaacatatttggaagaatggatttacgccggactatactcggtggatcttccatggtgaagcgcatcgcacgagagaagaggtggtgagacaacgcgtccaggattaccatgctgatccccgggtaggagacatgttgaactactatcaccagggacgctccgacgatggccctgcagaagacgagccggaggcgaccgcaaagactctctacgagcttttttacgctgcacagaaagctgtgagaggccagactgaggattttgaattggataacgttgggattataacgtagttccagttgcgttgtggcatctggggacacgcattaccacgtttgttgacaccctgtggcagcctgtgttgagtgcactacgcctggccaatgggcgtgttcgaacaaccctcacgcttcgtcgagcccattcgccgaaacaatccagatgcccacctccttgatgacctgttttgtgatgagaaagaacacactgaggcaaagtacgtgatgttgggttagacttggtcttttgagatacttggtgatgttagtgatgatccagacttatatctgttttgtgatgatccccacttatatttgtgagtcttaccgaggttagagcgtctatacatgacagaggaatccgcgaaacagatgacatggcacaaaaaaggcaaacgatacaatcctgacaagatggttcacgcatccgatggtgaagcatggacccactttgatgccattcaccatgagaaagccaaagaggctcgtaatgttcgtgttgcgctggccacagatgggttcaatccctatggaatgaccgctgccccatacacatgttggcccgtgtcttggatggttttggagactgcagggggtcacggccgcaaccccaatggcatcctcggccttctatgccgggaacactttcctggacttgtcgagtacgccggagtgacgagcccagcatacaccttcgaccactacgccgtcgcccccgatgcagtagatcgggacggcagacaattcaacaacaaggcggagcgggtgaagcaagagctgtgggatttcttcaggtgcgatgctggatacgaggccagggcggatgtggtgtctacgacgtgctgtaagaagctcgtcgtggacatgcactacgaggcgcgcatccaggccatcgtcacttaccacggctccgtccttggggagaaggtgaacaagaaggacgcccgaaccatgtcattgactgcggaccagtacttgcagatgattcctcattggtgcgccgcgcatcctgagtgctgggagaagatggtgcagaggtggtgctcggctgagtgggacgaggcgcacaacgctagccgggaacggcgtttgctgatgcaaggtccctcccaccatcaaggcagccgcagcctgggcaaatacgcggaagcatgggaggtccatgggccagattacgatccgaggaccgaggacatcgacgaagatgtcctcatgagggtcggaggaggcaagaggcatgggcggtactggattgccgacggggcaatcgactcgtcctccactcccactctctctcagggcgaaatattacagactcagctagatgatgagaggaggcaacgtgaggagctggagaagaggatggcggagatgttcgcgtacatgcagagccttggcgccgcacagggtcatgctccaccacctccgttgttccctgcagctgaccctacagagttcactactcctggtcaatcggcggcgtcgaacaaccctcatgcttcgtccagcccttcgccgaaccagtccagatgcccacctcgttga

SEQ ID NO: 81181 - DNA, 170 bp, Zea mays
  Clone ID: MRT4577_174053C.1
gaggcataggaagttcactgaaactgtttaactttagattggtctgaacaactatgggccacagaatgtcatgcgtccttatgcttcttgctatttgtacatatattgctaacgcaacaataatgcctgcatgctcacaagctcctatcacttccattattcccccatac

SEQ ID NO: 81182 - DNA, 2308 bp, Zea mays
  Clone ID: MRT4577_174054C.1
atgttgaacgactatcacgaggcacagttcgccgaaggacgtacggaggacgagccagaggcgaccgcaaaggcattctacgacatgtttgacgcggcacagaaaccccttcacggcaagacaaaggtttctcaactggatgccattgagcgtataatggcgttcaagtcgcaatatagcatgagtcgagacgccttcgatggtttgttgacagttattgacagtctgcttccggaggatcacgttctgccaaagagcatgtacgaggcacagaaactccttcgtgcactcaagatgacgtatgagcagatacatgcttgtccgaagggctgtgtcctatttaggaaagaacacactgaggcaaagtactgtccgaagtgtaaatcgtctaggttcatggaggtagactctggtgatggacagaagagacagctcgacatccccgtgacaatcctacgccaccttccgttcataccgaggatccagcgtctatacatgacagaggaatccgtgaaacagatgacatggcacaaaaaaggcaaacgatacaatcctgacaagatggttcacacatccgatggtgaagcatggacccactttgatgccattcaccatgagaaagctaaagaggctcgtaatgttcgtgttgcgctggccacagatgggttcaatccctatggaatgaccgctgccccatacacatacatcaagaactttacgaaaggtgtcgtggtgacagaccgcccacctgcaatgatgactggtgtcgaagttcgcgaacagatagatggtctcgtggccaacccagaaggtggttttgtgggatatggttgttggacaaagatggtgggcggtgggacgaggacgaggagggggagggggagggggaggaggagcacccgtaggacggaggaggaggcgcagcaggacgacgccgtacagcagcaggtggagcagcaagccgctgtcgatgcggcacagcaggacgacgacgatgcggcgcagcaggacgacgacgacgacgacgacgccgctcagcaggacgtctcaggttctggctcctcaggttcgaggagtatctacctgcgaggtcccgcgagcctacctaaccgacccatacttcgtgacagacgtccgctcatacgacccgatggagagaggtgggtcttggatggttttggagactgcagggggtcacggccgcaaccccaatggcatcctcggccttctatgccgggaacacttccctgggcttgtcgagtacgccggagtgacgagcccagcgtacaccttcgaccactacgccgtcgcccccgatgcagtagatcgggacggcagacaattcaacaacaaggcggagcgggtcaagcaagagctgtgggatttcttcaggtgcgatgctggatacgaggccagggcggatgtggtgtctacgacgtgctgtaagaagctcgtcgtggacatgcactacgaggcgcgcatccaggccatcgtcacttaccacggctccgtccttggggagaaggtgaacaagaaggacgcccgaaccatgtcattgactgcggaccagtacttgcagatgattcctcattggtgcgccgcgcatcctgagtgctgggagaagatggtgcagaggtggtgctcggctgagtgggacgaggcgcacaacgctggccgggaacggcgtttgctgatgcaaggtccctcccaccatcaaggcagccgcagcctgggcaaatacgcggaagcatggtcggcggcacatggtggcgcgccttgctccacgttctcggcatatgccatggcccacaaggggaaggcgacgtccgacgtcacctacaacccggatgacgggcccgaggcgtacaccaaccccgccatccacagccgactcagtgagtacaccgcaatggccaaggaggtccatgggccagattacgatccgaggaccgaggacatcgacggagatgtcctcatgagggtcggaggaggcaagaggcatgggcggtactggattgccgacggggcaatcgactcgtcctccactcccactctctctcagggcgaaatattacagactcagctagatgatgagaggaggcaacgtgaggagctggagaagaggatggcggagatgttcgcgtacatgcagagccttggcgccgcacagggtcatgctccaccacctccgttgttccctgcaactgaccctgctgagttcactactcctggtcaatcggcggcgtcgaacaaccctcatgcttcgtccagcccttcgccgaaccagtccagatgcccacctcgttga

SEQ ID NO: 81183 - DNA, 1448 bp, Zea mays
  Clone ID: MRT4577_174055C.1
cgcgatctagctgctccgcccagatcgacgtccccttagccgctacgctgccccacgccacctcacccgctcccccgtaccgtcgccctctcggaaccctcgccattccgcgccgcgagaggtcttcctagccgctgcgggtctgcctgcaccgcgtcgcgtcgccactgcaccgacccgccacagccccactagcctgactccaccgccaccctagaggatggaggaccgtgagtggatgtacacgggccgcgttcgacgtaatgatgtcaccccagaatggattaggaagaccgatgctttcgtggaacgggcatatggcgaagctgctaaaggagctagcctagtcccttgtccgtgtagcaaatgtgacaaccggaaaagaaaaccaaagaaggtcatggtagaacatatttggaagaatggatttacgccggactatactcggtggatcttccatggtgaagcgcatcgcacgagagaggaggtggtgagacaacgcgtcgaggattacgatgctgatgccggggtaggagacatgttgaacgactatcacgaggcacagttcgccgaaggacgtacggaggacgagccagaggcgaccgcaaagacattctacgacatgtttgacgcggcacagaaaccccttcacggcaagacaaaggtttctcaactggatgccattgggcgtataatggcgttcaagtcgcagtatagcatgagtcgagacgcattcgatggtttgttgacagttattggcagcctgcttccggaggatcacgttctgccaaagagcatgtacgaggcacagaaactccattatacgcgagcaaggagcacgagcgcgagcccagccatacgacctcggcaggacacctcacagcatcgtatccagcaactccagactcagctagatgatgagaggaggcaacgtgaggagctagagaagaggatggcggagatgttcgcgtacatgcagagccttggcgccgcacagggtcatgctccaccacctccgttgttccctgcagctgaccctacagagttcactactcctggtcaatcggcggcgtcgaacaaccctcatgcttcgtccagcccttcgccgaaccagtccagatgcccacctcgttgatgatctgttttgtgatgatccagacttacctttatgagtgttggtgatgttagttaaactttatcttgtgagatacttggtgatgttagtgatgacgcagacttatatctgttttgtgatgatccttacttatatttgtgagactttagtgagactttgtgatatatatggtgttcatgataaatttgttcattctgtgatgtgattgatatataatgtgatgtgaatcatatatatcttttgtttgtttggatggaacaacaaaagcaaataaaaaagggacattctggtcactttgccgagtgtaacactc

SEQ ID NO: 81184 - DNA, 276 bp, Zea mays
  Clone ID: MRT4577_174056C.1
cgtcactcacctcgaccaccggcatgggcatggccttggcctccgcgaccgtcgccgcactcttgcgctccgacctgttcgagccacacggcgccggcgcgcgcgtacggccgcagcgccagcagccgttcttggctacgctccacgcggcgaatggccccggctcggcgccggtggtgctggaaggcaaggccaaaggaaagaagaagaaggggcccagctacaggaacctttccgcagaccttgacgttgagatcagggaggcgcaggagtacc

SEQ ID NO: 81185 - DNA, 102 bp, Zea mays
  Clone ID: MRT4577_174057C.1
tcttcaggcgcgacgccgttccgggaacctcggtactcattgggtggggaaacacctatgcacccgtgtggtacaccgaatgatgcttatcagactccaatg

SEQ ID NO: 81186 - DNA, 274 bp, Zea mays
  Clone ID: MRT4577_174058C.1
gttttgggcatctagttaacacaccatgttgagcgcactttcatcaagggaagatcaatggctatcatgttatttttccaccttgcgcttcttgcgcttttttcgagcgcaacatatgcgttcattattccacaatgcttacttgctcctagtttcattatttcacaatttctcccaccatttacttgaatggacctcgaacacccaattgttcatgcctattcgctacaacaagctattgatggtagcgttttacaccaaccaattgtccaat

SEQ ID NO: 81187 - DNA, 770 bp, Zea mays
  Clone ID: MRT4577_174059C.1
ccgccatcaccgctgttaggttctaccaggagaccttcggcgtccctccggccacgcgagctcgccgaaatggtcgcccacaggttccatcagtaccaggtggtgggtcgcgcactgccgaccccaaccgatgagcaccccaagatctaccgccaagtccaagttctggtacttcctgagaaagctcaagaaggtgaagaagagcaatggccagatgcttgccatcaacgagatctttgagcgcaacccgaccaccatcaagaactatggcatctggctgcgctaccagagcaggactggttaccacaacatgtacaaggagtaccgcgacaccaccctgaacggcgcagtggagcagatgtacaacgagatggcctcccgccaccgcgtgaggtccccctgcatacagatcatcaagacagcgacggtccacttcaagctgtgcaagagggacaacaccaagcagttccacaactccgagatcaagttcccgcttgtgtaccgcaaggtcaggccgcctaccaggaagctccggaccactttcaaggcttccaggcccaaccttttcatgtgagaggtatatcgtacccgtgttctgtgtcttgagcgcccgagagataaggattcttcctgtgcaagtttttggtgccctgttcattgagcactttgtttgattccagttaaggatttgaatgatgctgtgtaaaacaatgacttgtctgcaattagttatcaactactgccaaaaaaaaaaaaaaaaaaggccccta

SEQ ID NO: 81188 - DNA, 618 bp, Zea mays
  Clone ID: MRT4577_17405C.1
gtctcaggatcacattgtgaccaaaatctcaaatttgttatgttcaaatttgacttcccagaagctttgcactctgcatacctctcctgtcttgtctgtgtggtgtaatgctatctgacgctaatctaaccacccccgtgctggtgtggtgctacagagctgagcttaatcacatcacggtgcaggcggcgttggggttctcgtcgctcagcatgaactcggcgttgctcagcgactgctggtcgtagaaggccgccttccacgcctccagctcagccgacagggccttggtgatcgccgcgtccttcccgtccttcccatccttctccttctccttctccttctccttgccgccgccaccgcctccgtccttgtccttgccgtccttgttgcccgaccccggcgccaccacgtccacgggccgccgcagcttcttgcgcagcttctccggcagggccttggcgtccatggtccccgtcaccgtcacctggttcttgcccatgtccatgcgcacctgctccactcctttgatcttgtacagcttcctgcggatgcggttcatgcagccgtcgcagtggagccccgtggagcctatcctcagcaccaccgtcgcgacca

SEQ ID NO: 81189 - DNA, 334 bp, Zea mays
  Clone ID: MRT4577_174060C.1
tcttcctcatagattcattaacatcaaaaccacaattctcctaacgtcccctataaattctatctgtctacatttagaggctgctcagttctctagcaacataacaactctatcaagtagattggagatatagatcgtagtggtcatgtatattggagatatagatggtagtgatacacgtcgcaacctatgtgtgacctctttctaactgtacaattccagtgtaacaccaagggtccaaccttaatttccccatttaacctttgtcctactaactgccctgccattgcccgatatctcctgttgctaaggctcaatctctgaaaatcctact

SEQ ID NO: 81190 - DNA, 736 bp, Zea mays
  unsure (1)..(736): unsure at all n locations
  Clone ID: MRT4577_174061C.1
agagtcagccttcatcaccgctgttaggttctaccaggagaccttcggcgtccctccggccacgcgagctcgccgaaatggtcgcccacaggttccatcagtaccaggtggtgggtcgcgcgctgccgaccccaaccgatgagcaccccaagatctaccgcatgaagctctgggccaccaacgaggttcgcgccaagtccaagttctggtacttcctgagaaagctcaagaaggtgaagaagagcaatggccagatgcttgccatcaacgagatctttgagcgcaacccgaccaccatcaagaactatggcatctggctgcgctaccagagcaggactggttaccacaacatgtacaaggagtaccgcgtgaggtccccctgcatacagatcatcaagacagcgacggtccacttcaagctgtgcaagagggacaacaccaagcagttccacaactccgagatcaagttcccgcttgtgtaccgcaaggtcaggccgcctaccaggaagctccggaccactctcaaggcttccaggcccaaccttttcatgtgagaggtatatcgtacccgtgttctgtgtcttgagcgcccgagagataaggattcttcctgtgcaagtttttggtgccctgttcattgagcactttgtttgattccagttaaggatttgaatgatgctgtgtaaacaatgacttgtctgcaattagttatcaactactgctatttacctgcgnc

SEQ ID NO: 81191 - DNA, 345 bp, Zea mays
  Clone ID: MRT4577_174062C.1
gccagctgttgtctatgctgcggtccggaaatgtgcaccgtgcagtgcagagccgagtccgacgggatgtgctgctttgcgagcacgaacgtagccgcttctttgccatccttggactgtgttgtgcggatcagagcatcgtctggacttccctggctgttgcagccttacccaaacctctgattcgagtactcgcggaggctcccaaccggggctccctggacctgcgctccgcagtctggcgatacgggttagctgttggttgcggcgatgatcgggaccttggtccctggtgctcgtctcctctactcgctccgatctatgcggtcagtcatgctccttgca

SEQ ID NO: 81192 - DNA, 331 bp, Zea mays
  unsure (1)..(331): unsure at all n locations
  Clone ID: MRT4577_174063C.1
gggccgggagttccaaacatgaccgctgnnaggntctatttgcagaccttcggcggccctccggccacgcgagctcgccgaaatggtcgcccactggttccatcagtaccaggtggtgggtcgcgcgctgccgaccccaaccgatgagcaccccaagatctaccgcatgaagctctgggccaccaacgaggttcgcgccaagtccaagttctggtacttcctgagaaagtcaagaaggtgaataagagcaatggccagatgcttgccatcaacgagatctttgagcgcaacccgaccaccatcaagaactatgggatctggctgcgctacc

SEQ ID NO: 81193 - DNA, 468 bp, Zea mays
  Clone ID: MRT4577_174064C.1
acccgtgttctgtgtcttgagcgcccgagagataaggattcttcctgtgcaagtttttggtgccctgttcattgaacactttgtttgattccagttaaggatttgaatgatgctgtgtaaaacaatgacttgtctgcaattagttatcaactactgctatttaaaaaaaaaaaaaaaaaaaaaaaaaaaaaaaaaaaaaaaaaaaaaaaaaaaaaaaaaaaaaaaaaaaaaaaaaaaaaaaaaaaacccacaaaaaaaaaaaaaaaaaaaaagggccttttggccgcaccccctttaggggaaatttccaccacttgggggccgtttattggggatcccaacctggtcccaaacttggggaaaacagggaacaaagtgtttcctgggggaaaatgttttcccgttaaaattcccccaaaaaatagagccggaaacaaaaaggggaaaccccggggggccctagggggg

SEQ ID NO: 81194 - DNA, 277 bp, Zea mays
  Clone ID: MRT4577_174065C.1
ctggagtggaagagagagagaggcagaacttgccggtgaaaagaggggaggagagaggctggaggtgaaacactggaagaaggcagaaggctggagagaccttagccaggatggaggctgttgtgaacttgtaccaggaattgatgaagtgtgcagatccccggatccaaaactatcctctgatgggatcccccttgctaataacatccatccttctgacctatgtgtacttcgtcctatcacttgggcctcgaatcatggctaatcggaagccttt

SEQ ID NO: 81195 - DNA, 521 bp, Zea mays
  Clone ID: MRT4577_174066C.1
tttgtttttttttttttttttttttttttttttggttttttttttttttttttttttttttttttttttttttttttttttttttaaaggaaaacgggggaagtctttctgccaaggaaaactccggtttttttaaacaaaagcccgggtggtgggaacatcctgaaggcctccggcagggttaaaacaaaaccgaacccgatacataaaatgggaatggggaaacaaaccccgagcccgagggaacccaaaccccccccccaaaagcccccccactacaaactacgatttttcctccccacattccaaacagggggggggcctaaaaactggggggcactgctcccaaattttaaaagccacgacggggcgacctagtcccacctaaggcgaccttgccctggagggtctggggtttctggggcccgggggggggcagtttttcaacgggaacggggagcaccccccccttgcaaacgggggaaattttgcccatggaggggtggcccggcaccacaaac

SEQ ID NO: 81196 - DNA, 993 bp, Zea mays
  unsure (1)..(993): unsure at all n locations
  Clone ID: MRT4577_174067C.1
gccaagtcgaagttctggtcagtaccgtacaccctggggctgatgctaggattctctgattgttttttccgttgcgtatttctgacggtggcgtcttgcttgcttgcgtgcaggtacttcctgagaagctgaanaagtgaagaagagcaatggccagatgctcgccatcaacgagatcttcgagcgcaaccctaccaccatcaagaactacggcatctggctgcgctaccagagcaggactggttaccacaacatgtacaaggagtaccgcgacaccaccctgaacggcgcagtggagcagatgtacaacgagatggcctcccgccaccgcgtgaggtccccctgcatacagatcatcaagacagcgacggtccacttcaagctgtgcaagagggacaacaccaagcagttccacaactccgagatcaagttcccgcttgtgtaccgcaaggtcaggccgcctaccaggaagctccggaccactttcaaggcttccaggcccaaccttttcatgtgagaggatagttgttggggggaaaaaattttgtgctgcggcctgctgattgcctgtagtattttcgtctaagacacaggattgtatgccgcgggtttggaacccttgctatatcacccagaagaaacagcagtaaggggccttgacaagagttggcggggggcaaaatttactgctgtgatggtttcatgttgcttgcacatcgccatgcattcacagcacatggacgggtggggaggacacagcgcacgctcgcggctgccttgctggatctagatgtcactagctccctccaaggatcgaggtgatggtatctgtagcccttgcactaccagcccgctgttcaagctgtctcgactgagatcctgggctgttctcaaagtatttgcagccacggctgttcaggagctctgttttagctgttgcttgccaccttttgacattcgtgtctgccgaggagtaatgttcaagagaagaag

SEQ ID NO: 81197 - DNA, 348 bp, Zea mays
  Clone ID: MRT4577_174068C.1
cctatatacagtcaccatcgccacagctctctctctgctgccggaagactacgccagagaggtctacaagacactcgatcaagaaaggagcgggcccccgtggccctcctgatggcggccgactatcacttgtggccactgtacatcgccgccctcgctcagtgcggcgaggcctaccacgccgttgaggacactatcgagcgcatctcaggcagtgctggtgatctgctaaaagatactactgacggtaggctgacggtcctaacttatgactcaccattgaaggaccccaggaatgatgcgcacctaggacctacatcgcctgacggacctgttaccctgtgaaag

SEQ ID NO: 81198 - DNA, 315 bp, Zea mays
  Clone ID: MRT4577_174069C.1
gcatgaaaatgtgctcgccagaccaaatttgccacataatcaacaaacacaaacaggccatgcatggggccgaccctctgctcctcttatactgctatagtagccaacgcttattaagaaactaactaacccatgactcctgcgatccgtatatatactaggaaatgcatgggtcttaatcaataagcgctgttgaatggctcgggggccttgaggttgctcaccatgtcgggcacggatccactgcttgcggccacggcgatgacgaggcaggacaagctcatggcctgcaccatccaccagcggatctgtccg

SEQ ID NO: 81199 - DNA, 587 bp, Zea mays
  Clone ID: MRT4577_17406C.1
gggtacctcgaggccggccggggttaatggtgtttccacatttgagttcattaggagtggtgttaccacagcattgcttgactatttgtcctgtggaacatttgggaaggaaaaggtatctgaaagaaacctacctcagcttcgtcagcaggtccttagatgatacaagtcgttcgtatctgtttccctttctattgatcatgaacgggatgaaactgccatgacactgttggttaagaaactgcaaagtgcattgtgttcgctggaacgtttccctcttgtttcagccagtctagtaggattggtaatggagggtcccgtctgacttcaggtcttagtgctctggctcaacccttcaagcttcgtctgtccccagctcaaggtgaaaaaccacttcgggattattcatcaaatattgtgcttatcaatccatttgccagtttagcagctgttgaaggatttctttggcccagagttcaacacagtgaggttgcgtcaaagccctatatttcatctggtaataattctgaatctggggttcctggcaccatagctggtgcattattagcaactgcaagggctcaatt

SEQ ID NO: 81200 - DNA, 621 bp, Zea mays
  Clone ID: MRT4577_174070C.1
gggaccctcgaggccggccgggatttctttacatccagcgcccgcgacactgcagagtctttgcaggataacttctccgaggatgaaccccacactggaaccagatcactctgaatactttcgtcgagaagtgacggaggatacctctccaccactcaagtccagaaggatccccatcaaccctgatgatcacgtactgactcctagcgtagctcactggctaccagagctctcatatgtgacttgggatgactacgctacaattgcagctgctcctcggcagtccaagcacatctacgtacataaggtggagtaaccacattgatgcgcgccgggaggctagacgtgtaccgcatcattcagcatactgctcatacatctatttccacacgtgagtacagacacacgcggggagacgataatgatcaatacgtgcttagggaaagtaccgctgagaaccaaggtgctagagataaatcctcagcagtaaccattaaaccaactccagagctgcttagcaaagggcacatgtgctgaagattgccatcacacattgtgacgccctttatttatgaggatatcgagaatgagaagatgctgatgtagagcatgatgcacctg

SEQ ID NO: 81201 - DNA, 224 bp, Zea mays
  unsure (1)..(224): unsure at all n locations
  Clone ID: MRT4577_174071C.1
aaataccggtccggaattcccgggtcgnacccacgcgtccgcccgngagtccgaacgnaaattgcaccaagaaatccatcgagaggccgtcgacaggggtattaatgggntcgtcgtctagcagcagccactgacgcntcattctcgnagccgtcgttctgctctccgtgctcgnggctgccagcgntaggcgngggacctnctgcgtgccggggtgggccttc

SEQ ID NO: 81202 - DNA, 446 bp, Zea mays
  Clone ID: MRT4577_174072C.1
gcggccgccctttctatcctttttttttttttttacttgaccttttttttgttcccttttttgtccttatctttatggatcttttctctctctaggtgcccattacctgttttaacgaaacaggcgcatttgcacggccaaaaaagggcgtggtctttttcaaaaagccgggggaaaacaacggactccaccttggcgccccgtggggcccaaaaaccccccccaaagcggcgaattaacccgggggagcggccccggaaaacatacccccccccgcaaaaacccccccttttataaaaacccacacaagcgcaccgccggggggtgtcgctctacatgggggggggggggcccaacaccaccagctccaagatcttcatgaggaccgccccgaaccctagaccttaccccacttaggaggggggcccgccaggggggccccccct

SEQ ID NO: 81203 - DNA, 1258 bp, Zea mays
  Clone ID: MRT4577_174073C.1
gccggccgggttctcgccatacagtgaatgtacaaatccagctcagatttttaaaaaagatccacaggtgttaaacctgctgcattggctaagatttctgatcctcaagacccatttctttgtcttgacaatgcacatgatcctgctggcactaagtttacatctccagcacctaataaaacagtagatatggtgtctttgcatatggaagttgacacttttgaatccagccctactaattcaggcaaggaaaatggttgtgttgctccacatacacctgtcctggagttcacaagaaccaacaaaaatacagagctaaagctgaagggtgagaaacttgataacaactctgtctcactggttttgcgaatagctgatttgtctggtcatgcaagaaatattcatttcctcttctacttggactctgatacagctttgtctgtagctgctgaaatggttgaacaattggagttagcagactgcgatgttaccttcattgctgattttattgatcttttgatagtgaatcttattccgggttggagacctgtaaatgatgcggcaacaaactcgtatacgcaatctgaaagtgaacttgcaatcacttcccataacaatctatcgaagttggtgcctgattatgcattaattgatggtatgatgcatccaaaagatgtgaatgtatcaactggttttcttgattctgtatcaagtgcaactaatataggaggatcaccatgctctgaaggttcggtcatttctgtacagcgtgctgagagtttcaaaagtgtgagtgactatgagcctgaggattatggtactatggactgtggtgggtacaaagagggaatcagtaaagaaaattgcagccatgttgtagatgatggatcgaggttaattttccatacagatcaagatcacttctcttggagttggccaatggccagcagtgcttcgatcatctactcctgataatcaggatgtgctgaatggggagcttgtcttgattgaacctcagtttggttgagatgaattgacaagggtgcgagaagaggctatggaaggagctcgaaataagtgggttgccagataaatgatgtttttgttcaaatctggcatttcatctgaacaatcataagctatgttcgatttatgttagaagtgtaagaaactatactgtcttttttagttaaaacataatatataggtagattgtcgtgaaatctgtttttttgcaatcgctgacaatcagactaat

SEQ ID NO: 81204 - DNA, 169 bp, Zea mays
  Clone ID: MRT4577_174074C.1
gttttataaagacatatttagaaatcgtagaatttttttcttggttcaatacaagcctctgtaactgtatctagagaggacagtgcatttcctcatgttgttggcatccagctcatgtagaaaggagtgtctctactctactcgactcacatagggtatttggtttgag

SEQ ID NO: 81205 - DNA, 2626 bp, Zea mays
  Clone ID: MRT4577_174075C.1
ccgggcctatcccacctttccctccaattcggcacgctaccgcttattcaccgtcgcctaccacctccccctcctccacgtgccgacttccgctccgcaccgccaatccgtcgtaaccctagcctagcccagcctggcctcacctgactccgatccgtccatgttcgccgcgaggaattttcctcccatgggttccgcatacgccgccgagaggacgccgatcgatggagaatgaggtgctgcgtctgccgcgtatcctccgccgggtgccgggccatgggcgttgcgggacgggccaatccgacgtcgtcgctgcgcagccgacgctgcctccgcatgcggccgtcttacgccccgttctccgagcccttcactgaacccccggcacccgccgcaccatcataccctgctgccgcgcacagtgcgtaggagccgcgggcggaccaccgacatctccggcgatctccattcctctttgcttcctctctctctctctccccctcccccctctctcgctcgtagagtcatttgcttgtcggggccgatccggaatggaggtgtttggttgtgggacccacaacgatgcggtcgatgctgaatacgcggaagtagatccaaccgggcgatacatgcgctataatttgattctggggagaggagctttcaagactgtttataaggcatttgatgaggtcgaaggcattgaggtcgcctggaatcaaatcaacatagatgaggtgatgcagtgtccagataatcttgataggctctacacagaagttcatcttctgaagtcactcaagcatgaaaatgttatgaagttttattattcatggattgatgaccagagtaagaaaattaatgtcatcacagagttgttcacgtctggaagtctcaggcattaccgtcagaaacatccacgtgttaacttgaaggcaataaagaattgggccaaggcagattcttcatggattggattacctgcatagccaccaacctccgattatccatagagacttgaagtgtgataatatttttgttaatggaaaccatggagaagttaagattggagatcttggactagctacagtaatgcaaacacctagggtgaggagtgttattggtaccccagaattcatggcacctgaactttatgatgaaaattatgatgagcgtgttgatatttactcatttggaatgtgtttgttggagatctttactcttgaatatccatacagtgaatgtacgaatccagctcagatttttaagaaagtatccacaggtgttaaacctgctgcattggctagaatttctgatcttcaagtaaagcagtttattgagaaatgtttagttcctgcttctgagaggtcgtctgccaaagaacttctgcaagacacatttctttgtcctgacaatacacatgaacctgctgtcactaagtttatatctccagcacctaaaaaaacagtagatatctctctggcgtctttgcatatggatgttgacactttggaatctagccatactgattcaggcaaggaaaatggatctgttgctccacatacaccagttttggagttcacaagaaccaacaaaaatacagagctaaagctaaagggcgagaaacttgataacaactctgtgtcactggttttgcgaattgctgatttctctggtcatgcaagaaatatccatttcctcttctacttggactctgatacagctatgtctgtagctgctgaaatggttgaacaattggagttagcggactgcgacgttacgttcattgctgattttattgatcttttgatagtgaatcttattccgggttggagacctgtaaatgatgcggcaacaaactcgtatacgcaatctgaaagtgaacttgcaatcacttcccataacaatctatcgaagttggtgcctgattatgcattaattgatggtatgatgcatccaaaagatgtgaatgtatcaactggttttcttgattctgtatcaagtgcaactaatctaggaggatcaccatgctctgaaggttcggtcatttctgtacagcgtgctgagagtttcaaaagtgtgagtgactatgggcctgaggattatggtactatggactgtggtgggtacaaagagggaatcagtaaagaaaattgcagccatgttgtagatgatggatcgaggttaattttccatatagatcaagatcacttctcttggagttggccaatggtcagcagtgcttcaatcatctactactgataatcaggatgtgctgaacggggagcttgtcttgattgaacctcagtttggttgagatgaattgacaagggtgcacggggagcttatcttgattgaacctcagtttggttgagatgaattgacaagggtgcgggaagaggctatggaaggagctcgaaataagtgggttgccagataaatgatgtttttgttcaaatctggcatttcatgtgaacaatcataagctatgttcgatttatgttagaagtgtaagaaactatactgatcttttttagttaaaacataatatatgggtagattgtcgtgaaaaaaaaaaaaaaaaaaggcccctacgcgaaaacccgaaaaaaaaaagggcggccgc

SEQ ID NO: 81206 - DNA, 440 bp, Zea mays
  Clone ID: MRT4577_174076C.1
acccacgcgtccgctccatatacaccagtcttggagttcacaagaaccaacaaaaatacagagctaaagctaaagggcgagaaacttgataacaactccgtgtcactggttttgcgaattgctgatttctctggtcatgcaagaaatatccatttcctcttctacttggactctgatacagctatgtctgtagctgctgaaatggttgaacaattggagttagcggactgcgacgttactttcattgctgattttattgaccttttgatagtgaatcttattccgggttggagacctgtaaatgatgcagcagcgaactcgtataggcgatctgaaagtgaacttgcagtcaattcccatcagaacatctcaaagttggtacctgattatgcattaattgatggtgtgatgcgcccaaaagatgtgaatgcatcaactag

SEQ ID NO: 81207 - DNA, 2732 bp, Zea mays
  Clone ID: MRT4577_174077C.1
gccggccggtccgggacgtccaaatcacaaacagacagaacatccccacgcaaggcccaagcgaaaaactatcatttctcccactctcccacctttccctccccaccaccacctacctccctctttattcgccgtcgcctaccacctccccctcctctccgtgcagacctccgctccgcaccaccaatccgtcgtaaccctagcccagcctggtctcggctggccccgctccgttcatgtgcggcaccaccgcctccccgtgttcgtagtagccgccgcggggaatttccctcccatgggttccgcatacgcccctgagaggacgccgatcgagggagaatgaggtgctgcatctgccgcgtatcctccgccgggtgccgggccatgggcgttgcgggacgggcgaacccgacgtcgtcgctgcgcagccgacgctgcctccgcatgcggccgtcgtacgccccgttctccgagcccttcactgaacgcccggcacccgccgccccgtcctccccttcatccccctgctgctgcgcctagggcgtaggagccgcgggcggaccgccgatatctacgtcgatctcgctggctccccccccctctctctctctctctgcttcctctctctctccctctcgctcgtagagtcagttgattgtcggggctgatccggaatggaggtgtttggttgtgggggatggggtggtcgatgctgaattcgcggaagtagatccaactgggcgatacatgcgctataatttgattttggggaggggagctttcaagactgtttacaaggcatttgatgaggtcgaaggtattgaagttgcatgggatcaaatcaacgtgggtgtggtgatgctatgtcctgatattctagacaggctataaagagcacattatcttttgaacttgctctagcatagagatggagttagattttctaaatagatgaatcatgacctttattggaagtttgatgtgatctgattgatcaacttgaatggatatccaagatttgatgatcggaaagattgttttgatagaagcaaagtactaacaaattggtcaaggcatattattcatgcgatggaaagctaggatagcaacaagctaccaatgttcgatagagacttggagtttgttaatcatattatgaatgtaaactatggggatgtaactattggagatcttgtgttagaagcgtgagaaaagatactaagcggttgtagtgttatcagaacttcagaattcatgccacatgaactttctgatcaaagctatgatgaaagagatgataggtctgcggattatggttcttagggactgtgctgggttctaaaagggactcagtataaaagaatgcatccatgttatatataatagatcgtagctaaatgtgtaatacctgctccaaggtctctgctttcggaggagccccttgatcagcacgttcttcaatcttctactactgataatcaggatgtgtctaacggggaagcttgtctagattgaacctcagtttgtgttgagacgaatggatctgcttgcactaggtgtacatctccagtacctaataaaacagtagatatggtgtctttgcatatggaagttgacacttttggatccagccctactaattcaggcaaggaaaatggttgtgttgctccacatacacctgtcctggagttcacaagaaccaacaaaaatacagagctaaagctgaagggtgagaaacttgataacaactctgtctcactggttttgcgaatagctgatttgtctggtcatgcaagaaatattcatttcctcttctacttggactctgatacagctttgtctgtagctgctgaaatggttgaacaattggagttagcagactgcgatgttaccttcattgctgattttattgatcttttgatagtgaatcttattccgggttggagacctgtaaatgatgcggcaacaaactcgtatacgcaatctgaaagtgaacttgcaatcacttcccataacaatctatcgaagttggtgcctgattatgcattaattgatggtgtgatgcatccaaaagatgtgaatgcatcaactagttgccttgattctgtatcaagtgcaaccaacctaggaggatcacaaggttctgaaggttcggtcatttctgtacagcttgctgagagttccaaaagtgtgagtgactatggggccgaggattatggcactatggactgtggtgggtacaaagacggaatcagcacattagattgcagccatgttttagataatggatcgaggtcgattttccatatagatcaagcatcacctttcttggagttggccagctgtggttcatcaacttcaactgataaccaggatgtgatgaacggggagcttgtttttattgaagctcagtacaagcacttggttgatgagttgacaaggatgcgagaagaggctagggaaggagctcgaaaaaactggttgccagatacatgatgtttttgttcaaatttggcatttcctctaaacatcataaactatgttcgatttcatgttcgaagtgtgagaaatgttaataatctgttttagttaaaacataaaaaaaaaaaaaaaaaaaaaaaaaaaaaaattcgaggggggtccccaccttgatcaggtggtcgttctctcgttgagggcggagcaggaccagattttcccagggcacagaaccaccgtaacactccctacac

SEQ ID NO: 81208 - DNA, 384 bp, Zea mays
  Clone ID: MRT4577_174078C.1
gaaaaaaactaactgagcatgactcgtcatcttttccaactctctttctttcccttgttctgctgacgcgccggtccgttggtcgcctcctatctgctcgctcgcccggtccggcctccgtccatggcgatggcggatgatgaggacaaaggagagccgcctggattggacccaagaacccggcgacccgtggcgaccggcaacatggccggcggtggcggagaggaggagtgggaggggccccccggctacgtgctctcgctcccggcggtggcgccgctcctgcccgtcgccgtctcctgcctcgacgccaccgtacggcgcaagaggcgcagccgaacccgacttcgtgcccagccgtctggcttaatgaccttgaagctc

SEQ ID NO: 81209 - DNA, 1628 bp, Zea mays
  Clone ID: MRT4577_174079C.1
tgcctaaaaccccctcggcccctccgtccagagccccctcggtccagaccgcgacgtccgtgaccgacgacgtcgacgaccccgcgcccgccgtggccgaccaccaccacagccaagcggccgccgaggctccggcgccggccacgccaccacagcacaaggtctgcgtcgggttcgggcggccggagaccagcgacctgacggtggtgctgtacgggaaggagggcgtcgcggtcagcatgagcgtgcacagggacgtgctcgcccagagcagcgccttcttcgcgcggcgcctcgccgccgacggccagccctgcgtggagatccacgactgcgaggacgcggagatctacgtggagacggtcggcctcatgtactgcgacgacggggccaacaagcaccggctgctcaagcagagcgtcccgcgcgtgcggcgtcatgaaggccgccgacgcgctcggcttccccgcctgcgtcaggtcctgcctcgactacctggaggccgtcccgtgggccggggaggaggaggagcgccgcgtcgtgtcctcggtccgccgtctccagtgcacggacggcgccggagtcagcccgctgctgaggagggtcgcctcctccgactccggctgtctgagaccgcccgccgacacgttcgcgcacataacggagatggtgctggcgagcaccgacgagcggggccggcgcgagacgaaagccctggtcttgagcctcctgaaagacagcactcgcggccacgtcggcggcggcggcgggccgacggatcaccaccaacaccgggcatctcctcttccgagacgctgtacggctcgtgccggggctgcctggaccggctccggcggctgctcgcggaagcttcgtccgagccggcgtactccgccgccgtcgcgcggcggatcgcgctggaggccgacaacctcgtgtggctggtggagatgctgttggcgggccagcgcgcctgcgacggcttcgtggcgctgtggtcgggccaggccgagctcgccgcgtcgcacgccggggcgccggcggcgtcccgccacgccgtgagccgcgtcacggcgcgcctgttcgtcggcgtcgggagaggggagatgctcccgcctagggacgcccgcctgcggctcctccaggtgtggctgcagccgctcatcgacgactacgcgtggctccagcgcgccggcggatcccggccggcggcgttcgacaggaggctcgtggaggacggcatcgggcagacgatcctgacgctgccgctggaggaccagaggtccttgctgctggcgtggttcggcaggttcttgaagctcggcgacgattgcccgaatttgcagagggcgttcgaggtgtggtggaggaggactttcgtcaggctgattctgacgcgggtgatattttgacatcagatcagatagaagctcagcctgaaatgctagcggcactagcttagctgttgatcatagattgtttgggagaaaccctttctgaatgttgagtgtattgtcttcgttagtccatctgacatgaaagttggcaagaatttggctgtgtgtttttgttctcagcagcattaacattaggtgggtctactcggatagtaatgaattcttgaatgg

SEQ ID NO: 81210 - DNA, 376 bp, Zea mays
  unsure (1)..(376): unsure at all n locations
  Clone ID: MRT4577_17407C.1
accttttcctttcctacttttaagaccgctgggcgcttcttttattttttgaccttcangacnagccatcttcatttcccagcgcagcaaaaacccaagaagcctattgagcggtaggcgaatccaaaaaacctaggaccacccgcaagacccttttgaacaacgtttcaaaggcgcggcttcttgcttgctaacaccattctagccagagctccccatttccgccccagtgctccagactcaaagataatgcaagggcaaccggctggttcagcacatcctggttgaacccacttgcctttcgtctgacctggctacattggaagatcaagaagctgttaaaaaaagctgtcctttggaccccgcttggggacaa

SEQ ID NO: 81211 - DNA, 604 bp, Zea mays
  Clone ID: MRT4577_174080C.1
attcacccatctcgtttctcgttccgatccgacctgctgcttcccgatgaccgagcccatggcagaccagctcgccgacgacatcatcacatagataacggagcacaccccacctcctcgacactgacgtggagtgcctgcatcccaacaaagggatctgacgactgtcatgtgctcagatggggcgaaatcctacatcacctagagctccaacacatgacccacgagataaatgcatggtgtacacggcaccatcttatttcccaccacgtactcacccttatgagctcgtgacatgaacgacaccgactctataccaacagctctcggaggccttccgcgcgcttgacataggaccacgaaccaattcaactctttcgccgagctccgccatgtacatgacaaatctgtgaatgagaagctaactgtatgaagactcggacgacatgatcctagaggctgatgtgcgatggtgatgcctctatcaactatgaagagcttgtctggtgcatgatgcacaagagatccacagacacataatctgaaggtacataagattctgcattagcatattagagcagatgcgacttcttattccatccac

SEQ ID NO: 81212 - DNA, 816 bp, Zea mays
  unsure (1)..(816): unsure at all n locations
  Clone ID: MRT4577_174081C.1
ggaacaacagttgctcgcacccgctgcgcggtggngcctcaaagaccaaaatagtgaacctgtatggtgggaccgctacgcgctcggaaactgtatcgtttctcgacaacgagctcagggaaggtgtttttcggaccttcggcttcctgaagcctaagagacttttttcacggatcaagctcgttacgaaaaacgatctagcaccgcgaaggggctacgtgtggggaccatgcttttttttcgaaggtcctgcaggaagaaacagcttcggctgaagctgtctgtacgtgatgccgaagggtgccgttcatgaagcttcggaattacaaaccgacttaaagatagaatgaccttttagtccataagagtctgagtcgttgttgtaaacttttatgaggggtatgattgtaattgctcgcaggctgtgtcctgtgcctataaatagtgaacagtattcctttactgttcacgaatttctgtaattgcaatcacatcgctcggaaattattctttgtcaaggcaaaggtataaatgtacctaaatatcatgttttccttaaatttatatgatatgtaaatcatgttgtttacttctaatttacttgtctttaatgctttatgtctcatgttattttgtattatctttgagaattcaattacaaagatataaccttcgtaattgtgtcgttgtaaccttcgtcggaaggtcattaaattctttgggaaaataatgcttcagcggacgaaggacattaatatttaatattttatggtggcttggtcttaattatagtatttgagaacaagtccccaacag

SEQ ID NO: 81213 - DNA, 1016 bp, Zea mays
  Clone ID: MRT4577_174082C.1
ggacccaaagacctccgaccaggagatgctcgagagcatctgtggcgtgctcatgcccttgaagctccaagctaagatcgccaaagccaagttcgaggcggcgtgctcgggcaagatctcgtgcgcggacatcgtcgctttcaccgccagcgacgcgtcctacttcctcagcaacgacggcatcaacttcaaccgtgcactcaacttattcaaggaaatgaaggcaaccggtgtgaacccaaacctggtcatgtgcaatacaaggttgtatgtcatgggccacgcattgcaaccttgggtggtgaagagcatccacagggagatgattgacaagcaggtgcagcacaacaaggtgacctactgttgtctcctgcatgcatacaccagggcacactacgatgaggatgccatggctgtgtaccggctgatgaaggatgaagcaatggacgtgatgctctacaacatgcttctatccaggtacgtcgacattggctatgtggacgaggctgaggagatcttcagagacatgaaggcgtccatggatgatcgttccaagcctgataagtggagctactcatcgatgctgaggcagtattcatcaactgccaacgtccttggtgtagagggcatactgaatgaaatggtggaagaactggacaaggtggtcatcttcgtggagacggacaatcaccagcttggttccatggtaaagcccctggttcatgacttagcagacttagcaggacttgctcacagtggaggattcaagcaaccgtggccttcacctatggagtttgtttggactgtgcatggtctccggcaacttggcgatcatggtcagcggcttgggggcaagccgcattttaagcggtggggaatgttaggagtggctgacatgtgaggctattgtcagggggcaagtggatttctacatctataaaaggacaattgtatggactaatagggacatcaattaccattttatcaatacagaacaaaaacgctagttctcatct

SEQ ID NO: 81214 - DNA, 340 bp, Zea mays
  Clone ID: MRT4577_174083C.1
cgccccgctcgtctccgccgtgcccacgccaagaagcctgcgcctggggagccaccagcagcagcacccgccggctctgaagctcagttcctctcaggtactgccaatgggctgtttccgtcaggtctccctcttgatttggcacaactgttagagaatatacgtacacaggttaatcaatcaattaactaatcaattcagctatggtggatggatatgcttgtcatctactagctgctgctgctgctgtagtcctgatgacagacgactttgtcttgggttgggacacacacaggacacgacggcgatcgcggcggcgatgatggaaaacacgggcagg

SEQ ID NO: 81215 - DNA, 260 bp, Zea mays
  Clone ID: MRT4577_174084C.1
cctttatatgtcatgggggacacacctgctattgaggcactgcagaaaatgatccaaggtaagtttagacaccttccagttgtagaaaatgggtaaggttttggcgtggtgggcctttccaaatggccttttggtgccatttccagacttggaaaggccgcagaaccagaaggtgcgcttgccgcttgttgtaaaaggggttgaccaacagttaggtggcaacttcttagttccacacattctcttgagactattagaga

SEQ ID NO: 81216 - DNA, 1333 bp, Zea mays
  Clone ID: MRT4577_174086C.1
aaagcatccaggtacatgcaatagttcccatccctggtggaagtgttgttaaggatattgttttaagccgggatggtcaatatctgctgacaaattctaatgatcgggtcattagagtctaccgaaacattctacctgttaaaggttctagagaggagatcagaaacataagcagcaacagtaatgaatatggaagtcactacgataaattaaaagcaaatggtacaagctgccttattctttcctgtgaacttttggatgccatcacaaagatacagtggaaggcaccatgtttcagtggtaatggtgagtggatagttggtgcttctgcaaacaaaggagagcacaggttgcagatatggaaccaagcagggcgccttgtaaagatgcttgaaggtccaaaagaagctctcattgatcttgcctggcatcctgttgagcctacaattgctacagtatctgtgacaggcttcgtatacatttgggccaaggagcatgtagagaattggagcgcttttgctcctgatttcgtagagttagaagaaaatgaagagtacgccgaacgagaggatgagtttgacttgaatccacgtgaagaacaggctgagaaagtagtgatagatgaggatgctgatgttgatatcgagacatctgagaagaatacagtgttcagtgatgtggaggattctgtggatgagatctcctacttaccagcaattccttacccagattctcctgatgagcagccagagaaatgccttggaagttcaaagttggaggatagcaaccattctggttccccatcctcaatggatgctgtacagaatggacaagccattcctccagcatcaagcccaatggaagttgacaactctactgctgaagacccagaagaagggccaaactcaaagcggaagcggcggctgtcagtgaaggggcttgagttgcagcagtccgagaaaggcaaaaagggatcaacaaagaacaagtccctcgggaagtccacaaaatccagcgccaagaagatggaatctgccaatggtaacagctctgccttcgatgatgaagccactgaggatgatgagattaacattgatagctagtgtgtttctgactgagggcaataggcgtgggggatagaaaatgccttttccccaccacccatccaccacctaattaaaattaactgttgtatgctgtgacaatataaacgcatgtatcagtgttcttgactgtaaattgatatgtgctgtttctcgtaaaaaaaaaaaaaaaaagcggcacccatgagtatttggttgatgcagtaattcgttctactttggagatgttc

SEQ ID NO: 81217 - DNA, 461 bp, Zea mays
  Clone ID: MRT4577_174087C.1
acactcctatgggcgattgggttcctcgaggccggccgggaggtcgcttgcgtggccgcgcgacaaggcgtacggggagagggaagaggggtggccggtctcgccggcgtcgattcgccgccgtgtggcgatccctgcacggacgtcggtcggtcgccatggagacggcgcatgaggtggccatttacatcgaccgcttccacaacctggacctgttccagcaaggatggtaccgcgtgaagattagtgccctgtgggaggatgacgagaatcgagcacccatctcgccggccagggtcacgcaatacgaaggtgcgaattcacctttcttgatgcagatatataaaaaataataataatccattcttcattctgttccgcagaaaatatgtcgccatgatttgacatgtaatataatctgttctgttctactcaaaaaaaaaaaaaaaaaatttgcggcc

SEQ ID NO: 81218 - DNA, 457 bp, Zea mays
  Clone ID: MRT4577_174088C.1
aaagggccaaactcaaagcggaaacgccggcctgtcagagaaggggcttaagttgcagcagtccgagaaaggcaaaaagggatcaacaaagaacaagtccctcgggaagtccacaaaatccagcgccaagaagatggaatctgccaatggtaacagctctgccttcgatgatgaagccactgaggatgatgagattaacattgatagctagtgtgtttctgactgagggcaataggcgtgggggatagaaaatgccttgtccccaccacccatccaccacctaattaaaattaactgttgtatgctgtgacaatataaacgcatgtatcagtgttcttgactgtaaattgatatgtgctgtttcttgtattccttagctctctgctttgcacccatgagtatttggttgatgcagtaattcgttccaaaaaaaaaaaaaaaaaaagggcggccaaaa

SEQ ID NO: 81219 - DNA, 259 bp, Zea mays
  Clone ID: MRT4577_174089C.1
acatgcacatttacctcttcggttttataaacgtacagtcaagtgttgtgaaggggacgcggtgaaatcaagacattggctgcctcatggcaagctccaccttgagcacgatgaacaagaaacattttggttcccgacatactaaagcgattgaggcaaacaatgaagataaaaaatgatacggttgaagatagtaccctgttttgttctatacactcattaatgaatgctactacttaaagtgctagttctataatat

SEQ ID NO: 81220 - DNA, 133 bp, Zea mays
  Clone ID: MRT4577_17408C.1
cttcccgggtcgcccagcgtcggcgctgttggcagctggtcaccgggcgctcggtcaagggccggccacgtgtacaggcagcagaaagatagtcggcggttgtacaaggccggtgagtatgccgtcatgaacc

SEQ ID NO: 81221 - DNA, 308 bp, Zea mays
  unsure (1)..(308): unsure at all n locations
  Clone ID: MRT4577_174090C.1
ttgacgcgtgggcaagttcaacaaggtgtctttagctctgtagcggtatgcatggcttcgggtgccggtgccaccgtcaccggcagtgggactcgctcatcattgctcggtgagttnaacaacgtgccttcgatgatggtggcgtgagatacgcctgcaactcctaccaggtggctgcgactaggggcgtggcttcgggaggcggcgactccagctccatcctcacgacgactgttgggggccttcatttttcgaaggtccttaataacacggctaaccatctgttttcagcatattatgaagtatta

SEQ ID NO: 81222 - DNA, 456 bp, Zea mays
  Clone ID: MRT4577_174091C.1
gtgtggggggtgtgtgtgtgggtttttatttatttttttttttttttttttttttttttttttttttttttttcttttttcacaaaatccgggttaacgtaaattttttcacagacgggttcacctaattcccttaagtacggcaaacctcattcatggggggggggggggggtacgttctttgggccacccgcgaccttcgaggccgccaaccaaccccgaagggggaaaggggacaccgcacccgcccgggcaggcaaccccccccacgggcggggcccccaaacggcaccggcccaggcaacccgagcgaaggaccagcgcgggggacacagggcgggggccggaccaaccgtggccaacagctaaccccggccgggaaaaaccggcggggagccccccgcccggaaaaccggccccttcactcgggggataccccggagaaccccgcccccc

SEQ ID NO: 81223 - DNA, 279 bp, Zea mays
  Clone ID: MRT4577_174092C.1
gggcaccatatgaatattttgggggggatttcaaatccccaataataacttgtcaaacaaagggattggtgccgcacatttttgttgtacgaagggcaaaactggggcttaactcccaaaggaaacattatgtgtcgccttaaaaacacaaaccccacgaccatgcaatggaaaccgcatgtttactcaacttttttgatgattttccgcttcctgaagggctgcacaggcatgcttccgggagcgctgggctttcgcctcctttcctttttacgggtt

SEQ ID NO: 81224 - DNA, 270 bp, Zea mays
  Clone ID: MRT4577_174093C.1
ggggggggggaaccattgcccagaggcggcccacccagggacacccaagcggacatgagtaccaccgggcgcgcacggaattcgggcgtcccgattatcaagggccgccgggggcgcaccgaacaccgcccgatctgcgggggggggggggggggtctaccctacctcccgcttaaccgatttcgagctggggggccgttacgcaaaacagaggctcttcccgactgccccgccggcgtctcgcagattactaacgtaacctgctgccgc

SEQ ID NO: 81225 - DNA, 1533 bp, Zea mays
  Clone ID: MRT4577_174094C.1
aggaacagaaataaggtgtacaagaggaacagaaactctttggttggatcgtatatctgcaaaggttactgccttggcaggcaatacaaatttctgggctgttggctgtgaagatggttacctgcaggtttacacaaaatgtggaagacgagccatgccggcaatgatgatgggatctgcagctgtttttatagactgtgatgactgctggaaattgcttcttgtcacaagaagaggtttaatgtatatatgggacctccataacaggacctgcattttgcaggactcattggctgctttggttgcatctccagatgagtcatcagcaaatcatgcaggtgcagtaaaggttatatctgctaaattctcaagatgtggttttcccttagttgtccttgccagccgtcatgcttttctttttgacatgagcatgaagtgctggttaaggattgctgatgattgttttccggcatcaaattttgccagctcatttattttcccccaagctggagagctaggcaagttgcagattgatgtaggcaagtttatggctagaaagcctatatggagcagggttacagatgatggtttgcagacacgtgcccatttagagacccagttggcagcttctttggctttgaagtcaccacaggagtaccgccaatgcctcctatcctacatacggtttctggcaagagaagcagatgaatcccgtctacgtgaggtttgtgagagcttcctaggtcctcccatgggcatgcttggatctgagtcatctacggatcccaaaagtccagcgtgggattctgatgttctcgggatgaagaagcaccaactcctcagggaagacatacttccatcgatggcatctaaccggaaagtccagcgtctgctcaacgagtttatggatctcctatcagagtatgaagctgctaagagcaaagttgacccaatggatatcacaccggcgctaccacaacaagcaccagaagccaatgccaacgtggtcacctcgtagctgcaccagttccgttgatagttccgttgctggcgacttactgacctctcggtaagtatgataggatagcaatcttggtaagtccttatatgaaccaatcaattagttgtgcttgtaactggtagattgtttagcgagggaggcgacctcaggcaaacattgatattgaacccgttagctgtaacgctgtgtaacagtagaagaaagaagctgaggtcgccaggtaatttattgttaaactgtaggaggccgggtaaactcatgcccttcttgttccaagctaccgtatgcagtggtggcccactggccgtgtgtattttggcgaaaacctgcgtcgtcaaaaactggcattgacatcttttagaggaacaggaacaatgagcatttcggcggtgatgattgagcgggcacgccataaacatgtgatttggataattctttatgtagagcggcttttatatgtgtaaacagaaacagaaaatggtggcttaatccaatcgtcagttggagaggac

SEQ ID NO: 81226 - DNA, 427 bp, Zea mays
  Clone ID: MRT4577_174095C.1
ctccggcgcgtcgagcatttatcatgttggcctactgcggaatttaccccgatgaagtcatcaacaatcgctccccatattggcacccccgataaggggatccttgctgctaatgtatcgactgacaccattgacaagagtctttccaccatcactgcccacaacgttgaggagaaccgtcgtgcgctccgtgaactcctattctgctgacctggtgctctccagtacatcagcgtatgtgatcgctcttccagcatactctgtaccagaataccagggatggcacgccttttgttgatgtcctcaaggagggaggcgacctccctgacatcaaggtcgacaagggcaccattgtagttgttgacactgataaggagaccaccacccaaggacatgacgaccttgacaagcgttgcgccaaggacta

SEQ ID NO: 81227 - DNA, 332 bp, Zea mays
  Clone ID: MRT4577_174096C.1
catatttggatttatttattctaggggttttatggggttttatgtttggattttatttttattttttttttttgggggaacctcaaaccccaaaccagaatttcattaaaaatgaaaagggccaggaactctggggggggcaaaatagctttttaaaaaacaaaaaaaggggtttggatgaaattttcaccaagaataaccaaaaacgggggaaccaaccattggttactcaggaggaacaagcacaatgcccttcaaaggggttttttcaagccgggggaattttaccggatacaccggacccccaacgggggtgggcacaaaatattgaa

SEQ ID NO: 81228 - DNA, 572 bp, Zea mays
  Clone ID: MRT4577_174097C.1
tttttatgtgttttttttttatgttttcacattttttgtttactaaatttttttattacagatgtgttttttggtgagtataccgtactggttttgcttaggaaatggatgtgttcctaagggggggggggacggttttaccgagggccaccgaataaaagcctctcacagcccataaggaaacccccctttttttaaaaaaaaaccgggggggatacccccaggaaaaccttttggaggaaaaatttggggaaaaccttatgggggaaaaagggggggaaaaccaaaaaaagggcgggggggggccccccggaaaatccggccgggcccccggggggcaccccatttttctttagggggggggtaaaaaagggggggaaaatgggggggataggtcacccggggggaaaaggaaccccggggaaaacccccccaaaaaaccgggggggagaaaaaaaggtaaaaccggggggggcccaaaggggggcccccaaaaatatttgcgagaggcctcccccccttaatcaaagggaacccccccggccgccaaaaaaaaaagccccccggggggg

SEQ ID NO: 81229 - DNA, 968 bp, Zea mays
  Clone ID: MRT4577_174098C.1
actccctaccagccacaggcttggtagctgacgagttcccacacctggacatcatcaacgacctgctggatgaggagcagagtgacaggagaagggttcttccagcctggtttcgtccagcaattctctgtgcataacggcgtcagcgcgcctgattatggcttgttcagtgagccgtacctgttcgaccggtccgagcagtactttgacgaggagcctccaaggttctacagtccattgagcagcgctcctcggaggatgagggaccggagctactcgcacttcgatctcccttcatactccaggagcagccagcttgatggtctattgatgagccagtggccgccatacagccgcgccgacctcgccatgcctggttttgggtcagacacaggtggctactcctatcagccgcagggtttcccgagtccagcgagtgcacagcaataccgtctatcgccctgcatgggcatgaaagttaacatgcattggcaataatgtgtggttaagtccataatgttcgcttctcagctgagtgtaattgtaatagttccccatagcagtgatataaagaattgttcctcagtttccttgttcaatcaatagttatatgacccccctcctccctcttttctctagttcagttttgcccagtggtaataaatctaagtcggctaaaatgatctggctaatcgtgttgtgaaatgtgtatgatgcaagcaaatggtagggtgtttttaagccatgccagtgcttcagctgatactacattaaactgggagtattctttgtttctccctctgacgagtgacgacgtgttattgatcgtctcatgttctctttgtatatttcagagtaaattctggatatagcccatggacataaattaattatttgatgcaagggcggccgccgactagtgagctcgtcgacccgggaattaattccggaccggtacctgcaggcgt

SEQ ID NO: 81230 - DNA, 662 bp, Zea mays
  Clone ID: MRT4577_174099C.1
cattgggtacctcgaggccggccgggatgctctcgaacagaaacaccagactcctccgccacgtccaacctctaatcgatgcacatcatgtctcgccaccgacgctatgtctccccggtattacagtaggaccaggatcttctcatcctaggagcgactctagcctacgaagaacaccatggacccatataggtaacccccggtcatccctgcgctatcctgccgagcaacggaataccctatggctgaacagaataaggtgacctccaagctccgccaaacctcccgctccgacgagaagatgaacaacaaccactcccagctgtggtggactgcgataagcataatgctcaacttatatatgctcatcgacagccgctcgcgtattccacgacaatacgctacgctactcgtcgctaccggctatccatcaccgtctagttaatagtccaatgcctctgtcgtatgccaagcactatcacaaccacactagtctacattccgccactttgctgtctacttcatattcaacgcttcgccactatctgcattgaacgctactatatatgactaatacgtctgtgaaatatgcagcctgcaattccaacgactgcatggaacacctcgcatctgctccttcacgtgctattgtactgctgcat

SEQ ID NO: 81231 - DNA, 918 bp, Zea mays
  Clone ID: MRT4577_17409C.1
tttcgttttttttttttttttttttcttttttttttttttttttttttgttttttttttttttttttttttttgggggcgacaacacgggtcaacaagatatagataggcgaattaaagcattacagctagctgcaaacgctttttattttttctttgcaacaaaacatgatgataaaacgtgtggggaagggaagggaaaacaggaggggcccttaaagctacagaacggagaatcaggtgagttggagttggagctaaaatgggttccgatcctctaaactaatgataactcccctgatctttggctaaaaatctatactcaaaatgcatcgatgtttccaagctgtccacttgatgggcttggacatttttgctggatggtttgaatttgttaaaacgatgtcactgtaaaaaatcatggggtaactgtcggttgtactcgcgcctttcacccccctcccggtaactggttatcatgccttgtaagcactcgctgtctcttgattgttgttgcattgtcccaaaaaaaaaaaaaaaaaaaaaaaaaaaaaaaaattgactgtttctgtggcactgccaatttacttactaattgtcaaaaaaaaaaaaaaaaaaaaaaaaaaaaaaaaaaaaaaaaaaaaaaaaaaaaaaaaaaaaaaaaaaaaaactaaaaaaaaaaaaaaaaaacgcggcccccaacccccactttttgtacccataaagaaaggtaaatcccgcgttagattaaaaaagggaaaaaattgttcccagagaaaaattgtaacccttcaaaaattcaaccaaaattaccaaccgaaagaaaaaagtcaaaatcctggggtgccaaaaaatggacttaacccactttaataaacttggccctccatccccattatcgaatcgaaaaacttgcggg

SEQ ID NO: 81232 - DNA, 349 bp, Zea mays
  unsure (1)..(349): unsure at all n locations
  Clone ID: MRT4577_1740C.1
acctgacgggaccagggcgagagggccggggggagccagccctcctaatatntgggcggacccaggggcatggcgctgtgcggcgggtactacaggggcacagcgatggcggtacgcatggagaaagggcgacctgcgattgttaaggtgggatagctcaggtgcgcgcagttatcagagctagctaacgtggcatacaggagaggtctcaccgggagcctggtcggaagtcgtaagatgcgccggaactaaggatgcaagggagccgaaatggccatggcctgctactggtgcaagctgcagtagctgtgcaaactgatcaacaaccgggtgcagagagcggagcaat

SEQ ID NO: 81233 - DNA, 2610 bp, Zea mays
  unsure (1)..(2610): unsure at all n locations
  Clone ID: MRT4577_174100C.1
cattgggtacctcgaggccggccgctggtagggttttttaacagcccattgcatagcctatcgagcgacggcctacgctcaaaaacacaaatcgctttccgcgccgccgccgcgccgccgaccggcgctcctcacctctcccgccgcacccatcgtccccccgttcccggctaaaccctgcttgagccctagacaccgcccgcctccgggaggtagagagcatgcacgccaggttcctcagcgcgccgtcccctgcctccgccgccccctccccgtacgttcgcttggccttcacgggcgccctcccgcgccgcgcgtgttggaagccgcgaggccccgcgtccgcgtccgcgccgccgcctcggcctctccactcgctgtgcgcccgggcctccatgcagcccgcctctcccgcgcacgacgggcatggtggtccgccggtgcacggcgtctccaacaccgtcatcggggtcctggggggcggtcagctcgggaagatgctctgccatgcagcgagtcagatggggattagaattgtcatcctcgaccctcttcccggctgccccgcgagctcggtttgcgatgagcacgtcatcgggagcttcaacgatggggacacggtccgggagttcgccaagaggtgtggggtcctaacagtggagattgagcatgttgatgccgccacactggagaagctggaaaaacagggcgttgactgcgagcctaaagcctccacaatcacgattattcaggacaagtacaggcagaaaaagcatttctcaagatacgagatcccattgcctgacttcatggaagtagatactttacgcagtatagaggaggctggggaaaagtttggctatcccctaatggtcaaaagcaagagattagcatatgatggtcgaggaaatgctgtagccaagaacaaagaggagctaccttctgttgttgcttcactgggtgggtttgagcggggcttgtatgttgagagatggactcctttcgtaaaggactttctgtaattgtggcaaggagcagagacaactctactgtctgctatcctgttgtggaaacagttcacaaggaaaattatgccatgttgttgaagctcctgctgatgtatctaacaaaataaagaagttagctactagcgtggctngaaaaagctatcaaatcattagaaggagctggtgtctttgctgtagagttgtttttaacagaagatgatcagattttattgaatgaggtagcccctaggcctcacaatagtgggcatcacacaatagagtcatgctacacctcacaatatgagcagcatatacgcgctattcttggccttcctcttggtgatccctcaatgaaagcacctgcagcaataatgtacaacatcctgggcgaggatgagggtgaagcagggttctttctggctcatcagcttatcagtagggcactaaccattccaggcacatcggtccattggtacgcaaagccagagatgcggaagcaaaggaagatgggtcatattacaattgtggggccttctaagataagtgtaaaatcacgcttggacaacttgctgcaaagaaactcgtctgatcccaaggaagttagccctcgtgttgctattataatggggtcccaatctgatcttcctgtgatgaaagatgctgagagggttttgaaagagttcgacataccttgtgagttaactattgtttctgcacatcgtacaccagagcggatgtatgattatgcgaagtctgctaaagacaggggtttcgaggtcataattgcaggtgcaggcggagcagctcatttaccagggatggtggcttcattgactcctcttcctgtaatcggagttcccattaagacttcaacactatcaggatttgattccctcctatctattgtgcaaatgccaaaaggtattcctgttgcgactgttgctatcgggaatgcagaaaatgcaggtttgctggcagctaggattctggctgcaagagatcctgagctccaggacagggtaactaagtaccaggatgatctgagggacatggttttggagacggcagaaaggctggaggaccaaggcccggaggaatttctgaagggaatggattgaccccttttgaagccctggctctggggcctgggaggaatacgagtgtatgggtcggcgataactcactgtccactcgattatggtttaagatggggagtcatcaagaagatactttaataggctcggctgcattcgattttccttacaattcttttttgataattgtgctatcttaacccatctcaacatgcccttttcccttctaatatagggtatgaattttgggtttagagggggaaaaaagaatgggagtaaacgttgtacgtacgaaaaataaaacggttcgagtaacgtaaaaaacatgcctggatttttcagccgcacaagttgctttgagtcaagtaattttacatattccctccgttctaaataaggccttgtttggttattaccattgttccttaaaatatttttaaattttatcttgcatatattcataatttcttcaacatttaaatctatacatttcatattattatctctat

SEQ ID NO: 81234 - DNA, 358 bp, Zea mays
  Clone ID: MRT4577_174101C.1
aaacctggggaaaccttttgaacaggtggttttttgttggaccttccaaatgggtaacagggttgttccaaagggcccgattgaggaagggttaaggcaaaccctgcctgttaatgatggttaaattccagagtcctggttagcaaggtcttttaagattaaccaggctgggtttctgaggggcacctttattgtaattccaatgggcgtttccaggaccaatgaggagctttgggatggtaaattttaggaggaacgctttaatccaacaaaactcctggccattctaaaggttccatcctattgggcccgggcagacaatttaatttccaaatgttttttttgcaaaaaaagattt

SEQ ID NO: 81235 - DNA, 1500 bp, Zea mays
  Clone ID: MRT4577_174102C.1
ggtacctcggaattgtccccgtcttccctgatcccttcgctccccgaagcaaaagcgcagagcgcatcagcgcagagtaggacagccatggcgacggcggcggcgcagtcccatccggcatcgatggacgcgcgccggtgggacgagtcatcgtaccgccgcggcatcctccgtgcccgcgacctctcgtcccgcaccctcttccgtgccgtcttctttgaccacagcgacgacccggataccgacatcctactcgccgccgcctccagcgacggctccctcgcttccttctccctttcatcctgcatctccgcatgttccgctacctcccaggtggagaccgccgccactctggtagatcctgtctgcatcgtgcaagcgcacagcggacctgcctacgacgtcaggttttaccccgatcaacagcagccgctgctcttcagctgcggggacgatggccgcatcaagggttggaggtggcacgagatgcagagctgccttgtcccgctctccctgcaaggggatcatctggaaccagcacttgacttggtcaaccctcagcacgagggtccttggggtgctcgatctccagtacctgaaaacaatgccattgcaattaataaacaggatggatccattttggcagcagcgggtgatgcatgtgcttactgctgggatgtggagaccagtaaatgtaaaatcacattcaaggggcatgctgattatttgcacagcattgcagttcgtgagtcaaaccgccaggttgtaacaggatcagaggatgggacagctcgtatctgggattgcagaagtgggaagtgcactcgggttatacagccaggaaagagcaaggcatttgaaagctcatgggtcagctgtgttgctattgatccaagtgaaagttggctggcttgtggcacgtctagcggtatatcagtttggagtcttctctcaaatgagtgcatctttaatttggactgtcatgctcctgttcaagatttattgtttgacaagaatcatattttagcagttggcgctgaacctctgctctcccgtctcacaataaacgggacagtcctttcacaagtaaaatgtgcccctcagtcggcgttttctgtctccatccactcaactgggatagcagctgttgctggatacggaggtctggtggatgtgatctcagaagttgggagccatctgtgcacattcggtagccggggcctagacaagtaaatgacccatgagcattccttgcgaacagcgcgcggagaatgcgagggctgtatctctttgcactgcagttgcacaagtttcatggaacgttgtcgctgacaatgctctactgaacaaagatagctagacggtaaaaaaaaacatttgatactagttcgagctaaacaaagttctgctctgacatctcttcaattggtgcaccggttgcatcccctctttaacgtatttgaaatttcgaaatgcaacactcacgtatataaacatccc

SEQ ID NO: 81236 - DNA, 685 bp, Zea mays
  Clone ID: MRT4577_174103C.1
gagctgagcgagcttgccgcgctgaagcgggcgagggtcgagcggatgaaggccttgaagaagatgaagaacgccaagcaagggttctcgggtggcaatctgtgccccctgatcgtcaccgttatcttctgcgtcgtcattctctggcaaggtttcttctcgggacacgggccggcggtgagcttccatggatcaccggaatcgtcgatcagggtggcgcgcagcagtctgatctccatcaggttctacaagaaccattccaacacgaggccaccaccattcagtgagaccactgcagctccccataacgtagtagagaccggtccgaggctcaggaatcgtaaccaagcgagaaggctactagctcggtgacccgatgattatggtggcggccacacctgcaatgaaagaagctcgccacattttgaagcgtcgccggcgcttcgcttcgtcctcctcgaggcgccgcccccaccccccgctccttggccgctgtaaaaaacgagtggagtcctagtgtgtcgtgcgctgggtagtgaatctgtgttggccatggctctagcgaagcgtagagagatcaacgaaagcaagcgagcaagcaagctgtctgtccgtatgtgtctggcatgttacagtaataaaaggtttgcgcgcaataaatcagagaaataaaatgaatctggcc

SEQ ID NO: 81237 - DNA, 559 bp, Zea mays
  Clone ID: MRT4577_174104C.1
atctattctcataacgatgacgagcctctcttcttatgtcttgcttctcagttgcgtggccacactgcacgccaatgcatatgcatcccaagaggcacggctgagagagttcatctcgtctaggaagaacatcgacagcaccaccgacacgtttagagtgcgtagcatagccgagagggtcgctggcagcctgagcgcggagagctctgcctctgaccagggctctctcaaggcggccgataagatcacggcgctgccgggccagccggagggcgtcgacttcgaccagtacggggggtacgtggccgtcgacgaggagaacggccgcgccctcttctactacctcgtcgagtcgccttcaggtgcctcggacaagccactcgtcttgtggctcaatggagggccaggatgctcgtctctgggctacggtgcaatgcaggagctcggccccttccgcgtgaccgaagacaacaaaacgctcagcagaaacctaaactcctggaacaacgtggctaatctgatcttcctggagtcgcctgctggtgttggattctcctac

SEQ ID NO: 81238 - DNA, 338 bp, Zea mays
  Clone ID: MRT4577_174105C.1
ttactcaggcccccacgttgctgaggccccacggtggagcgcgaaggtactctaccagctccccccagagaccacactacacggactcttcgggcgtatggttactactaagtttacttttacgaaataggaagggtagaggagcgtcgtagactaggtcggaaaggtaaaggtttacttagacaaacattgggcggcaaaggtaatcgttgtccacatggtaaacgcatttgttatccagttgttaaactttctgaagaacatgtccgttgagaccctagtaaaggtgtaggagaaagtggaggtcgccacaaacacattaactttggaaggaataa

SEQ ID NO: 81239 - DNA, 310 bp, Zea mays
  unsure (1)..(310): unsure at all n locations
  Clone ID: MRT4577_174106C.1
gtngacaaattttgactaattgctatttttgtggtatttttggtgtgcctgtgtgccctgaacgaaagcaccacaaagtggaagggaacaatgtgtgggccctggaacccaatgggtttacttgcaaccattgaatgccaaggccccatcagtgatccattccaaaggttttgtcttgggtcaggggcccccggcccaccaataataccccaagtttagcattttttaaaatttgtgaacctcgggcccaatttccaggttcccgccccccgcatgcaaaatcttagatttttttttgtggaccctaaat

SEQ ID NO: 81240 - DNA, 398 bp, Zea mays
  Clone ID: MRT4577_174107C.1
gttgagccctcccaatcccccattacaccatggaggacgacgatcctcaacgacctccttctagaggcctccgacgtctacaagtccgccgcacctctacttcctccggatcccccgaacctccagctcaaatctcacgacttaccaccagagaacctttacaactccgacggtatgcagctggatgatgtcttcacgccgaagggcggtgacttccaccacctatacccctctcggaagaactttagcaatatccatcacgggctcggcacggacccagcgaacaaagtcggtggcgcaggcatggggtcgctgatgactacaggagcatcgggattcccaccattaaggggtcttcccctcagaaacctcccatcgagtatctaggtgctagacat

SEQ ID NO: 81241 - DNA, 383 bp, Zea mays
  Clone ID: MRT4577_174108C.1
cccacgcgtccgcccacgcgttcgcccactcgtccgcccacgcgtccgcccggcttcacttcggtcgcagccgcgctccgcgttcctggggacgggcttgtgcggcggacccttggggccttgccctggcgaggtttccccttccccggctccagcggggcagacaccgtcgctgacgcctgttcccagtagcggtggcggtaacggtagcggtagtggtagcggcgggaccatcggtggaaatgggggagaaagtggccacaagaacaagaagctctccggtggtgccattgccggaatcgctataggctccgccttgggcgccggacttctcctcttgctcctcgtctgcctctgtcgcaagtcggggggcaccaggacgc

SEQ ID NO: 81242 - DNA, 424 bp, Zea mays
  Clone ID: MRT4577_174109C.1
tcgcccactcgtcctcccactcgtccgaaaaaaaaaaaaaaaaaaaaaaaaaaaaaaaaaaaaaagaaaaaaaaaaaaaaaaaaaataaaaaaaaaaaaaaaaaaaaaaacaaaaaaaaaaaaaaaaaaaaaaaaaaaaaaagggccacctatttaaaagacacaagcttacttttacaaaacattcaacactgaaaaaaccctatagtctcacataaattaaattaatatgagcatatgctttaaaacgtcatgactggtaaaacccaagagttccccaactaaatccctttaaaacaaattcacattttaaaagctgaattaaactctaaatgtcccggcacattaacctcttcaaaaattggggaaacccaaattgaaaatggtacactccatatacctataaattaatccctttggtttt

SEQ ID NO: 81243 - DNA, 140 bp, Zea mays
  Clone ID: MRT4577_17410C.1
agttccagttaaattatggccaccaagaccacgtaacggtggggtcaaaaaaatattatctatgccctaaaccacagccacacgcctaaccctcaacccacctctttccaacccaaactacaaatattacaaaaactagg

SEQ ID NO: 81244 - DNA, 295 bp, Zea mays
  Clone ID: MRT4577_174110C.1
ccgggtacaacctacctgaaaaggacaaaatagcaatgcggacgattctgcttatgcaagcatcaatagcctccagcacaatggaacggggacctatcagctagctcatgatatacatagctctgctgatgtgtgatgtcgaacatggcacaagcagatatcattcaggacacctgcagatggcttcaatcaaaccatcatgcttacaaaggagaagctgctgtctcgtccaaggagaggtattaatcttccatggaggtcctagcggccgccccaggaccttcatctaatctgc

SEQ ID NO: 81245 - DNA, 140 bp, Zea mays
  Clone ID: MRT4577_174112C.1
ccgggccgggccttcaaaccctcccagccaaaaaacacttccgccgcggccgtcgcatcaattgtacgccaccgccaattccataccgtgctcttccacctctgttgaaagcgaaaagagatggaagttaagggtgatgg

SEQ ID NO: 81246 - DNA, 443 bp, Zea mays
  Clone ID: MRT4577_174113C.1
cccacgcgtccgcccacgcgtccgctctgatctgttgcaagggcacgcctagggtttctcgccttgcctatactgtttgtggcggataagtcgtcctatcctagagggagacgccctggagcctggaatggctggctttgcagtgctcttccagcttgtgtggatgtcgttgctgcacatctaacagcagtggctgatgcctagaggtgtgttctttagttcagatctatcctgttttacagtactaggttaatgaacatagtgacagacacaatccaaatttattacaaaatagtaaataagcaaaaaactatatttcgacttacatagcatggtagctattttttcaaatagattgcgccagatcaaaacacaacgacagactatttttatgtcctccaatgcatgcgatgtagctaaaaatggattggtgaaagatgaaa

SEQ ID NO: 81247 - DNA, 233 bp, Zea mays
  Clone ID: MRT4577_174114C.1
gatattttttctggtcccttcctgccctcttcacactgacccatgtgttgttctatccctggaaagctatacctccttacccctatcagcttctcctcacatctcctctcgtcgccacccatgctatcaccgctctgatcacaagcaaggcaaaccctcactgttctatcaacgcccctcccttagctagatggcttcagcgaacaactggctgcgcttctcgctctcgggcc

SEQ ID NO: 81248 - DNA, 572 bp, Zea mays
  Clone ID: MRT4577_174115C.1
tcgaggtcatcctggcatggagtcctcgctgttcgggaacgcaggctgcgggacgctgccggtgatgagcgtggccggcacgctctacgagctgttcgtcgcaatggcaagctcggtctggacgctccacaggctagcctgggcgtatgacccagcggtcggcgtattccaggttggccggggcgcagagttctcgatggtgtacatggagaacattgtccggtcgtccaaggtctcgcggggagcagggagcccgggaagccggcgcgacgaccgaaggtcgggttcaccgtggtgccgggcttccggctcggagggacggtgatccagtgtagggtgtatctagatcacgggaagaggggagaggaaactattatagactcgatttgagatgaagcgaaactttatatatatgtatgtatagtcaaagaaagaaactgtacattcgaaaacgaaaggaggttattatatgtgtaaaggcggtcaagaacagcgcgtggaaataatctgcaggatcgaagtcgctggtcaatgatgagtataaagaaagctactaagtatcttttgttttg

SEQ ID NO: 81249 - DNA, 369 bp, Zea mays
  Clone ID: MRT4577_174116C.1
gggatcaaaccggctacacactgaaataaaacaaggaccatgcgtggagaccaatatacggcagagcttagctactccgcgcgctatgcgaaaggtcttgacatcaaataaacaaaccgctcgagtgttaatagcccacatgcaactgcatgcaaactttccactgttaagaaaccatagagcaggctgcgttcgcaaaggtggcagcacccattctgcactgcataaacatgatgttcaactccaacgattgttctcagcacccttcttgatgctcgctagcgccattggaagcctcaagacacgaagcagtcgactcgtcaggagccataccaagttcccatcggatggctgaaccatgctagccgg

SEQ ID NO: 81250 - DNA, 190 bp, Zea mays
  Clone ID: MRT4577_174117C.1
ataccatcaaaatttcctgttccaacaaaaacaactaaggcaaacgaccttaccaccagggcagaccaccactcgagaaaaaaaaaaaaaagagaagaaaaaagcgggcgtttcccgcattaggggctcccacgacaaaatcaccagaaaaccccacgagcaaacacgaccaaacattcatggcgaccgg

SEQ ID NO: 81251 - DNA, 1627 bp, Zea mays
  Clone ID: MRT4577_174118C.1
acccacctcgaggccggggcccgaaggttctaggctcgattgaacaaattggagcggcactacactcctccacgcctccacctccagcctcccactgatctggcctctctcgaggaatctatggattcgatgtgaagtcccaaagggtagcttttagggagggggaatgatgagatgttggaagttcacaagttgtgtctttcttaaaggctggtaaccttaatcctagatcaatatgagaaggggctacagttacagtccttcaccaccaaggggctacaggagaagggcgcgcagtccaagtcctcatgatcattatggtggtcgtggtagggatctcccaaccagtcttctggtcaggaatctccgtcgggactgcaggccagaagacctccgtcgcccatttggacagtttggtcgagttaaagatatatatcttccaagagattattacactggggatccccgagggtttgggtttgtccagtattatgatcctgctgatgctgctgatgcgaagtactatatggatgggcaggtagttcttggtaggcaaataacagttgtttttgcagaagagaacagaaagaagcctcaagagatgagagctagggacagagtcaggggtcattcttatgatgacaggaggtattctcgctctaggtcccctcgttattataggggccgctctccttcacgcagccaaagctactcgaggtctccacctcagaatccaagacacagacttagagagaggtcctactccggctcacctgtggacagcagatcaagaagtgggagcccttatgaggatggatatcgcagatcatcacggagagagaggtctctttctgttagcggatgaagcagttttacggtctagagctattgctgtggatctgcgcatggtggcctacttgctatgtctttctgaaccatatatgttctgtctagattatcattcccagtaccagagaagtatcgtgagactgtttgctgtactttctagtcttgaggatacagaagggggtcaccgattctctcagtagatggactaatgaccactagctacgccagttccaatgctttgtgtatttataggcagcattgtagtttgaataaaattatttgcatcgtgaaagctaattggtaaaaagactccacctcagaatccaagacacagacttagagagaggtcctactccggctcacctgtggacagcagatcaagaagtgggagcccttatgaggatggatatcgcaaatcatcacggagagagaggtctctttctgtcagcggatgaagcagttttacggtctagagctattgctgtgaatctgcgcatggtggcctacttgctatgtctttctgaaccatatatgttctgtctagattatcattcccagtaccagagaagtatcgtgagactgtttgctgtactttctagtcttgaggatacagaagggggtcaccgattctctcagtagatggactattgaccactagctacgccagttccactgctttgtgtatttacaggcagctttgcggtttgaataaaattgtttgcatcgtgaaagctaattggtaaaaagactgaatcatgaaacgaacgttttgcatccc

SEQ ID NO: 81252 - DNA, 945 bp, Zea mays
  Clone ID: MRT4577_174119C.1
aacaaattggagcggcactacactcctccacccgtccacctccagttttgtagggatctggcctctctcgaggtgagcgcgcctgaatctatggattcgatgtgaagtcccaaagggtagcttttagggagggggaatgatgagatgttggaagttcacaagttgtgtctttcttaaaggctggtaaccgtatgtgtagactgccccttgtcttttgtaatgtccttttcagttaatcctagatcaatatgagaaggggctacaggtacagtccttcaccaccaatgggctacaggagaagggcgcgcagtccaagtcctcatgatcattatggtggtcgtggtagggatctcccaaccagtcttctggtcaggaatctccgtcgggactgcagttttaggctcttcgctgaatgggacctatagtggtactaggttcgaagacatatatctgttggattggccagaagacctccgtcgcccatttggacagtttggtcgagttaaagatatatatcttccaagagattattacactggggatccccgagggtttgggtttgtccagtattatgatcctgctgatgctgctgatgcgaagtactatatggatgggcaggtagttcttggtaggcaaataacagttgtttttgcagaagagaacagaaagaagcctcaagagatgagagctagggacagagtcaggggtcattcttatgatgacaggaggtattctcgctctaggtcccctcgttattataggggccgctctccttcacgcagccaaagctactcgaggtctccacctcagaatccaagacacagacttagagagaggtcctactccggctcacctgtggacagcagatcaagaagtgggagcccttatgaggatggatatcgcagatcgtcacggagagagaggtctctttctgttagtggatga

SEQ ID NO: 81253 - DNA, 352 bp, Zea mays
  Clone ID: MRT4577_17411C.1
aagaacgggtcacagtacagctaataacaatggcagaatacacactataggagtacacagatccatcttttttgacagacagaccacgacaccaatgaattgcactcggggacgccaagaacaaaaacggggtgacagatctggtagccaacagctgtagaaagcctactgtatccagatggaacgtcggcttgaatacagcctaagacctgatctggaatggccatagatactgacaatactgtgcatacaacacataatttgatggccaaaggcgactcgactgagagcaacaactgccagtggatatagatggaggggtactggtggtgcaggaagatctcgtgcttac

SEQ ID NO: 81254 - DNA, 1587 bp, Zea mays
  Clone ID: MRT4577_174120C.1
cccacgcgtccgcccacgcgtccgcccacgcgtccgtgaacaaggtggagcagcactacactcctccacgcctccacctccagcctcccactgatctggcctctctcgtggtgagcgcgcctgtaagtgatcctttctcgcagattatttttgtagttttcgatggaggcggattagctttgaactggtggatcgtgtttggcatcgtattgtgactggttctgttctgtgaatttcgctagtttttttttctcccacagattactctgaatatgcgtgcccttaattgtgttacgatttggcttcgtcgcggtagtctgttgtgatgcgcccattatttcgcgattaattgtatgtgattctgcgttcgattgattgagaataggcagtgaacccttccgtttcttatttcactgctaactgtatctaggattctatggattcgatgtgaagtcccaaagggtagcttttagggagggggaatgatgagatgttggaagttcacaagttgtgtctttcttaaaggctggtaaccgtatgtgtagactgccccttgtcttttgtaatgtccttttcaggttcagatgttctctttgtgcatctactgtttcagcagggagttactgatgtttatatttaactataatgtctctgcttatattattagttaatcctagatcaatatgagaaggggctacagttacagtccttcaccaccaaggggctacaggagaagggcccgcagtccaagtcctcatgatcattatggtggtcgtggtagggatctcccaaccagtcttctggtcaggaatctccgtcgggactgcaggccagaagacctccgtcgcccatttggacagtttggtcgagttaaagatatatatcttccaagagattattacactggggagccccgagggtttggctttgtccagtattatgatcctgctgatgctgctgatgcgaagtactatatggatgggcaggtagttcttggtaggcaaataacagttgtttttgcagaagagaacagaaagaagcctcaagagatgagagctagggacagagtcaggggtcattcttatgatggcaggaggtattctcgctctaggtcccctcgttattataggggccgctctccttcacgcagccaaagctactcgaggtctccacctcagaatccaagacacagacttagagagaggtcctactccggctcacctgtggacagcagatcaagaagtgggagcccttatgaggatggatatcgcagatcgtcacggagagagaggtctctttctgttagtggatgaagcagttttacggtctagagctccttgctgtgaatctgcgcatggtggcctacttgctatgtctttctgaaccatatatgttctgtctagattatcattcccagtaccagagaagtatcgtgagactgtttgctgtactttctagtcttgaggatacagaagggggtcaccgattctctcagtagatggactaatgaccactagctacgccagttccactgctttgtgtatttataggcagctttgtggtttgaataaaattatttgcatcgtg

SEQ ID NO: 81255 - DNA, 310 bp, Zea mays
  unsure (1)..(310): unsure at all n locations
  Clone ID: MRT4577_174121C.1
cacagggggggggggcgggagccaccaccccgnccccagcggcgccaaaggncacaacggncggccacgggcgcggggcaagaaggaccaggngacggacgagcaggagggaggaanaanggcgggcgcgggcgcgggcgggnggaagaagcggnngggcgggggggaggngnnccggaccancggccggggcacccccgccaagggaaagngcgccggcgacgccgacaccggcgcggcnnncgccangaaggngcgcgacaaggagaccagcnncacccaccgcangccccaccagagcaaaagggaa

SEQ ID NO: 81256 - DNA, 338 bp, Zea mays
  Clone ID: MRT4577_174122C.1
catacgtcaaacaagttgtgctttcttccgtttgtctacaaaatttactctccagggagagtagagaatttatgcaaattgcagctaacgacaaattacagtagctgaaaatattttctcaacagattcttaattccataaaccgatgtaaagatccccaatggtataacctacatcgctactttgcagaagctagaatcagaaagcgcgccccataagcaattcaaagatacggcaatagcatagattcaaaagcaaatgagtcttgttcaacgtacaactgtgagcactcatttgttctctaaatatatcttttaaaccacaaatgcccgtcattt

SEQ ID NO: 81257 - DNA, 1232 bp, Zea mays
  Clone ID: MRT4577_174123C.1
agatctggaattcgcggccgcgtcgaccgatgcgtgtcccgatccaacggtctccgtcgtcccgtccgcgtgataaagggttagttgggtaccctcgagggccggccggcccccgaaggttctaggctcgattgaacaaattggagcggcactacactcctccacgcctccacctccagcctcccactgatctggcctctctcgaggtgagcgcgccttatcaatatgagaaggggctacagttacagtccttcaccaccaaggggctacaggagaagggcgcgcagtccaagtcctcatgatcattatggtggtcgtggtagggatctcccaaccagtcttctggtcaggaatctccgtcgggactgcaggccagaagacctccgtcgcccatttggacagtttggtcgagttaaagatatatatcttccaagagattattacactggggatccccgagggtttgggtttgtccagtattatgatcctgctgatgctgctgatgcgaagtactatatggatgggcaggtagttcttggtaggcaaataacagttgtttttgcagaagagaacagaaagaagcctcaagagatgagagctagggacagagtcaggggtcattcttatgatgacaggaggtattctcgctctaggtcccctcgttattataggggccgctctccttcacgcagccaaagctactcgaggtctccacctcagaatccaagacacagacttagagagaggtcctactccggctcacctgtggacagcagatcaagaagtgggagcccttatgaggatggatatcgcagatcgtcacggagagagaggtctctttctgttagtggatgaagcagttttacggtctagagctccttgctgtgaatctgcgcatggtggcctacttgctatgtctttctgaaccatatatgttctgtctagattatcattcccagtaccagagaagtatcgtgagactgtttgctgtactttctagtcttgaggatacagaagggggtcaccgattctctcagtagatggactaatgaccactagctacgccagttccactgctttgtgtatttataggcagctttgtggtttgaataaaattatttgcatcgtgacaggcagctttgcggtttgaataaaattgtttgcatcgtgaaagctaaaaaaaaaaaaaaaaaaaaaaagaaacgaacgtttgcaaaaaaaaaaaaaaaaaa

SEQ ID NO: 81258 - DNA, 444 bp, Zea mays
  Clone ID: MRT4577_174124C.1
aaaaaaaagggggggccggtcccgatttttggcaaacccccgttccgcccccgggtttaccccccccgtttggtcctttttgggttcaaagggcccgccccccaaaaaaaaaaaaacccgggcccccttggtaaaaacaacgggccaaaaaccacctgggggaggaggaggttaccgagggctggttcccaggggggggggggatttaaataaaaaaaaggtttccattgaacaaaactgaattgggcccgttccggggttttaccggccggggaaaaaccccacccccccccgggggggggccaaaaaacccttcaccaagtgggggaaggaaaacttgcccaagggcccggggccccattcggggggggaccccccccccggaaatttcttgggccccctggggcgggaaaatttctggattgggggaaccaacttcccctt

SEQ ID NO: 81259 - DNA, 487 bp, Zea mays
  Clone ID: MRT4577_174125C.1
tgggttccgggcccccccccgaggcgggcgcgaaattcgtctcgaggcgaaacatgtctcaagtttctctgggcagggtgggcagacgaccaccaaaggcacaggttcataggcacggacttgggggtgcccttaactaagaagaggccgcaagataccctggagcgggtggacttttttgttgaatggacaacacatttggacgaggtaactgccatgctcttgaaatcccctgagtctatttgagcaacctcgcaagaaatactgactgttaaaaagaaggggaacaatacgcggcaaggaacctttattgtaccgttttgaggtcactttatgaaagtgctaatgcaggaaaaaacaacggggggagctcaaactcctgccccagaagatggcaaaaagaatgttgatgaccataatgctattcttggactttcctacaatgcgtgatcaagaaaccaccctgatgtggtctttaacaatgggg

SEQ ID NO: 81260 - DNA, 261 bp, Zea mays
  Clone ID: MRT4577_174126C.1
attatcatattgaacaggttacaacatacctgggtcaggcaagccacaacagagaccgccttcatagccaaaaaacaacagcctcgtacatcacccagataacaagacccgggggcaggctcatctaaacatacaagggggaaaatgattctgctgaagcgtaacactttgcaacagcgaatagggtttgatagaagtttcctcaacctcttaatagacatgataaggccttgacatcaggcgcattctcatctagtgggc

SEQ ID NO: 81261 - DNA, 247 bp, Zea mays
  Clone ID: MRT4577_174127C.1
ggccgcttttttttttttttttttattttgtttttttttttttttttttaggggaaggaatcgattacacagacacacagatctagagacatgttgagagcccagcagcagctgggtcgccgatttcttaaactaccacaacccaacgccagcctatatcgggggcacattatgtcatgtccgtgtgggcggttcatgacgcaccacagagaaggatgcacggggggtggcaacgcgcatgcacgct

SEQ ID NO: 81262 - DNA, 239 bp, Zea mays
  Clone ID: MRT4577_174128C.1
gaccggaccggaatggccgggtcggctcgagccacgcgtccacgcgatcagccgcagttgatctgaaagcacgttcctcatcatcaaagagtgcggcgatcacaagagtcttcgggtgcatgatgagtcattaggtcatggctgggcatcacatacgatattgtgaggtacactcgcttcgcagctccaaagtagacgttctgagtggagagtacatgctgttatgctgttattagaat

SEQ ID NO: 81263 - DNA, 477 bp, Zea mays
  Clone ID: MRT4577_174129C.1
catttcttgctcaacaatatcaggacgatcttggaggcacaaagccactctctgtccaacatattgatcgtgagggctgggacacaatatggtacctgatccattcacacactatgacttgaacaagagcatgcaggggctggtaaagggactgatggcacaccttgtaagacatgcactcttgacgccatgatcttaacaggaagcctcacgagacattcatcatggtggtgtttgggatcgtgcacatgacaaggctgagcgcaaaggaactatctgtcgcatcttggcccatatgcaccacacaatccaaaacctctttatagacagcacaccactggagacacagctcgcttgcatacctgtacataaataaacaacattcacctttactaaaatctggtcgagagaggactcctatatagaccatcataaattacacaggacgacgctactataactactgatgttgctctc

SEQ ID NO: 81264 - DNA, 428 bp, Zea mays
  Clone ID: MRT4577_17412C.1
cccacgcgtccgcgaatcttccaaattctttcccgagacctaaaattctctcgacggattcgcctgatctgacacgcgatctctcggctcgccccaatggccgacaaggagaagttggagtctgaagaggagtacgagagcgacctcgacgacgcacccctctccgcgttgcggcgccgggacgctgcgagcgatgacgaggacgaggatgaggacggagggatgcccttgaggcggaggaaggctggatccgacgcagattccgacgggcagggcgccgccgaggtgtacgacgaggatggcgcgtacgaagaaagcgaggagtacgatgaatacgagtgcgagaaggaactcatggagaagtccacaatcgaagagacaatgtctgaacttatggatggtaagattcctatgctgcaagttgaaga

SEQ ID NO: 81265 - DNA, 439 bp, Zea mays
  Clone ID: MRT4577_174130C.1
catggctggggatgggttctatgtatcaacaatcgtcgatacgacgaagggcaccgacgtgtaagacagctgggtgccaatgtcgcaagcggggacggtgctcctgtgtgatctgcacagggcccgctttctctgggccctaccgtgcaagcccgcgcatatctgcataaacagcaacaaccactgtactttcttcaacaggggaatggagagagcacccttgcaaatatagaaccctccattgacctaagaaatatttatgctcccccaacaatatatcatacatctattattaaagttattcctatggccaaaaagcctcaccctttactatttgaaagcgtgcatatttttctaacatatttttttggaagagaacaatctggtacagaagaatcattaagatcccacacgagggctttgtcaaatacaaaatttg

SEQ ID NO: 81266 - DNA, 312 bp, Zea mays
  Clone ID: MRT4577_174131C.1
gcttgccaacatatagcaggaacctactattttttctggaggcaatacattataacaacactcgctcattaagcttaaccattgaaaatcgcatactatataaatattccaagccattttgcgctaaaaagccgtggcttgcttttttacaccggaataacatatgctatagaagcattcaaacgcgccaacactaaatgctcaagctgggaacagcttgcatacatacatgagggcaaagccatcccgctacaaaaaactggtatagggctcgccttacttcatagggaaaaatcccagcctcccttgaga

SEQ ID NO: 81267 - DNA, 476 bp, Zea mays
  unsure (1)..(476): unsure at all n locations
  Clone ID: MRT4577_174132C.1
gctcggagagggacttgttttacattcagttagaatatcaaaacacaaaagacacacactgttacctttcaaacaaatcagtaaaagagcggacggggatagacaggggctgcaaggcggcattcaggccgggggggggggatgggctgntggggcggctgcgggtgaaggggccacagctggagacgaaaggatcctacgggggccggcggnggcgtcncgcgtggctgggttggtcggcnctgttttttcaggcctgctcttcgtcttcngcttctcccctctcgtcggcggcngcggccgtcngctcatcggatctgtgcctctttcccaggattatctccntnnaccccggcagtggatcgtccagaagtgttaatgccgtggtggcgaagtccctattttnatcgttcacatgtcgggggtccggggggctcccttgtcctctggttcatgggtggagctttctggggggg

SEQ ID NO: 81268 - DNA, 791 bp, Zea mays
  Clone ID: MRT4577_174133C.1
acctctccttttgctctccggactctcgaagagaagctctgcagtctgcaccgcatcgaccatcgccggtcagcaacaagagccccaccgatggcggaggaagctgcatccctcgacgacgagacccgcgccctcgtcgtccccgacgccgccgccctcccggcgtctcccccctccgccgtcgaggctaacttcgcgcgctacttcgtcgcagattttctgaatccagggtatgatcagtatgtgtatcgccatcctaacggattgtgtgtggttggtttagctccagcccatgttgtgtttaaagaggaaggagtcatatccgctgttgacttcaatgtcggcaagtcagatcgcagtgagatgaaagtcacaggaaaacggaaaaggaatgcacaacacttgcaagaaaattcggcgttgtgcaaagtttgtgtaaatgataaatcttttattgtgagatgctgtgtaaaaggttcccttttggagatcaatgaaagattgatcaaacaaccagatcttcttaataccgctgctgacagggaaggatatatagcagtcttccagccgaaaccagctgactggctcaaaattaaggataaatttcttagttatgaggactacaagaacttgagaggagtatgctgacacccaaaagaagatgtttcgaacatgaagacagcgcttaggttcgactcaaccattcgtgtgatgatatctttactgctccagatatttgcagctcgatagaagcttcatcacatagctcctgaaacgcaaacatgtgcgct

SEQ ID NO: 81269 - DNA, 683 bp, Zea mays
  unsure (1)..(683): unsure at all n locations
  Clone ID: MRT4577_174134C.1
ngatctcatcacttatcatccctgtctcgattctctctccatgtccatgctcttccgcgttcttcttgatcctaacgagaagaagatatgcacgtcaaagtcgaaggaccacctattcgaatcgatcgccgacccccgaactcttgagacctacccggagaaggctgccaccgcccgaaaaaacgcattcatcatcatcaccaacccaccctgtcaggctgcggctgcacctacctcaaagactgcatagcatgatgcatgccaaatgccactttgctggaataccacatcattccacgctataaagctcgaagatatcgtcccttcgacacacaactgtaatattgcgcatggggacctcactgagtaccacttgattgatatatctgaggctggagatgagacactgctgactgtccatgacaacactaaggatgatcttatagctccctgctgataacactcttggggtccaaatcaaaggagggatagagatcgaaatgaatcttgtagcgactgcccaaacggttatggcacaggacctgaccagttcgatgaatcatgatggccccacacaacttcgctgcctgtgaatactgtatctcatgagctacatctcatcaacaagtgcatcaatgattgctatcgagacgtccatctggatagagctaccttttgctatg

SEQ ID NO: 81270 - DNA, 1116 bp, Zea mays
  Clone ID: MRT4577_174135C.1
gtgttctttgtttttttacttttttttactattttttttttttttttttcacttggaaaatgagctggacaacaaaatctttgataattgagttccagttcatcagttattacactgggaggtaatgtgtgaatcagtacttgtacatcaattttctgacagaataaacaaagcaacatcttcaggaccttagcatcttgtataggccgacatcccatcatctcataactaaagcaaaatgagtccagcccagtgcacgaggttcaagtgagtccagtgcacatgtttgcgtttcaggagctatgtgatgaagcttctatcgaactgcgaatatctggagcagtaaagatatcatcacacgaatggttgagtcgaacctaagcgctgccttcatgttcgaaacatcttcttttgggtgtcagcatactcctctcaagttcttgtagtcctcataactaaggaatttatccttaattttgagccagtcagctggtttcggctggaagactgctatatatccttccctgtcagcagcggtattaagaagatctggttgtttgatcaatctttcattgatctccaaaagggaacctttcacacagcatctcacaataaaagatttatcatttacacaaactttgcacaatgccgaattttcttgcaagtgttgtgcattccttttccgttttcctgtgactttcatctcactgcgatctgacttgccgacattgaagtcaacagtggatatgactccttcctctttaaacacaacatgggctggagctaaaccaaccacacacaatccgttaggatggcgatacacatactgatcataccctggattcagaaaatctgcgacgaagtagcgcgcgaagttagcctcgacggcggaggggggagacgccgggagggcggcggcgtcggggacgacgagggcgcgggtctcgtcgtcgagggaggattttcgcagtgagggattgtggagcggcggcggcgcctccagggatgcagcttcctccgccatcggtggggctcttgttgcttaccggcgatggtcgatgcggggcagactgcagagcttctcgaatccggcccggccggcctcgagggacccaa

SEQ ID NO: 81271 - DNA, 246 bp, Zea mays
  Clone ID: MRT4577_174136C.1
ccgtgatctctaattctcactatctcgagttaataacggaagcttgatcatcttgccttgcggtcttgataaagagcagggcattcgtctagcttctgtagtctgatatcattctgtactcgctgactccatgctactaagccttcggcttcatcaggaaacccaacaagtaaccgacttctactagaaagccatacctctcttactattatcaggaccaccaaaactgcctcttgatctgttgct

SEQ ID NO: 81272 - DNA, 798 bp, Zea mays
  unsure (1)..(798): unsure at all n locations
  Clone ID: MRT4577_174137C.1
gttataaccnttagttattacctcgtgcttgggaagggttttcccatcaaagtcagatgtacttggtgtcagctcatattcagcagatccacatacacttgtagatctgaaaaatcagctgctgcttactccaaatggggtcctgtatgttcaacctgagataagaaaaggtgtacttcctcgccttctagaggagatattgtcaacaagaattatggtgaaacaagcaatgaaaaagttgagtccatcacagcaagttcttcacaggatattcaatgcacggcagcttgctttgaagctgatagctaatgtcacgtatggttacacagctgctggattcagtggtcgaatgccttgtgcagagcttgcagacagcattgttcagtgtggccgtagaacactcgaaacagcaatatcatttgtcaaccagcatcctttgtggaaagctagggttgtttatggtgatactgacagtatgtttgttctcctaaaagggcgttctagggaagaagcattcaggatagggaaggagatcgcctcatcaataactgcaatgaatcctgatccagtcacattaaagtttgagaaagtgtaccagccatgcttccttcttacaaagaagagatatgttggctatagctacgagagtcctgaacagaatgagcctgtctttgatgcgaaggggatagaaacagttcggagggacacatgcccaacagttgcaaagattttggaacggttatcagaatatgtttgnaagacaggatttgaccaagtcagacatatttggagcgtcag

SEQ ID NO: 81273 - DNA, 767 bp, Zea mays
  unsure (1)..(767): unsure at all n locations
  Clone ID: MRT4577_174138C.1
ccggccgggacggccacacacatcccttccntctttctcctcgaggctcgagcattcgtgctgctccgaccccaccgccacaggctcggcggtccggcgatctcgctcaccggcgggaacatggaagaccgcaaagttccagaagaacatcaccaggaggggttctgtgcctgaaaccactgtcaagaagggaaatgactaccctgttggccctctagtgcttgggttcttcatctttgtcgtcattggatcatcgttgtttcagatcatcaggacggcaaccagcggcggggtggcttgagagagccggcccacatctaatccccagtatagagagttgcttgttatacatgcatccagctaggattgggtagcagctaaaatgttaaacgtgacaagactgccctgcattccgttcatttggtgggccttgaatctggaactgaaccataaagcagaatcatgtaccttatataaagtattgaatgggtaactggatctcagtgtttcatttaatctttccccggtgttggatttttatgtgtgtgtgtgattctaaggtgattctaagatactatgcctttgttcacctgtgttggcttgtgacaattgaagtttcagtagctgcactcgggtgcccttgtttgtttcgttttttttttgcagcttctagctaccaaaagctgctgtggactgttaaacgctcagcttttgaaccagcttctataaaaaaaaaaaaaaagaaaaaaaaaaaaaaaaaagcggcc

SEQ ID NO: 81274 - DNA, 739 bp, Zea mays
  Clone ID: MRT4577_174139C.1
actcgcctgggcgtttggactcctattggcccctcgggccggccgggacggccaccacacatcccttcctctctttctcctcgaggctcgagcattcgtgctgctccgaccccaccgccacaggctcggcggtccggcgatctcgctcaccggcgggaacatgactacttcaaggcgcctcgctgacaggaagaccgcaaagttccagaagaacatcaccaggaggggttctgtgcctgaaaccactgtcaagaagggaaatgactaccctgttggccctctagtgcttgggttcttcatctttgtcgtcattggatcatcgttgtttcagatcatcaggacggcaaccagcggcggggtggcttgagagccggcccacatctaatccccagtatagagagttgcttgttatacatgcatccagctaggattgggtagcagctaaaatgttaaacgtgacaagactgccctgcattccgttcatttggtgggccttgaatctggaactgaaccataaagcagaatcatgtaccttatataaagtgttgaatgggtaactggatctcagtgtttcatttaaaaaaaaaaaaaaaaaaaaaaaaagaaaaaaaaaaaaaaaaaagcggccgtcatctcctccaccaccaccaccaagttcaacaacagccagctcgcgaaaataatgaagagccgcagcatggcatcatcggccgcgctcttggggctagccctcgcgcta

SEQ ID NO: 81275 - DNA, 861 bp, Zea mays
  unsure (1)..(861): unsure at all n locations
  Clone ID: MRT4577_17413C.1
ngatctctgatgatatgctaagtataagcaatgacagagaccaaaagttgttaaacttggtgtgatgtctttgcttgctgtgtttaaggacgttattccaagttatcggattaggcagctgacagaaaagagctagcagtagaagtttcgaaagaagtgaagaagacaagatattatgagtacacacttattcgctgctacaaggcctacctgcagaaattgatatcgttggagaagcagccctacttttatactgtggctgttcgttgcatgtgtgctttattagacactgccccacattttaacttccgtgaaagcctattggctagtgtggtaaaaaatttaagctcctcagatgatgtagtaaggaaaatgtgttgtgaagcaataagatcattatttataaatgaaggaaaacatcgtggtgaggcaacaatagaagcagttaggttgattgcagatcatgtgaagctcaatgattgccaacttcatcctgatagcattgaggtcttcctgtctttgagatttgatgaagatattggaaaagatgagattcaggaggaaaaggtgaaaccaaagaggaataaacgttggcaaaaaaatcaggaggttccgaagcaattgccagttaatgataagaagaaaaccagacaggaactgatctcaaaagctagaaaggaggttgatgcagaccttagagcagtttccttcactcttgacccgaaggagagaaaagggatacaaaaagaaacactttctgctctgtttgagacttacttccgcattctgaagcatagtatggccgcttcaaattcaagagaatggtgcaaatgccaagacaaatactaaaaaagatgaatc

SEQ ID NO: 81276 - DNA, 2459 bp, Zea mays
  Clone ID: MRT4577_174140C.1
gtcagaacagtatgcttggaatgatttaagttcaccgcgcaaactggttgtccgaattgttgatacacctgcattgcgtgaaattaaaatagataaaatcagcccatggaagccatttttgaagatgcgccaaaatagcaggctttaatctggattttctcattcagtggtggactcaattcgagaaaacagagatttgatgaatcatttggcttgagagtgttcaaaattggctacgaagtgtatgccgatggtttaacaagagttttacgaatttgtgaacatgcagataatcccaaaattgagaaaattcaatggccaatagcaaatatacagttcagaatttcttatgtgtgtattcatcttcttgacaaggaccagaatggggaaaatgtccaattgccatctacaattttagcagcaagacttcagcatgtttcttctgattcagttgtcacaaatagattcaagcaagtatctgttgcaattcattcattgaatgtggatgaaaaatgggaaggggcttcaattgggacaattcttaggaggaacaagcttcaggatgctactctcgatgaaaatattcttcgtatgatctttgtactgaattcaactgactccagtgtcaaacaaatacagtattgtgccatcatcctacagcctgttgatcttaagattgatgaggaaacgttaatgaagctagtaccattttggagagcatctcttgcaccttcaggcacgacaagcacacaattttatttcagacgttttgaagtacatccaattaagatcatagcaagctttcggcctggtggccgacgcacaacatatagttctgctcaagaggctctgagggcactacttcatagtgttataaaggtgcctgaaattagcaactcagctgtggagctcaatggggttctcctaaatcatgctttagttacatttcgtgagctacttctaaaatgcgctcagcactactcatggtatgtattaagggcaatttatgtaacaaagggaagcaaattgcttcctccatcttttgcctcaatttttgatgactctgcttcatctgttcttgatgtcttcttcgacccttctgatggatcgctcaacgtccctggccttaccataggcatgtttaaatttataagcaagaacatgaagtcgggtggtttttctggaacaaaacggtaccttggtgatctcgggaaaactgttaaaactgcaagttcgaacgctctctttgctgctgtcacagaaatttcagatagtgttgttagaggagcggaaacaaatggtttgaatggcatggttactggtttccaccagggcatgttgaggttggcgatggagccatctgtcttagggcaggctataatggagggaggtcctgacagaaagatcaaacttgatcatagccctggacttgatgagctatacattgaagggtacctgcaggctatgttggatgtcatgtataagcaagaatacctccgtgtcagggtgattgatgaccaggttatactgaagaatctaccaccaaatagcgccctgataaacgaaatcgtggacaacgtcaaaagctttcttgtgagcaaggcactgttgaaaggcgattcttccacagttcgaccgatgcgccatctgcgaaatgaacctgaatggaggattgccccaacggtgctcaccctctgcgagcacctttttgtgagcttcgctgtgcgtgtgctgcaccgggaagccagcaaggccatcgctggagtcatgtcgagagtgaagaaaccgaccggagaggaggtcgaaggcgactcgcccgcatctggtggcgtcctgtgtaagcggaataggctgtggactgtcgggaggtttgccgtctcgggcatggtcgcctatgtagatggccggctgtgccggcacatacccaaccccatagcccggaggatcgtcagcgggtttctactgagcttcatcgaaaacaggggcaacgaataagcgggcagccggacaggtgataaaagggctcgccttctgccacctgctaataaggcgtaccatggaccatggtaaataggcgtgcacgttgtacaaagaaccgaggtgtggtagtgctcttgagccgtaaccgatctctgcatagagctgtgcatcaattttgaccgccttcaggcccacgtttggtgtacagaaacactgggacagtaattccgcagatgctacttcctgcctacatttcgttgacatggactcgtgcttagagtaagtttaatagtccacaacgagccttttcacataacaaactcggttagaggccctttcacatagtctatctatatcatcttattatacttgttctacatgcaaagtgataaatagcatggctatgataaacgtatggagccgttggtgtgttgatcatgagtcactccactgggtatatctctaattttattgtttct

SEQ ID NO: 81277 - DNA, 269 bp, Zea mays
  Clone ID: MRT4577_174141C.1
gtcgcgggatctctatgaagcaccagaattatcagtgaagaatatattaaatggctcacgggctactgtaaagcatatttctatcgcttgagagtaaaactgctagaaccagttcctgtttctacaacaaggtgttcctttagagtcaatgagaacacacaaaacctacaaattcatgcaggggacatacctgtagttcttgaaaaagaagaaacctgaagatgccttctgtgttgtgggaataacaatgattgatctttacccaagag

SEQ ID NO: 81278 - DNA, 345 bp, Zea mays
  Clone ID: MRT4577_174142C.1
acaagctttttttttttttttttttattttttgctttttttattttttttttttttttttttttaatattttttattaaatttttttttttttttaaaaaaaaaaaaaggcctaacccctctaagggcgaaatttgaaaagggcaaataaaaagcagggggctacggcaatctttgagggggccccaggcccccaattgggggaataagaaaaaaaactggccccttgttaaaaacgtcgtgcgttgaaaaaccccggaattacccaacctaaaacacatgggaaaaaacctcctttcccaaaggggggcactaacaaaaaagaatagctctatgtcccttccca

SEQ ID NO: 81279 - DNA, 744 bp, Zea mays
  Clone ID: MRT4577_174143C.1
aaattcccaaaaaaaaaaaaaaaaaaaaaaaatcgaggaaaaaagggacggccaccacaactctctctctctcctcgagcattcgtgctgctccgaccccaccgccacaggctcggcggtccggcgacctcgctcaccggcgggaacatgactacttcaaggcgccttgctgacaggaagaccgcaaagttccagaagaacatcaccaggaggggttctgtgcctgaaaccactgtcaagaagggaaatgactaccctgttggccctctagtgcttgggttcttcatctttgtcgtcattggatcatcgttgtttcagatcatcaggacggcaaccagcggcggggtggcttgagagccggcccacatctaatccccagtatagagagttgcttgttatacatgcatccagctaggattgggtagcagctaaaatgttaaacgtgacaagactgccctgcattctgttcatttggtgggccttgaatctggaaccgaaccataaggcagaatcatgtaccttatataaagtgttaaatgggtaactggatctcagtgtttcatttaaacaaaaaaaaaaaaaagaaaaaaaaaaatatcgacctcctcgatccagacagcaggcagcagccatgtccaaggtcttcaccctcgacgcggtcgccaagcacaactccaaggaggattgctggctcatcatcggcggcaaggtgtatgatgtgacgaagtttttggtagaccaccc

SEQ ID NO: 81280 - DNA, 954 bp, Zea mays
  unsure (1)..(954): unsure at all n locations
  Clone ID: MRT4577_174144C.1
tctccccatctaatcccagtatagagagttgcttgttatacatgcgtccagctaggattgggtagcagctaaaatgttaaacgtgacaagactgccctgcattccgttcatttggtgggccttgaatctggaactgaaccataaagcagaatcatgtaccttatataaattgttgaatgggtaactggatctcagtgtttcatttagtgtttcaaacaagccaggacgggaaaaaaacggccaccacaactctctctctctctctctcctcgagcattcgtgctgctccgaccccaccgccacaggctcggcggtccggcgacctcgctcaccggcgggaacatgactacttcaaggcgcctcgctgacaggaagaccgcaaagttccagaagaacatcaccaggaggggttctgtgcctgaaaccactgtcaagaagggaaatgactaccctgttggccctctagtgcttgggttcttcatctttgtcgtcattggatcatcgttgtttcagatcatcaggacggcaaccagcggcggggtggcttgagagagccggcccacatctaatccccagtatagagagttgcttgttatacatgcgtccagctaggattgggtagcagctaaaatgttaaacgtgacaagactgccctgcattccgttcatttggtgggccttgaatctggaactgaaccataaagcagaatcatgtaccttatataaattgttgaatgggtaactggatctcagtgtttcatttagaaaaaaaaaaaaaaaaaaaagagcccctagggcccaaaataccaaanaaagatccaacttttgataccctgaaacagaggacacaagcgggggccggcggactcatggtttatagtcgcttcattggggaaaatttgagccgttcacgaaaccacagaacatacaagttcccaagtataaaatgtaaagc

SEQ ID NO: 81281 - DNA, 309 bp, Zea mays
  Clone ID: MRT4577_174145C.1
ttctctctcacggctgctccacaatttcatcagtcagtcgccacatcaaaaatccagctgacacagtaaagaccaccggtctgtactctgtactcgagcccttctctctcgcaacagctccatcgagacttcaagatacagtgttgatcaaaccaatggccgccaaaggcagcgatggtatttgcgtggcccagccgcggagtgctgacccgctcaactgggggaaggcggcagaggagctgtcggggagccatctggacgccgtcaagcggatggtggaggagtaccgcaggccggtggtggttatgg

SEQ ID NO: 81282 - DNA, 723 bp, Zea mays
  Clone ID: MRT4577_174146C.1
cacggcacactctgcacgccactttcctataaatcgccctctccgtgcgcgaaggcggaacgggcaccacacatcccttcctctctttctcctcgaggctcgagcattcgtgctgctccgaccccaccgccacaggctcggcggtccggcgatctcgctcaccggcgggaacatgactacttcaaggcgccttgctgacaggaagaccgcaaagttccagaagaacatcaccaggaggggttctgtgcctgaaaccactgtcaagaagggaaatgactaccctgttggccctctagtgcttgggttcttcatctttgtcgtcattggatcatcgttgtttcagatcatcaggacggcaaccagcggcggggtggcttgagagccggcccacatctaatccccagtatagagagttgcttgttatacatgcatccagctaggattgggtagcagctaaaatgttaaacgtgacaagactgccctgcattccgttcatttggtgggccttgaatctggaactgaaccataaggcagaatcatgtaccttatataaagtgttaaatgggtaactggatctcagtgtttcatttaatctttccccggtgttggattttttgtgtgtgtgattctaagatactatgcctttgttcaaaaaaaaaaaaaaaaaacaattgaagtttcagtagctgcaaaaaaaataaaaaaaaaaaaaaaaaagcggcc

SEQ ID NO: 81283 - DNA, 257 bp, Zea mays
  Clone ID: MRT4577_174147C.1
ccggccggggcatagatacacagtttaggttatagaagaggatcgcttgtctgctggtttactctatcttctcttgtgggtacgatgttagttaccgttctgtatctatgaaacgatctacgcagttatagtctatacttgtttatagcatgttggaaacgataaagaggacatatttaggggctgcttggttcgtggttaacagtgccacactctggctaatgctaggcgtgcacaactccgcaacgcccgtggct

SEQ ID NO: 81284 - DNA, 318 bp, Zea mays
  unsure (1)..(318): unsure at all n locations
  Clone ID: MRT4577_174148C.1
gcagggcatgcacgtagcaatggccgncgagacgaagaaaggcctggtgctgctggacttctggatgagcccgctcgggcagcgctgcctcatctcgctggcggagaagggcattgcctacgagtactctgagcaggagctgctgggcggcgccaagagcgacatactcctacgctccaacccggtgcacaagaagatgcacgtgctgctccacgacggccggaccgtctgcgagtccctcgtcatccttgagtacctcgaggagggcttgccggaggtctgccccaagctgatcctcgacgccgactacgcgcgcgc

SEQ ID NO: 81285 - DNA, 441 bp, Zea mays
  Clone ID: MRT4577_174149C.1
gggaaaaacgggacggggctgccgctcggagttttattggggggtggggttggggggtcactcggggcttcatgagatgacccctcataaggtcatttcatcaatttggggggaaacaaccccccccccatggttttcccaattattagcttatgaaaaatgggggggtgatgggtcaacccatttttttccccaaaccaaataaaaaagggggaagggggaaaaaaatgggtcactttattcctcaaaccaaacacactattaggggtttggtcatcgaggggtcgttctctggggaggagggtacttttaccccaccttttacagcccaacccaatgggttttacacgggccacttcggcccacacacacgcccgttactttgtttgggtcgacgtgggcgtgccctggcgccttggtccatcgcacttggtggatttt

SEQ ID NO: 81286 - DNA, 606 bp, Zea mays
  Clone ID: MRT4577_17414C.1
cctcgagccggccgggacccggtggttcgctcggcctcctatggtgctggatgagtcgctgctgcacacggtccacgctcccagcttccctcggcaagggagactactcctcgttgaactggcacttctcgacggcggtgaagcaggcgctggacaccgatcgaggggctgctcctagtcgcgcgaggagggcatagccacaacctcctcttcgtcagccaccttcaacagttatctgtggatctctaggtgatgttctcctgcgcgctgctggccaacgtggccagcgtgggcaaaaaattccacgagcgcctggcgtgcgagatccccggcggcgtgtgcgacttcgcggcccagggcaccctcccggcccggaacaggatggatctggacaagtcttcgtggcgggaactcttgcgcctgtacccgctcgtgaagtaccagcacgggtacgtcaagaatgatctgttgctggaaagccactacgcatagtgtccagctgagagaaggctacatgctggttggttaccagtcgtgcgccaccaacgagccccgcgtgttcgtcgacaccgtcgaggacttcatgcccgaccgcttcctcgaata

SEQ ID NO: 81287 - DNA, 423 bp, Zea mays
  unsure (1)..(423): unsure at all n locations
  Clone ID: MRT4577_174150C.1
gcgactccactgccgtctcgcaaagggaattcccttcccctttagctcgccgctctgccgctcgcttcnngtctcccttgtagagggtgctcggggaccngnatggaacttggcctgagtactttaggtnnagagaatcngnngtttttctttgtctttctagcctcggggtctgctttgcgtnnctggtggtgnnngtgaagggggnnagaaatnntcgtgagaatnnctgttctncggatctaggtncgtgcntgagcctcgnnnggaatnncagggngnntttcactacctatagcnnttcgtcngnnatttganaatttnngatgtacctaannntggagtcttaaggggggtggcaannaaagtcttagnncagtagnntcgttcttatttgatgtnnatgaagcttccnnnccttgg

SEQ ID NO: 81288 - DNA, 410 bp, Zea mays
  Clone ID: MRT4577_174151C.1
ctgaaactgtctggcagctgactagtatttttcgtacagagacgaggcgtaatcaagttcccaggagctacctcaatgcgaggatgtgttttggcttttgagaatttgagcgtgtatgctgaagttgtctctaaaatctaacgcagctggtttcatctaactaaatgtgcgtcgagtgattttacaaaatttatataactgcataacgcgtactccctcctctgttggtttccagtacgcttcctttcgagcgctgtgctttttgttgaaatactgcgagcagtatctgtttttcattttattttatgctttcttggcttaaagcagctgagccattttggcagcagcgttgagacagactgcacgatgcaccaagcaagcacatggaccagcaagtagtacagtacaac

SEQ ID NO: 81289 - DNA, 266 bp, Zea mays
  Clone ID: MRT4577_174152C.1
acgcccggatgtattctcagcctcgaacggtctatttgcagtatgcatacgagatatgtcatatgcggtagtatggttaccgagatctgtagggatgcatatgcatatgatctacgcctttgcacattatatgtgatgctgcgattatgagcactacaataatcacgacctcataattacatacgaaatgatccatgcactcaagtccaagcctgatctgcagacacaaaagttccttgtgtattcttttactagattattgaccg

SEQ ID NO: 81290 - DNA, 400 bp, Zea mays
  Clone ID: MRT4577_174153C.1
gggcgacccacgcgtccgggtagctgaaggctccttctcgtttaggtctatccacatggttttgctcggggaacgaaaattttgaaggatgaaacgagacgtagtgcacgtgctagattcagattgctactgttctgttttcatagatcattcagccttactttgtttaacttttagtgcttcttagctgggctaggtagaattactgcttttagtgcctccagtgctctgagcaagtaatgattttccagtaacaaatcattgggccatagccattgcttgcatgctggacgttatagcagcagaattgaattcctttcttcaacttctaatgtaacaatccccaatgttactctaatgaatgatctatttatattcgtactatactattttaccaagc

SEQ ID NO: 81291 - DNA, 260 bp, Zea mays
  Clone ID: MRT4577_174154C.1
gggacctcgagccggccgggccgggcatacgaccgggacggggcgcaacgcaacaatcagcagagggccagaggcgaagcagaacagcaccacccgccttcgcctccaccgccgcccgggaatcttcttcgtccctccctcactctcacgccatttcattccttccacagttccgccgccaccggccaccaccagcgcatatttaaaagacccagcagcgattgcgccactccgccgcgcaggcaggcgaccccgtgcca

SEQ ID NO: 81292 - DNA, 533 bp, Zea mays
  unsure (1)..(533): unsure at all n locations
  Clone ID: MRT4577_174155C.1
gactagttctagatcgcgggcggccgctcgcggcacacaggtcgccaagctgcgttgttgaatcaaatagtctgtgatttcccaccagaacatccaatcatttcaacctttcggccactacgggaacctcttggacacagcccacttcaggtagctctactacatacttctatcttctattcatggatgcaagtgagtataaactataaaccccatttgcattcctatgtacatagttaatatggcacttgttgagttttcttgaaatgaaacatggtggaatgatccacctttttggtttggcgcctgtttgtattaatgtattatactggtgcctttgcataacaaatggcctaacgatactaaaatgttgtattgctgctcaaatgtgtctccttaacttgtgtttgcattccagaatctaatctggaatatttattgcaacccaagaaacaaaattttggggtattaagcgatgggttatatttttagctgaaaagtgattttaaaaaagtgtagaaatttagatgntg

SEQ ID NO: 81293 - DNA, 129 bp, Zea mays
  Clone ID: MRT4577_174156C.1
gtaccagtgcccattcattactcgagcgttcttacatacagaagatctcgcctcccatggggggtgtagtcatccaggatgtgcaagagaggcgcgcacgcaatcaagcaagcttgaatagagactatc

SEQ ID NO: 81294 - DNA, 444 bp, Zea mays
  Clone ID: MRT4577_174157C.1
cggactcaacgcctagcgcatgcactggcgaggcacgacgctagctttataagcgaagtatgatatgaggctctaccttgctagaaaaggatagaacggtaccaacgctaagaagctgttggttaaaatgctgctgggttaaggaaagctgactgagaatatggcactctctgatggataaagaacaggctttcatgttatgctgaatttatcgggcctaaattgacttaatgaggtgatctcgagctagtaaaaaggctcacaccagctagctggctgaatggtagtagttgttgctgctgtaaataagcaggagagttcaatgctgtcggttgtttgaatggaacaaattgctggggataggcagcacatagctggctgaatggaaggtgttggagctgcaaacaagaagcagagttcaatgcagctaggtggttgaatgga

SEQ ID NO: 81295 - DNA, 511 bp, Zea mays
  Clone ID: MRT4577_174158C.1
aatctcgattctcggtgaggtctattctctctactcgcatccatgctcaacccaagacaatgggatacgcttgagggtgaattgcacaatcgcccgcgcaaccatcgacgttatggacatccaagcagctcccgaaggcttctgcaggacgacatacctgcgtgggtgcaacgacaaaacacactcccaaagccacccccgcgtccttctcttcctactggaagaaagtgggatgcaatccatgataagaactacttgggtccaccatcggtcatatgatggcgacaagatgcattgaagagcccagcaacacttgactggtacaaggtgcacaacctacttgaggctctggacttgaactgtgagccaaaaaggtcttgatacagcccctgcgcctcccccttcaagatgtgtacaatgattgatgcaattgaaactgttcctggagtacgtgaacaacaatgggggcataaatcctgaagtggcatgtctacctagacatgatgaacca

SEQ ID NO: 81296 - DNA, 273 bp, Zea mays
  Clone ID: MRT4577_174159C.1
gggtgatcaaacagggttgcaaaaaataggcgggaaacaacttacaggcgagcctagtaagaagcaccgaagaaactaggcaacacaggaattacgcacaacacggcccagaagccacacccccccggaacaaaacaaatcctacaacggccaagagccaagcacggcaaacccacaaggcccataggagcaagaagaacctgtaacagtccaggaatcgtaccagaggcaggcacaaacacccaacatgggggctgacccaacccatccggg

SEQ ID NO: 81297 - DNA, 429 bp, Zea mays
  unsure (1)..(429): unsure at all n locations
  Clone ID: MRT4577_17415C.1
gagagccgaacgtgacctcccagccgccccatgctcaccctccccggtaccctccggcgggcgcgcgctcctcctggcctacctccccgccgacacctctcccgcctcctggaccgttacggcttcgtggccccggactccctcaccccggccccgcgagaacctcacagcgacaccgccgactccgccgccgctgcgaagaagcgccgcgcgaagaagccgccctaccgccctccgtcctcgctggaccgtggcggtcgcccgcccgcgcactccgacctccccttcgacttccgcttcagctacaccgagagcaccccggcctncaagcccatcgggctgcgcgagcccaggtactccccgttcgggcccgggcggctcgaccggccctggacggggctctgcgcgcgcgccgtcgacgctaccctg

SEQ ID NO: 81298 - DNA, 144 bp, Zea mays
  Clone ID: MRT4577_174160C.1
atattatttttaatttttttgatcaaggcaacaaagcagggagcggaatgtataacaaaaattccaaactttaacttaaattttcaaactgcatactaaagaatatggttctttaacgatcacagcataaaccaacatagaaaa

SEQ ID NO: 81299 - DNA, 907 bp, Zea mays
  Clone ID: MRT4577_174161C.1
gcgttctcggtcgcgtggtgggctgcaagcctgcaacctaaagcaataacaagcagagcaagagagagagatggagcgaggagacgaggcatcgtcagtagtgagcaaggccagcacagcagagcagcgactcaccagggagcagcacggcgactgctcggcgtggctgaacctgacgctgggcgcgagcgaatcgccgtcgccgtctccatcgccggacgccgcgagctgctccgcggactccgagtccgggtccgggtccgggtccgggcccgggcccgccgtcaagccgcccccgcacaaggtgttctcttgcaacttctgcctgcgcaagttcttcagctcgcaggcgccgggcgtccgcccgacgtccgcccacgcgtacgcccacgcgtccgcgcgcgcgtgggcggacgcgtggggcacgcgcacgccgcgctcatgcactcgctctgggtcagcccggcctcgtcgccgatccacaaggcggcgggcccggccagagcggcggcaaggttcctcgagggcgggggcgccgccgccgccgctgccgcctgggggacgacggtcgccgcctgcgaggaggcgcccggttcggcggcgtggcctgggagcttcaggctgagagcgcagcactcggagcacgaacgagcgttcgagactgaacagagcaagatcgacttggacctcaggctctaatggggggtatgtgcccgtgcatggtcagctcatctgctgaataaatctggtctggagatgtgatcaggttcagctcactgtcaggtgaaaccccatagagttttggacatattgagtcgcttagaattgttttgatggtactgcaattatgcatttctgtagctggaaactgtactttagatctattgacagacatcagttttcttgc

SEQ ID NO: 81300 - DNA, 276 bp, Zea mays
  Clone ID: MRT4577_174162C.1
caccgctgagctgggagaaagatggcggcaccgtgcgacaggatttggcccagctcatgaattcgagcggctctcataaagatctggctggcaagtatcgtcagatcctggaaaaagccattcagttatctggagcagaacaactagaagctttaaagcttttgtggaagcaatggtaaatgagaatgtcagtctcgtgatctcgcggcagttgctgactgatttttgcacacatcttcctaacttgcctgatagcacagccaaagaaatctatca

SEQ ID NO: 81301 - DNA, 1175 bp, Zea mays
  Clone ID: MRT4577_174163C.1
aaaaaaaaaaaatccaatgctcctcctacctcgtcctcctttataaagcaaattgcaaactgcttctgatgcaccatcccagcaagagcaagcttcaacctttgcatgcagagacctagtggaatagagcgaggggaatggagcaaggagacgaggcgtcgtcggtgaccaaggagagcccggagcagcagcttacccgggaccgggagcagcagcacgacgccggcgtggcgtggctgaacctcacgcttcgcgcgggcgagtcgccctcgccggacgcggccgcgagctgctccgccgagtccgggtccgggtccgggtccgggtccgggtccgggcccgagcccaccgccaagccgtccgccgccccgcacaaggtgttctcctgcaacttctgcctgcgcaagttcttcagctcgcaggcgctgggcgggcaccagaacgcgcacaagcgggagcgcagcgccgccaagcgctcctaccacgcgcaccgcatgatcgtgggcctgccgctgcacgcgcacgccgcgctcatgcactcgctccgggtcagcccggcctcgtcgccgatccacaaggcggcgggcccggccagagcggcggcgaggttcctcgagggcggcggcgccgccgccgccgctgccgcctgggggacgacggtcgccgcctgcgaggaggcgcccggttcggcggcgtggcctgggagcttcaggctgagagcgcagcactcggagcacgaacgagcgttcgagactgaacagagcaagatcgacttggacctcaggctctaatggggggtatgtgcccgtgcatggtcagctcatctgctgaataaatctggtctggagatgtgatcaggttcagctcactgtcaggtgaaaccccatagagttttggacatattgagtcgcttagaattgttttgatggtactgcaattatgcatttctgtagctggaaactgtactttagatctattgacagacatcagttttcttacaaaaaaaaaaaaaaaaaagcggtgtgcggtcaccagaacgcgcacaagcgggagcgcagcgccgacaagcgatcctcgtaccacgcgcagcgggtggtcgtgggcggtctgtcgttgcacgcgcacgccgaccttatgcgcttcctccgagccaacccggtgccggcgccggcggt

SEQ ID NO: 81302 - DNA, 2181 bp, Zea mays
  Clone ID: MRT4577_174164C.1
ctcttttgccatatttactcagtacatctcaccttgtctaatagaaatcatgacgactaagccaattcttcagttgatctaataaagttgaacacaataaatatggaagggaatcataatgtaacaatacatgttacatcatcagcaacaagaactgtgaataacaataagcattcataggtttaagatttgagtgctctgacatgttagcgtacagatgaatgatttgtgtaccttgagtacagatttcagtactatacacagtagaaaaaaattaagatccaagtgaacaacaaggaaatacttagttacggccttacggatccgatattcaattacacaaataaaaatctaagtacaggttgaaaagaatgaccagtgagatcaactattggccaaaacggttgacatcatagaactcaatattcttatatttctgggaaattatttctgcttgaacttttcgagctgtgtctgttgcacatccaacaaggataagcactgaagtcccagcaaatccacggaatgctgtcaagtgacttgtctgttcaactaaagatggtccagcagctagcacagccagaaatgcagatcccaagacagatatgcgactaagaactgttttaatataagcagctgtactttttcctggtctaacaagtggtatcgaagcaccttgccgcttcaattgttcactaagatcatcaggatctaactggagaaacgtgtaataatagttgaagaaggctataagtaatacattagttggaagatagagagcacctcctggattaagggctatggcagccttcttaagaaagtctaagccagaaaaccgtgccaaagtaccaggcaaagccagtgaagatgtagaaaatatgataggcatgactccagaactgttgaccttaaatggtaaatatgcagatcgctgaagttccccagttcgactgctgtaacgagaagcataattgaggggtattttgcgctcagcttcttgaacatagacaatcccaaggactaatagtaagaatgacaatatgattgtgagaagtccaacataattcccatcttgaaatgcctgcgcaactgtcctcccaaatgatgcaggcaaatatgatattatacttgtaaatataagaagtgatgttccatttccaagtttcagatcagatattctttcaccaatgaaagtagtaaagaccgatccaagtgtcaataatgtcacagatgttagaacccattctgtgctgaaatcattcacatagggacggagataaagaacttgtccaatggcctgaacaattgcaaatccaacagaagcatatcttgtatactgaagaaccttctttcttcctgcttccccttctttccgctgaaggtcttgcaattttgggtagagttgcgcaaggagttgaaacacaatctgtgcattgataaatggtacaatgccaagggagcaaattccaagccggccaatgcctccaccagagaaagaatctaaagtgcccagcaggctgttctggtcaaggttcccagcaaaagcttctcggttgaccccacccaaaggtatatacacaccaagccgagacaaggccaaaaaaccaaggagcttcaggaacttcccaggtagagggcccttgaagaagtcaccaatgtcaatggagctatcctcaattgcagctgctgctcctcgcccggacgccttctccctacttgcaccaccgccgctggagctcccaaataccggcgccatgataccaaagaaggtagacaggggagaccgcgacagagaattagacccctcctcgtagagccccagagggtcgaagccagggccggcggtttccagcgtacacctgcacgagcacagcagacagaaggaacctgggggaacagtccagtgtgcctcgccttcctctggttgtagtaatagcgatgcggcgcctgagaggatagatgggagccgcagccgctacggcacgcggccgaagaggagaggagaggggtggaggtgcccgggccaaggcggggagccctcgccagcattgcggcggggttgtcgtggcggtgaccatggaggcgtggggccgagagtggacggaggggggcacaggatgacgccggccggccccgagccggaggtgatagtttccccggccctcccggccggcctcgagg

SEQ ID NO: 81303 - DNA, 461 bp, Zea mays
  Clone ID: MRT4577_174165C.1
cgatcgacacaatgagggtgcttgtgctccttcctttctctgcctggctctgctccgcgagcgacacctccacgctgctaagcggctgctgtggctgccctccatcgccggcgcctcatacaccggcggcgttgcatctgccaacacccaatcgtctgccacctcaggatccaacacgccctcccggccacgcttccgccgttgaccacctggcccgtcgacccatgtgcacgcctattgcacatctgcacgtcggcagcattccactgacccaataaacccggccgcacaactccaacaacttgccctcccatccctgttgcctcctctgaataccagcccgtgctagcttcagaccacctgcgtggatggcactcccgctgttcagggccacagcaaccgacgtaccatgaggcacagagtgccctgctcgactgccgacgaccctatctgttcgcatt

SEQ ID NO: 81304 - DNA, 453 bp, Zea mays
  Clone ID: MRT4577_174166C.1
gggggcgcccccccagtccaagctcgctgaaaaaccgtgtacaggcaccggcagaccaaagcctccctcggaccgatccaccacaccaccaatggacgccgaggctccgctcctcctccccatcgacatcaccagcgtgccgtcggcgccctctcacctcccttccacccggagcatgcctcgatagcggcggctcgccgggcgtgcgcgtccctgctggcgcagacgaggcagcaagggcttgagtcgccgccgaacgacgcgcgcgggcacgcggggcgcgggcttcgacctgcacttgggtcaacggcggccgagcgcccctcctgcgcccagccggccgggagcgcgcgctgtccggacgcgtgtcccggcaggcaggtgcgggcggccgccggatggccggcgcaactcaccgggcgggccgcccacgggcgcgcgggtccggggagc

SEQ ID NO: 81305 - DNA, 280 bp, Zea mays
  Clone ID: MRT4577_174167C.1
aagtgtccggacgggcgcgttcagcgctgtcgcggccgaggttttttttatattttgacaaataccagcacaaagacgagaccattcgaacaaataaccttgcggaactatcgtgcgaacggccgaatttagcagattacctgcaaactgtccacatatggatcagagtgtttcgacgttccagcacgcattaagaggggccaaattcccctatagggggccttgttacacttcactgggcgtagtaaaacaccgtggtgacctgatataaccctcctgg

SEQ ID NO: 81306 - DNA, 421 bp, Zea mays
  Clone ID: MRT4577_174168C.1
atcattcagaccggtacactatgagcagctagctccatccttacaactacatatattcactgccctccaaagcgccaagacaggaagcccatgggacacaaagggcgactccgatgcaagatcgcagcgccttcgaccatgcagttcaagaatggacctgatatcgagacggacacagtgctagcggccgtctcagacctggaaaacctggcgcgcaccgtcggcatccctctgcgacaagtaactaccaggcacatcttgcttgcacctgaatgaggctgctgagcaaccacactggcgctctctgaggtggaactacaacgttgaactagcaggtccagctaggacatatgctgcaaagacaccaccttccgcatgaccaacctgaccgaggaggcactcaacatctaggggccgttcc

SEQ ID NO: 81307 - DNA, 264 bp, Zea mays
  unsure (1)..(264): unsure at all n locations
  Clone ID: MRT4577_174169C.1
ccgcccgctgccagcaggggcgtttccggcgtttgccaaggaggagaagggccncggggagacgaggggcggctacaaccgcaagaaggaccagccggcggagacggacccgcnccncaacaagggcggcgccgcgccggccgccgccacccgcgccaagacgaccggcggcaagaaggcnaccggcggcgacgacagcggcagcggcggggggcacaaccncggcggccacggcgggcgcnncgccaagaaaagcagcngaac

SEQ ID NO: 81308 - DNA, 451 bp, Zea mays
  Clone ID: MRT4577_17416C.1
aagagcaatggcatcagctctactttttattaatttaaaagggaaaacaaatagttcataaaattgtgtagagtaaaagctagctagctagcattggtcaaaataagcaggacacacctgggtgagaaaagagagcttatttttccaatccccaatcacaatttttacagtgtcgtcaagcaaaaacccaatcacttttgctgctaccacacccccccaaagagaacaataattttgtcctagctagggggaactggaagcggaattaatttattgacacggccggactctatcgatcggcgcgggcacccaccccatcgtcagtgatggtgggggtcgtccccggcggggggggcggcccccaccatgtgagcgaactccgtctcggaggcccaagggatggtgaggcccccccaacggtggtcgaagcccaactcgtcctccaccccct

SEQ ID NO: 81309 - DNA, 244 bp, Zea mays
  Clone ID: MRT4577_174170C.1
caccatgagcctccatggcagcgcgctcaccacatgtgatggtatctatcctcacgcctcgtctattcggacctactgatggctgcacggtggtgcatcggtactgctgccagggaggcgactaggatcggcgcttccgaacacttgaccaccaaaacagtggcgttggcctgctgctgcgcgccgtggatccagtcaatgctggggctgagcacgcaagctttgctgcaacctttgcgcatga

SEQ ID NO: 81310 - DNA, 271 bp, Zea mays
  Clone ID: MRT4577_174171C.1
cccacgcgtccgcgtcccttcccttccggtccttttggcccgctgtagctaataagtactgtactccgtaaccagcagcagcatgcaggcggtgggcatccggcgtggtctgaccatcgacccggcccgggaggaagagggcccccgcggcgcgcgtgtggcgggctggtccgccgagagcccccgtgggtgatctttcgccccggcgcgggctgctttgcatggcgccacgtgaatgagggcgggcttgcttggcgggccggtgggggcg

SEQ ID NO: 81311 - DNA, 180 bp, Zea mays
  Clone ID: MRT4577_174172C.1
ggactcgagccggcgggcgcgcctgcgaccacacccccacacgccaagccggcgctgctgcccgggtacgacctcgacatagctcagggcgctgagcctcagctccccccgggccgccgccgagccgtcgccgacgccgaccgcaacgcgcagaccaacaaaagcacagggcatcaccaa

SEQ ID NO: 81312 - DNA, 701 bp, Zea mays
  unsure (1)..(701): unsure at all n locations
  Clone ID: MRT4577_174173C.1
ccttttgtccttggtttccagctgaacccaactccaatggatataccntggacttataataccatcacctgatgactctaagatattcctaagttattacaacaattcgcttgtacgagatgggacgtcagacagagttgtcaacttcggtgcagttgcgaaaatactaggaggtctgaagccaaattatggtagttcggcaccaaaagtgatgttttattctgctagggggcctgaccctgaggataatacattggccaatgccgatatcttgaaaccaaatgtggtagcacctggcagttccatttggggtgcttggagttcgcgtggattggattctgctgaatttaccggtgaaagttttgcgatgctctctggtacaagtatggctgcaccacacattgctggccttgctgctctaatcaagcagaagttcccttcttttagcccggcggctataggttccgcactgtctactactacaactctcagtgacaggcaggggaacccaatcatgtcgcagcgaacatacagcaacccggactccacacaaactccagctacaccttttgacatggggaatgggtttgccaatgccactgctgctttggaccctgggctcatatttgattgcagttatgatgactacctctcctttctgtgtggtataaatggttctgctccagtagtggcgaactaca

SEQ ID NO: 81313 - DNA, 643 bp, Zea mays
  Clone ID: MRT4577_174174C.1
aggttcagacagtcattacggtaaaggctattcagacgcggctcgaacgcgcttaccctcgcggggcccgttacaatgggtcgaatcccgcctgggcctcccagggcggtgacgacgtgggagacccgtagacttcgacaaagccttcgtcttgcaacagcgagggcgaaggggaccacgtcggtcgccatccagtcgacgccttcagtttgttcggacgcgttctgtggatgtagccttcgtcggagtgatgaggagacgaaggcatcgagcgaagggtagcgtgttctccttcgccccaacatttgccctccgagggaccagtttgactaagtcatctggtgccgaagacgccgctagatggggaagacactgccctcgctcgaagtggtcccgtgggggtttttgaaatgtgaccgttgatggacgtgttactgttggactgcgtgtttcccaaagcgtcgcgtcctgtctataaaaaggcgaccgtggctgggactatttcctacccttaagcttgcttgcgctgtttgccctccttgctctcccgcttcagaaatctggctcgtgtcaagcagactgcgcgccaccgccgacggtacgtagcaatgtcttcttcctcgtctgatgcgagtgcgtcgtc

SEQ ID NO: 81314 - DNA, 330 bp, Zea mays
  Clone ID: MRT4577_174175C.1
gggtttgtgtttttttttttttttttttttttttttttttttttttttttttgggaatttgactcgatgaattggtttttgattgaataagcaaatttacaattaataatttggacaattgattttcaatttcgggagaacaaaaagatttgggggggttccctggtttaaattcaatttggaaggttttttttcttgtttttggcagggaagaggggggattattggatttgggccttggggcattgaattctattagtagtatcaagagcagcagttgtcgacgggggggtaccggggggggggcaagcggttgaaccaggcgtttcg

SEQ ID NO: 81315 - DNA, 348 bp, Zea mays
  Clone ID: MRT4577_174176C.1
gccccccggtacataaacatagaaaaggtgggatacacataatccggaaagcaagtttgggaccaacaaccctgggactggctgacgcactccgaaaaagggacacaattttgggcgagaacacgagctgtgtttaggccagggcagggaactgagcctggtttttaatcgttggagcagaatttggtccccgataaccgccgttgaaaccaccagggaacccccaagggcccttaccaggggcacgggcaatagggttatagaacctttcgccttaaggtggtttaaaaaactcgttgatgcttagggactttttgccccgtttttttttttaagaacttttttttt

SEQ ID NO: 81316 - DNA, 772 bp, Zea mays
  Clone ID: MRT4577_174177C.1
ttccccgaccctcccttcctcgcccaggccgacctaaagccgtccattccgtcgtctccatgctctaggacaacgagcacgcggggcctaccgcctacgtctccacccccaccgccggacgcatctcagagaatttcgaggatgtcgactccttcaaggaagaggctgatgagggacttcaagcggctgatgcaggaccctcctgcgggcataagcggggcgccgcaggacaacaacataatgctgtggaatgctgtgatttttggccctgacgatagcccgtgggacggaggtacgtttaagctgactctccagttcaatgaagaatatcctaataagccaccaacagttcggtttatttctcggatgtttcaccctaacatttatgctgatggaagcatatgcttagatattctacagaatcagtggagcccaatatatgatgtagctgctatacttacatctatccagtcgctgctgtgtgatcctaacccaaattcgcctgctaactcagaagctgcccgcatgttcagtgagaacaagcgagagtacaaccgcaaagtgcgggagattgttgagcagagctggacggcagactaataagctgagctcaccatgcgttatcatgcggtttctgtaccaaaatgtttgtaactaaaatgactgaactccatcgttaccacctgaaacagcaacttgctttgttgcatcatttggctggacggctggagattgctctgtcatggcctgtgcctatactgtctgtatcttg

SEQ ID NO: 81317 - DNA, 640 bp, Zea mays
  Clone ID: MRT4577_174178C.1
tgttcctgtgactcggaaccctagccgcgatatctcacgatccactcgagcgacgaagccgacggtaggcgaggagcgatggcgcgcgccgtggtgtcggcgaagggcggagcggtcgcgggcaagaagaaggggtcggtttccttctcgatcgactgcaccaagcctgtgtacgacaagatcatggaggtcgcctcgctcgagaagttcctgcaggagcgcatcaaggtcgccggcggcgaggctggcaacctcggcgactccgtcaccatctctcgcgagaagaccaaggtcaccgtcacctctgacggacccttcgccaagagggacctgaattacttgatcaagaactactgtgtgaagcgcaacgggcgggattggctacgcgcggttgctgccaactacgtaccgaaacgtctatgagctccgctacttcaacattgctgacaacgagggccaggaatgatattacattgcactacgcttatattttagtattggactctgtgctttgtgataccgggacccgtagattcgcaaatgtcccatgttatcggcgtgctatggatgattctaagaatcctgatgtactggatctctgctcccagctatgtggtggactggtacatccagagcactt

SEQ ID NO: 81318 - DNA, 780 bp, Zea mays
  Clone ID: MRT4577_174179C.1
agtacagtaataggggagggggcgcgtgggggcatgcgtcgaagacagtctcagatgtctggcggcgcaggatcgtagcaccgagggtttcccagtccacgttctagaagattcccgtctacattggccgaccccgcggcccacaccgtatatcaccgcctcctatccggcctctgcccttctcgccgaacggaaaaccctgcccggaccttcgttgcagcgctacgagcttcgacgggccgctcgatctccacctctgaagtggctgcttgtgatctagatctgaaagctgcagtggttgacagctgagtgtgaaactgtgaatcgaagatgagcgtggtgggcttcgacctcggcaatgagagctgcatcgtggcggtcgcgcggcagcgcggcatcgacgtggtcctcaacgaggagtccaagcgcgagacacccgccatcgtctgcttcggggacaagcagcggttcatcggcaccgccggcgccgcgtcctctaccatgaaccccaagaactccatttctcagatcaagcgcttgctaggccgcaagtactccgaccccgaggtacagagagatctcgcctccttcccgttccgtgtcacggagggccccgatggttttcccctggtccatgtacgatacctgggcgaggaacggacgttcacctctacccagctgcttgccatggtgctgtccaaatttgagggcattgctgaggggaacctgaatgctgcagttgttgattgttgcattgggattccaggctactttacgatc

SEQ ID NO: 81319 - DNA, 282 bp, Zea mays
  unsure (1)..(282): unsure at all n locations
  Clone ID: MRT4577_17417C.1
gtggggtgtaaggtgtgaagtgttggtgagtgggatggaagaaagtagtttggttcttgatcttattttgttggtggggaggtgtaaaacttattggggcttggtgggtnttgcgggggggcccctcttcctcctactctgtttccttgcccgtaggcctggtgcctgcctgccgtgctgtcgggcttcttaccgcggcacccgttgtctggatcggcgtatttgccttggccctcctccggccccctactccgggcctgtcttgcgttggcgtactcgctt

SEQ ID NO: 81320 - DNA, 557 bp, Zea mays
  Clone ID: MRT4577_174180C.1
gccggccgggtcggggtgtctggaaaccctagccgccatatttcacgatccactcgagcaccaagccgagggaaggggaggagcgatggcgcgcggcgtggtgtcggcgaagggcggcgcggtcgcgggcaagaagaaggggtcggtttccttcacgatcgactgcaccaagccagtggaggacaagatcatggaggtcgcctcgctcgagaagttcctgcaggagcgcatcaaggtcgccggcggcaaggctggcaacctcggcgactccgtcaccatctcccgtgagaagaccaaggtcaccgtcacctctgacgggcccttctccaagagtggatgtaggcgacgatggagagactccgcaagctttgagccaccacggaggtcgtcctgtcccggcccttgctccaaaggtgctggcatgcttcaggctcctgctccgaccgattggagagcggagggatccgtccaggcggatttgaagagcggctgtacaaattgaagaagctttagttctttatgtgatgattttataacatgttcgtaaatacctgtac

SEQ ID NO: 81321 - DNA, 283 bp, Zea mays
  Clone ID: MRT4577_174181C.1
agacgcctcagccccatcacaataacatcaaaggcacatcggatccatctcgacagtgaggcttgagagaccagatcaaattgaaatcatccgcgactcaccaacgcacgtttgttctctgatctctctggttcttctttgaacagcaaggattgcacagcacaatacaatgtctggttcaaaatgctcttctatatgatatttttatgaatcctcatgagaagcttgttcttgggttaggatttttttctcacctcatcatatcacacctatcgaggaacag

SEQ ID NO: 81322 - DNA, 1291 bp, Zea mays
  unsure (1)..(1291): unsure at all n locations
  Clone ID: MRT4577_174182C.1
gaaagatgtatgtcaagcaaggtaagtaagttgggtacagctagggtttccagtccacgttctagaagattcccgtctacattggccgaccccgcggcccacaccgtatatccaaaaaaaaaaaaaagaacaccgcctcctaacacctttccggctctccccttctcgccgaaggggaagccctgcccgtacttccgttgcggcgctacgagcttcgacgggcctcgatctccacctctgaagtgactacttgtgatctagatctgaagctgtagtggtcagcagcttagtgtgaatcgaagatgagcgtggtggggttcgacctcggcaatgagagctgtatcgtggcggttgcgcggcagcgtggcatcgacgtggttctcaacgaggagtccaagcgcgagacacccgccatcgtttgcttcggggacaagcagcggttcatcggcaccgccggcgccgcgtcctccaccatgaaccccaaaaactccatctctcagattaagcgcctgctcggccgcaagttctcagatcccgagctgcagcgcgatctcgcctccttcccattccgagtcacggagggccccgatggttttcccctggtccatgtacggtacctgggcgaggagcggacgttcacctccacccagctgcttgccatggtgctgtccaatttgaagggcattgctgagggtaacctgaatgctgcagttgttgattgttgcattggtatcccggtctacttcacagatctgcagcgcagggctgttcttgatgctgctactattgcgggtctccggccattgcgattgttccatgagacgacagccactgctctggcatatggtatttataagactgatctcccagagaatgaccagttgaatgttgcatttgtcgatgtcggtcatgcaagcatgcaggttagtgttgtcggttacaggaagggacagctcaagatgttgtcccatacatacgaccggtctcttggtgggagggacttcgatgaggccctgtttaagcactttgcagctaaatttaaagaggaatataagattgatgtgtaccagaatgcgcgggcatgtattaggttgcgtgtggcatgtgagaaacttaagaaggtgctgagtgccaacccagaggccccactgaacattgagtgcttgatggatgaaaaggatgtgcggggttttatcaagagggaggagtttgaacagatcagtgcctctgtgctggaacgcgtngaaggccactggagaaggccttgctgaagctgggttgactactgaaa

SEQ ID NO: 81323 - DNA, 228 bp, Zea mays
  unsure (1)..(228): unsure at all n locations
  Clone ID: MRT4577_174183C.1
ataaaaaacacatccgaggcagctataatatatagggggaggccacaggaacataataaaccgngacatccaaacaccaagccgactgacaccaaacgcaggcaaacacatagggtatgctgtgcggcacgacaataacagattttagacatcgacaccagaccgtctgacaccaaacggagactgacacaagatggctcctgacaagggcaggaaacttattgggtt

SEQ ID NO: 81324 - DNA, 412 bp, Zea mays
  Clone ID: MRT4577_174184C.1
actagatctagagcgggcgctgtcgatgtagcagattcacgctcacgtgcgcgcgcatgcaaagttatagtattgcgataccgaaacctaaattaatggcagtggccgtacaactacaacactgggactgccaaaaccctgccgaaaccaatcttaatggactagatgcacatttcgctttctggagttgtagtaataaggaacaggccgatagcgattgccattactaacacatgctcaatctgaatggggactggcactctccctgtacattaacatcaagcgctgtggttgttacgctcaccctcaccgttacagttgcaattgccatagcgctagctcctgttgctttctttcctttctttctcgtcatggtcacgtgctttggctgtccagctctagctctaaagct

SEQ ID NO: 81325 - DNA, 651 bp, Zea mays
  Clone ID: MRT4577_174185C.1
atggaagcaagcagcaaggcggccctgctcctcttgatggtcatcgtgggatgtttgacgattcctgcacactctcggaacgtcgttcgtttctgcaaatgccagaagcagacctgcaaaaagggagcaatattcgaagctgtttgctactgctgtccaggcgggccaagctcgcacggtggcccggcagtaggggcacgcgcagcgggaacgcagctagcgctccaggcatgccgagtggaagacgtgcctgcagcgcagccggggccaccgcacctctccaggcatatgtcagcttgggacgaagcttcagcggcctcgccgtcttctgcttcctgcagctcggagacgggcctggggaacgctgtgatcggtacgaactcgtctgcgttagcgacggcagggacgaccacaggctccgtcgccgcgccttcttccgccttgctggccggtgacgggttcgccgggctggaagcgactgccgactggttagagtgccctgtatgccgtacacagcaccgaagtcagtggtgcgagttagccgcgcccagcccaaaatggttccgacggccgtgtcttttgcctgcaatgaaggatagcatgcgtaatctctctggtgtcaggggacatgtccctcaccctagcaactag

SEQ ID NO: 81326 - DNA, 364 bp, Zea mays
  Clone ID: MRT4577_174186C.1
caatacattcatggccatggcacccacccatgaaacaagattgagaaaacgaaccgaccaaactgaacaaaccggtgtgaatagtaagctaataaaaatattaaatttagcgagggggtacagattttttcaaaagcaagggctggctgcgatgatggaaaggaaattaaaagctgatcagggcacccttcttcgaatctggctttttctgaccttcctgggagcggcttcttcccttcttgccaaagatcatttcccccagatcttcaaggatgtcatcttctccacctcacgttgctctcgcggtagctgaatgggtgacaagggcggctacattgcctccaccattaaaaccttcttgctc

SEQ ID NO: 81327 - DNA, 163 bp, Zea mays
  Clone ID: MRT4577_174187C.1
catcatctttcaccatttcgtgccaagcataaacaccctccacctcgacagcaaggccatcggctgccttcgcatggagcgcgcgacggggtcggcagatatgatgaagacgtactccctactggacacggtgcgcaggcacaccatcgagttgaacccccgg

SEQ ID NO: 81328 - DNA, 1462 bp, Zea mays
  Clone ID: MRT4577_174188C.1
cattgggtaccctcgcggccggccgggacaaaacacaagctctcggaggacagagaagtagcgtagctagatccagcgctcggcgccagagacacccgacatcctcgtcatgtctccggttgcaagcaagggagtagtgatggacggtgcggtggcggtggcggcagtggccgccgccgtgctgctgtgcctccatctgccggcggtggcgcgaggccagctgcaggtggggttctacaacacgagctgccccaacgccgagtccctggtccgccaggcggtggccagcgcgttcgccaacgactccggcatcgccgccggcctcatccgcctccatttccacgactgcttcgtcaggggctgcgatgcgtcggtgctgctgacctccgccaacaacacggcggagcgtgacgcgccgcccaacaacccgagcctccacgggttccaggtgatcgacgcggcgaaggcggcggtggagcagagctgcccgcagacggtgtcgtgcgcggacatcgtagccttcgcggcgcgcgacagcatcaacctcacgggcaacctgccgtaccaggtgccctcgggccgccgggacggcaacgtctccctggacacggaggccaacagcaacctgccggcgccaacgttcaacgcgtcccagctggtggccagcttcgcggccaagaacctcaccgacgaggagatggtcatcctctccggcgcccacaccgtcggccgctccttctgcacatcgtttctcgcgcgcatctacaacggatccaccccgatcgttgactctggcctgagcgccgggtacgccacactgctgcgcgcgctgtgcccgtccaacgccaactcgtccacgcccacgaccacggtgatcgaccccagcacgccggcggtgctggacaacaactactacaagctgctgccgctcaacctcggcctcttcttctccgacaaccagctgcgcgtcaactccacgctcaacacctccgtcaacagcttcgccgccaacgagacgctctggaaggagaagttcgtcgccgccatggtcaagatgggaaacatccaggtgctcacggggacccagggccagatcaggctcaactgcagcatcgtcaacaacggctcgtcgtcggtggggatccagcagatgacagtgcccaactcctactctggcgccaccgcgtcccttgatgatgagatcgccacgagctgatctagatcggcgcggtgtgatgtgatgatagatatttgcattgtgtgtccatctttaggctattaattagtacgtttgctcccggtacgcgcgagagtgcgtagttcgtgtgtcattcatatgcgcgtacacgagatttccagtatcaccatgcatgtatcccgtgaatcatcatcagtaaataaaactggtgctctttgcacagtctagaaatgaaaaagaaaaaaaaaaaaaaaaaaagcggcc

SEQ ID NO: 81329 - DNA, 280 bp, Zea mays
  Clone ID: MRT4577_174189C.1
acgataacgagatggatctgatgatgttgtttgttgggaaaggcctaatgatacgtgagggagatcctaagtggatgtagcgagaaaccaatccttgttgagctaaacgaggaccctgacggcgatgtgaagtactactcgatctatgcgctgcttgttgcgataaaatgaaggcgtcgagcttactaaccgtgttccagtgttctttcagttcgaagcctaatattccagtcaggtactacgctggaaattgttgggccacaacagatctgaagagttt

SEQ ID NO: 81330 - DNA, 265 bp, Zea mays
  Clone ID: MRT4577_17418C.1
cgctgagggagccaagatgcgaatgctctcatcaagaacctcactgatgccactattaccatggctcgaggagcatgtcaggatagtggtcatcgacttgatcgccaactagagcagggaatgccatatgatggcaccaggagtacgccatctgcgctagcaagtacccttgcgacgatttcataatggtccacttcgacaaacagatggaaatgcacgatgatccacggcgtccatgatagccaagcttgtgttatcggaacta

SEQ ID NO: 81331 - DNA, 482 bp, Zea mays
  Clone ID: MRT4577_174190C.1
gatctcaacagatgagtgatcaaggagtactcctcctccacacacctctgtttcctcctatcgatcatggactgcttctgtgctctgctaccttgcgaggccacgccgcgctagtgttgttcctcttcgcgaacctgcagttgcttcctggtgcagaggctgagatgtgaacggccccttcttcacctcacgcatcgcatcgacgtcgaaccccacgcctctctcgatcgggaagagtccccatcacccggtctgactgggcgtgtgcgcccccgtgctggagctgatcaaagccaaagggtatgaggcgtccactcagacggggtgtgcactgatgatggctgtcgacgacctcgagatcggcatgaggctcctgctcgcctgataattataggatgacatttctcataattattacagctcagagatgtcacgcacttcacaaccactgcaaggtagcaacgtgtataacgacatgacat

SEQ ID NO: 81332 - DNA, 302 bp, Zea mays
  Clone ID: MRT4577_174191C.1
aaattagaccatagccacacaaactttggattgcctctcacaaaagggggaacggtttcccataaaacaagaaaaataataagatcgggggggaagaggggcaaaacacaacccgccctttaaaaaccgcaccaaaaaacgggccgccttcctttggattacagcactcgggcaccgcctgggttctaaggcttttggccaagggcaaggaaaacccatcaggggaaatggccaaaatcccccggcaatttcataataatcagggcccattaagtaaccatcggccccgggggcgggcccgg

SEQ ID NO: 81333 - DNA, 301 bp, Zea mays
  unsure (1)..(301): unsure at all n locations
  Clone ID: MRT4577_174192C.1
tcgattcttagtcntnnctaatacatgatgtgtanctangtnagggcgtcagaacaacacttgctaccaagcaattagctcctccttacgcttgtaccccttgtagtgagcgcaacagatgcacacattatttcacaccactcacttactcatatggccaacatttcacaggatctgccaccagcaactacaatgagcatcgaacatacaatcaagcaagcctacatgctacaactatcgctcgttatcagcgacacacaacaaccaactgcccatgcactacaaccatcctttgcacatc

SEQ ID NO: 81334 - DNA, 206 bp, Zea mays
  Clone ID: MRT4577_174193C.1
acattcactactcgcttcgtggattcattatctaagtctaccatgggctgcgtctgatggtactggctcatggtatggtcacctaagcctattccacagaactctccattacctcaccaagacctgaatcgagcttgcccttagtcccttgattcccatggcactagatctcttctttctgacacgcgctcttacagacgagcatc

SEQ ID NO: 81335 - DNA, 853 bp, Zea mays
  unsure (1)..(853): unsure at all n locations
  Clone ID: MRT4577_174194C.1
tcgatccacccttctttgnatgacnnggcaaaagggacaagnntggactggtaaaaactgaatgatacttttttttttaattttgctaatgcaattgatcttacttctgccttgaaggaggtgaatggaaaatatgtaggaaactggccaatcaaattacataagtgcacatggaagaacgagatagacttagaagctttggagaaggaaatacccaaccacagaagaaaatgaaactgcagaaaaaagtgtcttcacaagtgaaaattaataattctgcttgttcatcgtctgtcagtaccacatttgctcgcctgtgccgatctaccctctttgatgatgacagaaagataaactcatttttatcattcctttgtggaggtattatgcttnannnnnnnnnnnnnnnnnnnnnnnttnnnnttntnttntttttttntttttttttgtttntttaatttattataaaaaaaaaaggggcggccttttttggggtgtcccataggtgccatgttcgacagatgtcagaaggcattatttctagggcccacctttgaggtttcatgccgtttgtttaagcgatgttcatcgtcattaacttgccgtaaatatgttcagtaggcagctagtatatcttcagaatatcctcgtttcgtattacatatacccccaaatgttctccagcagggcaacaccattacaccacttaaccaatttttttccttgaggaatttccctgttaacctcaaacttttatttgccagccaaaagttgttgaagcggctgtgctgaattgctgattgaattggctgtaactacctcatgggtacacaattctaatcctgtttccttt

SEQ ID NO: 81336 - DNA, 602 bp, Zea mays
  Clone ID: MRT4577_174195C.1
gccggccgggcctgggattgtcccatcaaactcgctactggcctcgggcccgcccgtcgtgaggtccgagctcgatgcagccgatccggcggcggcaccgaggctttgcactcctctgtctctccgccgccctcctcgctgccgccactctgctccccggcgccgccgtcgccgaaggtgtcacgccctccgaggcgcgccggctccgcgacgaggtagtgcgggccctcagatccgccgctcctaactcttctacgtattgctagttttgtggcttcgagcgccaagcgagtgcttggtgattttagcgtttagcgtggaggtgtgagtagtatggtgttcgattgcaagggtggaagtgtcggcctgcttgcttagggagctgatttaggaatttaggttgatgattgagcgaatttctagcttgcttagattgattgtctgttaatgcctgatgcgagttcgtcagatcgtggttttattgttctgctatcgcacatttgcttttgttcatgcttggtatgctttaccaattctagtaatggcggctctgggcctgtttggttcagcttttagaaaaaaaaaaaaaaaaaaggccccta

SEQ ID NO: 81337 - DNA, 277 bp, Zea mays
  unsure (1)..(277): unsure at all n locations
  Clone ID: MRT4577_174196C.1
gggattataaggacggcatattcccccttgattggaacttaaaaatccccccttgtggctcatgggggccgggaacaaaccaaacacccctccctgtgtgggtggggggggtgatnnnatcttaggactgacccgcctagggtgtgcgggggcaaatccagcttgatctccccctccttgggtgggacccgcccgatttttacggcgcccccccccgccaaccgcgtgtttgcaagccccccctcgcgggccggggggaacttgccccccagcgttc

SEQ ID NO: 81338 - DNA, 168 bp, Zea mays
  Clone ID: MRT4577_174197C.1
gagttcacgatcggggggtgctctccggcaagaccacccttggggaggagttctatggccaaatcggcgccttcgatcgaccctccaacctcctcgttatccaggatggcctggggagggctgatagcggagagctgctgaacgtgagggttcttaaggcgaactaca

SEQ ID NO: 81339 - DNA, 621 bp, Zea mays
  Clone ID: MRT4577_174198C.1
ttgggaccctcgaggccggccgggcttcattttcatccgacggactacgctgggatacgtctcctctgtcctcctcctattcccgacggctacaggcctagaccacccccctaccagggacgactcattctatccaaggaatccatggtaccatctagggggagtgagggccacgctcctcaaggacacgcatccctctggatacaataactgagagattcttaatcatttcgaaaaacatgaacatgagatctaagaggcacaaagagatgataaaaaagcaccagcaaggaaacatgcttgtgtccactatcgacagcataaagatatgaatgaactccacctggcgaacaccacgttgatgtcatttaccaatgagaaggaggagctgatgaatagtgacaccaccagcacgacgctgatagacggatataagatgccagacactttcaggttcagctttcgagcgccaacatcttatacgcatgatccaaccaaggccaaatgctgagagcagagtgtaccattcaaataatgatactgaaggcagtggaagttgtactgttctgctccaaagatagtaagactggtctcaatgtcagcactgctaccgaagtgctg

SEQ ID NO: 81340 - DNA, 296 bp, Zea mays
  unsure (1)..(296): unsure at all n locations
  Clone ID: MRT4577_174199C.1
tgctttaattttttnngctcccttnnncctttgtgggggggggggggggtttnttntattcccntcatttcatgcttttcgagccttgttttttttttccctttnntgattgttggaccttgccccttcgttgttntcttangttgccttctttggttttcttgtctgtttttttnnccccgcctctngagtcctccgctggtgcttggttttatcctgtcccgttttttgacgcgttctcggnctcttggttcttcccgtgtttttcttttctttacctgttggcgttcctgttt

SEQ ID NO: 81341 - DNA, 316 bp, Zea mays
  Clone ID: MRT4577_17419C.1
accttgatgcatgccagggggaggctcacgagcggaagcaccaataatcagcgggcaagacaggaaaagaggggcaacacggacccacggggagcgaaggcaacgacacccgacagggtaagagaagcgcgaccccgcgactggagcgaaaacccaagccgaaaactcaaacaaggctgacaccgatgggacaacgccagacggccaggcacaggcgcacagcacagaataaggcggcgcacacgcaaactggagggactagagggccaaaaaaaaaagaacgggcgctcgagccgaggacccacacttgctggca

SEQ ID NO: 81342 - DNA, 392 bp, Zea mays
  Clone ID: MRT4577_1741C.1
ggccgcttttttttttttttttttattttttttttttttttttttttttttttttttttttttttttttttttttttttttttttttttaaaccaagttaggccccccgccctatattacttaaaattggacccgaaggggggccggattcttttaggttgggatgggaaaaaacaagttggggaacccaattttttttgaaaaaaaaaaaatccattaaaaaaatgggggcccaaaactagccctaaaaaaattaaaaaacttattggcgccggggccgggttgaactaaaaaatcccccgccccccctgcccatttaaggacaaaaagccccgggccaaaaaaaaacgggggttgtggctgtcaaggtttgccggcatacggaggggggg

SEQ ID NO: 81343 - DNA, 489 bp, Zea mays
  Clone ID: MRT4577_174200C.1
ttgtgagccttcgagatcaacgacgccggctgggtcgtgtatgagcaactgcggccaccgcccctgccaggggaacattcaaacgctcactggtatgtgacttagacatatactaggtacatgcatggcttgtttcttctccatgtcactcatacacacgacaaggactccacaagcatgcagatcatgctcgtgcattttcgttcatcacgattactaacctctttccggacagtgtatatcctacacaaatgttatttgtggaaaacgcagttggatgtgaggcgtatgatacacatgaccaggtgctggaggcactaccatgtctaaatgcgaacacacttgagctcattctaagcgccttacagtatggtgacccatattctagacctcgctacttctgttttgctaaacgtgaacctgtactggatcatatgcattccacaacactaggttgtttcatacagctatgagcctgagcctgacact

SEQ ID NO: 81344 - DNA, 587 bp, Zea mays
  Clone ID: MRT4577_174201C.1
gcgttcgcccacgcgtccgctaaaataacacagaaatacaaactactacgaaaaaactaaaaactaaaaaaaaaaacaaataaaaaaaaacaaaaagggggcgcggttttaggggctccaagctctcaagcgcctgcatccgaggttaaacgacttctatggcgccatctaaacggaactcattgaccgcccgttcacaaccatcttactgaacaaaaccctggcttcgctcgacttaaccggactacctgagaacctcgtctgcctaggtgatcgagctcgcaaacggcagctttggagggtgcctcccaaccagcatcgacaacatgtgcggaacgctcaacgagatcctactgatcaacgacggtcgtcgactgctgcgtgctcccagcggtcggctcgctccaggaggtgaccgttttcgacggtagcttcaactctcttgtctgcccgctgccgcagcaggtggccgtgatgcgcaaggtggagcaactggacgttgcgcacaaccgtctgttggggtgcgttccggaggccatctgcgaccttccgcgcctgaagaaccttaccatcgcatacaacttctt

SEQ ID NO: 81345 - DNA, 863 bp, Zea mays
  unsure (1)..(863): unsure at all n locations
  Clone ID: MRT4577_174202C.1
cggacgcgtgggtggagagcaggtggtgtaagaaagggttccgaccggtcagattctacgtcgaggatgtccgagtgcacagcttagcagactggtgacgatgaggcgccggaactgaggctcactgtcactgggcctccacccccacctctctctgtggtggtggtggtggtggcgcgggagggagaggacgacggcgatgattctggctgggagtcagactcctctgtagcatcctgcccagccacattgtcatcagaggaaaggagacggcctgtcggatcgctcccacggccagtaagtctaaacgcgtttgatatcatctcattctcaaggggattcaatctgtcggggttgttcgaggagcgaggcaatgaagtgagatttgtctcagcacatcccatgcaaacgatcataacgaaactggaggagatcgcgaaggtgaagagctttgcagttcggcggaaggactggcgggttagcttggaaggcacgagagaaagtgaaaagggtccattgacaatcggggctgaagtatttgagctcacaccaagccttgtggtcgtggaggtgaggatgaaggcaggggacaggcaagaatatgaggatttttgtgagagggagttgaaacctgngatgcagcacctggtgcaccatacagcctcggttccagatataccttctgatactgattagcttanaaggtagtgtgctcttgattggaatgattgtggtgaagaaatttggattgaaaggatgcacctttctgtttcagcgtaagcatctgtgcaggaaaatgttattcatagatttccgnagntttttttttgtaatattctttctgcaatccaaaatgttttgcg

SEQ ID NO: 81346 - DNA, 687 bp, Zea mays
  Clone ID: MRT4577_174203C.1
ggtgcaggtgtacccgtgggccgtggccgcgcacgagctggaggtgccgctgcagacgttccggacctggcggagctgggccgacgggccgttcgtgttcaacacgcggccgctgagcccgcacgacgcgtgcgcccgccccgccatgttcttcctcggccgggtccggaacgggacggcgcgcacccccgtgacggagtacgccaggcgcgccggcgccggcgccgccccgtcgaaggagtgcgacaaggctagcttccgtgcggcgtccacggtgcacacggtcagggtcatcgcccccaggatgagcgagagtgactggaggcgggcaccgcggcggcagtgctgcaagacgaagcggacgaggtggggctccgtgctggaggtgcggatacggcgttgcggcagaggagagctcacgtcgccgtagaatagaaacaaccggtccgttttcgctgtgatttatccacggaaggccaacgaaaacagcagtagatatttgagtggagagtatctgccttctagcgacaacagatttgtccacgctgtgtataaaaaagctttacctacgcgactgatgagatatacaggtcacgcacatacagtagcatatccgaaagtcacgttttgaaaacgttgcggtgttgtacaaatgggaaaataaaatcgtcccgtaccattgtgaat

SEQ ID NO: 81347 - DNA, 196 bp, Zea mays
  Clone ID: MRT4577_174204C.1
aaggcaaccacctttattttagggtttggaattacacatacaacacatatttaaccgccctttgaggttatacattttctcaatggggacaaaaaaaaaaaatattctcctaaaatgtatctcctctatgtcaaatagcatctataatttatttgaccgaatattaacgttggtacttttgggccaacccgacccc

SEQ ID NO: 81348 - DNA, 513 bp, Zea mays
  Clone ID: MRT4577_174205C.1
gtaacagagccgtaaaaagcacgctaagcggagcgcacatccaacgatcaaacaccagtaggctatccaagcatataactccttgttgcgcttatcgccctactaaagagcccggaagaggcgcacattgtagcacatggctgatttgctgctaggggcgtggatcggcacacggcactaagacgcaggaagctagaatcggactgcggacctcaaggcgcgcatggactgagactgctgctagatgaaggggaggagcgctctctacaacactgaaaggggtgcactacgacgagatcagccgcatgctaaacatagagaccagttgaagggcacatcgagcccaacaacggggtcaagcgggagctggccacggtgaacaaggccaacatctggacctacttgccctacaggcttgttgcgcacccttacactcggtctggctaacacaagaaggtaccagcgggctacgcgcgcagggcagacgatgccatggctgactcctctacctac

SEQ ID NO: 81349 - DNA, 1423 bp, Zea mays
  Clone ID: MRT4577_174206C.1
ggttgggctactcgaggccgggctggaaaagttcctgacgcagatagttgaagagggccactcccacagccacctccttctctccggtagcagtaacgcagaagaggcaaacgggcagcgagctagatctcgcgtccccgctgcgactgtgaagccaccgtcgtcagatcggacaaggcgccggagcctcagcaatccctgagcagactagaggagtagctaaggcaaagggaggtggcaaagatgctgccgacgaccgcgtccaaggggcgcggggcctcccgctccgccccgccgctcttcggtccctacctccgccgcatcgtcaagtggcaacaaatggatattgaatacacattttggcaaatggttcatctctgtacttcaccaaaagtagtctatcagcacaccaaatatcacaagcaaacaaagaaccagtgggcccgtgatgatcctgcatttgttgttattctgattcttttcctcgtgtttgcaacatcagcttactgtgcagcatatggagagagtgcctcacatgctgctctaacaatcacttcggttgtgtttctccatttcttgtttgctgggatagttttggccacactttgctggttccttacaaattcttacttgagagaggaacctaacagccatgttgttgagcaacgcgtggagtgtgcacacgaaattcttggcaggctctatgcatttgacgttcattgtaactcgttctttcctgcgtttgtcatcctatatgtggtgcagtattttctgtcgcctctattggtcgcgcatggcttctttccagctttgttatctaatctactcttcgtggtggcaatttcttattatcactacctgaactttctaggatatgatgttcttccatttctagatagaacaacattcttcctgtatccgattggtctcgtcatcatcctgtctccacttatgatactaatagggtttaatccgacaagatactttctaagcttgtacttcggttaaagtctacggctagaatgccatgtacaagcaaaaatatggtgattggcgataactaatggcagatctggatacatactctgtagtaaagcattttagatatcttgtgtgaacgggggcgagtgaagttcagtaaagctcggagcattctatggatgtatcaggtgcctgtggcaaggctaacaatggaagacatatagtcttttgattggtatcaaatatcctttttgggtgtcaatttgttgttcataatatgagctgtttgcgttactttgggcccagtgaccagtgtatacttgtagtagaactgctacgtagagtctattgtactatcacatcggcatcagaattgcatcaagttctaccaccagtcatctctttgtcatgtttactgtaaggacattctcgttctcgctaa

SEQ ID NO: 81350 - DNA, 351 bp, Zea mays
  unsure (1)..(351): unsure at all n locations
  Clone ID: MRT4577_174207C.1
cagtattttttcttttagccctcctcttccatgtcaaaactggtagctttgagcctttcatagagctagctattagctattgattcctgcaaaaaaaaaaaaaaaaaaaaaaaaaaaaaaaaaaaaaaaaaaaaaaaaaaaaaaaaaaaaaaaaggaaggaaaaaaaaaaaaaaaaaaggngggccgaacggggcgaccaagcaaatccaactgagctagcgtcgccaaacataacattagaggcactatgaaacaacagccggactagagttaacaaactgttcgctaaaataaaacctacaaaaaaacaattaatttaataaagtaagattgtagttaagaaacccgaa

SEQ ID NO: 81351 - DNA, 623 bp, Zea mays
  Clone ID: MRT4577_174208C.1
agcggcgcagcgccgtggccgcggcaaccctggccccttgcgcctgatggacgtgaggccccgaaccctcgcgtacttcgtggttgcttccttcgccctcgtgtcagtcacattcgtggtgtatactggtgggtggtgggaggaggtggaaggagagggcgcggcgacgctgcgaaaggtcatgcgctccgtaacgccgctgccggcgcccaggatgatggatctgcctcagtttcaaaataaccacaaggaaagtttgtattggggcacttatagaccaaatgtgtacctcggaattcgtgcaagaacccctctgtctctaattgctggattaatgtggattggcttgaaaaatggtcaatattttcttcgtcatgtttgccaagattctgatgagctgagaacatttgggtggacagctcacaatggtagggattatgggcgtcaagtgctggttgatcatggtcttttcctaactactagttttctgaaagagaaaggagagagcagtggttatggtggagactgggccgttcgattggatgctaacaatgagaggtcaggtttaagtgatgctgaagaaagaccacacatttttttctatatgctgatgaaactgaaat

SEQ ID NO: 81352 - DNA, 359 bp, Zea mays
  Clone ID: MRT4577_174209C.1
acgcgttcgagagaatagtatcttcatgttacgtgcttagattggtaagtattataatgcctaattacaatatgcatggtctgttgcagtttgcatgcacatatcgacagtgtgagaataacttggatatgatgtgcttgatgtgatacctgatgtcgcggtgatcatcagctactttatcaacttgatctcaaccctagagcactcaccctgtgtggttacacgcccaactgcctagctctaactgatgattagatgcgtggagacgcagacaactcaccagctataccgattgtgttctcacatgatgcataagcctgataatacacaatgtgatttcgaccaaacttccttatacc

SEQ ID NO: 81353 - DNA, 284 bp, Zea mays
  Clone ID: MRT4577_17420C.1
gtgtacctcgtagtcggccgggagcacctttccacaaaggcggtgggcggtggcgcattccaccccagcaccaccaagcaggtgcagtcagtgtgatgtgcggaccggccgaatattcggagcatgcacactcactcactccactgcccactgcccgacgaggaagtctcacgatctcaacccgcataaatccacgccgcgaggggtagtaacgatcaatccccgtaattatcctgatccacacgcaccgatccaccccctctctggctcgtccctcggcctcc

SEQ ID NO: 81354 - DNA, 163 bp, Zea mays
  Clone ID: MRT4577_174210C.1
agataaccagaaggcgtcctagtaatgacataagtgattcgacttacagtctggaggtgttattttcttccgagacacatggaaacaaatttttttctatgatgattactaaaaaaattgcaaactttatgctacataatgcattatcctatcatcttgaata

SEQ ID NO: 81355 - DNA, 353 bp, Zea mays
  Clone ID: MRT4577_174211C.1
ggttcggtgtgtttttaagctcaagagggggaacattctttccgtgccttcgggatcgcttaagagttgtattccatgagctaaaaataacaagaaaaaaattcctggccccccaagcagttaattgaacaagttgtctttcaaggggtaatactaggaattctccggcagagggggcccgccccgatcactgcccccttttgggggacgtgacgggaaacactgagcgcatccgcgggggctcgactgcgcccctaggcgaggggagcagagaagaagcccctctgcccgatgggcgggggcttgggctcctactggtcgcccggggacccctacgcccgccggatgaaggg

SEQ ID NO: 81356 - DNA, 107 bp, Zea mays
  Clone ID: MRT4577_174212C.1
gtgcaaaggtagggctagtattactagtgcttcgcgagagacccatcgactccagtcgttcagaggtgggcttaggcaggggcggttgcacgcgactagccgatccg

SEQ ID NO: 81357 - DNA, 692 bp, Zea mays
  unsure (1)..(692): unsure at all n locations
  Clone ID: MRT4577_174213C.1
cattgggtacctcgaggccggccgggaaaaaatacaagagctatctagtaacagctcatcaagaaccttctttcgagcgagtgcgtagagcgaagcgaggggacctgcgacggcctcgagtgcaggtgcagcagcagggatggctggagcggtcgctgtgtggctgctgggggcgttcgccaagagtggccgccagacggagccggcgcaggctgctgccgatgcggaagacgcgcggcgccaccgcggaggtgatggcgttggcgcggttgcgcgcgtcagcaacggtcgacgagtccaggagaagaggcggcgggatagcggcgcgctctccggctcggaggagaccgtcgtgtgcatgctcatggacctctacgctccggcgtgacgtgcgtacgtataacgtgcgggggacggcggtgttgttactgcgcgcgtagcggtacgtacggagaccaaaactccaagattggaagggctacaatcctctctttatttaaaattagataaggaaaagattttagcacatcaaattttttttggttttgttgctccccaactagcacataaggacaggtatcttgaggacctgaactgtgtaagtgtaacgctgtggttaattaattagccgtgcgtgccagctgtatcgtttggtttaaaaanaaaaaaaaaaaaaaaaaannaaaaaaagc

SEQ ID NO: 81358 - DNA, 822 bp, Zea mays
  Clone ID: MRT4577_174214C.1
tgggtacctcgaggccggccgggccggaacccgcgcggctaacaaagcagccaagtaaaaaaaaatacaagagctagtaacagctcaagaaccttctttagagcgagtgcgtagagcgaagcgccgaagcgaggggacctgccagtgccacggcctcgagtgcagcagcagccagcagggatggctggcgcggtcgctgtgtggctgctgggggcgttcgccaagagtggacgcctgccggaggcgccggcgcaggctgctgccgacgcggaagacgcgcggcgccaccgcggagatgatggcgttggcgcggttgcgcgcgtcagcaacggtcgacgagtccaggagaagaggcggcgggatagcggcgcgctctccggctcggaggagaccgtcgtgtgcatgctcatggacctctacgccccggcgtgacgtacgtgtaacgtgcgggggacggcggtgttgtttctgggcgcgtagcggtacgtacgcacacagctacacaaggggcaggtatcttgaggacctggactgtgtaagtgtaacgctgtggttaattaattagccgtgcgtgccagctgtatcgtatggtttttttttgttcggttttttttactaggtgtgaagaattgttctcgatcggttgattaacatctgggtcgtccgttctggattgggcgccgttgagagaaaaaaaaaaaaaaaaaagccgtttggtttttttgtttgattttttactaggtgtgaagaatttttctcgatcggttgattaacatctgggtcgtccgttctggattgtgcaccgttgagatccaaaaaaaa

SEQ ID NO: 81359 - DNA, 166 bp, Zea mays
  unsure (1)..(166): unsure at all n locations
  Clone ID: MRT4577_174215C.1
acactcacacagccatctctcccagggggccagggcagcnnagcaanccgncncncnancnacaggcgggggaannaanaganggagggcaaggaggaggacgnncgccngggcgccaaccgcnacncggagcgccagccaancggcacggnggcgcanggcacgg

SEQ ID NO: 81360 - DNA, 345 bp, Zea mays
  Clone ID: MRT4577_174216C.1
atgtcggcatgtgtgctgggcaccctgctcgctccccacgtcgaccctactgccacgcgtaaggctgcccttgctgccagcatggccgacccctcctccttcctcaacaacacggttggcctgctctccggcgctacgtacgggcaccgcgacaccctcgtggatggggtcccctacatcgccggtctcgcacctctccccaacgacctctcctccgcgccacaacgcccccgtcgacccccatcgggcttcaccctcgctgctcgcgcgccgatgggccccgttgtcgactccgcgttggtcgctgccatcgctatgatccagattgttgtggctgcctcatag

SEQ ID NO: 81361 - DNA, 763 bp, Zea mays
  unsure (1)..(763): unsure at all n locations
  Clone ID: MRT4577_174217C.1
gtacgcctgcaggttccggtccggaattcccgggtcgacccacgcgtccgccccacaggcacacccaaacctccaggtgtccaaatggatcagccctgctgccgagctctgtatgactttgaacctgaaaatgaaggggaattgggttttaaagagggcgatatcatcacactcactaatcagattgacgagaactggtatgaggggatgcttcatggccagtctggctttttccccatcaactatgtagaaattctggttgctctgccccattaggatcctgtgctggctggctcacctccttctgacccagatagttaagtttaaccactgctttggtaatgctgcttccaatacatcacgaatgcaggccgcagtggatgagtcaccaagcccacacgtgccctgggttgacccgtgtgctcctccaggagacgcggtgatagatggtatcttccaaggccagtgggcctggtacatgctttaaaacaccatctgagactagccaggagtcccagaactggcttcacagttctcaggaggctgtggttcctggtaacatgcctgtgaaccacatggcagaaaaactctcctcactgaagatattgtctctcacccaggggccatctcaaggtctccagttctccatttacagaggagaaagtcctttntgttgcactttcccttcctaaatatgtgagtcacagaattgttggcaaaaacatcccctcaccagcaagatgtctgctggtttaagcaactt

SEQ ID NO: 81362 - DNA, 143 bp, Zea mays
  unsure (1)..(143): unsure at all n locations
  Clone ID: MRT4577_174218C.1
ggcgagtgttgactggtngaatcccactattatcccaattatttctccctactacccctaatccccacaggtagggtttatatagtaaaatcatccggctctactattaagccaccccaagccattttatggtatctgtctac

SEQ ID NO: 81363 - DNA, 274 bp, Zea mays
  Clone ID: MRT4577_174219C.1
aaaaccaccctgaatagttaattttattttggcggcccttcttgacaaattaagcttttttttaaattgatagagttggagggctccttaacacccaccctttttcttcttttgagaaaataaaaaaattatccccctttctcttgggggattatatgcagcatgcttcccatcccttgggaaattaaatcaactccacctgcttaaagggggcccccccctttttgcattagggcgggggcgattttccctctcctgaattaaggataacccc

SEQ ID NO: 81364 - DNA, 505 bp, Zea mays
  Clone ID: MRT4577_17421C.1
tttaaaaaaattttttttggggttttttttttttttttttttgggccacccttaattctctttattattaaacccacccattaatataaacctttgcatttaaatttacatttttggacccccaccccctccattgtgtagaaggggtaaaaaccaaaagaaattcccaatgggaatttctattacccaccaccccagtaattattaattccataaaatggaatgaaaaaaaataatgccaaaaatttcttttacaccacccacccacccccccaaaaaattataagaaatggaaccgaatccaatcccaccccaccgaaaaaccaaaaaacaacggcggcctttggcttcatctgcattcctaaaccgtggtaaacttccgccataaacaatcaaattaacacccaccgatccaaataaatcttcaatggccccttggattaaaacccccgccgccccccccacaacaatttttctacacccctaagccacccaaacccccaaa

SEQ ID NO: 81365 - DNA, 374 bp, Zea mays
  unsure (1)..(374): unsure at all n locations
  Clone ID: MRT4577_174220C.1
ggccttccgagttgctactgtgtgcggctcgcttgttcacctaacggctagattccaaaaagcggcccnctatgaagatatctagaaagctatgaaagctggttccgagggtaccctcagcaggttcatgggttcttcttaggaagatcagacttctaccacctcacttggtgacaccacgtccagcttctttggcgcctacgccggtagcactctaaacgaccacttgagtgagctcatatcgtagtacgacaacgagtggcgctacaatacccgcgtcggctacctgatccgccacatggtaaaaaccctgtagaggggtgtattccccatgcttctgatgaatgattactagcttgatataccgagaatat

SEQ ID NO: 81366 - DNA, 175 bp, Zea mays
  Clone ID: MRT4577_174221C.1
attgggggaggttgtattgatgataggggagtgtttctacaggcttttaagtattcttgctgttttgagcaacgtacatagaattgtccgaacaaatggctcaaaatatcaaaaaacattcaggtaaaggattttttttcgaaccgacaaaaaaaccctttgaacactgaaacaa

SEQ ID NO: 81367 - DNA, 382 bp, Zea mays
  Clone ID: MRT4577_174222C.1
tttttttttttttttttttttttattagcaaggggattaattcaagggtcatcaacatggtggatcaccaaactctgggttaaaacctcgcaatgatatataggaggccttttgcaaaactcccagcacgctaagcctagaaatgggggtggtccataaccgaatattacatgggcatcacaccccctggggccatatgggggttcaaaagaaagcaatctgactggagtcattttttatttgacaaagcttttaaagaaacgcatggggcaaatttcaaacaacttttgtttggacaaaataccccggggaaaactaccacctgcttgatggcccactgtttttttataaacaagggtccccgggggcaccctggttttag

SEQ ID NO: 81368 - DNA, 276 bp, Zea mays
  Clone ID: MRT4577_174223C.1
aaagttgtgagcggaaccaaccttaaatcgataaatccacttcaaaagccgaccctgaactttcggatccagactggagtcgtctacttggcatacaaaatggccgaatcgacgccgttgctgggcaagagcagcaacactgcattgtgcgccttcgcattcgcaaaggacacgcccaatggcaagcggccccaagccatcgcccaccgcggctacaaagcaaagtatccggaaaacaccatgagtgcattcagagccgctgtggaagtaggtgcc

SEQ ID NO: 81369 - DNA, 291 bp, Zea mays
  unsure (1)..(291): unsure at all n locations
  Clone ID: MRT4577_174224C.1
tttttttttnnnnnnnnnnnnnnnnnnnnnnnnnnnnnnnnnnnnnnnnnnnnggacctcatgttcaagttcctccaaaattccaatgagtactatatgttgaccacaataaaatttccgacggcttaggtcatcgaacaccaanacctatgagccatcggaaatagattatttatgacccagaggggtcatgtggcactgctcccactgacccacgatatggccctgtgctccttctaaaatatgcaatgtcgtaaaggcatcacagtgcaacaacaggaccataaccct

SEQ ID NO: 81370 - DNA, 817 bp, Zea mays
  Clone ID: MRT4577_174225C.1
gccggccgggccgggaacccgactcctccagccaacagcccaagcgaagcgagggcccttgagctcccctcccgcatgacgtccccatggtgcctctcggcaccgcccgccgccccgcccgtggcggctgcgcccggcgccctcggcttctccgcgtctgcctccaccctcgcgcgtgtgccggttcccggaagtaggcggcgcaggtggaacgcgctcgtggtctgcgcggcccccgatggggagaagattacgaagcggtcgcccctggatttccccatcgaatgggagagaccaaaacctgggaggagacctgatatcttccctaagtttagcccaatgaagacaccattaccgcatccattgccagctgatgatcctctggatgatgatgaagaggaagaggaagaacaagcaccacctcaggaggagccacaagaggacgatccagacaaggaagaacctgaggaagatgacccagataagccaaccgagtaattttcgattggcttgaacagtgatagattaggcaatggggaaaaaatgtgctacgtctttggagcgcgcaagagatctcagttctatttgaactgccggcttatataggctctagatgcataagtttgttatatgacctctgagcttttctaaagctatgaaagttctgtttcacggattacagattacagtgcgatatctgtgatgacatgtattctcactttttctatgttttgagtaagcaacgtgtacattgcaaaacctgtatttggtgtagttgcatcattgatttgcgtaaaaaaaaaaaaaaaggccccta

SEQ ID NO: 81371 - DNA, 473 bp, Zea mays
  Clone ID: MRT4577_174226C.1
atagcggaagcttcaaccaactcttcacgagtttgcatcttttgccaccatggcttatctttcaaatcaccatgacccacctctacaagttctttccaccaagcttggagttcagggtctttttggagttcctcatctgacttgtagtagaatgagacatattcttgcacccaggacttgatggcatcccatatctctagcccattcagaagcataaggatagtcctcaatcaaaagacgaactccatggggagcagatgggtccttaaccgcaacttctttctttacaagatcattaggtaatgcttgatcagtgaaaacccagtccttgtaaatgacagcggacatttccatagagtacctaccccacaagaatgttttctctataataccatctggattgaccagggctttccgggcaagtgaattaatattcatggtgtcacggtagtgaggaaaacagaagtttgtaa

SEQ ID NO: 81372 - DNA, 294 bp, Zea mays
  Clone ID: MRT4577_174227C.1
gtgctctcatggccaacaaaagaactgccgcaaaaactgattagaatgtagcccgtgaagctttgagaggtgggggaagcagatacacggactctgtatttaaactttggaggcaaagcaaataaccaaggattttcaagggacccactatagaattctaatgccactgcactgggctaccagaggcagcacaccttgagcaaagcgaaaaagcatatgggtggtaaaaaagggaaaacaaaggagcagaggcaaaaaggtatcgtatagaaaaaaaaaaaatgataccagggg

SEQ ID NO: 81373 - DNA, 1073 bp, Zea mays
  Clone ID: MRT4577_174228C.1
aaaaaaaacgcataaatacaaaaaaaaccagcattggcctcgaggccggccgggttcttaccccgaaggcggtctccactctctccagacagccgccaccgccgccggtggttcacaagcagccggtaggtactcaacccaaaccgcaaggaggacacggaacccaaattccagcacgactcctccagccagcagcccaagcgaacctagggcccttgagctccctcccgcatggcgttcccgtggtgcctctcggctccggccgccgtcccgcctgtggcgcccgcgcccggcgcctttggcgtatccgcgtcggtcaccgccctcgcgcgtgtgccggttcccgccggtaggcggcgcaggtggagcacgctcgtggtctgcgcggcccccgacgaggagaagattaccaagcggtcgcccctcgatttccccatcgaatgggagagaccaaagcctgggaggagacctgatatcttccctaagttcagcccaatgaagacaccattaccgcatccgttaccagctgatgatcctctggatgatgatcaagaggaggaagaggaagaacaaccaccaccacaggaggagccacaagaggatgatccagacaaggaagaacctgaggaagatgacccggacaagccaaccgagtaacttctggatggcttgaactgtggtagatataggcagcgggcaaagatgtgctacatctttggagcacgccaagagatctcagttctattcgaactgtttgttctgccggcttatataggctctagatgcataagtttgttatgacctttgagcttttctaaagctatggaagttttgttttacggattacagattacagtgccatatctgtgatgatatgcattcacacttctatcttaagtagcgtgtacattacaacaagaagtctgcagcaactgttactcggaaaaaacaaaaaaaataagcggcttgttgatttatttaaaaaaaaaaaaaattcggtgtagttgcatcattgatttgtgaaacggatactgagatttttgagtaagcgatgcaagattctgggtcttctg

SEQ ID NO: 81374 - DNA, 959 bp, Zea mays
  unsure (1)..(959): unsure at all n locations
  Clone ID: MRT4577_174229C.1
aaaaaaaaaaacaaaaaaaaaaaaaaaaaaaaatctacagacagccgccaccgccgccggtggttcacaagcagccggtaggtactcaacccaaaccgcaaggaggacacggaacccaaattccagcacgactcatccagccagcagcccaagcgaacctagggcccttgagctccctcccgcatggcgttcccgtggtgcctctcggctccgcccgccgtcccgcctgtggcggccgcgccgggcgccctcggcgtctccgcgtcggcctccgccctcgcgcgtgtgccggttctcgccggtaggcggcgcaggtggagcaccctcgtggtctgcgcggcccccgacgaggagaagattaccaagcggtcgcccctcgatttccccatcgaatgggagagaccaaaacctgggaggagacctgatatcttccctaagttcagcccaatgaagacaccattaccgcatccgttgccagctgatgatcctctggatgatgatgaagaggagagaggaagaacaagcaccacctcaggaggagccacaagaggacgatccagacacggaagaacctgaggaagatgacccagataagccaaccgagtaattttcgattggcttaacagtgatagattaggcaatgggaaaaaatgtgctacgtctttggtgcgcgcaagagatctcagttctatttgaactgtgctgccggcttatataggctctagatgcataagtttgttatatgacctctgagcttttctaaagctatgaaagttttgttttacggattacagattatagtgcgatatctgtgatgacatgcattctcactttttctaagttttgagtaagcaacgtgtacattgcaaaacctgtatttgatgtagttgcatcattgatttgtgaaacggatactgagattttttagtaagctacngaaaaaaaaaaaaaaagcggcc

SEQ ID NO: 81375 - DNA, 621 bp, Zea mays
  Clone ID: MRT4577_17422C.1
tccgatccagcaccgtcgccgcaaacaccacacctcgagagccctcttcgccggtgaagtagcaagcaagatggctggaaggaagggaggcgacaggaagaaggcggtgacccgctccgtcaaggccgggctccagttccccgtcggccgcatcgggcgctacctcaagaagggccgctacgcgcagcgcgtcggctccggcgcccccgtctacctcgccgccgtcctcgagtacctcgccgccgaggtcctggagcttgccggcaacgctgccaaggacaacaagaagacccgcatcatcccgcgccaccttctgctcgccgtccgcaacgaccaggagctcggcaggctgctcgccggcgtcaccatcgcgcacggtggcgtgatccccaacatcaactccgtgctgctccccaagaagtcccccgccgctgcagagaaggaggccaagtcgcccaagaagaagaccaccaccaagtcccccaagaagaaggtcgccgccaaggagtagccgcccctagcttagctgactcttagttccatatcagggagaagatgaggagacttttggttgattggatcctgtatgtaaatgctagtctgtagtggctcattcattag

SEQ ID NO: 81376 - DNA, 903 bp, Zea mays
  unsure (1)..(903): unsure at all n locations
  Clone ID: MRT4577_174230C.1
gaggcggaacccaaattccaacccgactcctccagccaacagcccaagcgaagcgagggcccttgagctcccctcccgcatgacgtccccatggtgcctctcggcaccgcccgccgccctcggcttctccgcgtctgcctccaccctcgcgcgtgtgccggttcccggaagtaggcggcgcaggtggaacgcgctcgtggtctgcgcggcccccgatgaggagaagattacgaagcggtcgcccctggatttccccatcgaatgggagagaccaaaacctgggaggagacctgatatcttccctaagttcagcccaatgaagacaccattaccgcatccattgccagctgatgatcctctggatgatgatgaagaggaagaggaagaacaagcaccacctcagggggagccacaagaggacgatccagacaaggaagaacctgaggaagatgacccagataagccaaccgagtaattttcgattggcttgaacagtgatagattaggcaatgggaaaaaatgtgctacgtctttggagcgcgcaagagatctcagttctatttgaactgccggcttatataggctctagatgcataagtttgttatatgacctctgagcttttctaaagctatgaaagttttgttttacggattacagattacagtgcgatatctgtgatgacatgcattctcacttctatcttaagtaagcaacgtgtacattgacaacaagaagtctgcagcagctgttactcgaaaatctttgctcaggtgtgtttggtcataggaactaaagtttagcatgtcacgttgaatgtttgaatgactaaatatagtctaattgtaaaattagaaaaataaatggtttgatgatttattaagcctaattaatctattnttgat

SEQ ID NO: 81377 - DNA, 299 bp, Zea mays
  Clone ID: MRT4577_174231C.1
ataattattagaagaggggccaaaaggatctctaagttacaggttataaaagggcctacataagggcaaggtccgatatgccccaaaacatttggattggggggggttaaaaggaaaaatcccccccaaagcttgtcaatcccctccaatacatatggattgaaaaaaaccgaacaagccctaacaaaaaaacggcaagttaaaaaacagtaaaaacaggggaaaggggttccaccttgtccccaggaaatctctccgagggacatgggatgtcaagtactttaaaactgcccttaaac

SEQ ID NO: 81378 - DNA, 1146 bp, Zea mays
  Clone ID: MRT4577_174232C.1
ggctaagcagacacgaacgcaggtccggcggcaatgcaacgcgccgcgctcgtcgggtcccctctcgtacctgtgggtccccttgctcagcttgccgtgcggcgccgctgccgcttccatggtggtgttcgcgtgaggtcctcaaccgggaaggacgggaccgggactgggaccgggggcggaagcgagggcggcgacggcgccggtgccgcagcgtcttggctgagctcggcggtcggggagaaagtggacgagcttctgcgccgcgaagagaaccgggccctgctcgagggcgtcgaggacgccgagcgccgcgttgagcgcgcgcgcgccgcgctcgccgacatcgagcgccaggaggccgccgcacgcctcgcccgcgaggaggtccgccgcctcgagaagcggcgcgatgagattgcagagtcccagcgggaattgcttcaagcaagagaaatgattgatgaagctcagcgatccttgtcttctagtcttgacgaaggaagctttggagatatgtcaagtggtgatgttgatgaagataacgagagaatagaatccgtaaaagctgctgcagtttcctctgtcgtcggtgttctggctagtttgcccatatctttctatgaagttgaagatcttccacaactattccttcggtcatcaattgttttcataagttgtgctttgtttggagtcacattccggtacgctgttagaagagatctggataatatccaactaaaaactggggctcctgcagcatttgcttttgttagaggccttgctctgctggaatctggtagaaccttcgagctgagtactgataccttaatatcagttactcttgatgctgcagtcagtgtggttgagaacattttcatatttctgcctgctgctgttgcactggactactgttttaagatgagatttttgagtccctttcctagaagaaaacaatagcttctgtgaagaatatgtatgatcaataacaatcttgatagctcaaatggtcatatgtaacacaaatgatatcttagattcattaaaaaaaacatttcccctcataaaaaaaaaaaaaaaaaaaaaaaaaaaaaaaaaaaaaaaaatataaaaggataaaaaaaaaaaaaaaagggtacctgcccg

SEQ ID NO: 81379 - DNA, 455 bp, Zea mays
  Clone ID: MRT4577_174233C.1
ccaactagcaccatacaaagcacaatagtgtactcaacaacggcagccaaaatattgtgcctcggtgatgctccttggtatttctgcaaatgcctctaccgccaacattttcccgcaatgctcacaagcttctatatactttccttttttccccgcacctcttaacacccgtgtgttttgtgtgtgaaaaacccccttttttaacctccatgatatccacacgcgatttcaggtgtgggatttttctttttaacccactttttctctcacaaaaaaaatatccttttttaaaaaatatccttcttttgggtttttttgggcacaaaaaaaagggggaccacaacaaccaacaacattttgtgctaaacaattttttgtttttttttttaaaaaaaagtatttttttttatacaaaccaattagctggataaaactttttttttttatttggaaaa

SEQ ID NO: 81380 - DNA, 279 bp, Zea mays
  Clone ID: MRT4577_174234C.1
cttgatgggggggggcttttatgtgtggggtttctttttgttttttattttttttttttttttgccacatttaactaggatatgccttgctcaaaaaaactttggttatgattaaacatattttaacacccttggttaatacaccaccacaaaaatgattttttgttcatccccaaacttgttaacgtgggggggctccaggctgatattgtgaacaacgggagcgccactttattgcccttttaaaaaaatttcggtggaaaaaccccctcggggggg

SEQ ID NO: 81381 - DNA, 460 bp, Zea mays
  Clone ID: MRT4577_174235C.1
cccacgcgttcgcccacgcgtccggtgaacccgccgccgccgccgccgcaggaggaggagacgcgccaaggagagcacgcgaggaggcgaccatgagggccaagtggaagaagaagcgcatgaggaggctgaagaggaagcgccgaaagatgaggcagagatctaagtaagctggtggagatggatggtggacgtgatggcatgcttgagtacatacatttcttcggatgcgtttgctcatggagaggcgtgaacctggtgtgcagtcacagtttgccatctgtcaattggcttgtctcggaaacctgcacttcagtaggctatcgtggttctagttatatccagagttttgcactaagacaactcggtctgttttgtgaacctattatgatggagctttatttgctgctaatatcgacctacctatctacctacctgttaagtaattcctgtgtttgtt

SEQ ID NO: 81382 - DNA, 562 bp, Zea mays
  Clone ID: MRT4577_174236C.1
ggaacaaaaggcacaatgcacacttcaccggcattgttctacgttccaagaaagacgacgtgtgtgacggggtacacagctcccaacaccacagcacaagagacgcgtatggagtcactcttctggctccactccgatatatctatatctacagttgcattgctggaccagcttcgaactagttctctcacccgtacgattcgaacaaccgatggagatgcaggatactacaaatcctaatctggaatccctcagtgaatgctactaacctgtcacgccaatctcatctaatcatgaatgatgacgatgcttacattcacactaaacctggactggattctaccattttttatttttttttgaccaccgcctttcaaatccattgcttgtagaatgaaggatacccgacgggagaacatactgctctggactggcacccttttaacaacgcttgtgcacgtgtctcctgcaaagctctcgaggggacatggcgacaacacatttttcgagcccaatgcatttcttatgtaagactgagtgaaagttagctgactggcaatct

SEQ ID NO: 81383 - DNA, 482 bp, Zea mays
  Clone ID: MRT4577_174237C.1
ggcgggtccgaggttatcgccatttcgatatacgagctcctcgtggacgacactcgctgacttcgaggtggatgccgccgccgtcaatgcgctggcgctgcccgtgaagaccgccttgcagatggaggataaggctgagctggtcgaaggaggagtgtgcgaggttctacggcaccggcttttgaaggagtccgtcgcagctgcacctcaacgacgacaggtgaatccggacaggcccgcgtgagagctatccacaagctcctccggtgatgcgtgacacttgccttcgatttccgcgagaacgaaagaggatcgagtgaaagggaaacatgcttgtgcgttcgatactacgattattgaacttaccttttcccttcttttttgcttgactggaaggggaaacagttctcttctattccacaacaatgatccgaacctgcaatgcaataataacatacgcatgtgatatatattaacaatgt

SEQ ID NO: 81384 - DNA, 875 bp, Zea mays
  Clone ID: MRT4577_174238C.1
ccgaatctgagcctcgcggtgggcatgtcctcgtcctcttccttccccacctctcgcttccccttcgccgccggcgccagggcccccggcggcagaggcggtgccggtggaggcgggagcagcgtgcggccgtgggggtcgaccggcgggacgtcggtgtcttcatctgggaaacggatacagaaggagctgctggacctcaacgcctccgactgctccgcggggcccaagggcgacaacctgtaccactggctctccaccatcttcgggccccaaggatcgccatatgaacgagggatatttttccttgacattgtgtttcctcctgattatcccttcaaacctcccatgattctcgtaactttcaaaacaaggatttaccattgcaatattgattccacccgtaaagtgcatttggacattctgaaggatggttggagtccagctttcactatttcaaaggtgttattggccatcaaagacatcatcaacaatccagatccatacaccccgcttgtgatgagcatttcacgtcagtatctgactgatagagctaaacatgatgaaacagcagctgagtggacaatgagatttgcaagatagaggattctgtttgcatctaagcacgattgaccttgtaaaaaaatcttaatgtggcctgacgcctgaaatggtgaatgttggcaaaggagccatcagccatgtattatttgatgtgagttgtgacataaaggtgtactttatgcttgagtgttctttaatcgctgcttttaggtggagaataatctttttcgattttgcacttctgccaaagttgcaccctgaactcttcagaacttttcttccgagtttatttctaaaaatggtttctattg

SEQ ID NO: 81385 - DNA, 282 bp, Zea mays
  Clone ID: MRT4577_174239C.1
tcgccctggtgctagcgctactctgcgctcttttaccgaaaccccctctgcacagggtgcatatgtaacttgaactacagcgatcccgacaggtttttatatgaaccgccgactactactgcggctactgttgacctacacacccgtgccgctcgggcagctcccccaccaacaggggatgcttctgcagtgcatgaaccacacgagactgcccagcatgccattaagctattttctggccttgtcctactcctactacaactgctaggtcaagaacttcta

SEQ ID NO: 81386 - DNA, 386 bp, Zea mays
  unsure (1)..(386): unsure at all n locations
  Clone ID: MRT4577_17423C.1
tataacttccctttttcgttttttcacaacaaacngcaaacacgagaaggttcatattcaaatttacattatccacttataataagtagcattctaaacaacactctacggccaccagtgcccgactactacgaccccgaatttatgtcactcataaaacaatgctcgtcaacacaaccatcttaactgccaaacttcacaaaaatttctaataatctacactacatcgcctcataccataaagttcaacaacacttaaggaccatcttcactcaaaatttttaccaaatcaatatacaatcaaacttgcaacttacattcactttccctcaatttactccatccaacatatataactaacatctgctcaataccctttatttttt

SEQ ID NO: 81387 - DNA, 252 bp, Zea mays
  Clone ID: MRT4577_174240C.1
agcttcagaggttaggacaaataatgtagtattctgtccccttggcccttgcatgatcaatgcgattagtgagggttgctgtgtcatattccgtggtgtaaatgtaatatgcgaaaaatggtatggcaatttacgcatgtcctgtaaatgccagtaatacccttaaatgtacttactacattgtaaaccaatgctggaaaatgaggttgaatgctggatggggctactagacaaaaaataaaaaaagggggg

SEQ ID NO: 81388 - DNA, 934 bp, Zea mays
  Clone ID: MRT4577_174241C.1
ttgggtacctcgaggccggccggggtgggcatgtcctcgtcctcttccttccccacctaccgcttccccttcgccgccggcgccagcgccagggcccccggcggcagaggcggtgccggtggaggcgggagcagcgtgcggccgtggggatcgagtggtcgaccggcgggacgtcggtgtcttcatctgggaaacggatacagaaggagctgctggacctcaacgcctccgactgctccgcggggcccaagggcgacaacctgtaccgctggctaagagctccaaggatcgccatatgaacgagggatatttttccttgacatcgtgtttcctcctgattatcccttcaaacctcccatggtaactttcaaaacaaggattttaccattgcaatattgattccactggtaaagtgcatttggacattctgaaggatggttggagtccagctttcactatttcaaaggtgttattggccatcaaagacatcatcaacaatccagatccatacaccccgcttgtgatgagcatttcacgtcagtatgtgactgatagagctaaacatgatgaaacagcagctgagtggacaatgagatttgcaagatagaggattctgtttgtatctaagcacgattgaccttgtaaaaaaatcttaatgtggcctgacgcctgagatggtgaatgttggcaaaggagccatcagccatgtattatttgatgtgagttgtgaccacaaaaaaaaaaaaatgatccagctaaacacgatgaaatagcagctgactcaacaatgagatctgcaagataggcgatttgttcgtatctaaacatggtcgacatcgtaaacacacaactcttaatgtggcctgagatggtgaatgctggcacatgagccatctgtcgtttgatgtgacgcgacataaatgtgtactgtatg

SEQ ID NO: 81389 - DNA, 406 bp, Zea mays
  Clone ID: MRT4577_174242C.1
acagcatatttcattggtaatggccacaagggccaaagcaggcctgcaaatccctcccctacggggacaatctttgggcccatgccccctggttaacaaaaaccgggacatttcccgcaggacatataccaatacctttgtttacgggccccccctaccagtttgtttatgcccccgctcacttgccggggaccaaattggtagcgtaggcccaagcctttttgttgacagggtcaacgagggggtcggcgagggtttaaacgggacccttgccggggaccatggcccgccccaaaaaacccaacatggaaaacatggggagggggccgttcttgatctccttgaccttgagccccccaaaccccccccgggtcgtcggggagccccagcgggtcaaaacttcccc

SEQ ID NO: 81390 - DNA, 398 bp, Zea mays
  Clone ID: MRT4577_174243C.1
ccaaccctccgagaaatcaaccggcaagggctccaatccggcgaacaacttccgcgtcaacctaaccgtcctcctccgttccgccggttggaacggcgttcaaaaccaacttccccactaagttcatcaagggccgcgtcaattgcaaaacttgcggcgccgggttcgtaacaaatgtcaccgagtaaatcgcgggcgcaaaggtgaggctgagatgcaagcacttcggcaccggcagctcgagcgctccatcaacggggtgaccgacgggaacggcacgtacacgatcgagctcaaggacagccacgatgaggacatctgcgaggtggtcttggtggagagccgcgcaaagactgcgatcaggtgcaggcggacagggaccgcgccggcgtcctgct

SEQ ID NO: 81391 - DNA, 205 bp, Zea mays
  Clone ID: MRT4577_174244C.1
acccgtgacgggactccttaccattaacactccctgcgtgcggtgcgcctgcttaaggaggggaaggacagactctcaacgaaggagagaccgggccgcagtttgtatacatgtggcatgccttctagccaggaaaaaacagaacaaatacaagctaattgcggttctaacaaaatctaatcaaactgtggcgagaaggcgcaat

SEQ ID NO: 81392 - DNA, 461 bp, Zea mays
  Clone ID: MRT4577_174245C.1
atcttcggtccgaatatccctgaatatgactctcgcgcccaacgcaggccggcagggagatcaagagggcgctccacctgcgccgacgcgatgcggtcgcaatgggaagaataacacgatgatcagcctcaagaggaaccgacccaacacgacctcgacatctaactacgcgcatctcagccacctacgatgacgagcttctcctgcaccatgagtgtaatgcccgtacatggattgtatccctttgcagacgtgcttagctggagacgtagaaaaagccaaacgtcctgtatgatgaatctctaagatgatctgacacagattctatatggcaatactgaagataattagtatgatgctctgaccctattgataatgaacagaaaacaccggcctaggtcccacgagatccatgtctcgtaccctttagtgaaactgaatagaccgctatgacatcaatc

SEQ ID NO: 81393 - DNA, 531 bp, Zea mays
  Clone ID: MRT4577_174246C.1
ctcttccttggcgtttgatggttgcctcgtgactctactgctagtgtctctaccccatctattctgcaggtccttgatcaaatcgtctcatcttttgccgggtctacgagaccatggtcccctctcttggacgtcctcgtttctccatttggcgttcttccctccctggaggattcctcccctcacggggcgttggcggccgtcgtttggaagcctggatgtgtcgccctaagatgatgtactcacgactgtcgtctgtcagattgaactcggtgcctaacagtctagaggaatggaggtcgctggagtggtgtcgctcagtggtggatttagttagtgctatcattttgctcttgttttcctgttttccggtgggccgtgttaggccaacgctcattgctgttgtatctcctcttttgtaatctctgttttgcttggtgtaatcttcgagccgtttgggctactgtaagggttttgcctcgtttccctaataacgaggttgttgatgtgtggctttgccatgcgaatatg

SEQ ID NO: 81394 - DNA, 1313 bp, Zea mays
  Clone ID: MRT4577_174247C.1
cctgtgccgcgctcgagccggccaggccgggacccccttccttcccattcccactgctcggattgctttccccacctccaccgccaccagaccagatagcaagcaaccgacccctcctcgctgtattcgcagggaaggagaagatggagcctggccagagcgggactgagcaggcctctccacgcgggaacgattgggaggtcgtgcagctcaccgcgtccgcatacgccgccgcgcccgctccgaggaagcccgagccctccgacgaagcggaagctaagagatacggcgcaaagggggacgatctagccgccggcctactcatgtccggccacttctccgtgtctcagagcgaggtcgagagcctcctcgtaggcgccgacaccaaagaaccaccgcccaaggacaaggaggagccttgcgagcatactaagctgctggaggacgacgtccccaccatcccgttcgatgacggcaaggcgctgaaaggcatgggtctggtcggggaagagccggccgggttctcgtcgcctgtctacagctccatcacggagagcaggagtgacaagaggagcgaggagcctactactctgcatagtttcaaccccgtgactggctcaacaaaggtcgtctcacctgacgagcagagcgagcctgctgctgggtctgggtccgggtctgggtcaggcccgcgtgaagcgtggtggaagaagcagcttctctccctttacaggaacgccaaggagagcaagcatctctggcctatcgtcgccaccactgctgctttggtgggcctggcgtatctggggcggcgctggcataagggcaggctgcactttcagctgctcaagatatcgccttctaccaacaaggagaaaatcagcgacgcggttggaccgttaaaccgcatcaacgacattctcgttgctggcaaccacccaagtcacggtgtccatgggcatgcccgtgcaggctgaatgcagtcagttcgcgaacccatcgggcgtcctggacccatatactatcatgtgtcgctttgagaatcggctcaagacaaaccatcgggcaggactggagtagttgtccaaggactgaggatgtttatgcagacacaagtatgtttggtggctcgatgtatgtgaattccaaaactccatctgggtatgtaaatatttgtatgggtttagtttggttgctttttcgtttggtcatctcatgaaacctctgctgatgggttccttgtcccaaaaaaaaaaaaaaaaaaaaaacaaaaaaaatttttaaaaaaaaccccccaaacaaccccggccgtt

SEQ ID NO: 81395 - DNA, 1398 bp, Zea mays
  unsure (1)..(1398): unsure at all n locations
  Clone ID: MRT4577_174248C.1
ggacaaggaggagccttgcgagcatactaagctgctggaggacgacgtccccaccatcccgttcgatgacggcaaggcgctgaaaggcatgggtctggtcggggaagagccggccgggttctcgtcgcctgtctacagctccatcacggagagcaggagtgacaagaggagcgaggagcctactactctgcatagtttcaaccccgtgactggctcaacaaaggtcgtctcacctgacgagcagagcgagcctgctgctgggtctgggtccgggtctgggtcaggcccgcgtgaagcgtggtggaagaagcagcttctctccctttacaggaacgccaaggagagcaagcatctctggcctatcgtcgccaccactgctgctttggtgggcctggcgtatctggggcggcgctggcataagggcaggctgcagtttcagctgctcaagatatcgccttctaccaacaaggaggtaaattgcgtggaactgtttgccaaatactacattacaaaggaaaattgcattatgttgtctgcatcacagctgatgacctaagaaccaacttctcccgacatacctgcggttggttttcttatccattttctgatctcgttgcgtgtcgtcgcatcatatactatcatgctgtcctgcatgatttgtcttaagactgaacatgccagcgaagagaacttcatgtcgaatggctcatcatgtatgctacagcacaagaattttgggtgtttacatgtatgttagtgtatacgtttactagcattctgtagcaatgtgtaccgcactacttccttatctttttacaaacaagctagtgtatcagtttactagcaaccacccaagtcatacatgtgatggggcctcaaaatgttggagcatccctcgttttttaatggcgcctgcaaatgctaatgaacgcacactcttctttgcgtttcagaaaatcagcgacgcggttggaccgttaaaccgcatcaacgacattctcgttgctggcaaccacccaagtcacggtgtccatgggcatgcccgtgcaggctgaatgcagtcagttcgcgaacccatcgggcgtcctggacccatatactatcatgtgtcgctttgagaatcggctcaagacaaaccatcgggcaggactggagtagttgtccaaggactgaggatgtttatgcagacacaagtatgtttggtggctcgatgtatgtgaattccaaaactccatctgggtatgtaaatatttgtatgggtttagtttggttgctttttaaaaaaaaaaaaaaaaaaaaaaaaaaaaaaaaaaaaaaaaaaaaaaaaaaaaaaaaaaaaaaaaaaaaaaaaaaaaaaaaaaaaaagncgccgtctagaggtccaagttacgacgcgtg

SEQ ID NO: 81396 - DNA, 532 bp, Zea mays
  Clone ID: MRT4577_174249C.1
acctcttcgtataataacggcccctccatcttcaacttcaagtgagcagaactacacaaacacttacaaaagagcagaatggctgcgtccgacgagtcgaccatggcgcggacgaggtggcaggagatgacatcgggcggcgtatcaggatcgtcgagttagacgtgtctgccggagcaagaccggcacggagacctgctgggcgtctacgaatttgcggagtccatccgcctcatcgatcttagacggatcactcactcctacaaggcctagaggctccgggcgggtctgcatacctggagcttcttcctgaccaccaaacatgcgatcgacggctctctcatggacgccatgatgagcgtgtggagggagatcttccggcagccggcggacgagaagcagaaatgcagcaacctggtgaacggcagcgtcaaagactaccaggtggaagggtatggaagtgacaaggtggtgcccgaggatcaggtcctcaactggagcgaccggctgcttctgatagtgaaccccggaa

SEQ ID NO: 81397 - DNA, 552 bp, Zea mays
  Clone ID: MRT4577_17424C.1
acttcgctcagagcattccgatctagcaccgtcgccgcaaacaccacacctcgagagtcctcgtcgccggagaagtagtagcaagcaagatggccggaaggaagggcggcgacaggaagaaggcggtgaccaggtccgtgaaggccgggctccagttccccgtcggccgcatcgggcgctacctcaagaagggccgctacgcccagcgcgtcggctccggcgcccccgtctacctcgccgccgtcctcgagtacctcgccgccgaggtgctggagcttgccggcaacgcggccaaggacaacaagaagacccgcatcatcccgcgccacctgctgctcgccgtccgcaacgaccaggagctcggcaggctgcttgccggcgtcaccatcgcccacggcggcgtcatccccaacatcaactccgtgctgctgcccaagaagtcccccgccgccgccgagaaggaggccaagtcgcccaagaagaagacctccaccaagtcccccaagaagaaggtcgccgccaaggagtagaattccccatagcatagccatt

SEQ ID NO: 81398 - DNA, 322 bp, Zea mays
  Clone ID: MRT4577_174250C.1
gccgggctcggatcgccagacacactatagaccacatccacgtcagccacatcactagctagctgtgcagaggcaatggcgtccaaggttgatttggtggtggaggtcaagtccccggctgacaagctgtgggcggcgctgcgcggctccacggagctgttccccacgatcttccccgagcagtacatgaccatcgagaccgtcgaggccgacgctcaagcccgccgcgagcgctccgcctcctcaagacgcctcatcccccgcccacgctgacccgcccaccgaccccccctccccctcccccgctcgcccccgccgcccc

SEQ ID NO: 81399 - DNA, 324 bp, Zea mays
  Clone ID: MRT4577_174251C.1
tggacgttgaccttgctctcctggggctcgctgagagcgccagctgcagaacaagcgagtctctgagacatgccagacaccaccgtgagatctaccatctcctgattatatgactactacgcactatctgccgccctaacagcagacgcacacatggcaataccccactcaaccaccttagctaagaccgatgccagcaacaaggctgacaccaacaaccaccaatgaaggcctctttgcaaggaccaaaccacatgcgaaagaccccatatagggctatctgtcgatgctctttgggcccagggggcttttataatggcgatc

SEQ ID NO: 81400 - DNA, 302 bp, Zea mays
  Clone ID: MRT4577_174252C.1
ctaaggccgtggaattcatacaagacataatattcagattcgggataccaaacaacatcataaccgacctaggatccaacttcacaagttcagagttcttcgacttctacgagcaaaaaagcattcagatcaagtatgcttctgtagcacatccaagagccaacgggcaggtcgagcgagccaacgggatgatactggaggcactcaggaaaaaggtctttgataagaatgaaaagttcgcaggaaaatggataagggaattgccctatgtcgtctggagcctaagaacccagcctagctga

SEQ ID NO: 81401 - DNA, 387 bp, Zea mays
  Clone ID: MRT4577_174253C.1
ccaggacgtgcctcaacctcaccaacgccgtctcggggatcggggtgctgtccatgccgtacgcggtggcgcagggcggctggctcagcctggcgctcttcgccctcgtcggcgccgtctgctactacaccggcaccctcatcgagcgctgcatgcgcgccgacccgggcgccatcgccagctacccggacatcggcaagttcgccttcggctccgcggggacggagcgccgtcgccttcttcatgtacgtcgagctctacctcgtggccatcagcttcctcgtcctcgacggcgacaacctcgacaagctcttcacgggatccagcgtccggctcgcgggcgactaccggctgcaggggaagcagctgttcatcgttctggcggcg

SEQ ID NO: 81402 - DNA, 431 bp, Zea mays
  unsure (1)..(431): unsure at all n locations
  Clone ID: MRT4577_174254C.1
ctacgcgaggaccgggcattggacaatttgcacagcacccagggacgcccccggaggcgcgaaagacagaagacacgggaaggacccgcccaccaccaaaccacagacnaggggcacccaangggcagaccgccaaaaggaggagcgaccatggccgccagcggacagcagcgaagaaaagacgaggacaggggcggacccaacacagccggcgcaacgccgacaacaaagccgagccgacaggctgtggcgcccgacaggagcccatggacaccacgcagcgagatgagaagagtgagaggaagtgctgcgagcctggaagcccgaggaaccctaatccatgcatcgaacacaaaacaaggagggcagggcaccgcgacccacacggactacatgaagagctaaaccaagcacaacaagcagcaacgagc

SEQ ID NO: 81403 - DNA, 240 bp, Zea mays
  unsure (1)..(240): unsure at all n locations
  Clone ID: MRT4577_174255C.1
gcggcgctgaggcggcgggnngcggtcgcaggatnnctcgcgggcgtgaaagaagaggagggtgagagggggtcggagggggttgcgctcgtgctcggggaccgggctggtggagctgtggggcctctggtgctctacgcnctgatcggagtcgtggctgtgggcnngacncgctcgctctcgctccctgtcgcttgncttcgcctcggttcctcccctcgctgtggtcccgctccctct

SEQ ID NO: 81404 - DNA, 271 bp, Zea mays
  Clone ID: MRT4577_174256C.1
cggactcgtgggctcgagcggtttttttttttttttttttttttttttttttttttgttgtttttttttttatggtggttgttttttttttttttttgaaaaaaaaaaaaatgctttttattttaaataaaatttagttttttaccaaaaaaccatttttattaagcataaaatttattttatttaaaagctatactctatttattccatatttacaagccaaacctctatgtttctaacttttgcatttaggaaaacatattaaaaattt

SEQ ID NO: 81405 - DNA, 498 bp, Zea mays
  Clone ID: MRT4577_174257C.1
tcaagataacaaagagaggaacggtggaaggactggctcacctggaacagcttcagaagagaccgacaggacagccagaggatccgcgcgtgtctgcccttctggtacgtagcagatctgactaacggcgaagcgccggccgcacccgacgcgccatccttgggcggcgtcactccgtcgcagatccggttgcccgcgccgttcgtcgcagatccgattcgagccgtccaggtcgcggcagcacgcacgcccgacagctgtggacgaagccatgtccacctgtacttggtttaagaatcgctccgctgtcttccacagccgctcagccgatctcatccatggcctccggcgcacggctatgcccaggagacacgccctcaacgaagatcagtgcatataagagataagtatctcgactattccatagcacatgtatgcatccaaggcctgttccccaatatcaatttgtgcaggattcaaaggaactttaacctgagc

SEQ ID NO: 81406 - DNA, 535 bp, Zea mays
  Clone ID: MRT4577_174258C.1
aagcagcaacgcatatctcaaatgggaccaatatcaggagcaaatatgaaccagacagaatgaccgctcacgatgacgacgagataagccaagtactatctacaagggggggatgagatgcacacaagcgcaaccgtgacgatggtatagaaaccgttgctgcaccaaggaaaccagatccggccaaaaggcgacgaccacacggacagcacctggacaaatatgactactactagtactagtggcaaggaatccaataaataggtctactgcagcggcggcagcggcgggggaagtactgctaggtaggctgtaaggactagggcccattggctcactggccgacggaagggaagaggaaggcggaggaggtagcgactagagccgtggttgaaggtgacgacgccaggcacggggccgagacggagcttggggcgggtgcctaggccgcggggggcaccgagaaagatacggccgccataacgggggcaactgctagggccttcgattcgactccggccattgcttgcttcgc

SEQ ID NO: 81407 - DNA, 544 bp, Zea mays
  Clone ID: MRT4577_174259C.1
gaactaaactttgttcggagtaaccaaacactctctattgcgggtgttgatttattatcttccatcagtttccaggacatatatgcttacaaatggaggtgaagtaacagaggaaagagaggcatagtggggggccacaggacacaagcatccacgaaaggttctctcctctgtccagaacccagacaccgagagggtaaacagaagtgacagcagcagctgtgctacagcagtgcagctcaccacataatagtttgtttactgtggataaacacatctcgctcaggcagtcaggctgtctccaatagcacatctccccctccccctgtcgtctatggggtggccagccatgccccctcgccgtacaatggcgcccctactccctgcatgtaagcagtggcgggcccaggatttatagtatgggtattcgaaaattttctaggatgatgatttttaaagactaaagtttttctactggcatacatagataattatttgtatataacatataattaagcataaacaatataggcataactatttc

SEQ ID NO: 81408 - DNA, 758 bp, Zea mays
  unsure (1)..(758): unsure at all n locations
  Clone ID: MRT4577_17425C.1
actcacccagagcattccaatccagcgccagcaccaccgccgccagctccacacctcgagagggacgcctcgtcgccggagaagcagcaagaagaagatggccggaaggaagggcggcgataggaagaaggcggtgacccgctccgtgaaggccgggctccagttccccgtgggccgcatcgggcgctacctcaagaagggccgctacgcgcagcgcgtcggctccggcgcccccgtctacctcgccgccgtcctcgagtacctcgccgccgaggtcctggagctggccggcaacgcggccaaggacaacaagaagacccgcatcatcccgcgccacctgctgctggccgtccgcaacgaccaggagctcggcaggctgctcgccggcgtcaccatcgcccacggcggcgtcatccccaacatcaactccgtgctgctccccaagaagtcccccgccgccgccgagaaggaggccaccaagtcgcccaagaagaagaccgccgccaagtcccccaagaagaagaccgcagccaccaaggagtagccgtccccgtccccatagcctagccagtgttgctgctctgttccatttctcatggacaagatgagtagtagtcgtttggttggcagatctgtatgtagtgcctggtagtctctagtgaccctttcctcagattcgtcgagcaaaagggtgggcattgtatctctgatttctgtgngaaatactatactanagatgcatccatctgaatcttagt

SEQ ID NO: 81409 - DNA, 307 bp, Zea mays
  Clone ID: MRT4577_174260C.1
tcgctcacacattacagtcatgcatgtgcaactttgaactaattcaaactggacaactgctatgggctcatataatctgatataggatgactgatcgtacctgatactcttattaccggcgacatattagagctaatacttgcataacaccttgacatgcttgaagagcgcattaacttgataaatagctgacacggactatgaccgctcaattgatgatacataatcacttaaccgatcgcaaggtctacggacacgagacgcatcatacatatctctagcctatcaactttagatagtaacattg

SEQ ID NO: 81410 - DNA, 816 bp, Zea mays
  unsure (1)..(816): unsure at all n locations
  Clone ID: MRT4577_174261C.1
tgggaccctcgaggccggccgggccgggaattcgaatgcggaactcaaatttcggtttccctcgcgtcccgcccacatcctccgcagccgccgcagccgccgagccgagctccaagcggaggagaataggagagaccaccgatccgccgtcggagatgagggaggaggcgctggagcggctgcgcggggtggtacgggacagcgccgggaagcacctctacacgtcggccatcttcctcgccgacaaggtggcggcggccacgggggaccctggcgacgtctacatgctcgcgcaggcactcttcctcggccgtcaattccgtcacgcgctccacctcctcaacaattctcgcctgctccgcgacctccggttcagattcctcgccgccatgtgcctcgaggagttgaaagagtggcatcagtgtttgttgatgcttggggatgcaaaagtggatgagcatggaaatgtccttgatcatgatgatgacagtgatatttattttgataaggacgcggaagatcatgagatcaatatcaaatcagctctatgtttcttacgtggtaaggcatatgaagcactggacaaccgtgatcttgctcgccaatggtacaaggcagctgttaaagccgatcctctgtgttatgaggctctcgaacgtcttgttgataattatatgttgacatgtgaggaagaatctgagttattatcctctctgcaatntgnggaagaagatgggtggctatcatcattctactcgtgtttgatcacgaagcatgaaaagaatattttagttgagcaaattcagaaacttgaag

SEQ ID NO: 81411 - DNA, 420 bp, Zea mays
  Clone ID: MRT4577_174262C.1
ggcatctacaggccctcttgagatctttttcgtaggcgcgccatcggggcaccccgcatcgtgcgggaagctcggaacgcacaccggaaccgggaagacgctgagcctacgcactcaagaatggacagctacggcggaaactcatgacttccaaactggcagggattgtgaaggtatagcccatctttacgaagactatggccaacaagggagcgaactgagcaaggggatggatgccctaggtctactaggcacacgtgacaaaaggcttcaacgaggagtagaggaggcacccctgcaagaacccacgaagaatcttgcaacatgcccggtgacaaggctgtcggcacacccgggaggaaggaagaccacatcaaggcgggtaacatggatgatggggagataaagcaagcaggccca

SEQ ID NO: 81412 - DNA, 857 bp, Zea mays
  Clone ID: MRT4577_174263C.1
ctcgaggccggccggggtttttcgacgtttggatgatacgttggtggaaagttatggtctgcttccaagccgaggtgttagtacaacggaagctttaggtattttctcgtgggcatgtgggggaccacaatcatttagacagataaagaataagtttggtcactctttggaaactattagtcgcaagtatagtgaagtccttaatgtactatataagatgtcttctgacgtaatcaagcccaaagacccaaatttcatagagattcaccctagattgcgagagagtagattttggccccatttcaaggattgcataggagcaatttatggaagtcactttcccgcttctgtcccggccacggagcaaacaaaatgtattggtcggcacggttacacatcacagaatgtaatggtcgtttgtgacttcgatatgaggttcacatttgttgtcacgggttggccaggttcagtgcatgacactagagtattacaagatactttgataacttatgcggacaggttcccgcatccaccggaaggtatataagtatgttgtacttttgtatcatacgttattcatttatgtcatatgtatgtaacttgatatttttgtttgtgcgggtaaatactatcttgtggattctggttatccaaatagaaaggggtactttgcaacttataagggtcagaagtaccacatttcagaatggcaaaatgcgaggcaacctattgggagcaaaaaagtattcaactttgcacactcttcgctacgcaatgttatagagcgatcgcttggggtgcttaaatgaagtggagaattctcctaagtctcccttctttttcgcttaagaaacatc

SEQ ID NO: 81413 - DNA, 353 bp, Zea mays
  Clone ID: MRT4577_174264C.1
ggaccacgacgccagcgcggcgaccaccagcccggcgccctgcctctggagcagggtgatgccgcgacgcagcgtggcgcgagagacgagcaggtcgtagacgggcacgaatagcgcgacggcgaggtagaacacggcgacgatcgacgccggggggggggtgaagtgcttccccatgtggaggtccatggtcgacgcctggaggaacgtgtagtttgtaagctccgtcaccatggtgaatcccacggtgccggtgttccacacggggatgatcttcaggaggcacttggcctcctcgccctgctgctcgctgcgctgtctcctcggtctggccggggtgtcgttgggccgtt

SEQ ID NO: 81414 - DNA, 753 bp, Zea mays
  Clone ID: MRT4577_174265C.1
atgtcttcagacgtaatcaagccaaaggacccaaatttcatagagattcaccctaggttgcgagagacaagattttggccccatttcaaggattgcataggagcaattgatggaagtaattttcccgcgtctgtcctggccacggagcaagcgaaatatattggtcggcacgggtacgcatcacagaatgtaatggccgtttgtgacttcgatatgaggttcacatttgttgtcacgggttggccaggttcagtgcatgacactagagtattacaagatactttgataacttatggagacaggttcccgcatccaccggaaggtaaatactatcttgtggattctggttatccaaatagaaaggggtaccttgcaccttataagggtcagaagtaccacattttagaatggcaaaatgcgaggcaacctattggtagtaaagaagtatttaactatgcacactcttcgctacgcaacgttatagagcgatcgtttggggtgctcaaaatgaagtggagaattcttctaagtctcccttctttttcgcttaagaaacaatcgaagatcattattgcttgtatggcattgcataacttcattagggacagtgctctacacgatagagactttgatcaacttgtaccaaatagccttggtcatgatgtacccgtaggtgagagtagtagtaccacatctgatgagttagacatgagtgcatttcgagatgcactggctaatgcattagtgtcgtaa

SEQ ID NO: 81415 - DNA, 660 bp, Zea mays
  unsure (1)..(660): unsure at all n locations
  Clone ID: MRT4577_174266C.1
ctcgagggccggccgggaanaaattcacatcaaagaaaaataaaaatcccactataacacatacacaaaaaaaaaacaaaaaaaaacaaaaaaaaaaaaaaaaaaaaaaaaaaaaaccctcgggggttggaaacccctaccccccttttctcccaatcccctcgagccccaacccgaggaaaggggaggaccaatgccccccggcgggttgccgacaaaggggggcgcgcccgcggcaaaaaaaaaggggccgtttcctttcccaatcgatggccccaggccggggggggacaaaatctggggggccccccccctcaaaaagtcccggcaggagcccttcagggcccccggggttttgttttgtaacctcggcaactcggtcaccttctttcgggaaaaaaccagggcccccgtccccttggagggccctttccccaaaaggacccggaggtccttgcccaaaaagtttttgaaaaaccccaccgggcggatttgcttccccgggtttgttgccaaaaggacccgcaacgcctaggacccccgttacttcaactttgttgaaaaggaggccggggaaaaaatttaatttccccctcacctttttttttcgattggcccctcttgcctttttgaaacccggccccccgcaattttcccaat

SEQ ID NO: 81416 - DNA, 2536 bp, Zea mays
  Clone ID: MRT4577_174267C.1
ccggccgggggtgacccaccctgacgagacatggcactgctgcttcttttcccttcgaaaccatcccgaaccctaaattcgaatgcggaactcaaatttcggtttccctcgcgtcctgcccacatcgtccgtatccgccgagcctagccccaagcggaggagaataggagaggccaccgatccgccgccggagatgagggaggaggcactggagcggctgcgcggggtggtgcgggacagcgccggtaagcacctctacacgtcggccatcttcctcgctgacaaggtggctgcggccacgggggatcctggcgacgtctacatgctcgcgcaggcactctttctcggccgccaattccgccgcgcgctccacctcctcaacaattctcgtctgctccgcgacctccggttcagattcctcgccgccaagtgcctcgaggagttgaaagagtggcatcagtgtttgttgatgcttggggatgcaaaagtggatgagcatggaaatgtccttgatcatgatgttggcagtgatatatattttgacaaggacgctgaagatcatgagatcgatatcaaatcagctctatgttgtttacgtggcaaggcgtatgaagcactggataaccgtgatcttgctcgccaatggtataaggcagctgttaaagccgatcctctgtgttatgaggctattgaatgtcttgttgataattatatgttgacatgtgaggaagaagttgagttattgtcctctctgcaattcggtgaagaagatgggtggctatcagcattctattcatgtttggtcacgaagcatgaaaaagaatatttagttgaagcaaaattcaaggaacttgagcaagaagcttgtagtatttcgtcctcgagttctggtgaaacaatgaaaaataacattgatgttttggtttgcaaagctgaatactaccaccagagtggagagtaccaaaaatgttttaaactcacatcctcgttacttgagagagaccctttccatttaaagtgcacattagttcatttggcaactgcaatggagcttggtcattgcaatgatctttatcttttggcatgcaacttagtgaaggattatcctcaaaaagctctttcatggtttgctgttggttgctattactactgtatcaagaagtatgatcaagcgcgaagatacttcggcaaagctacaggtttagatggggcatttcctcctgcttggattggtacaggcattgcctatgctgctcaagaggagggtgaccaagcaatggctgcgtttcggacggcagctcggttatttcctggatgccatctgccaactttatacatgggcatgcagtatgtgcgaatgcacaatttcaaacttgcagagcagttcttcacacaagcaaaatccatctgcccatctgatccacttattcacaatgagttgggggtcgttgcatataatatgaaggaatttccttatcaactcggggtcttcgtcttcggttccaatttccagtgcaaccaagactccatagccggcaaggcaattggaaggatgcaagagattgcggacaagattttttccgtagctcgggaaacaatccgtccaggacgcgggttgacctcctttgacgctaccaaacttcgtgtagcattggaggacattgcttgcatgatggagcaagattctctggtgttccaagagtatttggacaaggtcaacaacgtaacccaccagcccgacagcaactacgaaccctcagacttgtcctcaccaccccctggtgaagacaaccttagtccagactgggactttgccgagcacttcgaaaggttttggggtattgaatatgactccgatcagatgccttcctttagtgacaatgagatgtgtgaccctgctgcacacacatatgatcatgacacggatgacagagatggacaattgcttgttgccctatatgctgtagacatttggggcaggccttccagtgaggtttctagaagaacaatggttgaaacaggttggccaggttcagtacatgacactagagtattacaagatactttgataacttatgtagactggttcccccatccaccggaaggtaaatactatcttgtggattcaggttatccaaatagaaaggggtaccttgcaccttataagggtcagaagtaccacatttcagaatggcaaaatgcgaggcaacctattgggagcaaagaagtattcaactatgcacactcgtcgctacgcaatgttatagagcgatcttttggtgtgcttaaaatgaagtggagaattctgttaagtctcccttcattttcgcttaagaaacaatccaagataattattgcatgtatgacattgcataacttcattagagacagtgctctacacgatagagactttgatcaactaggacctaatagccttggtcatgatgtatctgtaggtgagagtagtagtagcacatctgatgagttagacatgagtgcatttcaagatggaattgctaatgcattagtgtcgtag

SEQ ID NO: 81417 - DNA, 356 bp, Zea mays
  unsure (1)..(356): unsure at all n locations
  Clone ID: MRT4577_174268C.1
acccaggggcaccaaacagcggagaacaaccacggaagaggaggcagacaaagcacgcaacacagagaagcgaaacgccagggcagcgagcgcgcaacccagacgagcgcgggagacagagagaaagcaaccaagacagccagaggngaaccacaccacagaggaggcgagccaaaaacgcgcacggaacaggcacgccgacaccaccagagaacaccaacaccagcgcacgaggaagacagacagccacaagaaaaaagacaacagagaggagcgagcgacaagaagcgaaggcacaagaaagagcgaccgggaccaggagagagaaggggaggacgggggcaggacgaccaacc

SEQ ID NO: 81418 - DNA, 425 bp, Zea mays
  Clone ID: MRT4577_174269C.1
ccttcttttttttttttgacaaagatattcttttattttgggaattgcgatgacaggaccggggggatcatctcatcagatcccagccaacattcattctgggaggcccccttcaaaatccctagaaacaaagctttggtttcacataactatatccaaggatgaaatccttgtacctacataaccattaggtctccaacaaaatcccaccaaacagcacatggggcaatcccaatacacaggaaatggaacgaaagtcccttcctgccacctctcttcatactcccagggcctttacctggtcccctaatatggctccaatcaatcttatactagctcaacctatacctgggcttgaaaaccggcttggccaatcccaatgtcagcgagacgaccgaggccaccaagcataaagccagcaagac

SEQ ID NO: 81419 - DNA, 719 bp, Zea mays
  unsure (1)..(719): unsure at all n locations
  Clone ID: MRT4577_17426C.1
acaaaccagagcagcgcgcaccgccgcccacgcatctcgagtagtttccagctcgccggagacgcagcaagcaagaagatggccggaaggaagggcggcgacaggaagaaggcggtgacccgctccgtgaaggccgggctccagttccccgtcggccgcatcgggcgctacctcaagaagggccgctacgcccagcgcgtcggctccggcgcccccgtctacctcgccgccgtcctcgagtacctcgccgccgaggtgctggagcttgccggcaacgcggccaaggacaacaagaagacccgcatcatcccgcgccacctgctgctcgctgtccgcaacgaccaggagctcggcaggctgctcgctggcgtcaccatcgcccacggtggcgtgatccccaacatcaactccgtgctgctccccaagaagtcccccgccgccgccgagaaggaggccaggtcgcccaagaagaagacctccaccaagtcccccaagaagaaggtcgccgccaaggagtagcccgcccatagactactgtcgtgacattgcttaggtccatatcagggagaggatgatgagttttggttggttggatcctgtgtgtaattgcctaagtctgtagtggctgttacattagttcgatgaacagccggtagatgggcgctgtaatttatctctgatttatgtccggaatggctanagatgcaatcctttcaacc

SEQ ID NO: 81420 - DNA, 249 bp, Zea mays
  Clone ID: MRT4577_174270C.1
cggactggaatgccgggtccacccaacccgtccggggaataatagccgaaaccgtgtccgattttttttggccatggtggccaaaacgcccaagatgggttgttaatttataggctggccgttttttcctttccttgccccaaaactggaaataaatttatatccgttgaaataccgggggcatgccgaataagggagggggtgaatctaactaattaagtaaggcttaaataacacgtttaaaaggtc

SEQ ID NO: 81421 - DNA, 720 bp, Zea mays
  unsure (1)..(720): unsure at all n locations
  Clone ID: MRT4577_174271C.1
aattcggcacgagggccccgcatgcctgcatcctccacctcttcccgtccaactccgctcccacctggcctagaactgcaggcggccaagactggcgatgcttctcagatccatgctcatcaccgctcgctcacctcccagtacctcctccttccgtaataacctggcgtgcagcgtggtgctcctcggcaccgccgccacctaccccaacagcgggcgctctgacaacggcgaccgtggcggtgcgggtgtaggggctggggagtttgtgccctgccggatccagttgatcgcagaggtttccctcgctaagctcttcacagacttcgccagcccagtcgacacgtctgcgctgatgcagcagaactcgcctcccaccttgtccaagtcgcccatgccggagacggagaccatcccaccgcaagagacgctaggcggcggcgacgacaacatagatcccgtcgatccgcgtgagagtgttacaggctccgaggaacccggcttgccagaagctgccgttatgaggaaggacatggcggcggtttccaacaaggatggcttgcccaccaggaaggacgacgacgaggatgcagcgtccgagcccaccaccaagccatgtgactggcataacanatcaataacttgagatacatttcacaagcttagtcccatangttgtaacagataatgtgctaatgtccagcatgatgagtttctatg

SEQ ID NO: 81422 - DNA, 288 bp, Zea mays
  unsure (1)..(288): unsure at all n locations
  Clone ID: MRT4577_174272C.1
ccctcgagcctccggctatcagtacgaatttcgaatctctgaaaatctccgtacatgagctccgttgcatcatgaggcgcgcggcgntncnnntctacacctcccaaccctactgtctggcggatcggccgcgcacggaatgcctgccacggtcttcgctacccctcatcgcacgcgcgccgtgccactccgtcatcgagggggggggctctaccgacactccagaacttcaccccacccccgcctatatcagaagcagcggggcaattagccctctgcagccacccc

SEQ ID NO: 81423 - DNA, 348 bp, Zea mays
  Clone ID: MRT4577_174273C.1
attagctctgcatctggggttggaataacccgagttgcgacggtcgtcttggctctttgtgtgctggcatataattagccccggtgcagaacacgaaggggtcgggttttattctacaaaaggggtgacagatcgccttactgtcgacgatggatattttaggtgccctagtctttaccctcaccttacatgacctagaattcactagcctttatgacagcaaacgttacttgaaaagaggctagagtatttaatggccaacatggcgaggcaccagagactgtgtacactaagaaccctttggcgacaagaatgctggtaaagcataacattgggtggacatattcc

SEQ ID NO: 81424 - DNA, 853 bp, Zea mays
  unsure (1)..(853): unsure at all n locations
  Clone ID: MRT4577_174274C.1
aattcggcacgaggtttaaaatcaacaaaatctatctagcatatattcaaatgtttttcccatcaaaatctgaaatgtcagtgttacctagatttagcttagcaattggtttagcactctaattatatacctttttctgtcgtagatatatatcttcttcaacgatgttattcactacgggtccacttctagaaggtatgtatctgagaaatattttccccatcgcaaggtaaataatagttatacatctaccaagtttcagatgtagtcttattccttttttagtttttatcgttaatttttattgcactaatgatgtgttacctcttaagatatttgtcaaaccaataattttgaatgacacttatcttggtactttgtcaaatctataaacttgggagttaggatcacatctgttcctataaaccaagttcaaagattgttattttattttgaagatcacaactcactgtaattgttcatgataattatttgtaaactgaaaatccaattatctcgctatcaaacaccttcaaagaaataaatntattctcgcgccgcagggcgcgcgttagctactagttctgataaaaaagaatgtgcccctgcgctgcgctgcccaatgtcctccacccgcattccccgttcggctaaaccctacccgtctccggcgccgcttagatccatcacagacgacgctcgccggtcctgagagatggccgacccgaactcgcagcccctcgccgccgctacggggggatgtttctgcaacctaacatcaagctgcgatgaccgcgccgcaatcgcaccgaggcgctgcggtggcggcggcgaaacagggagcatgcgcaag

SEQ ID NO: 81425 - DNA, 456 bp, Zea mays
  Clone ID: MRT4577_174275C.1
ggaccggaacgaccgacgcgatccgatcgtgcatatattccactagatcattcttatgtcgacggcaatgactcgaccgcgctgcaacgggcgttgagtgagatagaaacatgggcaagaaagacaaaatgcctgctctcgcaattctattgaggacaacctactgttgcgaaaacgatgacaaagactaccgttgtttgatcactgacatcgacaaggggaagcgattcatgacgtcgccggagcttagaacaatatcggacagctatactggaatgccgtcatataccctgtcgccatgtatgccatacacgcagcattatattcacagctaatcatggatgattgggtcggaaccaattccactaaattggtgtatgtgattaatcattttatgcgaatcattgcacatgcacgtaatgtatcatatagtgcatacacaagggaataatacat

SEQ ID NO: 81426 - DNA, 132 bp, Zea mays
  Clone ID: MRT4577_174276C.1
gggcaatcctagatcagtgatgcaacggagactgcaactaggcatatcaacgtcagacccgcctcgggagcctactcatttccccttgcacggactgaaagacacaggcattggctgccgaagggaaaacaa

SEQ ID NO: 81427 - DNA, 2060 bp, Zea mays
  Clone ID: MRT4577_174277C.1
cctcgaggccggccgggccggggcttcgcagccagtggctcagcggctgcgcccgtgcctgtcacgtcttgtcctcaatctctctctctctctctctctctctctctctcaatcctcacctctccggctctctttctcctccccagtccccaacggtgaggcccccgccgcgcagcccatcgacgcattgccgctgcaagcgcggacaccgagggctagaagcggcagcggtgccagggttcggcgctcggtcggcaatggcgaggcggcttatgctggcgctccctgtgctcctcttcttattgctcgtcgggcaatgccacggcggcaagattggcgtctgctacggccgcaacgccgacgaccttccggcgccagacaaggtggcgcagctaatccagcagcagtccatcaagtacgtgcgcatctacgacaccaacatcgacgtcatcaaggcattcgccaacaccggcgtcgagctcatggtcggcgtccccaactccgacctcctcgccttcgcgcagtaccagtccaacgtcgacacatggctcaagaacagcatcctcccatactacccggacaccatgatcacctacatcaccgtcggcgccgaggtcaccgagagccccgccaacgtctccgccctcgtcgtgccagccatgcgcaatgtgcacaccgcgctcaagaaggccggcctgcacaagaagatcaccatctccagcacccactcgctcgggatactgtcccggtcgttcccgccgtctgctggggcgttcaacagcagctacgcctacttcttgaagcctatgctccagttccttgtggagaatcaggcaccgttcatggtggatttgtacccctactatgcgtaccagaactcgcggagcaatgtgtccctcaactacgcgctgttctcgccagagtcccaggatgtgattgacccaaacactggactggtttacactaacatgttcgacgcccaggtcgattccatcttctttgcgctcatggctctgaacttcaagactttgaagatcatgatcactgagtcagggtggccaaacaaaggggcggtcaaggagactggagccacaccagacaatgctcagacctacaataccaatttgatacgccatgttgttaatgacagcggcacaccggcgaaaccaggggaagagattgatgtctacatattttcattgttcaatgagaacaggaaacctggcatcgagtcggagaggaactggggactgttttttcctgataagagctctatctacagccttgattggacgggccgaggcaatgtggatgttatgactggagcaaacattacaagtgctaatggtacctggtgtattgcttcaactaatgcatcagaaactgatctgcagaatgccctcaactgggcatgtggtccaggcaacgtagattgttctgccatacagccaagccaaccctgctaccagccggacactttaacttcccatgcttcatatgcattcaatagctactaccagcaaaatggagccaacgttgtggcctgtgactttggaggtgcggggatacgaacgacaaaagatccaagttatgacacttgcgtctatttggctgccggcaataagatgagcacgatgaactcaacatctcttccagctcgcagcgactctggtccagtcccacgcgtcaaatgcttcgccactttgctgcccatgctggccctcgtgatggctgcagttatgctgtgatctatggggaaaaaatgctccagctagcctccttaagacgtgagatgaaaggtgaattgcgtaatgctgctggtaaccatcgaagttctgttttttgccatgagcagtagactagtagtagtctagtagagaggcaccttatgctgtaggaattctctggtcggttaagatgtacatcgtcgcgcggacaatatatatcagctggcattaagaacttgatatcgtattatgctgtgtttcggctctcgaaaaaaaaaaaaaaaatcgtccctgcccgggcggccgtccgagccctatagggagtcgttttcg

SEQ ID NO: 81428 - DNA, 541 bp, Zea mays
  unsure (1)..(541): unsure at all n locations
  Clone ID: MRT4577_174279C.1
cgggaaaaaccgctcgccaaaccctagccgccgattgccgccccccgcccgggggggctgcggggggcgncggacagngccgagggaaggggcaccangaggnnggagaagngcngggccggcaccacaaccaacgaccccggccaaggaagccaggncgnccgcaacgacgccaagaccanccgctnnngccggncaaagngccataaaggggggggaggaanaggaacccnccaaaggncaagnggacaaaagcanacaggcggangcaaggcaaggacacgacccaggaaacaaccacngagncagagaggaagaggaacaggcccgagcgcaacgaccgcaannngacggagcagacccngaaggcgagcccgcnnaagacaaagagnaggcacgagcgnanggaaaaacacaccccaaacagacanaaaccnggnaaacgcaaggagagggaaaaggacnccaaggagccggagcaggacaacgccacgcccccgaagaagcnaaaaagcaaccaccnngcggcggagaaaacgaa

SEQ ID NO: 81429 - DNA, 1502 bp, Zea mays
  Clone ID: MRT4577_17427C.1
gggtacccctcgcggccgaacgcaagccggaccacggcggtaaagacaagtgcctgctcacaattagcagtgtacgtagttgacaccacacagctgcgccattaacatatagcaggcctagcagtgccgttctggaaagggcgggagaggggatgaggacgagaggtggcagcggattcgccggcctgcaggtggcgtgcgtcgtcgccgccctgtgcctgctcctgccgacggggagccgcgcccaactgcaggtggggttctacaacacctcctgccccaacgccgaggcgctcgtgcgtcaggtcgtcacggctgctttcgccaacaactccggcgtcgcacccgggctcatccgcctccatttccatgactgcttcgtcaggggctgcgatgcctccgtgctcctgtccgtgaaccccgccggcggcaaaacggagcgtgagtccccggccaacgacccgagcctgcgcggcttcgacgtgatcgacgccgccaaggccgccgtggagcggagctgcccacgcacggtgtcgtgcgccgacgtcctcgcgttcgcggcccgcgacagcgtcaccctgacgggcaacctcttctacgacgtgccagcggggcggcgggacggccgcgtgtccaacgagacggaggccaacgacaacctgctggggccggacagcacggcggagatcctcatcgacggcttcgggaagaagaacctgagcatcgaggacatggtggtcctgtccggctcccacaccatcggccgctcccactgcttctccttcctgtccaccaaccggcagcggctggccaacgggaccataagcccagcgtaccaggcgctgctggaggcgctgtgcccgcccaacccgggccagttcacccccaacaccacggagatcgacgtcagcacgcccaccgtgctggacaacaactactacaagctgctgccgctcaacctgggcctgcacttctccgacgaccagcttatccgcaacggcactctcgcgccgttcgccagcgcattcgccgccaacgagacgctctggaaggacaagttcgccgccgccatgatcaagatgggcaacatcgaggttaagaccggcaccaccgatgagatccgcctcaactgcagcgtcgtcaacccgtcgtcgtcgtcgtccaccgctggggtgatcgagatgctgttccctgcagccgacgaggttgccacgagctcatgactgatcgaaaaaatatatccactcgtgttaataacgcgcgtgcggcctgcatgagtacgtacatatcttcgcctttgtacgtacgtggacctcgattgtttgctgcgcgcacagtcgtactgaactgggtttgatttctgggtgtggtgaaagcatgaataaaagttgcttacatggcgtgcgaaattaaattgacgatgtagctagtacttcctctgcagtcctccaaagaaaataatataagttacgcgtgcccgttaaaatgggttcatattagct

SEQ ID NO: 81430 - DNA, 1384 bp, Zea mays
  unsure (1)..(1384): unsure at all n locations
  Clone ID: MRT4577_174280C.1
ttgggtacctcgaggcagggcgggcttcgaggccggcctggctctttctcttccaggagatccccaccgtctctctcccccgtctatctcttcttggagcctggagaagaggaaggagcagggaacgggggaagaggttgctgcgacagctcaggtctcaagtttggattcagacaagtagacaaacaccagttggttaagatggcagctggtttccagatcggtgtgatcgggtcacttgcactctctgttgcatcttcagtttccattgtcctctgcaacaaagctctcatcagcacacttggttttccattcgctacaacattaacaagctggcatctgatggtgaccttctgcaccctccatgtggcacagcgcttacgtttcttcgagcccaaggcaattgatggacagacagtcatactctttgggttgctgaatggcacgtcaattggtcttctcaatctgagtttaggattcaactccattggattctaccagatgacaaaattggcgatcatacctttcactgtgctattggagactatcttcttgaagaaaagattcagcgagagtatcaagctttctcttctggtcttacttcttggagtaggaattgcttcagttactgatctcaagctaaatctgcttgggtccatcctttctggnctcgccattgccaccacctgtgttgggccaattctcacaaatacatacagaagaggttgaaggtctccctcacgcagcccctgtaccccgctgcgccttaccaggcaggaattctgtttgcaactggcccttttgtggatcaacttcttactgaccggagtgtctttgcacacaaatactctgctccagttctggtatgatcttaatactttccctaaatacatgaaatagtattcttgcaattatttagggaactcaattgattgaagacacacaaccagccaatttcataatttacagaatattaaaatcctgagacctgcaagattgctaacagactaattggtagttgctgtgtatgtagatctttagtcatgtgaaagttctttaaagcaaacatgttttgtgtactgtaaaatagttcagtgatacctaaagaattcaaaataaaatcaagcatacaatggcttcagtaattattgctagaatctaacaatattactctcttgtcatttttttgcctattggaaaagaatctcatgtatacctcaaagttgacaatgaaatgaaaatgatcttatctatatgaattgtatgtagggtttcattgtcctatcttgcttgattgcggtgtctgtgaacttcagtacatttcttgtgatcggaacacatccccagtgacataccaggtgcttggtcaccttaagacatgtct

SEQ ID NO: 81431 - DNA, 348 bp, Zea mays
  Clone ID: MRT4577_174281C.1
aaaaagacggcaattatgggtaaacaagaccatggtaggggacaacctaaaacaaaccccaaaggttaaaggacttggggggctaaacacaagatggggccaaaaatccccaaataattcggggggtttataaaagctggaccaagcctccgtatcctaacatttaaaaatggggggggggggtctggacaatatctgggttggccaaaggcgttgaccggcccataggggggcggatttccaagtccatgtccccttccaaacacgggcgaggctggaacaaaaaccttcccccccccagggggggcgtgagccttccttctattaaaaggttattaacaaagaagc

SEQ ID NO: 81432 - DNA, 593 bp, Zea mays
  unsure (1)..(593): unsure at all n locations
  Clone ID: MRT4577_174282C.1
ctcgaggccnnggccgggacctgcatgcagccatgcgtgacctccgacggcgctctccaccgctcaccgatcccacccatatcgacagcgcgccgaattcattggcaagccggtgaaggaccttgcagctgagcatggaccagcgccgcgcgcccaccgcaacaatgagtgccacgcggcccagatcatctccatcgagcgcgtgcccgacgtggacaataccacagtgaagaaccacctcctcctcctcgtcatctcgatggccaacgtctacctggtcgacccctacgggaatcttcgtcaacactgccggatacggactgggcagctgctcaagctacaagacaggaccaactgcccactccatctgggtggaggaggactcatacacatcatcggcccaacatactcgcagcgtgtcgcacgactaacacgaaggagaccccacgtaactgacgagtggagcagtgatgagacgctgtgcacctacgcgatcaacacctcgtgcactacacgtcttgctgatccgttgtcggagctgccgagatgagaacgaagtcctctgacactgccgcagatatcactgcaacaac

SEQ ID NO: 81433 - DNA, 797 bp, Zea mays
  unsure (1)..(797): unsure at all n locations
  Clone ID: MRT4577_174283C.1
ggtaccctncgngggcctggccgggnatcaccacaacactttaatttccagcttctctgtttttgtcatcacctctcgagtctttgaaggcattacacttcatcgcagcattttcaggaacaggtctccctccgcgagccccatcacttaccctactgtcctttcacttctcccaagatgaagcttcttatcttcgcactggctgccgctgccctgccgaccatcgaagcatcagctaataccgctctattcaagagcacgtgtgcaaccgtcaccaaccagatgtggaccctttccggatcactgtctcagcttaaggccacggccgacagactaggtcatgcgcacatctccagaaagtgcgatgaggcgagtggacatgttgccaatgcccgcaccacctggggtggaatctcgctcaacttcggcggcctcccatggcaagcaaggctttcgccacatgccggtcgcgtccaatccaccatgtccagttgcggctccgctctcgactggatttacgcccagcctgaggtctcccgttactccgcttaccggatcccggtgtctaactgtaggcgcacctacgactcctgtcaaagtggatgcagacagatatggaactggccatcaccttttggattcggccctaagcctagccaacgcgctggctactaccgtcgtcagcttgctgatattgagcaaaggtcatgccctaatgttcaagaaacgtcctgccccatttcttcccaagcaaatggatatgagtgcattgacctccaaaccgaatcacctcatgt

SEQ ID NO: 81434 - DNA, 491 bp, Zea mays
  Clone ID: MRT4577_174284C.1
gtgactcaccaccatattcagctgacgatccagaaggagggttcatagcaatatcttgcggtgctggccgttggaatacttgaagcgacaaccaaaggggagaaaatacatagcacttattctaaagtttgtcaaggatcatatgggagctctgctttttggtggaggaagaacttatgaaagttgaggaacaatcagtggagctggagatggattataaggagagatgctgttgaaacaacagtcatttcttgatctcaatcattccaataaccttgccatcaacctgttcgaatgggaatccatggtctaacctagggtcgcggatgagctcaccgagcagcaggcctggcagctcaacttcgaccttgattcggcctacaatgccttcttggctgcgctgcccgctgctggtctgtaaccgggcaaggatctaccagcttgatttttatttggttggttcagtctattatgcttttgacactggagca

SEQ ID NO: 81435 - DNA, 326 bp, Zea mays
  Clone ID: MRT4577_174285C.1
agctcgagaacgcggccttagcggtctgatgttcgaggcttcccaaaaatcaaaaagtacatttctaaaaaaaaaaaaaaaaaaaaaaaaaatcctctaatacaaactctccatacggacgaactaacccccacatctacactgccccttggaacaagcaaaattggggtgggagggcttgctaactgatctctgcagacgtgccgacatcatgggtccgcctgacgccgttgcctgcagagtacccccccgggcgggccatcccttggcgactactgcatattctcttgcactggcgctcgctccagcatgcctttgcacggccc

SEQ ID NO: 81436 - DNA, 548 bp, Zea mays
  unsure (1)..(548): unsure at all n locations
  Clone ID: MRT4577_174286C.1
naaaaaaaaaaaaaaaaaaaaaaaaaaaaaaaaaaaaaaaaaaaaaaaaaaaaaaaaaaaaaaaaaaaaaaaaaaaaaaaaaaaaaaaaaaagggggggggcggtcctggtggatcggaatccttgctttccgcacgcctgcgtatgcgcatggcttttttttttgtgtgggcgctacctaaatttcattgggctggcccgttctcttcgcacctgcctgggctggcccctgccgttgccctacccttatttggcttggcgtgggcatcccttttctctcttgcctggcgtggttgtcttaaggggacgggccccgttccgcctttccctttcatttgcgtctgcctgattggattgggggatggccccctgccctgttgcctttattttacggcgggtggtggtggtttcgtcccaccgctgacctgttccgttttgcttggcgccctaccgtcccgccccctttccgtttggttttccctttccttttccttgccccggcccgctcgggtttgtgcctcttcccggtctttgattttagggggggt

SEQ ID NO: 81437 - DNA, 295 bp, Zea mays
  Clone ID: MRT4577_174287C.1
cggatcgtctcagccgccgttggattcaccctcctagcggtagggtatataacctggacttcaatcaacctcatgtacatggtattgatgacgtcactggtgaaccgttagtccagcaggaggatgataaacccgaagcagttgctgccaggctaagacagtacgaagacgtggcaaagccagtcattgaattatacaagagccgaggagtgctccaccaattttccggaacgagacgaacaaagctggcctacgtttacacattttctcaacagtagtcaactattagtccaag

SEQ ID NO: 81438 - DNA, 298 bp, Zea mays
  Clone ID: MRT4577_174288C.1
tttgaattgtgcaaatagttttcatccatcgcttctgcaccatgaaaatctaattaagtgactcatatacgggaggctagccatgtttatgattgaccatgtatccatagttatctttctacctttctcatagataggttgtgcaacccatcatccaaaattaccaaacatcttgaataacaaactataatctagaaaagaactttacatattcattcaatggctaacccttagtaacatacattacaccttactttttatgcatcctactctttctgattacataatacattctaat

SEQ ID NO: 81439 - DNA, 157 bp, Zea mays
  Clone ID: MRT4577_174289C.1
ggggaacggccggtggtccacggaagcgcttttagccccaatccgagctccaaccagcgcgtttatccggcgctcccagtacctgtaatggcctcacttactaaatgccgcgcgctgggcatcgtccgggcgtgtgcgggggcagactgcgctagcg

SEQ ID NO: 81440 - DNA, 599 bp, Zea mays
  Clone ID: MRT4577_17428C.1
cgggattggccctagtttgtcaaaaaaaaaaaaaaaaaaaaaaaaaaaaaaaaaaaaaaaaaaaaaaaaaaaaaaaaaaaaaaaaaaaaaaaaaaaaaaaaaaaaaaaaaaaaaaaaaaaaaaggagggaagagagagctttccgcctttttcctccgcctaaaagcgacgtcgttgccggagctcgatccctagggggggtttgggaacctcgcgccctgcctccgtggccctttgggccttcctaaccttcctaaaccttttcgccgtccttttccccgtcgggcccgagcgccgccgaaacaccggaaaggggatgccggacaagtccaacgaggggtcctactgcctttacaacactgacgcctccagggggtacggggtctccgtttttttggggctcctgctccagcaggccattgtaaacgtcgccacggggggcctttgtttgggacccgggctttcctcccggggttgtgccgaaacggcattcgccctctcctggaaaacattcctcgccgaaaaagcttgtttaataggaggatcggtgaggaatgcaaagcacaccaagtttttaggctactacatgaagcatgatt

SEQ ID NO: 81441 - DNA, 366 bp, Zea mays
  Clone ID: MRT4577_174290C.1
ctccaggctccaggctccagcgcgctcgtccacggcccgcgcctcttgcctcctctgtcctctccacttctccggtctgagcagtctccagcggcagcgcgctcgcccgcgcgaccgcgcctcctcggctcctctccagccgctcggtcgccaccgcggcaccgccaggcgcgcagcgcgctcgaccggcgatcgcacaccgcagcacgggagcagaggcccgaggttaattttgtgaatttgtgatttgaagttttgatttgattatttatacggtagtaattccatgtttaattataagcaaatttttgttatagtcttaacttagtagccccctcttggattaatcctggatccgccactgcc

SEQ ID NO: 81442 - DNA, 280 bp, Zea mays
  Clone ID: MRT4577_174291C.1
ttttttttttttttttttttttttttttttttttttttttttgcctggacaagtaatggggcagggaaaatttttcgcggtaatagaccggaaaagttttttggggaaacgaaccggggcaagaaaaacaattaatcctttccttacgggaacgcttaaaaagagagggggggggggacccaagcgaacaaaaaaattaggggccggccgggggtaaaaaacaggccaaaccggggacaaggcgaaacgggcttcccagggcggcccgctcatggggggg

SEQ ID NO: 81443 - DNA, 324 bp, Zea mays
  Clone ID: MRT4577_174292C.1
gttggcgctgggcacggacaagctgcgcgtgcaccaggtggtgagatccagtgccgcacgactcgtccaccaacgagatcggtgtgacgctggatacccggccgttcacgcagtgccagcccatgttcgaggactagcaggtggacgtggacacacgcgtcatgctccatcgcgggcaggaggagcggcgggtatgcctccggatggtggagacgtaccctgtgaacatgtatgttaacgacttgagccgggatgagcgcgagaccgatgaccacttggtaagcttggagatccgcacactgatgggtcaccaggacctggcga

SEQ ID NO: 81444 - DNA, 396 bp, Zea mays
  unsure (1)..(396): unsure at all n locations
  Clone ID: MRT4577_174293C.1
cagcgccaccagcaaccaggagaagaacccaaacaacccaggacccgcaccgcgggaagaaaagaccagggaaacggaccacagcgcaaggcccaacgggaccgaacaaagagcaggagcgcaaacgagaggacggggcacacaaagaagggaaggccacagcggcggagcaacgcgcgcagagcgccccggaggcaaaacagcacaaaacggacagggacggccaagcgcaaaacaccccaggcaggaggcgcagaccaacaaggccaagaccaggcaaaggcacagcgagaggaaccggacaccgagnaaaccaagagaaagaccacanacaccccccgcccaggagggcaaggagcaacaaagaaagagagaaccccaacaggcagggcccaa

SEQ ID NO: 81445 - DNA, 280 bp, Zea mays
  Clone ID: MRT4577_174294C.1
cagaagacggaaccaccacacgccgaaggcgaaaaaatcgcacgcccgctgccagcctgccagacagacagcaaaaaggaaagcgccgacggcgaccaaacgaaaccgccaggcaacgaacgacccggagaaggacccaccccacagcagggaacgcacgcacagacgagaaggacacgaagaacagacaagcaacaaccaagggaccaacagacaggcccgacgcaagaagagacaaaagagggaacaagaattacccgccagaaaaccccaccaaacc

SEQ ID NO: 81446 - DNA, 209 bp, Zea mays
  Clone ID: MRT4577_174295C.1
ttcttttttttttttttttttttttttcttatcttaaggaaatttttgtggttttgcctcctattatgtaagaatgcataagtatttcatccagaatttttgacatacaaattgtagggtctcatattcataatccatattagttttctgtataacacatacacacaactttgtttttttaaggagttaaatgatccttttttcttttt

SEQ ID NO: 81447 - DNA, 700 bp, Zea mays
  unsure (1)..(700): unsure at all n locations
  Clone ID: MRT4577_174296C.1
ctcgaggccggccgggccgggatgggcgagcagccccctgctcggcttccctgctccctctccctcccttggcatctctccacggcggcctccctctccaccagatgcagggcgccgaccacccttggatgccacgcacgctccctggtcccaggactccggcctcctccccgcgctgctcggccatgggctcccctcgccggcgctgtctcttgctcagcctcgactccaagccgcgtctatagccgtcggccccgcagtacctgctacccccatgcacacagtcgccatctcctacatccaggcgcccctccctagcagcttcctgctgttcacgtgaagaagaaagaagaagaagcagtgtgtgagtatgacgggatcgagagatgatgatcgtgcgaaatgaaggatgtggagtggagccgaccacaagatgaagtcggcagacaccccgaagaaggatggactaaaccagtggatgctcgccaagcgagtaccctctagcgaacactaaccagtgttggattccagcggtgttggagcgaaggcagaaacgccacccttcgcccgaagtctccaccgcttagcccctgccctgacagacaaagcaggcagggacacccttcgcttcatcggcaccagagacnacatggagacccttcgctcgattcggcaccagacgaaggcctgcggcaacgct

SEQ ID NO: 81448 - DNA, 127 bp, Zea mays
  unsure (1)..(127): unsure at all n locations
  Clone ID: MRT4577_174297C.1
tgtgatcgagcgtcgtagctcggattcagtcgacgtgttataataatgaagtaccagctgctgccatcgtgatgctatgctgctctagagatcanctcagactctgcgaaaggctataaactcgtgg

SEQ ID NO: 81449 - DNA, 385 bp, Zea mays
  Clone ID: MRT4577_174298C.1
gaaaagcaacagaggaaaacggggagcaaaggtggtttggttttatgggggaaaacagaatttgttacattttttttgtttcccttggcacaaaaaaaaaaaaacttttttcccgggggttaaaaccggaaaaggccacacaccataacaccaccccgggttgttttttacgaactacacgccgtcacccaataaagccaaataacttggtcacttgaaaagaaaattttgcctccctccctcggcccagttggatccaattccaaaatgggaggggccacattttcaaacggcaagggtggtgccacttgtagccaaaaagggcgggggccattgttcgccagcctggcgcaaatgaaggcgaacatttttaagggtggaaggg

SEQ ID NO: 81450 - DNA, 452 bp, Zea mays
  unsure (1)..(452): unsure at all n locations
  Clone ID: MRT4577_174299C.1
gaagaagcgngcggttttgcagnacncgccgancccggacgcggcgacgcngcngaacngcangangngggggcngnacgggcngccgcnggngcacccgcacagcangcnggnggngaccancaacggcaccggcaggcncanccagcncaccnacgnggcgcncnncanccccngcnccgcgggggcggggcgggggggggncgngcnccngnncgccgccgagggcgccnncgncgncgccccggccgcgcnggngcgcacccgggcgcacacgcacgagcgcaggnccangcncgncggcancgncnccggcnncnncggcaccggcagggacgcngcgccgcncccgggcaggaaannggnganccagacaaagagcgngggaaacangccccngggccgggcccgggccgcccccggcaacagcagnnggngggaccgccaacgcg

SEQ ID NO: 81451 - DNA, 693 bp, Zea mays
  Clone ID: MRT4577_17429C.1
agctccaatctcagagcattccgatccagaccagccgccccccgcatctcgagtagcttccagctcgccggagaggtagcaagcaagatggccggaaggaagggaggcgacaggaagaaggcggtgacccgctccgtgaaggccgggctccagtttcccgtcggccgcatcgggcgctacctcaagaagggccgctacgcccagcgcgtcggctccggcgcccccgtctacctcgccgccgtcctcgagtacctcgccgcagagatgctggagctcgccggcaacgcggccaaggacaacaagaagacccggatcatcccgcgacacctgctgctcgccgtccgcaacgaccaggagctcggaaggctgctcgccggcgtcaccatcgcccacggcggcgtgatccccaacatcaactccgtgctgctcccaaagaagtcccccgccgccgccgagaaggaggccaagtcgcccaagaagaagacctccaccaagtcccccaagaagaaggtcgccgccaaggagtagccgccccatagactacagtcgtgacattgcttaggtccatatcagggagaggatgaggagtttcggttggttgcatcctgtcatcctgtgtgtaattgcctagcccagtaagcgctgtattccatctctaacttatgtccggaatgactaaagatgcaatccttt

SEQ ID NO: 81452 - DNA, 876 bp, Zea mays
  Clone ID: MRT4577_1742C.1
tcgtaggtcgtcgcaagtctctatagtgacgtcgtattatacgtccgttcctcttcctctcccaccggcagggcaatagtcagcgatgggcggcggctcgggcaatcctctacctcccccaccggcggcggcagcggccttccgcgtggaccggccgctgcaggcgctgggcttcgagttcactcgtgtcaccgccgaagaggtggtcggtcgcctccccgtcaccgagacctgctgccagcccttcgactggctcaacggcggcgtgtcggcgctgatggcggagacgacggccagcatcgggggctacgtcgcgtcggggtaccggaggctggccggggtgcagctctccatcaaccacgtcggccccgcgcgcctcggcgacctcgtccaggcgcgggccacgcccgtccaactcggccgcaaaatccaggtttgggaggttcagatatggcgggtcgatccttccacgtcggagcgcaaagatctggtgtcaacagcgagggtcaccctattgaccaatctaccaacaccagaaaagatgaagagcttcgaacaaggcctgaagaatttttcatccaagttgtagagctactgacgaaggcatgcctgccgcctacattatcacatacgtacagcgggggagcgccgtctattagtttactccatcatcagctctaggaggaaggagacctgctcagtggctgctgacctgtctgtcattggcaattggcatggcacatcatcaagaactcgccgcaagcctgcctcttcctgcgttggagcagaacgcgagacatttcaaacaccaattttttcccccttttgcagtcggtaaaactctggatccagctctcgcgatgcagtgttacctga

SEQ ID NO: 81453 - DNA, 1418 bp, Zea mays
  Clone ID: MRT4577_174300C.1
ctcgaggccggccgggccggggtaccaaagaaacataaaggattgtatagcttgagtcgtcgagcgaaacagctagcaaggaactcagcaagcaagcatgagtaagccggctgcggccctagtgatgttgctggcgctcgtcgccgccgggccggcggcgggcgacggggggagcaccagactcggctgcttcgtgggttggtccccgctcaaaaccgtgtcctccctgctctgcctgctccagggctccagcacttttccgagcccgaagcctgcgcccacggggcagggcctgagcgtcggttactacaacaaaagcggcagctgccctaaagcggagcagctcgtgagggaagccgtgacgaacgccaccaacggcccaaaccgtggccttaacgcgggtctcatccgtctccacttccacgacgccttcgttcggggctgcgatgcttccgttctcctggacaagaccgcgtcgggcaacaacgacacggagaagacaggcccacccaacaaggacagcctgcgcggcttcgaagtgatcgacgcggccaaggcggcagtggagaaagagtgccccggcatcgtctcctgcgccgacatcctggccttcgccgcgcgcgacgcgtcctacatcctcagcaacgagaagatctactacgacgtgccggccggccgctacgacgggcgcgagtccttcgccgacgagaccgaccagctgcccgggccgggctccagcgtccaggacctcaagaagagcttcgccgcccaggggctcagcctcgcggacgccgtcacgctgtcgggcgcgcacagcatcggcctcgcccgctgcctcttcttcaaagaccgcctgtcggccatggaccccggatacgctgccacgctgaatgccacctgcaacgctggcggggacagctacaaggtgaaccaggactacaagagccccgacgtcctggacaaccagtactacaagaacatcgacaagttcgtgctcttcgcgtcggacgctgcgctcaagtccagcgagacgattgaccaggtgaatgccaacgccggcggttatggcaagtgggagaaagacttcggggacgccatggtgaagatgggaaagatcggggtcatcaccagccccggctacggtgccgagatcaggaaggtgtgctcgcagatcaactactagctctagactcctcctgcggtaattattggctgcgtgtctactataatcgaccttaatgtggctttaatttattgagttcctctcataatgtaactgcgtgtgttcattattttattgttctactatttatcatatatatatatatatatatatatatatatatatatatatatatatatatatatatatataactcttttaatttcacgctaaaaaaaaaaaaaaaaaaaaaaaa

SEQ ID NO: 81454 - DNA, 624 bp, Zea mays
  Clone ID: MRT4577_174301C.1
ccaagggatttttggatcaaagcaagggaaggtccagatttgccagggagatctccatgaatccacagctcatggaccttcaaaggagaaggtaccctcactaaggaacaagtacaggctgaattagaaagacttgtctctgcaaaatgggcatggaatattcatgatatgggtaacaattcttttagggttacttttccatcaatgggtgaaatgcagaggatgattgaatggggcgttgtgcaaacaaagtttaaggcaaaactgcaaatcaaagaggctactgtagatgacgaagtgaagtatgttatgccaaaagtgtgggtccaatttactggattgccagaggaattaagagatttcccagttatatgggctgttggctcaatccttggagtgtcaaaggaggtggatatgatttttaccagacaatatggtcggtgtcgactccaagtgttagtattagatcctaatattatcccacggtatgtggatgtagtcattggtgactttttatatgagcttcgttttcgtgtggagaagaacttggaggactccaatccggagccaatggacatggatgatattacggaggatggcaatggggaggccactaatggcgat

SEQ ID NO: 81455 - DNA, 868 bp, Zea mays
  unsure (1)..(868): unsure at all n locations
  Clone ID: MRT4577_174302C.1
gccggccggttcgggctgttgcctatggtgctgctgtccaagctgccgtccttaccaaccaagccggtaacgagaagactcaagatctccttcttttggatgttgtccctctttctctcggtgttgagatgcaaggtggtattatggctgttgtcgttccccgtaactcccctatcccttgtcaaaagtccaaggtcttcaccactgcttccgataaccaaaccaccgttaccttccctgtctacgaaggtgagcgtttgatgaccaaggaaaacaaccttttgggtgaattctctctctctggtcttatccccgctccccgtggtactcctgagctcctctgtaccttcgatctcgatgccaacggtatcttgaaggttactgctcaagataagaccactggtcgcaaggctgatgtcaccatctccaactctacccgtctctctgctgccgatattgaacgtatggttcaagatgccgagaagaacgctgagtctgataaggagcgtgaggctgttgtccaagccaagcaagaccttgaggcttatgtctaccaagtcgagaacaacatctctgaccctaacgtcaacatgaagctccgtcgtggtgaccgtgagtccattgaaactgctctcgctgaagccatggaactcttggagatctctgctgatgaggccaaggctgatgaccttaagtctgcccaatctaagttgaagcgtgcttccactcgtgctttcgcccacgtttactctcaacgtcgttaaatcttttgattagttttagaaaatttcccttgctttttatcaannatgtattaattnaaaatcaaaaattaaagggagagatgtagtctcttttcaggattttt

SEQ ID NO: 81456 - DNA, 773 bp, Zea mays
  Clone ID: MRT4577_174303C.1
aattcggcacgaggcaaacactgttcccgatcagattgttgagttggtgaacaaataccaggaattgtttgcagccccaaaaggcctgcctccaaagaggttgtttgatcatgacattcctttgttgcctggtgtaaatcctttccgactcaggccttatcgatacactcctcaacaaaaaaatgagattgagaaacagattaaggaaatgttggaaggtggaattatccagcagagttccagtcccttcgcttcaccggtgctgttagtaaagaagaaggatggagagtggaggttatgcgtggactacaggaaactcaatgcttatacggtgaagaataggtttcccatgccagtttttgatgagattgcagatgagctgagtggagccaccgtattcacaaagttggaccatagggctggttaccatcaaatcaggattaaagagggagaggagtataaaatgaccttccatacgcataatggacactatgaatataaggtcatgccattcggtctgacaggagcaccggctacctttcaagattttatgaatcacatcttagctccccttttgagaaagtgtgttgtggtattcttggatgatattttggtttatagtactactttagaagatcacgttggacatttggaacaggtttttggtattctgacccaaaatcagttgaaactaaaacaatccaagtgtaagtttgcccaagacaaattggaatttttgggccatgtaatcagtgctgctggtatttcgactg

SEQ ID NO: 81457 - DNA, 657 bp, Zea mays
  Clone ID: MRT4577_174304C.1
atctttccgccccatcctcgccacctgttcctctcacgtctcttctccttcctgctatctctgcgcgtgcggtatcatatctctctcaacatcatcgtggtccttgtccttgtcgactctgtgagtggcacccccactgtcgatatgatctacgaggttgggtgtgttgaccatcgcgtggtcctcgactgttgactatgccgcctactgctatgctgaagagtggctttcgagtacgcctgctagcttgacgctctgtgtgccgcagctgtgagagggcgtagtctgcactgatattgccctgtgtgagtactagatccccggttcctactgcgccgtcattgaagcccctgggccccgagacttcatcatgaacatgattactggcagctcccacgttgaccgtggtgcgctcctccttgactcctcgactgatggtttttaggatggaatctccaaggatggacagagacgctgtgtacctgccccttgctttcccccttgtggcagctctatatgagctgctgctgcaactagatgggctgcccctctcggatctactctatgggacgagatgcgtgaattgttgacgaagactcttcttacctgaagatcgacggatacaaccgtgactacggtctcttcatatccatcact

SEQ ID NO: 81458 - DNA, 517 bp, Zea mays
  Clone ID: MRT4577_174305C.1
cattgggtacctcgaggccgggcggattcgcgtggtcgtccagccacgatgtcgcttcttctcacagagttgcacgccgccaggatccgcaccctcttctcgccctccggccttctcatgcacgcccagcgaaactactaggcctcgccagcctgacaagcagcggcaggatgagtggggtttcaaaaccttcatggtttgcatcaacggcttgcccaccaaccggtgttgatgaaggtcctcctccatggtctgcattcaccattgtcggctacagacgagtttcctcaagacacaccgccattcacatctacttcaccgtgaaacctccaaatgatgtattcctcgacgaccttcaaataatgtttccatacctaatgaggtatggataaaatatatgtcttacattgtttataaattctcaaacccttgggttataatatatgataagttaaaccaaaaaaaataaaaaatgtccttcgattattttgggaaaaaaaaaaaaaaaaaagcggcc

SEQ ID NO: 81459 - DNA, 288 bp, Zea mays
  Clone ID: MRT4577_174306C.1
cagccatgctcggatttaattcctatgtgcgagtgcgcgcccatgtcctggaagatggtcatgcctgcagcaatgctcatgtcttgaggagaagcaatgtgaaaagcatcaggaaagctgaaccttacgttcaagtcagcaaacatttgtgagcattctagtatgcttgcgaccttgacactttataaaaattatctttatatttgcttcgagtatcaaccgtatagttgactctagtggggcgaagagagcagagatgagagcaaaattcagacttgctgcccctgt

SEQ ID NO: 81460 - DNA, 685 bp, Zea mays
  Clone ID: MRT4577_174308C.1
gtcactacgtatggaccgtaccgcgatctctggcttgcattcgtgcgttgcacgggctccagacacgtttttgggaccgccgccggcggactacttccagccccagttgctcaggcgtacttcgtgctacggcgctcggccggcgaggagcactcgcagcaccagcactgcatgaggggataggtaccctacagcgtgagcacaagcagcactcggtgatgagcatgagtgtgggatgaggacgctacgaggaagcttacacaacgggcaagagtattgtgctagggcggaacaatgtctggttcaatggaatcgacatacctgcgtgctacatactgaaacattaccccaagctcaagaggcgcaggatgcttcaaagtacatcacaatcctttaccgcggcattcacgacccatctctttgtgatgatgcactgggaacaaaggaagctgcactctcaaatgttacagactacctcactaaaaaaaacactgctgaggagctgcgtaatcattcgacccagctcagaccatgtgttgcagctattcctagagcacagactgcacacactggacgtgcaataagtgatgctgcggccaagatacctgtaacatcagatcttcagatttcactctgcacggatatggcagagtggacccagggcagagaagcgtgctttcctccg

SEQ ID NO: 81461 - DNA, 238 bp, Zea mays
  Clone ID: MRT4577_174309C.1
aatcgttgtcttcggttcatcctctcggccgccgtctggactgtagcaagcagtgctgctgtccgccgcgctccggagccatgcgggaggggatgaaggagagggacagaagtgggagcccagatgcctcgggccctcctcccttccgcagcccggcgtacaagacgaagctgtgcgctttatggagaaacaggggcggctgcacccgccccaactgcgaggttcgccacagcgaggg

SEQ ID NO: 81462 - DNA, 248 bp, Zea mays
  Clone ID: MRT4577_17430C.1
taaaatacattacacaacaattctattaaacatatcaaaaaaatatatataaatactaaactaattaaaattaaaaaacaacattgaataaacttaaatacaatatattaaaatctaacaataaccatatataatccaatcaacataattcttaaaaaaaaaaaaaaattctctatttacaaaccttaatttatatccaaaaacctaatttactttccattcacataaaatttttagaatactaaaaa

SEQ ID NO: 81463 - DNA, 1107 bp, Zea mays
  Clone ID: MRT4577_174310C.1
gcgatcgggcacgcgccgggccggcggcagggtctcctcgtcctcgccgtcgactgctacaacggcgacggcacaccggacgccgagcggatgaagaaagctgtcgacctggcgctgtcggcggcggcagcggccggcggccggctcgggtgcgtcctgtcgaccgggatgaccatagccgaggccgcggacgcgctcagcgcctgcggcgtcgacccggccggcttcgacgcgctcgtctgcagcagcggcgcggatctctgctacccgtggagggaggtcgcggcggacgacgagtacgcggggcacgtggcgttccggtggcccgggaaccacgtgcgcgcggccgtgccgaggctcggaaaggccgagggcgcgcaggagaaggacctcgccttcgacgaggccgcctgctccgggcattgccacgcctacgccgcggcgggcgcgtctaaggtgaagaaggtggactcgatccggcagtcgctgcgcatgcgcgggttccggtgcaacctcgtgtacacgcgcgcgtgcacgcgcctcaacgtcatcccgctctcggcgtcgcggccacgtgcgctaaggtacctgtcgatacaatggggcatcgacctgtccaaggtgtccgtgctcgtgggcgacaagggcgacaccgaccgcgaacggctgctccctggcctgcacagaacgctggtcctgccggagctagtttgccacggcagcgaggaattgtgccgcgaccaagacgggtttctggcagaggacgttgtctccatggactccccgaatatcctcaccctcgccgagtaccaggcggcggtcgacatcctcaaggctatttgagagtccgggattatgatacatgatctgctccgacattccagctgttggttccacactctgctggggttattttggacggacagttaaaatttcacagcgaatgactgcaaactttatataaaaaagatacatgtttttgttttcggttacttttatttttttggaaggggcttatggtataagtgtacatgaatcttttggtgcacatagtatacatattaaattatatttcctctatttcaaaataatagtcgttttagtttt

SEQ ID NO: 81464 - DNA, 322 bp, Zea mays
  Clone ID: MRT4577_174311C.1
ttgaaaaccctaaccggccatcccggcctttttttcggcggcggcttgttttgtctcggcggccacggtgcggtgggagcggttccacgggctgcccggcgcggccccgtatgggcggcgcgcgggcgcggtcggccccccggcacaggcgcgggcgcacggttccccagccccggcggtgacgggtgcgaccccggcgggcgcggacttagccgcgtggcgagcgcggtccatggccttgacggcgggccggccatggcgcatggcacggtgcggtcgcgtggccaccggcggctcatccccggtcacggcgcgggcgcgc

SEQ ID NO: 81465 - DNA, 341 bp, Zea mays
  Clone ID: MRT4577_174312C.1
aatctgcaatatataataagatttaaaaatatttctgtcaaccgcgtgaataggacaatggcaggcatctacaaaaccgcgcagatctgtgattgggagcagcttcttcacacgctcaagctcaccgaacgctgctatcaatgctttactagttgatctgtaaaactttaagatcactcatggtgtagatatcacaccctacccgtacgattctcgtctgcaccatgtgcttcctcgtgtatacaatctacagacaggatgctgtccgttctaacagtgccagacatgaatctgcaggatctggaaaagagcttgttcgatggggaaaggtaggtactgaa

SEQ ID NO: 81466 - DNA, 375 bp, Zea mays
  Clone ID: MRT4577_174313C.1
tcccgttcgacgacgcgtccggggacgcgtcggccactcatcctcacaggatgctacatcttttataacacgcagacatagagctatagggggttgtgcagcacgagataatgatgactacccctagacgagctgcctaaggtgctgaacgaacgaaacttacaacatgctaaccttcttggtctacctaataaccaccatgctgctaatggcactaacgctcatcatataactctcgagtcaggattaaattgtgtatgccacccacactggtacatccagagcacttatgccacaaatcgccaatgcctttacgaaagcctgcactgcctatgcagcaacattgcgagacacgcttacatatcacatgccaac

SEQ ID NO: 81467 - DNA, 203 bp, Zea mays
  Clone ID: MRT4577_174314C.1
ggggtgggttttctcttagttgttgtaacagcttaacagtttatgtgcttcaaaaattgcttgagcttataaaagaaagggcagtactggacaagaaagctacagcttcatgacaagacttcacttcttagggtatctagggccccagtggcaggagctgaggatgagacccgtggagagaggtctcgaggaccctgggacaa

SEQ ID NO: 81468 - DNA, 234 bp, Zea mays
  Clone ID: MRT4577_174315C.1
ttgggtacctcgaggccggccgggttgaagtctcctgcaggcttcttttcgtttgccaactccatgcccacaagctccaagaacggcgccgggtcttcgggaaaaaagatagtttcttcagtccgacaccgcttctagcttcccctcggcgatctgtgaagctatgaagccacctctcgagaggaaccgactaagaacgccactcgtggtggtgggacagtcacattagcccta

SEQ ID NO: 81469 - DNA, 540 bp, Zea mays
  unsure (1)..(540): unsure at all n locations
  Clone ID: MRT4577_174316C.1
gnnaggagggcttgtcttaagnngnaanaaananttnnnntannnnnnnnnnnnnnnnnnnnnnnnnnnnnnnnnnnnnnnnnnnnnnnnnnnnnnnnnnnnnnnnnnntagcnncaacagagnaacantggcgaccgngatnggtgtccctacttatgctccttgctctntntgcatgtgttgctaacncgacaattatcncttaatgctnacaagcttcnatagctaacccttnttccaccataccttccatcaatgatagcttcagtatgtgaaaacccagctcttcagccctatnggctccaacangcaatcatcagcaggcaacatacctttatcacccttgangnnacaacaatcgnnagccntatctnnggtgcantnatnggtacaaaccatcagggcacannancttgcagcaactcatgctacctgtgatcaaccaagtngctntggcaaacctttattgctactctgacaacaacaaaattcttcnatttaaaccaactgnctacctgaaccctggttgttaattgcaa

SEQ ID NO: 81470 - DNA, 676 bp, Zea mays
  Clone ID: MRT4577_174317C.1
ggccctaggggccttttttttttttttttttgtgatctggatgttgtaaacatgtaatgactggaagctggaacgaactgacgctccatttccgtttgctgagagtgttgggggaatatttgctcattttgcttgctagaccggcagtgttggcaatgtcgcgcttattttgctagctagatggacataaataaaaatctacttactactagctccgatgccgtatttatttgaataacttcagtctatttattaccatgcgctaattttactgcaattatctgcagtaggggatcatggtaaattgtcagagtttggaggcgttcgcggtaactttgctcagagcggtcgctgccttggacccagactgccgtcccaggtgcctgcagatgaactcgccggcggccatcaccttgcccaggtcgacgcccgtcttgacgcccagcccgttgagcatgtacaccacatcctccgtcgccacattccccgacgcacccttcgcgtacgggcagccaccgaggccggcgacggaggagtccaccacgcttactcccatctgaagagagataagaatgttcgagagggactggccgtaggtgtcgtggaagtggacagcgagcttctcacgggaacgacggagatagctgcctcaagcatcggaaccacggtacctgga

SEQ ID NO: 81471 - DNA, 596 bp, Zea mays
  Clone ID: MRT4577_174318C.1
ttctccaccgagcacagcgccgaaaaccgttgccatcgatcgatcgcccgcaaactgacctctacagatgtctgaagccgcggagggatataagaacgccgcgcagggcgtggaccacatacaaccttaagcgaaagggacaagatgacaatgacgcgtgcttatcgcataaagaggaccacccagatgaagaagctgatgaacgtctattgcgaccgccagactgcgaacatgaatgcaattgcattcctgattgatggtacgcaggcttctcggggaacatacccctgatgaactggagatggaggacggcgacgagatcgacgccatgcttcaccacaccggaggcagtgttcctaacaccacctaagagcatgaactgcagaacctcctattgctctccggcctgcgaaatactatacaaaagggaatgagtctatttaacgaacttgtgatgatctggctcctctgtgccattgctgatgaacatccttaggcgttatttatggggatggtgtggcactttgttctgtcatcactcggatatatatccctaatacatggcgccatgtttgtccttacttgccccgttaaga

SEQ ID NO: 81472 - DNA, 371 bp, Zea mays
  Clone ID: MRT4577_174319C.1
cggctcgaggccggtgagccggcgcgcgcgcaacctaacgcgaaaaaaaggaacggagaaaaaaaaaaacacaaagggagctaccgtctggtggtggacgtggaaagcctcgcggtttccatgattaggtcgccagttccatcgcataaactgcttcgaaactaagaaatgtaaacgtcagccagcatgtgcttgctaattcaaccactccttgttgtttttttttcttttcgtctagtttagggttttaagtaggaaccgtctttttttccttctcttctgtctttttcccatgccaattatgagagagaccagctttcgttgaataattagcctgcacgttacctgaatgaaccatctctcttttggtg

SEQ ID NO: 81473 - DNA, 692 bp, Zea mays
  Clone ID: MRT4577_17431C.1
aaagctccagattccgaacagcaccgccgctgacgcatctcgagtagtttccagttcgccggagaaggagcaagatggccggaaggaagggcggcgacaggaagaaggcggtgacccgctccgtcaaggccgggctccagttccccgtcggccgcatcgggcgctacctgaagaagggccgctacgcacagcgcgtcggctccggcgcccccgtctacctcgccgccgtcctcgagtacctcgccgccgaggtcctggagcttgcaggcaacgctgccaaggacaacaagaagacgcgcatcatcccgcgccacctgcttcttgccgtccgcaacgaccaggagctcggcaggctgctcgccggcgtgaccatcgcccacggcggcgtgatccccaacatcaactccgtgctgctccccaagaagtccgccgccgccgagaaggaggccaagtcgcccaagaagaaggccgccaccaagtcccccaagaagaaggccgccgccgccaaggagtaggcgccccatagcctagctccacaatcagggagaagatgacgagacttttgattttttttgcgggattgggtcttgtaattgcctagtctgtagtggctctttcattacctcgatgagcaagccattaaggggctgtgttttgtacctgattaatgtcgagaatggctaaatcctttg

SEQ ID NO: 81474 - DNA, 1969 bp, Zea mays
  Clone ID: MRT4577_174320C.1
cttactgagtacggtcgcattgggtcgacctcgcggccgcgtgggcgggcgcgggggcggacgcgtgggcgagtgctgcaaacacaggcacacagctgctatcggatgtcggaggccaaaacccagacgcaacgcaacgcatccccctctctgtcctctccgtcctgaactcgcgcctcgcttcgtctctcccattcccacccgctgaagcttcaaggagcttctcgtctgagaccgagctaacgagctcaccggcgggcaggatgctggcggcgtccaccaaggtcggctctaggctggcctctccgcacgcctccttgtccgccggtgctgcggcggcggctctggcgagctcccccgtgctgggctctgggatgctcccaggcgccgggttcggcgagacggggagtcaccacgcggcagacgcgccgccgccgctgccttgcagttcctcgggcgattcaagggaatattatcagtggaagagactggtgaatcaaaggcagtcaacgctagatggaggcaaagtgcctgctgcattgggccaccatgtttttggtgcgggctgttcctcacggaaccaacatatctacagatatttttcatattcttctcatcaagggagtatatggggcaggagcaaggttctacatgacctgccagggtatgtaaaaattgtggaagtagggccacgagatggtctacagaacgagaaggacatcgtgccaacacctgtaaaggttgagcttatacgaagattggccacatctggattacctgttgtggaggcaacgagttttgtatctccaaaatgggtacctcagttagctgatgcgaaggatgttatggaagcagttcggactatggggggtgtacgttttcctgtattgactccaaaccttaagggatttgaggcagctattgcagcaggggcaaaagaaatcgcaatatttgcatcagcttctgaaggattttccaagtcaaacataaactgcaccattaaagagagcattgcccgttataatgacgttgctcttgctgcgaaagagaaagaaattcctgtccgagggtacgtttcttgtgtggttggatgcccagtagatggaccagtgccaccttcaaacgtagcttatgtagcgaaagaactttatgacatgggctgctatgaggtttcacttggtgataccattggagtcggtactccaggcaccgtggttccgatgcttgaggcagctatctccgtcgttcccgtggagaagctcgctgtccacttccacgacacctacggccagtccctctcgaacattctcatctctcttcagatgggagtaagcgtggtggactcctccgtcgccggcctcggtggctgcccgtacgcgaagggtgcgtcggggaatgtggcgacggaggacgtagtgtacatgctcaacgggctgggcgtcaagacgggcgtcgacctgggcaaggtgatggccgccggcgagttcatctgcaggcacctgggacgccagtctgggtccaaggcagcgaccgctctgagcaaagttaccgcgaacgcctccaaactctgacaatttaccatgatcccctactgcagataattgcagtaaaattagcgcatggtaataaatagactgaggctattcaaataaatacggcctcggagctagtagtgagtagatttttatttatgtccatctagctagcaaaataagcgcgacactgccaacactgccggtctagcaagcaaaatgagcaaatatgtgaccacctctacgggaaagattcccccaacactctcagcaaacggaagtggtgcatcagttcgttccagcttccagtcatcacatgttcactcagcaaacagaaatggagcatcagttcgttccagcttccaaaaaaaaaaaaaaaaaaaaaaaaatggacgtcgtgtagagagacagagagaataccaatgaagtatactccc

SEQ ID NO: 81475 - DNA, 252 bp, Zea mays
  Clone ID: MRT4577_174321C.1
gttattctgagttcaaaatgcagtagcgtatgcatttactcgtgtgtaatttcaaactcctttcgtcttaatgaaacacgggtggcagccctgttcgcgaaaaaaaaaaaaaaaaaaaaaaaaaaaaaaaaaaaaaaaaaaaaaaaaaaaaaaaataaaaaaaaaaaaaacacaaaaaataaaaagagagaaactctttaatagagacacaataaatacaataaactgaatcgacggtttacaacttttaca

SEQ ID NO: 81476 - DNA, 419 bp, Zea mays
  Clone ID: MRT4577_174322C.1
cccacgcgtccgcccacgcgtccgaaacaatcatatatgcttagaactgctttcatttcaaagtaacttatgtacatctgacaaaatgcaaactagctacatttctatactttgtatttgctttggtttgtgttggcatcagtcaccaaaaagggggagattgaaagggaaatggcctcaatcatttcctataatcgattttggtgtttgacgaccatcacaaaccttatggactaactagtttgcctagttgatcttttctcaggtgcataaagtttatatacacatataaggaaaatgacccttgggccaattctataagtatggggcaagtcaagattgcaccagcctgcatgcaccggactgtctgtgtgcaccggacagtgtccggtgcctaagctgtcgcacccaacgaatag

SEQ ID NO: 81477 - DNA, 355 bp, Zea mays
  Clone ID: MRT4577_174323C.1
tgggtgaccaccaactcaagctcgtaactcgcccattgtgttctgtctcgccacggcaccgtggggccgggtgccataaatatgttgctggcaaccaaacacagcccattgcacaacgcgaaggcgacatatgcgccgaggccggtctatgcacataacccagtaacccatcgagcatacattcttcatacctatactccacggacagaccctttcaggatggggcaaggactgctcaggaatagcccactatttcctaaaactatagaagaccatgctgaatctaaacactatgcatgaaaaccatgctctcgttccgaactaccaccactacagatgcatcataacaattgcc

SEQ ID NO: 81478 - DNA, 366 bp, Zea mays
  Clone ID: MRT4577_174324C.1
caaataccatcccataatcaaaaacactcactgccggcacttaatacataggatgggccaccatcgccacgaacctctatatcataaacaacacatgaactacactgaacactacctccaacattttgagatccacgaccccatcggtgtcaaccacgccaacatctacttcttgtgtctcaagacggcccaccccgtggtcactatcaacccgccttaattctgcgagctgatcacattccaagccggctgtctcgctaacaacaatctccactttaacctcttgcacaccaatggcatcgcgaacggcatcgaccatcaggcgtagctccccatgcaggacttgcacatgctgttcgacaacta

SEQ ID NO: 81479 - DNA, 359 bp, Zea mays
  Clone ID: MRT4577_174325C.1
taaattaataatcatatttgggcggcgtaaaaaatgtgcggttcagtgtacatatattacacaacattatatggtgcattacattgtctggaaataattaccggctactgaactcaaatatactatatattaagcacatttgaatggtcgcttaccatatactttttcatgtcctacgaatagcacagcgctacttttttattacaaccaccatgccttggaatagtccattaaacagcactaatgtctctgcgatgtgcacctagacaggttgtggacacagaacctgaggggcatctagacctaaccatggaagtgacactcacaagtaatgacatctacatgagtgtgtggtccca

SEQ ID NO: 81480 - DNA, 482 bp, Zea mays
  Clone ID: MRT4577_174326C.1
ttttccctaccttttttttttttttttttttttttttgttttttttttttttttaaagaaaaaccaaccccttttcctgtgccccttttccatgttaaaccccaaccttattttttcccttccttttcaaaaaaaaaaaaaatggccacaaaaaaaaaggcaaccttttttttttttaaaaaaaaacacacctacgtgcctccaacaccaaaaaaggcttttatttggggtattccttctgggaaaatgaggaaaaaaaaccctaaacccttttatcaatgggggaaaattattagctttaccatggaacccccccccacaattcttaacaagccttaacaaaaacaaaactctccatttgctaaactaaacaatcatttttttatcggttgaccggaaggtcccaaaacccacctccacatgcctttggatcatcccccgaacaaaagtttggtctgggctttggatccccatttggaaaa

SEQ ID NO: 81481 - DNA, 341 bp, Zea mays
  unsure (1)..(341): unsure at all n locations
  Clone ID: MRT4577_174327C.1
cttcacgaaccttctagaaccccgtccanaaccctacccaaccatggcggcctccctcctctcccgcgccgccgctacctttttttttttttctncncnncccnnccnacttgggggggggtctttttttttttcccaaggtcnnntcnggtgggcgaaatcacaactttccatggcnccngtcccccccttttctgcccgtngccactgctgggcgcgttcgggatcgcggngcggtgcaacgccacgtngttttnntncggggggtccgaggccgccgggggnccacacagngcccctttcttttcccctggtgtcggncgnattgtttcacgccaacc

SEQ ID NO: 81482 - DNA, 736 bp, Zea mays
  unsure (1)..(736): unsure at all n locations
  Clone ID: MRT4577_174328C.1
aattcggcacgagggcagaacctggttgtgatcataattctacttcctctggagataaagtggcttgcttttctgtatgtctaattttttgtttgaccattgaaaaacaaacaaccaacttacggatcaaatcagtattactgccagaagtatatttgacccttaacactatttataaattacataaagtttcacgattaaaactgacggacggatgttatttggcctagaaatagctcgaaagctctaggcttaacaacccttgcactaaattattgtgattaacgttgtactttatagtgacaaaaattaattggaattatatagtttcttttgttttgtagaagcaaactaagttaggctataataatatagatagatgattaggtttatatatggtttcttttgtgaattttattaaggatcaactagtgtcatgaagttgatagacataaaatagcgacacatttcttttgccgtactataaaaagcgctggaataattaagatagtcaagagggtgaatttggtgtctctaacttttcttggacaaatttaaattttgaacacaagcttaactattctccgtgtgttcaataaacgtgtctaataatatgataanaaagtttatatccctgattttctattttatactacgatggtaattttaaggatgctaattttaaatttgaatgctttaatataaatgtataaaataagtaaaagatcaatggact

SEQ ID NO: 81483 - DNA, 837 bp, Zea mays
  unsure (1)..(837): unsure at all n locations
  Clone ID: MRT4577_174329C.1
tggctcttcccctccccccatctcctcccccgacgccgaaccgaatcgccgcagcagccgccggagaagaacaaatcgagcgccagccgccatgtccggcgtggaggaggaggagaacgccgccgagctcaagatcggcgaagagtttctcaaggccaagtgcctgatgaactgcgaggtggcgataatcctggagcacaagtgggagcagctgcagcacatgtcggacggcggcgccgaccaggtctcgcaggtgttcgagaagtcgcaggcctacgtcaagcgcttcagccgctacaagaaccccgacgccgtccgccaggtccgcgagacgctctcccgctacagcctcgtcgagttcgagctctgcaccctcggcaacctctgccccgacaccgccgacgaggccaaggcgctcgtcccctccctcgtccccggcggcaggttcgacagcgacgaccgcgtcgacaagatgctcaacgacctctcactcatcaagaagttcgagtagccgcccccataatatgctccttcttgctcttcttgtgttcctccagtggacatggacatggagaccgtgtgccatttatcagtctcaagaagtactagctactagtagcctagtttggtgatatgtttaatcttcagattatctcctcctatgctatgatcataaggcatcagcagtgtcaatctcaaatgtatggagttgattaaccttgttggtatgctgtcttggagaaaaatgtagtaacttcttggtggagatatatggnagttaacctcctatatgctatgactantaaggacgagtgattaaacatttggtgatatcag

SEQ ID NO: 81484 - DNA, 699 bp, Zea mays
  Clone ID: MRT4577_17432C.1
aacaactcagagcattccgatccagcgcaaccgccgccaacaccactcctcgagagtcctcgccgccggagaagtagtagcaagcaagatggccggaaggaagggcggcgacaggaagaaggcggtgacccgctccgtgaaggccgggctccagttccccgtcggccgcatcgggcgctacctcaagaagggccgctacgcccagcgcgtcggctccggcgcccccgtctacctcgccgccgtcctcgagtacctcgccgccgaggtcctggagctcgccggcaacgcggccaaggacaacaagaagacccgcatcatcccgcgccacctgctgctcgccgtccgcaacgaccaggagctcggcaggctgctcgccggcgtcaccatcgcccacggcggcgtgatccccaacatcaactccgtgctgctccccaagaagtcccccgccgccgccgagaaggaggccaagtcgcccaagaagaagacctccaccaagtcccccaagaagaagaccgccgccaccaaggagtaaccgcccccatagcctggccagtgttgcttagatccatttctcatggactaagatgagaccctgtatgtaatgcctgctagtctgtagtgcccgtcagattcgtcgagcaaggttgacattgtgatatcagtgagaatggctaaagatgcaatcatttcaatctctgc

SEQ ID NO: 81485 - DNA, 576 bp, Zea mays
  Clone ID: MRT4577_174330C.1
atatcctattagactccggcgccgctgtcgttccctcactccgcgtcgcccgccgctgccgaataccgcgacctgctctatgaccttcagctgtccatcatggcggacgtcgatgccgaaccgtgagggtcccctctgcattcccacgaagaggacgttcttgcaaggacagctaccgcggcgccgacctaaatgtgcttatcgacatgtgcactgacgacctcgaccagctcttccccgcgtgcgcgcatctgacatgttcaagaggggcatgaagatgaagtccatgctgctcatcacgaaaatgcagaaggcgaagaatgatgctcctgctggttacaagtctgagccagtcaagatgcatctccgtatcatgatcaatgtgcatcagatgattgtgagtaatgttgccgtctacaacatcaagaccttcggcacatgctgcgatcaacgctgagatgatcgaccactaccttgctgagatctccatctcctacaagcacggtgtagcacgacatgaccgagatctgggccacccatgtcctcgatgatgagtcctctgcaatgagcatatac

SEQ ID NO: 81486 - DNA, 697 bp, Zea mays
  Clone ID: MRT4577_174331C.1
accatacaaaaactgctccccgccgctctcccgctatgaagcagctccacaagtcccccacccacgccccgtcgccggcgcacgcgccggcgtccaagatctccaagcccgcgcgccccgggccgcgcacctgggtcggctacctcctccgcgagcagcggctcctcttcgtcctcctcggcgcgctcatcgccacctccttcttcctcctccgcccctacctcttctccctgtcggcctccaaccccaccgagcgcagccccatcttctccttcgtcggccactcgtccgacccccgcggcgtccccacgggcttccgcccgccgcctcgccgcgtcgtcgtcaccggcggggcgggtttcgtgggcagccacctcgtcgacaggctgctggagcagggggacagcgtgatcgtggtggacaacttcttcaccgggaggaaggagaacgtcgcgcaccacctgcggaaccccaggttcgagctgctccgccacgacgtcgtcgagcccatccttctcgaggtcgaccggatctaccacctcgcgtgccccgcatcgcccgtgcactacaagtacaaccccatcaagacgatcaagacaaatgtcatgcgaaccttgaatatgctgggtctgggaaagtgaatcggtgcaaggctcctgttgactagcacaagtgaagtttatggcgacccacttga

SEQ ID NO: 81487 - DNA, 378 bp, Zea mays
  Clone ID: MRT4577_174332C.1
gactggcaaaaaatggaaggatgtatgaagttgatacaactaagcacctgaatgaatatggtgaggcaggcttgcgaacattggcactatcgtacagggtgcttgatgaatcagaatattcttcttggaatgctgagtttcttaaagcaaagacctctattgggcctgatagagagttgcaacttgaacgtgtatctgagttgattgaaagagagctgatccttgttggtgcaactgctgtagaggacaaattacaaaaaggggttcctcagtgcatagatcgtttggcgcacgcaggtctcaaaatctgggttctgacaggtgacaagatggaaactgcaattaacatcggctatgcatgcagtttactgaggcaag

SEQ ID NO: 81488 - DNA, 541 bp, Zea mays
  Clone ID: MRT4577_174333C.1
gcgttcgtgctggcctacacctaaccagtagcgagagaggtgagcgccatcactggccgaaaatgaatatacgcagctgcgcctttgcagtgataagctactcgccttacctgtcctggctccccggtgcgcggggcacgccaggggaccccctcgacggggctggtgccgctcaccggcacgacggggcgggtcgaggacggcaccagaccctgttgtggatccactcttccttctttgccgctgccaaaggtgtctattcgactgctacactggtgccatgaaaccataggctggcctagctgacatcccaccaactgtggctgctgtgaataatcctaaccctgaagtggcttatgatgagtgcaatcctgactcagttctcctgtacatcccatctagcttgcgtttgcttactttgtcctgagtggcgggaggttcatatatgccttactgctgcgtctcctggtattgacacttgtcctgagcgtggcagctagataggacgtgctttgcctttccttccctcgcggtggacctc

SEQ ID NO: 81489 - DNA, 622 bp, Zea mays
  unsure (1)..(622): unsure at all n locations
  Clone ID: MRT4577_174334C.1
gctttcgnaaacttgncggnacgcacggccttcgtgccggcgacgcatcatatttgatagactggcaaaaaatggaaggatgtatgaagttgatacgactaggcatctgaatgaatatggtgaggcaggcttgcgaacattggcactatcgtacagggtgcttgatgaatcagaatattcttcttggaatgcggagtttcttaaagcaaagacctatattggtcctgatagagagttgcaacttgaacgtgtctctgagttgattgaaagagagctgatccttgttggtgcaactgctgtagaggacaaattacaaaagggggtaaaatacagtgtctgacttttcgtattgttaagatatgcttcttggttcctagtattatgctagtaactgtttcatgttgttttgatttataagttatgtttttgtgctctatcaggttcctcagtgcatagatcggttggcgcaagcaggtctcaaaatctgggttctgacaggtgataagatggaaactgcaattaacatcggatatgcatgcagtttactgaggcaaggcatgaaacaaaatgtttgtccatacccactggtgagcaggtagctcaggatgcaaagaagttgcaa

SEQ ID NO: 81490 - DNA, 458 bp, Zea mays
  Clone ID: MRT4577_174335C.1
ccctgcaacgtctcctccttccgcccccctcgctctccatcccctccgggccatcgccgcctgaatccttcactagggttagggtttacgtaacgaacccgcgccatggctaccttcacttcccaggtcagcgcgatggctggcgcctccccgtcgtgctctctcttcgtgagccggcggcggccggcggtcatgcccctgcagatgcgggttgctcgtggcgggaggccgcgcgggttggcgatgcgggtgacgtgcgagaaggtggtgggaatcgacctgggcaccaccaactccgccgtcgcggcgatggagggcggtaagccgacggtgatcaccaacgccgagggccagcggacgacgccgtcggtggtggcgtacaccaagggaggagaacggttagtggaccagattgccaagaggcaggacgacgtcaacccgctgaacaccttcttctc

SEQ ID NO: 81491 - DNA, 653 bp, Zea mays
  Clone ID: MRT4577_174336C.1
ggccgcgtcgacgagagattaatagatccgactctcctttgccgccttcatccaccatcgccatgaacagcggccgcgcgagcaagcaggataggcggcaaccgacggaccggcggcgcgttagcagagcaagggaaagaaagaggaggtgggaaagatgcgcgtcatgtccctcactccctctcccctcgccctcggtttttttcctccgtactattgttttgggttgcatagaaagagggtcacgaaaaccgcaaaatctttcacgagttccgtcgagctttgtcggagacatctgatgatatattttttatggtgagaggacatccttcgaattgctcaaccccgcaaagcaattgaggttgtgtcaaactcctctagctcaaccttaactagccagcaacaaaaactccattgactccatcgagatttataatttgtattggattatttccgacggtctagaacttatttccagttcgtcagttctaatatgtggaaataagcttatttttaatggcgggcgtcagacatagctaatgtccggcagtcattagtggtcgtcgttgttaaaaccgtgtaacaactgtgacgacgtctagtgggccccacaattttatgtctgacgacttacatagagatcgttatatata

SEQ ID NO: 81492 - DNA, 171 bp, Zea mays
  Clone ID: MRT4577_174337C.1
ctcagcctgtagccatctcatacaactgcaataccccgctcattcgatttatggtcacagctgtgcgctgtcttaaatgggattgctctctactctcccacaaaatacaagcccgtaccatatatcgtatatcttgagatgactagacgtagatgatccaactacatgtac

SEQ ID NO: 81493 - DNA, 584 bp, Zea mays
  Clone ID: MRT4577_174338C.1
cattgggtacctcgaggccggccggatccacaacccgcaacatgggcgtcaccaagaccgttattctcgagggcaacggcccctcccccgtcaagggcgacaccgtcaccatgctctacaccggctggctcaaggaggctggcaagaaggacggcaagggcaagcagttcgacaccactgagaagcccggccgcgggccattcaagacccccattggcgttggtcgcgtcatcaagggctgggacgagggtgttgtccagatgaagctcggcgagaaggctcgtcttgatatcagctctgactacgcctacggcaaccaggatgttggcggcggtctcatccccgctggctccgagctcatcttcgaggttgagctcaagaagatcaactaaacgatgcggcataatgatgatggaggatggcacattgcaggtatactggaagggtggactgtatggcggaaaagctaccagacgctctttctcctgcgcggcgcatgtcgctgatgctggggttgctgtagaaaagcatttgcctgtttaatgcatgtcatcttgatgaaaaaaaaaaaaaaaaaagcggcc

SEQ ID NO: 81494 - DNA, 363 bp, Zea mays
  Clone ID: MRT4577_174339C.1
tcccacgcgtccgggccaacgtcaggttccatgtcagtccgtgcgaacacttcagtcggacaagggcggacggcaagaaggtgatcgacagagggtctcatttcctcatggttggcaaggaggagttggagatcagctttgaagcctgatgccgtaagaggaaaagcgttacaatttacaggtgtcgccgggaaagttggtaacttcagcatacaacacaagaagtcaagtaatttataattcattcatatttgcctcatcaaaatgttggggcttttacatgtgatttattattaagcatatttatctatcaaatgttatcatgtgttacgcgtaaaaaaaaaaaaaataaatatattataa

SEQ ID NO: 81495 - DNA, 342 bp, Zea mays
  Clone ID: MRT4577_17433C.1
gactgaacggctcgacccacgcgtttcttttgtacaggccaacactgacggtggcaggtgaccaacgaaccccgggtggctctacagcgactccgtcggcggcttgccttcccgcgccgcgccgggcccggatcgctcgccctttccgactgtcctgctcaacgccgccaccagcacgtactttcccgcgccggaggtcccgctcggctgacacaacggagcggcgcaagctcccccactggttctgaagatgcgagaaagaaaaagagggggagaacgagggtggcgtctatgggcaccgcggaccaatcagaatgagagctgagtgatggctcgcaagcg

SEQ ID NO: 81496 - DNA, 884 bp, Zea mays
  Clone ID: MRT4577_174340C.1
cgggtctgcccacgcgtccgggaacaaacgggaccgattattgatcaactttcaaatgaggttgcaaatgaagtcctacatgcagtgggacagtttctcgtggaagaaagcttctatgatgtagcattaaactggcttcagcagaatcctggcttttcatttggtctagaatgatggtccatcagttttactgggatgggtcaaggttgaagggggaaactgtagtgaattgactgacctggtaatggaaaacggctctggttatctcggaatacctctggatgcaaagcgggacctcttactgggacttcatgaggctaccgtgattgagctttctgatgattgggagggagcaacacccgtacagataatgaagcagctagcttcatcctggcgcatcgacctgcagcaacttatcaattagggttacattgattgtcgatatatgggttaatttgaatatttgaattgttcgtttccctctggttcttgtctggtctttagctattagtattaggaatattatattgggtggggtggaagtggcactgtgttgaaatggattggttgtattggaaaatatggtattgatgttgtctcaccttcattgaggctagggagcaacgaagaaaaattctaggttgggttttagatctccatcctcgtcctggtcctggtgacggaaaaagtttcctgcggggatcccataaactcttgcccgtatttctttcccatttccgctccacgcggggataaatatctgtcgggatccgggtctccgcttaaattataatcgtgacatactttctttgttattaagccaaaaaaaaaaaaaaaaaaaaaaaaaaaaaaaaaaaaaaactcgaggggggggcccgtgtacc

SEQ ID NO: 81497 - DNA, 235 bp, Zea mays
  Clone ID: MRT4577_174341C.1
ggcgcttacaatgaaccttattcgtcagctgaaataactatttaaggtggcaaataacagcactggaatcggtatgctcttcagcacaacaggcgtttcaaaacgcgagctccgcttaacacgataacctactgctggatcacttaacgggcacctgcttctcaatgactactaatctatattgccgctaagtactctatgcttcccttgcggtctggctttatctacctctccc

SEQ ID NO: 81498 - DNA, 258 bp, Zea mays
  Clone ID: MRT4577_174342C.1
actgtccacacacattacttccgcactggaaaagacccccaaatctccaacatttgaacgaggggttgacacttggcaaaacacacagttttttattaaaacgtgttttttaagagcaaaaaggaggacctccccctttgtgggttttgttgctctataaaaagaaaaaaaggggtggccccccttctttttagggggggtttttttttggggggggccccaagctcaaaattccttttttgcgcccatttttgggag

SEQ ID NO: 81499 - DNA, 603 bp, Zea mays
  Clone ID: MRT4577_174343C.1
gggtacctcgaggccggccgggccgggattcgttgctgtcgcacacatatagccaaagaccaaccacaagctaagctactagctcagccagcatatctctctccgctctcttggcaagcagctgcacgcaataatggcagcaaccacaaccgacgaccaagaacgccccgctcctcctcctcctcctcctcctggcagtcctccctatagccacactctcctcccgcctggcgcaccaggcacgcacaaaagccacggccaccacagggccacgaccacggtcacggccacagaccgtcggccaagcacccgccgcctcctccatcatcatcgtcaccaccaccacccccaccacccgcggcggcgctggtgcgcaccacctgcaactccacgccgtactacgccctgtgcgtgtccgcgctgtcggcgtatcgagcgctcgacagaggcgtgaaggcgctcctcgagaactgcggcgccaagtatgtcagtgcccgcgacggtctggccgccgccgttgactccatcgcgctcgacgaatacaactccgcgaacgcgcgcgtcagcgccggcgccgagtacctgcaagtgagtggcacgctg

SEQ ID NO: 81500 - DNA, 353 bp, Zea mays
  unsure (1)..(353): unsure at all n locations
  Clone ID: MRT4577_174344C.1
gccgcaaaatccggcggcgacacaccgcgtgcgcggacgcgtgggcggacgcgtgggtgtgggtgtgtgagtctcaaggttttcctgggagaaggttccatgccctctcgccctggtgttctttcttccatcttaatgaaatgacatgcagctcttctgcatggttcgagaaaaaaaaaaaaaaaaaaaaaaaaaaaaaaaaaaaaaaaaaaaaaaaaaagaaaaaaaaaaacaaaaaaaacaaaaaaaaccaacacntccctaaaaaaaccaanccaaaaaaaacactatatacaaacgtaaacttaattgaacctcttaaaaaaatccaaattaccggccggactgtgaaa

SEQ ID NO: 81501 - DNA, 383 bp, Zea mays
  Clone ID: MRT4577_174345C.1
agtaataacaagcatgtaaatgatgttgcataaatagaccgcccataaaagcatgacctttatgcagatttcatgctgatttggtgtggaacagtccaatcaggaatgacagctcgcgtaatcagatttagaagcccatgcaatgtatgtaatcacgaaacgacagctcgcggctgaatcagcaaacaacaagaatagcatagctgtatagcatcaaaacaaggaacgcggtaattggtaaagatcaggtacccatgtcatcctcagtgctcgacagcgactgcctggaaaccgagtcatacccgtacgggagcttcgacagcacccactgctccagatgcttctccatgatctccgcgcaacttggtacaggccaatcacag

SEQ ID NO: 81502 - DNA, 149 bp, Zea mays
  Clone ID: MRT4577_174346C.1
cgatggcggaattagcgacatcatcggatggattggtggacgaagaagcgagtcagctggaaccaggatattggagcactggaagtagccatggtctgcatttcacaaatgagcaggacataagaaggggaaaggcggctcttgtttcc

SEQ ID NO: 81503 - DNA, 272 bp, Zea mays
  Clone ID: MRT4577_174347C.1
aaggtgatccgaaaggactccgccaagaagacggccaagaagtcccgcgtcaagtgcttcatcaagctcgtcaatttcactcacctcatgcccacccgctacaccctagaggtcgactaaaaggacgtcgcctagggcgggcccgacgcgctctccacccgggacaagaaggtcgaggcctgcaaggccaacaaggcgcgcctggaggagaggttcaagaccggccagaacaggtggtcctttaccaagctacgctcctaggcgccgggcac

SEQ ID NO: 81504 - DNA, 671 bp, Zea mays
  unsure (1)..(671): unsure at all n locations
  Clone ID: MRT4577_174348C.1
gngcgggctttncttcttcggtcgataggaaccaaaatcccccaaccgccccagcgcacggcccggccgtctcaggcgtccgcggagatgacgcagcaggacgtggagatggcggcgcgccacgggaccggcgccgacggagcgcgattctaccctcagccgccgaacggcgccggcggcgagacgctcgacgacgacggcaagaagaagcgcacggattgggagctaaccgaacaagccctaagtaagaaagtggctcaaaacttcggtggcatcgacgggatgtggcgtacgccgttcgcggaatcatgacgtgcgcaggacccagccagaagccagagggggacgacggcagctgtggcatcgttgcctgattagctcgtatttgtcttgttgcgcaccctgagcctgaggtgaggaggaagacgcagacgacgcgcctttggctgtggcgtgtggcgtcctgtggcgggcatgggatgggttatgggtcggggcgtgctggtccagcgtagacccaggtcaaatgccactggcggcgcaggccgggctggggtcatgctgctcatgcagatacaacgcgcggtcgcctttgtaatgcatataggggagctgggagtcaatgctgacatcttataccccataataataatatatatctagccttggag

SEQ ID NO: 81505 - DNA, 141 bp, Zea mays
  unsure (1)..(141): unsure at all n locations
  Clone ID: MRT4577_174349C.1
gcggggcttccgnccatgcgtccggcgagtcgctgactgttctggtgatgaccattgaccacctgcaggccacctgatggcacgttctccccgctgactggaagttccgcgtcacgtaccacgcacccatcaactcttaag

SEQ ID NO: 81506 - DNA, 616 bp, Zea mays
  unsure (1)..(616): unsure at all n locations
  Clone ID: MRT4577_17434C.1
cggacgcgtggggtgaagttttcgataccacccatgaagataactctattttctcatttgaaattggacaaggcgctgtcatcaaagcatgggatatagccttaagaactatgaaggttggcgaggttgcaaaaattacatgcaagtcagaatatgcatatggagctgcaggctcgccaccagagatacctcctaatgcaacccttatttttgaggtggagctagtagcttgcaggccgaggaaaggttcaagcttaggcagtgtatctgatgagaaagcccgggtgcaagcaaagcttgatgccaagaaggggaaggggaagggaaagggaaaatagatcgtgacgttgctgctgactattgttgtaaccaagaaaataattgtgggagcgtcctcaaactgctccgtcacttgctggctactgtgcttgatgttgtagcgtggactaatgtatcgaaaagagctaagtataaataatatctggtatctatgtaaaaaaaaaaaaaaaaaaaaaaaaaaaaaaaaaaaagaaaaccccaaaaaaaaaaaaaaaaaaaaaaaaaannaagtcctctgcgttgttaccactgcttaagggcgactgccagcacactg

SEQ ID NO: 81507 - DNA, 377 bp, Zea mays
  Clone ID: MRT4577_174350C.1
cgggtcgacgacgctcactcgtcggcgggcgcgccctatttttttctagactgagaataaatgcttggtctaattactcatacttgctagcattataagaatggtatggtgacacctcaagtcatgccactgcccataggcatacgccgtaatgactggtggagctgtacaattacagacatgtttcaccgtggacaggatccatgtttttcagctgatgttgtagagatggggtaaacacctaccgtaacaagcaacacttaccctgcatgaaagggaactgccactcttcttgtagaggctcattatgaactgtgcaacaaccacatacgccacatagagccacaacagttgccagtgtcttagcgccggctacc

SEQ ID NO: 81508 - DNA, 220 bp, Zea mays
  unsure (1)..(220): unsure at all n locations
  Clone ID: MRT4577_174351C.1
gacccacgcgnccgcgaaacagaagggaggggaagaagggcggggaggggaggaagacgganacagaaggngggacgaaggagcggcgaccggacgccagacacaggagaagcangngcaacagcgggaaaccgaggaaagccgggaagnagcagacggaaacgaacagcagaaggaggaaacaccaacaggagggggagagcacggagaaccgagccac

SEQ ID NO: 81509 - DNA, 205 bp, Zea mays
  Clone ID: MRT4577_174352C.1
cttggtttttttttttttaaaaatacacatggctcatcatgcacatcttaaatcatgccaacagcggtccatcagctaaacaacaatatactgtgatgaacagaagaagaagtactttatttaggatcccaactagggcgggcgagttctcgagaaatgggaggaggccaaggggggcttgccggagaaccagacgcccctgggg

SEQ ID NO: 81510 - DNA, 2753 bp, Zea mays
  Clone ID: MRT4577_174353C.1
cgacgccacccgcccggactgccccatcatctacgccagcgccggcttctacaccatgaccggctacacccccaaggaagtcaccggccgcaactgccgcttcctgcagggccccgacacggacatgaacgaggttgccaagatccgggacgccgttaaaaccggccgcagtttctgcggccgcttgctcaactaccgcaaggacggcacgcccttctggaacatgctcaccgtcacccccatccgcgacgacaacggcaaggtcatcaagttcatcgggatgcaagtcgaggtgagcaagtacacggaggggctcagcgaaaagcgcatgcggccaaacgagatgccagtgtccctcatccactacgacgaccggcagaaggagacggcaatgtcatcgatcacggaggtggtgcagacggtgaagcacccgcgcgctcgctccgagggtgaacaggagcccgtggagcctgcaccgcccgtcatggcgtcgccgttggtggcccctggcacgccgtcgggcggtgccagcctcaagtccccgctctgggacgtgaagaaggaggactcgcggctgagccggaagtcgagccgccgctcctccctcatggggttcaagatggggaagaggagctcgataggaagcaaggatgcccttccagcggaggtggaggccccggccccgcgccggcgccggcgccaccggagtcaacgacggagaagcagcgcaagaacagctgggagcaagaggggagggagagggacatcaggcaggggatcgatctagccacgacactagagcgtatcgagaagaacttcgtcatcacggatcccaggctccccgacaaccccatcatcttcgcgtcggatagcttcttggagctgacggagtacacgcgggaagagatcctcgggaggaattgcagatttcttcaagggccagagaccgacatgtccacagttgataagatccgggaagctatccgggaacagaaagaaatcactgtccagctaatcaactacaccaagagcgggaagaagttttggaacttgttccacctacagccaatgcgagaccagaaaggagagcttcaatacttcattggagttcaattggatggaagcgaccatgttgaaccccttaggaatcgtctctctgagaacactgaactacaaagtgctaaattggtcaaagctacggcagagaatgtggatgaagcagtcagagagcttcctgatcccaacctgagaccagaggatctatgggacatttactcacgatatgtttccccaaagcctcataaacgttacaactcttcttggattgcgatggaaaagattataaaatctggtgtgaagattggcttgaagcacttcaagcctataaaacctttgggttatggtgacactggcagtgtacatttggtggagttgcaaggaagcggtgaattatttgcaatgaaggcaatggacaaatcagtgatgttgaaccgcaacaaggttcatcgagcttgtatggaaagagaaatatactcactattggatcatccttttctcccaacattatatacttcattccagacaccaacacatgtttgtctcataacagacttttgtcctggaggagaattatttgcactactcgatatgcaaccaatgaaacttttcagagaagaatctgcaaggttttatgctgcagaggttgtaattggcctggagtatctccattgccttggaataatataccgtgacctaaagccagaaaacattttgctccaagaggatggccacatcgttctgactgattttgacctctcttttttgacttcctcaaaacctcatctattcttcacactatagtggtgataaagcattctacatcaaggcgaagaagatctaaggagtatctgcccccaagttttgtttcagatcctgccactccatcaaattcttttgttggaactgaagagtacatagctccagaggtcatcactggtgtaccacatacaagtgccattgattggtgggctcttggaattctcttgtatgaaatgttgtatggacgtacaccttttcgaggaaagaacaggaaaaggacatttcataatatcctgcacaaagaccttacatttccaagtagcattccggttagtcctgcggctaagcaattaatccatggattgctacagagagatccctcttctcgacttggttcaagtgctgctgcaaacgatatcaagcaacatcccttttttgaagatatacactggccactcatccgttgcatggagcccccagagcttgatgttccactgaaactaactcggaaggaacctgaacaaaaagtgaagcctgaggaggatatatactcatgttcagattattgagacattttaagggcaggttgtacgatcccccctcccgaccccgtgcatgactttcagcctgaagagattttatattaccgagtggaaataacgttgctgagcatgtacatagtaataaaagaggtttataggcatgcaagatttccagcctgaattgcacaagaggtcgttgtaagtcattcttttggttaggttaagtgaataatccatcaacaggataaagttcttgtaaatgtacactttctttggcatatataataaaaatcttactaatttccgttggtccaaaaaaaaaaaaaaaaaaaaaaaaaaaaaaaaaaaaaaaacaaagttctagatcgcgagcggccgccgactaaagagctc

SEQ ID NO: 81511 - DNA, 152 bp, Zea mays
  Clone ID: MRT4577_174354C.1
agatttaagcaagaataaggttgacaaagaatcagtttcagcactgcttgaactcaatcaacaataagtgcagcagccaatacatgagcttgctcatccttggcccgagtgggtccaactcatgaagtgcttgctcgacatgggatacttct

SEQ ID NO: 81512 - DNA, 375 bp, Zea mays
  Clone ID: MRT4577_174355C.1
cagcaagatcactcgcaccatctgttttcacacacgacaaacacccaactcatatacaaatgcacttacatgcacgctgttcaggaagaaatggcagcgataaacgcaaaagcagctcagctcgagaagctcattaagcatacagtgacaagagtactcattaagcatcagctatattataaatatgaagggagcaaaaccatagacacaaatggatagaatttagctgccgatatcaagtgctgacaaatgtcatgccgtgatcaggagaataaaatccaaatgcaagaattacacccccagaaaccagggatgcaaaatggattcggagttagcattcgacatcacttctgtatttctttggttttgatttac

SEQ ID NO: 81513 - DNA, 451 bp, Zea mays
  Clone ID: MRT4577_174356C.1
ggggccccgggggagccccgggaaatcagggaccgggccgtgggggggaacaaattttccttttagaagaattcaaaaaaaattaggagaaaaaaaggaaaaagtggaacccgggggaaaatagagagggatcaaaatcacaaaaaaaaagcggcccggaatgacaaatttaaaagcgggggggccctaaaggcggatgcaataaaaaataattcaacgggcgaaaagaggcgttttccaaatggaaaaccgggggggcccttttttaaaaaaaacgaccaacacccggggaagggcctttaccgtttgggccccaaagaggtttttttttttaaccaggggggggggcaacaggggatgaaccttctaccccgggggccctaaaaaggtggaaaaaaacaggccccgtttttttgccccaagaagccaaataccggtttgtggggggcaa

SEQ ID NO: 81514 - DNA, 803 bp, Zea mays
  Clone ID: MRT4577_174357C.1
aattcggcacgaggagcacatctacttaccgcacaagctagcgcgcgcaggagctcagctcaggcaggagcgggagagatggagaaggcggaggaggcggcggcggcggcggcgcaggagcagtggcagggcgtggtggaagccaacctgccgtcgaccccggcctctgccgcgtggccgcacatcgcgagcttctgcgcgctgcaccggtacctcccgggcatcgacgtgtgcgagctcgcggcgggggaggacgggcggcccgggtgcgtccgctacgtggcctccctggtgccgggcaccacgaccggggaggtccgcagctgggcgcgggagaagctgctggagatcgacgacggcgcccggcggctcggctacgccgtcgtcggcagcagcatggggttcggcagctacgtcgccactatgagcgtcgtcgctggcgacgccgacgaggggtgcaggctggtctgggcgttcgagtgccagcccgtgcaggggtggagccgcgacggactcctcgcctacctcgatggcggcgtcagggccatcgccgcgcggatcgaggaagccacccgtgccgcttacgccgccgccaatgcgacgccagaggaggcggcggcgtcggtcgccgccaatgcttgacaagtctagctccgagaggaatcgaatcgacagtcgacagatgcatgcatttctgtattgagatgagaatattactgtacgtcgtcaaacttaattaatgcgttgttaatcgcaaccggttgataaaaaaaaaaaaaaaaaaaaaactctcgagagagggc

SEQ ID NO: 81515 - DNA, 444 bp, Zea mays
  Clone ID: MRT4577_174358C.1
cagaaatccagacaatacaatcagcaatagacgggttgggggaagcatgcaccaactgcttacagatcggctcaaaaaaaggccttgaaccatgacaaaactgatagaagagaaatttctcaaagaaccagtccttgctagcacaacaacctgaacacccttgctcacacttaggaaccatagagagaaaaggtcccatgacacgatcaaaaaacgaggaaatactcctctatatacatatcacgctgatgaagctcatgaaggccctgcatcaaaggggggcgaagagcaccactatcctgaatatatcgcccgggcaaatagtcccacatgtccttagcagagtgatggcgctcaagattcattatcaaagaaggctgcaatgtaggcatgatggcactcatcacttgggcatcatcatttgtcccggagccatccttggac

SEQ ID NO: 81516 - DNA, 301 bp, Zea mays
  Clone ID: MRT4577_174359C.1
tgttctcaatgcgagcaagcgcgaggtggcactggcttagcttcgcatacacagatggctaacaagcgtcagcgggaagagcggaagcgctaccagtaggctgacccagacctatttcctctgcaatccaccccttgtaacgacggtaccattagcatgagcacgaagaagcagaatgagagcatgttcaagaaggcaaataagggctgcacgcgaggggctaagcaccctctacgggatcccaggatgcgacccgatgaaacgctgatttatccagaagttcaccgaccacggctgcaat

SEQ ID NO: 81517 - DNA, 1062 bp, Zea mays
  unsure (1)..(1062): unsure at all n locations
  Clone ID: MRT4577_17435C.1
gggaccctcgagattccttccattccagccctccgtccgacgcctctttccttccattttacccctccgtccgtctctcacactgtctctctccaccctctcgctctccgacaaggcgacgacgggtaggccaccgccgccggcgccgtcccactacgacaagtgctgaggccttcatcgctttcttcgccggcgacgagcacccaccaactaaggtcatggaagagatgatagatctaacgggggatggaggtgttcttaagacagtagtgcggaaagcaaaagatgatgctatagcgccatccgagagcctgcccttggttgatgttcattacgaaggtacacttgctgagactggtgaagttttcgataccacccatgaagataactctattttctcatttgaaattggacaaggcgctgtcatcaaagcatgggatatagccttaagaactatgaaggttggcgaggttgcaaaaattacatgcaaatcagaatatgcatatggagctgcaggctcaccaccagagatacctcctaatgcaacccttatttttgaggtggagctagtagcttgcaggccgaggaaaggttcaagcttaggtagtgtatctgatgagaaagccagacttgaagaacttaagaagcaacgggagctagctgctgctaccaaagaagaggagaaaaagaagagggaggaagcgaaggccgcggcagcagcccgggtgcaagcaaagcttgatgccaagaaggggaaggggaagggaaagggaaaatagatcgtgacgttgctgctgactattgttgtaaccaagaaaataattgtgggagcgtcctcaaactgctccgtcacttgctggttactgtgcttgatgttgtagcgtggactaatgtatcgaaaagacctaagtataaataatgtctggtatctacgtagatcacgtaaaaaaaaaaaaaaaaacactaaccgtatcgtatgcatcatgttaggatctatgggccaggctcaatagagaaatttaaataaantctaggaaattttaaaagccccccacgcgtccg

SEQ ID NO: 81518 - DNA, 268 bp, Zea mays
  Clone ID: MRT4577_174360C.1
ttctggctggctcctgtcctcacgctgccagtggttctcgtcctagcagcaaccgcatcagctctcaccagatccgttcatcatttcatccccatgcctccggtgaattcgttcgtcctcatgcctctgctggatttgttgtcctcatagatccgtttgttgtgtttttggtgaggggctgtggtgaccctgagagcgagtttgagagtctgaggagggactgggaggtgctggtgcgtgagttgatgtggctgcagtgctagctgca

SEQ ID NO: 81519 - DNA, 238 bp, Zea mays
  Clone ID: MRT4577_174361C.1
ctatccagtcgacccactcttcctttaactccacggctcgacgagatggacacgatgatcttagggcgggctccgcttctgctcctggtctcggcactactcgttcagatccgagcctacgacccgttgctataccagccgtttgatgatgacttcaagggtagatcgatcgtctgcaagaacgatgaataccaaggtgtatggaagcatgccaagagtgatggacatgatgactatg

SEQ ID NO: 81520 - DNA, 289 bp, Zea mays
  Clone ID: MRT4577_174362C.1
catccttctcaactatcttttatcctcatgatattaacaaatcatctacggtactatccaaaatatacatctgatataaattattatcttatattactacattttacctaaactattttacatctaatataattataagttcataatcttatatatattttctatatatgatcttcaactatagtaatctcatcttatttattaccaacataatctttattacttaaaaaaacatcatatttatatttaatctaactatcctatattttaattcatacatacataaact

SEQ ID NO: 81521 - DNA, 966 bp, Zea mays
  Clone ID: MRT4577_174363C.1
cccacgcgtccggaagactccatcaagcagctcatacgtatatcacttgccatgccagcctagcttcttccgtgtctttctttctcaataaatacatgccactcacatggtgctcctccatcttccaagtcaccaacgcaaattgcaccaagaaatccatcgagaggccgtcgacaggggaattaatggcgtcgtcgtctagcagcagccaccgccgcctcatcctcgcagccgccgtcctgctctccgtgctcgcggctgccagcgccagcgccgggacctcctgcgtgccggggtgggccatcccgcacaacccgctcccgagctgccgctggtacgtgaccagccggacctgcggcatcgggccgcgcctcccgtggccggagctgaagaggagatgctgccgggagctggcggacatcccggcgtactgccggtgcacggcgctgagcatcctcatggacggcgcgatcccgccgggcccggacgcgcagctggagggccgcctagaggacctgccgggctgcccgcgggaggtgcagaggggattcgccgccaccctcgtcacggaggccgagtgcaacctggccaccatcagcggcgtcgccgaatgcccctggattctcggcggcggaacgatgccctccaagtaactgcgaagagcatagtgcatgaggaatgagcttgtagctagctcatatgtctgaataataagcacagcaagaagatgaatgcatttctcggatcgttcatccggaacaataattaaaggggatccggatttgttcttgtgatataattaacgattcctgttatacttggaagtagctaggctcgtccccatccaatgcaagcaaagatctgatctcccaacgtgcatgagaaaatgtgagcgatttacttcaccggtccttcctctaattaaatggaaatgtgaagtggaacataagaaattaaggtgaagcc

SEQ ID NO: 81522 - DNA, 468 bp, Zea mays
  Clone ID: MRT4577_174364C.1
atgacgctcgtggagatgtgcgtgcacatggactgccccgggtgcgagaagaagatccggaaggcggtgcagcggctggaaggcgtgcacgacgtggaggtcgacatggcgcagcagaaggtgacggtgagcggggacgtggagcagaagaaggtgctcaaggcggtgcggcggacgggccggcgcgccgtcctgtggccgctcccctacgccgcgggcgcggccgccggcgccgcgcacgtcctggcgcagcagcagccagcagcaggcgcaggcgcaggcgcaggcccggcgcacgccagccacgcggcgcggcccacgtcctcgtacaactactacaagcatggctacgacgactcgagcctgtacggcgcctactaccaccacggcgccaactcggccgtcgccggcaccaggtccaccgactacttcagtgacgagaacgcgcaggggtgctccgtcatgtga

SEQ ID NO: 81523 - DNA, 139 bp, Zea mays
  Clone ID: MRT4577_174365C.1
attaaacatagttgcaaaaacaaggcgaacgggatcttaaaatggggtgggtgtcaaccataatatgggtacggctcaaaacataccacacattccataattaaataacgtttcagcacattgggattgtagaagaaat

SEQ ID NO: 81524 - DNA, 1667 bp, Zea mays
  Clone ID: MRT4577_174366C.1
cacaagactccatttcagcgaaaagcacacaaatgcattatatatacatcaattggcagcttttggcttcaccttaatttcttatgttccacttcacatttccatttaattagaggaaggaccggtgaagtaaatcgctcacattttctcatgcacgttgggagatcagatctttgcttgcattggatggggacgagcctagctacttccaagtataacaggaatcgttaattatatcacaagaacaaatccggatcccctttaattattgttccggatgaacgatccgagaaatgcattcatcttcttgctgtgcttattattcagacatatgagctagctacaagctcattcctcatgcactatgctcttcgcagttacttggagggcatcgttccgccgccgagaatccaggggcattcggcgacgccgctgatggtggccaggttgcactcggcctccgtgacgagggtggcggcgaatcccctctgcacctcccgcgggcagcccggcaggtcctctaggcggccctccagctgcgcgtccgggcccggcgggatcgcgccgtccatgaggatgctcagcgccgtgcaccggcagtacgccgggatgtccgccagctcccggcagcatctcctcttcagctccggccacgggaggcgcggcccgatgccgcaggtccggctggtcacgtaccagcggcagctcgggagcgggttgtgcgcccacgcgtccgcccacgcgtccgcccacgcgtccgcccacgcgtccgcccacgcgtccgaagaaatccatcgagaggccgtcgacaggggaattaatggcgtcgtcgtctagcagcagccaccgccgcctcatcctcgcagccgccgtcctgctctccgtgctcgcggctgccagcgccagcgccgggacctcctgcgtgccggggtgggccatcccgcacaacccgctcccgagctgccgctggtacgtgaccagccggacctgcggcatcgggccgcgcctcccgtggccggagctgaagaggagatgctgccgggagctggcggacatcccggcgtactgccggtgcacgggcgctgagcatcctcatggacggcgcgatcccgccgggcccggacgcgcagctggagggccgcctagaggacctgccgggctgcccgcgggaggtgcagaggggattcgccgccaccctcgtcacggaggccgagtgcaacctggccaccatcaacggggtcgccgaatgcccctggattctcggcggcggaacgatgccctccaagtaactgcgaagagcatagtgcatgaggaatgagcttgtagctagctcatatgtctgaataataagcacagcaagaagatgaatgcatttctcggatcgttcatccggaacaataaataaataaataaaggggatccggctttgttcttgtgatataaaaaaaaaaaaaaaaaaaaaaaaaaaaaaaaaaaaaaaaaaaaaaaaaaaaaaaaaaaaaaaaaaaaaaaaaaaaaaaaaaaaaaaaaaaaaaaaaacccaagcacccaacaaaaaaaaaaaaaaaaaccaaccccccccccccccccccggggggaaagggcaccatccccccaactcggaggcgggttactattgggcaccccccccgagcccagactgggga

SEQ ID NO: 81525 - DNA, 440 bp, Zea mays
  Clone ID: MRT4577_174367C.1
aggagaggtggacccacgttaggtaccttgattgacatcgtctacagactagagggcggtgcccatgcacattgtaacactgagcacatgagacatgctacaccttagacattggtaggtcgaacagctgatctactgatcaaacaacactaaatcagaaatgcatgctgacagactaaggaactacaccccatatattggggccaaggaggtacgttattcctttccttcatagaaaggacagattagagagtctgggatgctcacgcccagaccctgttgttggcgcagactgggtgcttgtactggttgatatgctaggaccgtgcaggcgtgatactcgacacagttcccatgggaccacttctctcagttatcgcaccagatccagaactggtccatggcatggtaggccccgcaggatccacacagggagctgc

SEQ ID NO: 81526 - DNA, 1188 bp, Zea mays
  Clone ID: MRT4577_174368C.1
gggctctacacgagcactgcatcggtgaatctgcaagcccgcccgcccgtcgctcgccaccgccatgttcggcatcgtcttcccggaccacacctttcccctcgacgccaccgctttcgcgcaggtggcgcccaattcctgggtcctcgatctctccactctcgcgctcgccgccgcgccgcgctcggcagtcgtcttcctgctccccgctgccgtgacagcgctgccgcccggcaaggccgtctccgtctacttccaggccgccaccaaccgccccttcgcattcttaggtgcgctcgggcccacgcgcccctcggccagcttcccgcttccggaggccggcgacgagccggagcctgctgtgggccccgctaaactgggtgtcgccgtggaggacgcggccgcgttaccgccgccccctgacgagcagcgtgccgagcgtgtggcgctccgtgtcggcgagaacctgttcaacttcatgcaatcgttctgcggtgccgacggcggcaagctggtagtgcccacggacatcctggaccggtggttccgcaagttccaggagcgagccaagaaagatccagcgtacctcaagagcttcgacttttgagagcaaaggtcattttgcagataccatgtgggaagaatgttggatagcagtatagcagtgttttgtgtctcatctaggccctcctacattgcacacaatgttacgccgtgtcttaggggctgactgaatgaaggtgcatatgcagcttctctatctattgtagagaaggacaacgacaccaaaagcgaccagataggttagatggtggtgcttcaagtccttgcacccgaatgagaagtcttcttagaaacttttacaacaatacatcggagggttctgcttcgaatgtcagtattttgtggataatatctgggaatctcaggactaagatgaatgcgattgagttcttgtcgcactcctttgtgaaagagtagaatgagaaacctagtggatcttaaacccattgataaaagaaaaaagggataccccctagggttagggaataaaaaagggtttggggatagagggataaggccccccgcctttataagtggggggattttccttttactagaaatttcattgttggaggattgacatgtagaatgagaccccctcgaagcatatttttatttcccttc

SEQ ID NO: 81527 - DNA, 427 bp, Zea mays
  Clone ID: MRT4577_174369C.1
agacaacaaaaaacgggatggccctatcaggatatcaggagatataccagggggaacaatttttatcaaacaaaaacccgaattctcattggggtaaaaatatagacccccaaaacataggggccccaaaaggcttttgaccttgcataaaaaaacatcatctgttttcaaaccaagaaaccctgggtttgggggcattggaccaactggggggcaaaaacacaaaaaccaccccgatcacaactattaggccccccaccagcgggctgaaaaaaaaaaccccaggctgccttggctgcacaaatccatattttccaccggaaggtaccacaatcatgggggggaaaccccccccggaaaaacccccaggaggggaacctgagtggggggccctgggaactccacatggccagtttgccaccaaaag

SEQ ID NO: 81528 - DNA, 269 bp, Zea mays
  Clone ID: MRT4577_174370C.1
aacaagtcctgtgcttatttttttaacacattaaaccccaccaccctaattaaacataacaaacaaattaaacctaatgaatttattaactcatacccatgctcacattatcctgccgttcaaaaactacacacaatcaactaacaaacaacctaacgatacaaaaaaaacttaaccccgacacctacgctcaccccaaaattccgaacccttacccccaaacataccaaccttccctatattcaatctaaaaaaaccttcccgtaaca

SEQ ID NO: 81529 - DNA, 188 bp, Zea mays
  Clone ID: MRT4577_174371C.1
ggcacatccgttctttcgtctgccccacatgactaccgagcttttgtgggggcatacgacgacgacggctacaacaaaactggggaccaaaaggtgcacagcctggcgaccagaaacaaaagagaggtgtgtttttttttcacgcttttttattgtgccccctcgggcacagcagcatccttatgcac

SEQ ID NO: 81530 - DNA, 327 bp, Zea mays
  Clone ID: MRT4577_174372C.1
cccacgcgtccggccctcggagggctcatgtgctacgagaaccccaagcacaaggtcaccgctgtccccgccgacgaagaagagatctgcggtgccactttcaaggtggtggaagggtctactgtcctgacggcgctgcactgatctatcattatcaggcggaggcgatgcgatgatgattcataactttttacatgcgttggtggatggcggttttacattatggctgtcaacaagttttgctcatgcaaacctttttatctatcttttgtttattcatcttttttgcttgctttgtccttactccattcacggctttttatatat

SEQ ID NO: 81531 - DNA, 564 bp, Zea mays
  Clone ID: MRT4577_174373C.1
gtgtttttttttttttttttttttttttttttttttttttttttttttttttttttttttttggttttttttttttttttttggcacaatcttcccgcttcgacaactacttcagcaaggaattacctcacaattcaatagtccctgacccccctcaaaggaagcccttggggaaaaactatacaactcgccctccacggaacacaactccagcccaacacactcgactttcacaaggcacgaccccccggaaaataaaaaccctaggaagctagaaccacaccggcggggaaaaaaccgggccatctaccaattaccaatcaggatacataacaaactcacgaaaacttggagggggtcaacctgccccaccatttccgcttcacggagttgggcgaagactcgttgccgttccccagcttggtcaagaacatctttggctcccttattcggccactgaaatctttcttccaccagtcgaagttgggcttcaacccccggagctccatgtctggggttagggtggcatccccctgcccggacttgacctcaaccaggaacttg

SEQ ID NO: 81532 - DNA, 830 bp, Zea mays
  Clone ID: MRT4577_174374C.1
atctcccaaaccaatccaatcccctctccgcgatctcaccgggaaattcctcgaccgattgaaagccaaggccctctcgtcctccttcaagatgcagatcttcgtgaagaccctcaccggcaagaccatcaccctcgaggtcgagtcgtctgacacgatcgataatgtcaaggccaagatccaggacaaggagggaatccctccggaccagcagcgcctcatctttgccggcaagcagctggaggatggccgcaccctggctgactacaacattcagaaggagtccaccctccacctggtgctcaggcttcgtggaggcatgcagattttcgtcaagaccctcaccggcaagaccatcaccttggaggtggagtcctcggacaccatcgacaacgtgaaggcaaagatccaggacaaggagggcatccctccggaccagcagcgcctcatcttcgctggcaagcagcttgaggatggccgcaccctggctgactacaacatccagaaggagtccaccctccacctggtgctcaggcttcgtggaggcatgcagatttttgtcaagacgctcaccggcaagaccatcaccctggaggtggagtcctcggacaccatcgacaatgtgaaggccaagatccaggataaggagggcattcccccggaccagcagcgtctcatcttcgctggcaagcagctggaggatggccgcaccctggcagactacaacatccagaaggagtctacccttcacctggtgctccgcctgcgtggtggccagtaagtgcgtgatagccgcttctgtctcagggttaacaggtctggtgttgtcg

SEQ ID NO: 81533 - DNA, 134 bp, Zea mays
  Clone ID: MRT4577_174375C.1
gcgttgcgaccagagggcactacgccactacccgctgaggagaagcgtatggatgagcggaggagaagaaagttacgaggattacgctaagagcggtgagcgaaccgtgagcagacaagagggagaatcgggcg

SEQ ID NO: 81534 - DNA, 721 bp, Zea mays
  Clone ID: MRT4577_174376C.1
cctgcgtggtggcatgcagatctttgtcaagaccctcaccggcaagaccatcaccctggaggttgagtcctctgacaccattgacaacgtgaaggccaagatccaggacaaggagggcatccccccggatcagcagcgtctgatctttgctggcaagcagctggaggatggccgcacccttgctgactacaacatccagaaggagtccacccttcacctggtgctgcgtcttcgtggtggtatgcagatcttcgtcaagaccctcaccggcaagaccatcaccctggaggtggagtcctctgacaccattgacaatgtgaaggcaaagatccaggacaaggagggcattcccccggaccagcagcgtctcatctttgctggtaagcagctggaggatggccgcacccttgcagactacaacatccagaaggaatccactctccacctggtgctccgtctccgtggtggccagtaagtcctgggccatgagcagccgtccttccagggttcacatgtctggtgccttcctctgtccctctgatggagattatctgcatgtcgtggtcgtgtcttgatcgagtcggtgaagagtccctatgtttccctttctcagaaaatcgtcctatgtcagtctggttgtgttcgtgaacatttctgctggtgcccagcagtttggttggaactgtgcaatggaataattgaaccctgaatttcgtgtgcc

SEQ ID NO: 81535 - DNA, 829 bp, Zea mays
  Clone ID: MRT4577_174377C.1
cgggaaacatccgatccgatccaatacagccccccatccgatctcgccgggaaatctctccgatcgaagcgaagcgaaggctctctcgtcctcctcctaagatgcagatcttcgtgaagacccttactggcaagaccatcacccttgaggttgagtcctctgacaccatcgacaatgtcaaggcaaagatacaggacaaggagggcatccccccggaccagcagcgtctcatctttgctggcaagcagcttgaggatggccgcaccctcgcggactacaacatccagaaggagtccaccctccacctggttctcaggctccgtggtggtatgcagatatttgtcaagaccctcactggcaagaccatcaccctggaggttgagtcctcagacaccattgacaatgtgaaggccaagatccaggacaaggagggtatcccaccggatcagcagcgtctcatctttgccggcaagcagcttgaggatggccgcacccttgcagactacaacatccagaaggagtccactctccacttggtgctcaggctccgtggtggtatgcagatcttcgtcaagaccctcacaggcaagaccatcaccctggaggttgagtcctcggacaccatcgacaacgtcaaggccaagatccaggacaaggagggcattcccccggaccagcagcgtcttatctttgccggcaagcagcttgaggatggccgcacccttgcggattacaacatccagaaggaatccaccctccaccttgtcctccgccttcgtggtggcatgcaaatctttgtcaagaccctcaccggcaaaacatcaccctc

SEQ ID NO: 81536 - DNA, 1428 bp, Zea mays
  Clone ID: MRT4577_174378C.1
cccacgcgtccgctcggcccaggtttaggtaagttccccttcttttttattattttttgctgttttcaatttcaagttttgatttcaaattttaaatctgtgtttaagctctcaaattcaaacaaatgcagcaaacaaaaatataccagcatgagatgcaaatacctaatgttattagttaatttactatcctattttaagcaaatgcctttacacatgcaactcctacactaaaaaataggcatttttgagaaaaatgatctctagtatattaaaatccctaagagagagcttataaacatataattcaacaaacggatgactggactttatgtagagatcattttattttaatctgtattaggaacatgtttattttgggaaatgtagcttcagaggtatggagattctttttagggtattattaattcaaaacctctggagaatttaaccaattcgaaaaataaaattttgaggtgttacattgagcttcttcttaatgtactaccgtgggacggtgggagcggtctttcccctaccgtccgagtgtttttaataaaatgaattgaacaactaaacaagttgtagaacaccatgttctgagctgggcgcctggctcttgcttcaacctgctgcacgctctaggaatcaatgactctgtcatccctgtgggagattgttccaaaggacctctgtgccctgctcatgaatccgtttctcatctgccttttgattatttgtttatttgctcttttctccttttgtagttttcacaagcatgataatcagaacatgttttatgtgcatagatggagaggagctattttggaaaacaagttggttcctctcttcaaacaaaggatgctatatgacaaaggaaattcctcattttgcatccttcaccatcttgtgttaggattgttatttgttgctgtagccggcttctttcctatacatcaaggtcatggatgattccaggaatggtggagggaggctgagagcagggcgccaaaactccagaaaaagggcttcaattcaattgtgatccttgtggcttggtgactgtggaaacacattgatggtgcctctccaaacagcaaccttgtcctgcaacatatccatcaagatgctcatatgtggggaatggctggggcagcagacattaggagactttggccttagtcctgggagtgcttgtttgctgctggttgtagtagtgtggtttttcatggacatttatgtgtatgcatgtgtttggccgccgtcaggaggccattttttgtactgtttttgccttataaggcctatttttgttcttaatataatgatgcgcagtcctcctgcgttttcgagagaaaaaaatggaagactccacagctgcagatttaggattggaataccataactgagcatttgtagtttttaaag

SEQ ID NO: 81537 - DNA, 1260 bp, Zea mays
  Clone ID: MRT4577_174379C.1
atggcagagtacgaggcactgatcttcggcttgtcggtggccctatccctggggatccaacaacttttggtgaagggagactcccaactgatcatcaagcaagtccacggggagtgtagctgcaacgagcccaggctcgcagcctaccttctccacgtgagaaagctggagaaagacttcacagccctggaattgcagcatgtcccacgggctgacaactcggtggtagatgacctctccgtgaaggcatcaacttgggcacccgtgcccgagggcatcttcaaaagatggctgctaagacccaccgcccaacctgccgaattgggcgaagggggcgagactagtacttcgaagctagcggtcctggtggcgtcccagaacccaccgaaggctgtgtgtgctacagggggccctgccagccccttagcgccgcaaccaatatctcagagtggtcccgatgcatggatctccgagatccgggactacctgaaggagaatatccttcctgaagaccatgtgtccgcagagcgcatagtgcagttggctaaacgctacgcggtggtagaaggggatctctaccgccgcggctccaatggcattcacatgcggtgcattacccaggaggagggctgtgagttgctcacggagatccatggaggagagtgcggaagccattcatcatcccgcacattggtcggtaaggcctccggcatggcttctactggccaaccgctctccaggatgcaactgagatgggccatcggcgggtactggtacctcttcgtcgccatcgacaagttcaccaagtggccagaggccacccctgtagtcagcatcacccagggtgccactgtcgccttcctcaagtccatcgtctgtagatttggggtcccaagtcgtatcattacggataatggaacccagtttacaagtcgaatgttccaggagtattgcaagggcatcggcacccagctctgcttcgcgtccgtggctcatcccaggagtaacgaccaaatggaaagggcaaatgcagagatcctcaagggactcaagacacacacctacgactgcttgaagaagcatggtgcaaattgggtcagtgggcttccgtccatgctatgggggaaccaaacaacacccaatcgagctaccgaggagactctgttcttcctggtctacggggccgaagcctgccttccctccgaaatcatcatgggctccccacgggtccaggcttttgatgagtctatgcaggaatag

SEQ ID NO: 81538 - DNA, 876 bp, Zea mays
  Clone ID: MRT4577_17437C.1
cctgccgggatgagataaagatttacctagagattagttgatttattagcctaatgtgctagaactggagaccattggaactggggggctgtttccttgaacaggctgcacacccactggttcgggcctgcgcctccaccgtgcccgcgaggttcgtgacctgacgcagccgccgatcgagttaatggacgccgaggctggcgtcgccggcgccgaccagctgccgcggaggcagtactacatgaatctattgcttttggcttaccagagctttggtgttgtttacggtgacctaagcacatcgcctctttacgtttataaaagcacattctctggaaagctcaatcagtaccaagatgaggagacagtgttcggtgtgctttccctcatcttctggaccttcactctgattcctttgctgaagtatgtcactattgtgctgagtgctgatgataacggtgaaggcggaccatttgctctctattcgcttctttgcaggcatacaaaactcagcttgctgccaaatcaacaagcagctgatgaggaactatcttcatactacagaaatgggtttgcacctagcaatggatcttcaccttggttaagaaggtttctggagaagcacaaaaaaatgagagttgtgcttcttctcatagttctctgtggcgctagcatggtgattggtgatggtgtcctcaccccagcaatctcagtcctctcatctatgtctggattacaagttcgagctactggtttaaagcataatgactgtgtctcgctccagtgctgaagccgagtaccgggccgtcgccaacactgttgctgaatccacctggctgcgccagcttctgggcgagcttcgtcacccgttacgtc

SEQ ID NO: 81539 - DNA, 848 bp, Zea mays
  unsure (1)..(848): unsure at all n locations
  Clone ID: MRT4577_174380C.1
actcatccgatccatccagtcgcctctccgacctcaccgggaaacctcccatcgaagcgaagccaaggctctctcctcctcctcctcaagatgcagatcttcgtgaagacccttaccggcaagaccatcacacttgaggtcgagtcctctgacaccatcgacaatgtgaaggcaaagatccaggacaaggagggcattcccccggaccagcagcgtctcatctttgctggcaagcagctcgaggatggccgcacccttgcagactacaacatccagaaggagtccaccctccacttggtgcttaggctccgtggtggtatgcagattttcgtcaagaccctgaccggcaagaccatcaccctggaggttgagtcctcggacaccatcgacaacgtcaaggccaagatccaggacaaggagggcattcccccggaccagcagcgtcttatcttcgccggcaagcagcttgaggatggccgcacccttgcggattacaacatccagaaggaatccaccctccacctggtactcaggcttcgtggtggcatgcaaatctttgtcaagaccctcactggcaagaccattaccctggaggttgagtcctcggacaccattgacaatgtgaaggccaagatccaggacaaggagggcatccccccggaccagcagcgcctgatctttgccggcaagcagctcgaggatggccgcacccttgcggattacaacatccagaaggagtccaccctccacttggtgctcaggctccgtggtggcatgcagatatttgtgaagaccctcacggnaagaccatcaccctggaggtggagtcatctgacaccattgacacg

SEQ ID NO: 81540 - DNA, 277 bp, Zea mays
  Clone ID: MRT4577_174381C.1
atcagctttcaaagcatttacaagtgctgcaagttagtgaaacagctgtctccgtaaatggaggaaatgtggggaagccttggaatgcccttctggttctggcacattggaaagcacactcagaaggcttcatcaccaagattttgggagagtaaagctaagtatagttgatgtaacattgtagaagcagcataggaacaataagaacaataggtaaagctataattatggcttatatttagaaatgactgcatttgatattttaggatatttttct

SEQ ID NO: 81541 - DNA, 332 bp, Zea mays
  Clone ID: MRT4577_174382C.1
ctaatatgatagcgtggcatgggggggaagcatgccactgtacaatgcgtgcctacattttcgctatgggtattaggcgaccagggtcaatatggtgcgtataacaggatggccaatacacgcttctataattgaaagctaaagactactggtgctaaataccagtggcagctcagattgatacaaaaaaaaaaaaaaaaaaaaaaaaaaaaaaaaaaaaaaaaaaaaaaaaaaaaaaaaaaaaaaaaaaaaaaaaaaaaaaaaaaaaaaaaaaaaaaaaaaaaaaaaaaaaaagggggggccctttggggggggcccactttaaagtaccc

SEQ ID NO: 81542 - DNA, 365 bp, Zea mays
  Clone ID: MRT4577_174383C.1
gagctaattgtagcgtaagatgcaaggtaaccatctacagaagaactgtttcaaattttgcaataagatataatagataattattcatgtactcaactatgataatgtcgtgtttacattttagctgttggtacatacacacaacatggacatcctaggcctgggatctgaccaaaggtgcagaggtctcactaggattttggagcatgccgccacttcattgagcaatagcaaattctccatttgcagaccatatgcattcaaaataattggagcgcagaaaggatgaattaaaacaagataaccagggtgtaaaaaaatcctattgttgtggtggagtaccttgtccatcattcttataatca

SEQ ID NO: 81543 - DNA, 829 bp, Zea mays
  unsure (1)..(829): unsure at all n locations
  Clone ID: MRT4577_174384C.1
nacaatccaatccagccccctcacatctcgccggaaaatctcctccgacagatcgaagcgaaggccatctcgtcctcctcctcaagatgcagatctttgtgaagaccctcactggcaagaccatcacccttgaggttgagtcctcggacactatcgacaacgtcaaggctaagatccaggacaaggagggcatccctccagaccagcagcgtctcatcttcgctggcaagcagctcgaggatggccgcaccctggctgactacaacattcagaaggagtccaccctccaccttgtgctaaggcttcggggtggcatgcaaatcttcgtgaagaccctcaccggcaagaccatcacccttgaggtcgagtcatctgacaccattgacaacgtcaaggcgaagattcaggacaaggagggcatccccccggaccagcagcgcctcatcttcgctggcaagcagcttgaggatggccgcacgctcgccgactacaacatccagaaggagtccaccctccacctggtgcttaggctccgtggtggcatgcaaatcttcgtcaagaccctcactggcaagaccatcacactggaggttgagtcgtctgacaccattgacaatgtcaaggcgaagatccaggacaaggagggtatcccgccggaccagcagcgcctcatctttgccggcaagcagcttgaggatggccgcacccttgcagactacaacatccagaaggagtccaccctccacttggtgctcagggctccgtggtggtatgcaaatcttcgtcaagaccctcactggcaagacatcacactggaggtcgagtcttc

SEQ ID NO: 81544 - DNA, 818 bp, Zea mays
  unsure (1)..(818): unsure at all n locations
  Clone ID: MRT4577_174385C.1
gctgagctncgaggccgcttttttttttttttttatagataattattcatgtactcaactatgataatgntcgtgtttacattttagctgttggtacatacacacanncatggacatcctaggcctgggatctgaccaaaggtgcagaggtctcactaggattttggagcatgccgccacttcattgagcaatagcaaattctccatttgcagaccatatgcattcttataatcaggatgccctggtcgagcttcctcgctcgctccctgagcgcatgctggccatggaacttgttcagcccaccctgggtggggtggtgatggccgcggacgacagtgcttcagagctcggcctgctcggcggcggcggatataccggggacggggcaaatacagccaggggagaggacgacgagaggcaacaggtcgaagcaggcgacgccagcatccgtcgtcgtcgtggacgcggtggctgccaccaaggaggcgacaccgttcttgctgccgtcaatgtgagcttgtgtgcctcctcacagagccactcaccattgcatcgtagatctaggcgagcggcgacggcacgaggaagctgaaggcgttgaggctgagctagaggacgagcttggacgaccaccacactgagtgccacgagttgcggcagtcgtgcacctctctggcgtccacgtcgggcggggttggatgcggcggcaggattggcatctatcgcggcggcggcgggttacgatggatggggttgcggtagcgtgggagtggaaccgtcgaaaggtttttcccggccggcctcgagggtcccaatg

SEQ ID NO: 81545 - DNA, 844 bp, Zea mays
  Clone ID: MRT4577_174386C.1
agttgtattgaagggagctctggatctcaccgggaaacctccgatccgagcgaagcgaaggctctctcgtcctcctcctcaagatgcagatctttgtgaagaccctcaccggcaagaccatcacccttgaggtcgagtcctctgacaccattgacaatgtcaaggcaaagatccaggacaaggagggcatccccccggaccagcagcgtctcatctttgctggcaagcagctcgaggatggccgcacccttgcggactacaacatccagaaggagtccactctccacttggtgctcaggctccgtggtggtatgcagatctttgtcaagaccctcaccggcaagaccatcaccctggaggttgagtcctcagacaccattgacaatgtgaaggccaagatccaggacaaggagggcatccccccggaccagcagcgtctcatctttgctggcaagcagcttgaggatggccgcaccctcgcggactacaacatccagaaggagtccaccctccacctggttctcaggctccgtggtggtatgcagatatttgtcaagaccctcactggcaagaccatcaccctggaggttgagtcctcagacaccattgacaatgtgaaggccaagatccaggacaaggagggtatcccaccggatcagcagcgtctcatctttgccggcaagcagcttgaggatggccgcacccttgcagactacaacatccagaaggagtccactctccacttggtgctcaggctccgtggtggtatgcagatcttcgtcaagaccctcacaggcaagaccatcaccctggaggttgagtccctcgacacatcgacacgtca

SEQ ID NO: 81546 - DNA, 486 bp, Zea mays
  Clone ID: MRT4577_174387C.1
tgtgcggccgctccgaggccggcctggctcgcggaatcctctacatagcatattccgcacactctattatcccgtagaagacatccgatagccacgacgcatggtcaccgtcaacgccgccgagttgcacctccatggttgaccgcgccgagatcgccaggactatgatctatgactgcctgagacgaaggtgaggagcgacaggcagcatttcagctacgtcaaggatgccaagaacgcggccccagtaagcaccataggcctatgagcgcccctgctcgccacaacgtacgccccgaccgcctcggcggctcccgcactggcgctcgcgcacgagtgcatgtccacgaagggaaccggaatgagactcgcgatctcaacaacctgctgagagaatcctcctggatggctacgcactcatctggtgcctctacaccatctactcctctaagcccgacgaggactaggagtgcggggacctctcaa

SEQ ID NO: 81547 - DNA, 652 bp, Zea mays
  Clone ID: MRT4577_174388C.1
aacagaagaactgtttcaaattttgcaataagatataatagataattattcatgtactcaactatgataatgtcgggtttacattttagctgttggtacatacacacaacatggacatcctaggcctgggatctgaccaaaggtgcagaggtctcactaggattttggagcatgccgccacttcattgagcaatagcaaattctccatttgcagaccatatgcattctgtcagtaagcataaaaaacgatatcaatgttcataaatacatcccatgctaaccaaacatacaaaataatagaaggtcaaattctatgctaagattcaccaaaataattggagcgcagaaaggatgaattaaaacaagataaccagggtgtaaaaaaatcctattgttgtggtggtgtaccttgtccatcattctgaaaaacatagaaaattgattcaatgcatatgcttaacactggaaactctaggacaactcatggacgatttatttgatatcggcaattttaatatgcatacatcagaatctagtttgccttctggatacatgggcagtgtatcacaaaaccaaatgttaaaaggcatgtcaaacctgcaagatcaacccaagtgtataataaaccagcggatgaagaaaactacaataa

SEQ ID NO: 81548 - DNA, 835 bp, Zea mays
  Clone ID: MRT4577_174389C.1
cggccgctcaggcggcgggcaaccatccgatccaatccagcccccctccgatctcgccgagaaatctcctccgatcgaagcgaagccaaggctctctcgtccccctcctcaagatgcagatctttgtgaagaccctcaccggcaagaccatcacccttgaggtcgagtcctccgacaccatcgacaacgtcaaggctaagatccaggacaaggagggcatccctccggaccagcagcgcttgatcttcgctggcaagcagctcgaggatggccgcaccctggcagactacaacatccagaaggagtccacccttcacctggtgctcaggctccgtggtggcatgcagatatttgtgaagacactcaccggcaagaccatcaccctggaggttgagtcctcggacaccatcgacaacgtcaaggctaagatccaggacaaggagggcatccctccggaccagcagcgtctcatctttgctggcaagcagctcgaggatggccgcacccttgctgactacaacatccagaaggagtccaccctccacctggtgctcaggctccgtggtggcatgcagatatttgtgaagaccctcaccggcaagaccatcaccctggaggttgagtcctcggacaccatcgacaacgtcaaggctaagatccaggacaaggagggcatccctccggaccagcagcgcttgatctttgctggcaagcagctcgaggatggccgcaccctggcagactacaacatccagaaggagtccacccttcacctggtgctcagggctcgtggtggcatgcagatcttcgtcaagacgttgactggcaagacatc

SEQ ID NO: 81549 - DNA, 224 bp, Zea mays
  Clone ID: MRT4577_17438C.1
ggcaggggtttttttcggtaggaatgctgatgtttattccccagtttctgcgacgatattttacaccaaaatcatcaaaaaaaaagatcttttagaagtcacaaaactaggaccttctatttgcatccagatccaggacgcacgctgctgggctctttgggaggcggaagagacgatgttccttcttcccattagacatttcccgggaccttaaatccaagaat

SEQ ID NO: 81550 - DNA, 805 bp, Zea mays
  unsure (1)..(805): unsure at all n locations
  Clone ID: MRT4577_174390C.1
aactcaatcaaggcgacgcctcctcctaaacctctctcgatatcaccgtgtacagaacctacgccccggctctcatgtcctcctacgaaccgatgcgcgtgttcgtgaacactctcacaggacaaaaccatctatgcttgatggtccagtgatcggacacgaacaactgtgtgaaggacaagatccaggacaaggagggaagcgctccggaccagtagtgcctcatctttgctggcaaccagctagaggatggccgcgccctggctgactacaacatcgcaaaaggagtccaccctccacctggtgctccgcctccgggtaggaatgcagatctttgtcaagaccctcaccggcaagaccatcaccttggaggtggagtcctcgaacaccatcgacaatgtgaaggcgaagatccaggacaaggagggcattcccccggaccagcagcgtctgatttttgccggcaagcagctcgaggatggccgcacactggctgactacaacatccagaaggagtccaccctccacctggtgctcaggctccgtggaggcatgcagatcttcgtcaagaccctgacgggcaagaccatcaccttggaggtggagtcctcggacaccatcgacaatgtgaaggcaaagatccaggataaggagggtatccccccggaccagcagcgcctcatcttcgccggcaagcagcttgaggatggccgcaccctggctgactacaacatccagaaggagtccaccctccacctggtgctcaggcttcgcggaggcatgccaattttcgncaagaccctca

SEQ ID NO: 81551 - DNA, 245 bp, Zea mays
  Clone ID: MRT4577_174391C.1
attcggctcgaggcacagcccacagattgagagcagctccctgcaccgccttcaacacggaacctaagcggagaggagccggagcacgagcgaggactgtacacgtgaaagacaaactgggctactgtcaaggtgcctactacacgatgcaggccatgcgcactgagccaagtgcatgcatggctgttaaggaaacgcaaccgacactctgcgaggtgacataatgacgctggcaaataccgagc

SEQ ID NO: 81552 - DNA, 316 bp, Zea mays
  unsure (1)..(316): unsure at all n locations
  Clone ID: MRT4577_174392C.1
tcccttttannatttcttttctnttctnttattttatattcattttttcttaatcaacctccttttaactctctttttattccctttttatacccattaactatccaatgtnttcttccacaatcaatttcctatttcataacttccaatcttaataatatattacctatctaccacntttttaatttcttctttttcacacctcaaactcaatagttctattctttgcctcatattttttaccatacataatacaccttttttttttttcctttcttttcccaatttttcttttttaatccttcattattttttt

SEQ ID NO: 81553 - DNA, 854 bp, Zea mays
  Clone ID: MRT4577_174393C.1
aaaacatctgatccagtccaatccagccccccctccgatctcgccgagaaatctcctccgatcgaagcgaagccaaggctctctcgtcctcctccccaagatgcagatcttcgtgaagacccttaccggcaagaccatcacccttgaggtcgagtcctctgacaccatcgacaacgtcaaggcaaagatccaggacaaggagggcatccccccggaccagcagcgtctcatctttgctggcaagcagctcgaggatggccgcacccttgcggactacaacatccagaaggagtccaccctccacctggtgctcaggctccgtggtggcatgcagatcttcgtcaagaccctcacgggcaagaccatcacactggaggttgagtcctcggacaccatcgataacgtgaaggccaagatccaggacaaggagggcatccctccggaccagcagcgcctgatctttgctggcaagcagcttgaggatggccgtaccctggctgactacaacatccagaaggagtccacccttcacctggtgctgagggctccgtggtggcatgcagatatttgtgaagaccctcaccggcaagaccatcaccctggaggtggagtcatctgacaccatcgacaacgtcaaggcgaagatccaggacaaggcagggcattcccccggaccagcagcgtcttatctttgctggcaaacagctcgaggatggccgcacccttgcggactacaacatccagaaagagtccaccctccacttggtgctcaggctccgtggtggtatgcagatttttgtcaagaccctgaccggcaagacatcaccctggaggtcgagtcgtctgacaccatt

SEQ ID NO: 81554 - DNA, 349 bp, Zea mays
  Clone ID: MRT4577_174394C.1
atgtgtgcacaatccaacgggcggcgtcttatattttttataatcgacagcaaaacaaatataaaacaaaaggagaaaaatactaataaacagaaacagcgagatcacccgttcggcccatttaatagctaagaaaaaaataacttttgcgatagctagagaaggtaaaatagaccttttcctcctatccaaaacaggaaccaagatactaactggacatggacaaatgctgaaggctgctataggccaaaccctgaacgcacgcaacccgggcaatcaatcacatgaattttagaaccaggttctcaatagcagaccgcgccatacctttgggaatcagacatgtaca

SEQ ID NO: 81555 - DNA, 554 bp, Zea mays
  Clone ID: MRT4577_174395C.1
gggcaaccccccccccttaccattccattaacccttagggggaaaaaactgttcaaatttttatccctaaaacaaaaccagaagggaaaacgggggtttttttttccaaacgggctccctgggggccttttttacaaggacggggaccctagggggggggagcattccataatttgttttgagcattgaaacataatcggagggggggatttcttccttaaaattcaaaaaatgaaaattttttttttcaccccagtttttgaaattgctcaaactttcatccctaggaacttttaaaaaaacatttgggcccccaagttctttaaagcttttaaaatcgggttgaaccctttaataaaacttgtccccttcacaacccacttaaacaggacctccaaaagcttgtgcaacctttgaaaccaaagttgtcccaactttggggtaaacagtccccttcgattgtcctgaaaaggcccccaaaaacacttttgtaacctcatgcatgatgtaaaatacagcttttatgtgtgtttatgggcaactgataccctttg

SEQ ID NO: 81556 - DNA, 375 bp, Zea mays
  Clone ID: MRT4577_174396C.1
ctcactttcatttttttccttctaaaaaacaggggtgggggttaccatttttataccataccatacccaaagacaccccaaagaatataagaaacttttgctgaaccggcaatacaaaaagcattacctacatttcctaaagctaacaaatacccctcccttctttgcagcaaccaatccattcttcaaatgaaatcatttttatccaaccaatccaccggaacaaaacctgcccaccgctttacatgatctccaaactcaggcatattcccaccaaaattaacaatatcctgacacacagaaaaaacccaatgttgaacccaagatctacacaagttatgataccactaccccttagcttaccaaaaccaaaaa

SEQ ID NO: 81557 - DNA, 338 bp, Zea mays
  Clone ID: MRT4577_174397C.1
agacaaaaaaacatcaggaccgctgttattaagatgaagggatattgaaaaaaactggccccagtctacaataaactttgaccgagatgatgatagtagactcagtttcgaacaacacttctgtaattgactcaaagggataaactggcatcccagcacaaacttgacgggctgggtccttgccgttgcacatacggggatgctgaaccttaaaccttgaggtaagccacaaggacgcaactatggacctactcattgatgggctgttgcctaggtaacccttgctgagagtgtcgacagacacaagcaacacttcaatttgcatagcgtgcatgaaa

SEQ ID NO: 81558 - DNA, 225 bp, Zea mays
  unsure (1)..(225): unsure at all n locations
  Clone ID: MRT4577_174398C.1
tcctacttttgttttccccctcttatctaattaacaaaagcgttttttttccaattagcatgcctacacactaacnccaactttttccatccattacaatatttacattnttnctcctactccacatatgacattcacatactatcatctatttttaatatctctttatttcttactatacttactattaattatctattcttccatacattatatatttttttt

SEQ ID NO: 81559 - DNA, 415 bp, Zea mays
  Clone ID: MRT4577_174399C.1
attcggctcgaggtgcaactgcccaagtgtctcacccgcggctcgggcagaggaagcgggggagtttcaacggcggctgggcgccgaaccggaggggccacgcctggccggaccccggaagcccgacgacagccggccacccccgcgggtggggggcctcctcggcaccgtggccccccggaaacacaaccgcgcgcaccaaaatttcagggcccacggccccccccccccgagatctgggcccccccccacgaccaaaggcccatcaaacacaaaaccaggacaccgctgcagctatcagaccgccaaaaaaaccccaagccaccgtttctgcggctcaaagagtatcaatggccatttctccctcccaatctggcttgaatactggcgggcacaagttaattcctggctcccc

SEQ ID NO: 81560 - DNA, 235 bp, Zea mays
  Clone ID: MRT4577_17439C.1
cccatgaaggaaactggggcttcatactcgctttgaaaaaaagtaacccccttctactttacttgttaaaacatccccctttgcctgttttacattaataaacagagaaggaagagaaaaacattctcccccgcccattatttcccagcgtttgccccaaccacacattatcccataaaaacaatcatagcctctgcaggaccccaaaggttatagggggctccaaacactgatc

SEQ ID NO: 81561 - DNA, 382 bp, Zea mays
  Clone ID: MRT4577_1743C.1
gagattacagccgcaagggagatgtcctcgatcaaggtggatgatgtttccttgaaaatagcaaagaatgttggatctgctgttgaagccacaaataaattgccaagcactagcagaaatgttgaatttcgttacaataggaagaatccaaagcgaagacggttcctggaagcgtcacatgaaaagttatgtttctcaatagatagcacatgtgggccagattctgctgcaacttccaatcctatcagtattgttgaccatcagggaataggaaagccaatctcaggagaaaccataatgtccgttgatattgatgaaaggcttgcatctttatcaaacatggtagcagtgctttgcgaacaacaactgtttctaccattac

SEQ ID NO: 81562 - DNA, 284 bp, Zea mays
  unsure (1)..(284): unsure at all n locations
  Clone ID: MRT4577_174400C.1
aaaaacaaaaaancaacaggcgagcaaataaagaacacccaaagagggggacagcagcacggaaagaaaaggagcaaaaaaacagggcaaacaaacgacagggacccacaccagcagaaaaagaagcaggggaaacaacggaagacaagaaaaaagacaaggcagcaacccaaagcacgacaaccgacccggggagagagagcagaccaaaggccagcaaagaaggggcgaaaggagcaggcggccaagaggaggaaaaacacgggccagcaggaggcgacaaa

SEQ ID NO: 81563 - DNA, 593 bp, Zea mays
  unsure (1)..(593): unsure at all n locations
  Clone ID: MRT4577_174401C.1
gggtaccccttcgnagtctcggccgggnaaaccctacccgactccgccgccgcccgccgctccgcctcagcgcatagcccgccgcgacctcatcgatcaccttcaactttcaatcatggcggacgtcgatgtcgaaccggaggttgccgccggagctcccaagaagaggacgttccgcaagtacagctaccgcggcgtcgacctagatgcgcttctcgacatgtccacggacgacctcgtccagctcttccccgctcatcaagaagctgcgcaaggcgaaaaaagatgctcctgctggtgagaaaccagagccagtcaagacacatctccgtaacatgatcattgtccctgagatgattggaagcattgttggtgtctacaacggcaagaccttcaaccaggttgagatcaagcctgagatgatcggccactaccttgctgagttctccatctcctataagccggtcaagcatggcaggcccggtatcggtgccacccactcctcgcggtttattcctctgaaatgagctgttacccggctctgtagtctcccaagacgtagttggcaatggtccgttcagcttttctacttg

SEQ ID NO: 81564 - DNA, 753 bp, Zea mays
  unsure (1)..(753): unsure at all n locations
  Clone ID: MRT4577_174402C.1
cttcccctacccgactccgccgccgctccgcctccgctccgcctcagcgcatcgccctccgccacagcgtaccgcgacctcatcgatcaccttcaactttcaatcatggcggacgtcgatgtcgaatcggaggttgccgccggcgctcccaagaagaggacgttccgcaagtacagctaccgcggcgtcgacctagatgcgcttctcgacatgtccacggacgacctcgtccagctcttccccgcgcgcgccaggagaaggttccagaggggtctgaagaggaagcccatggcgctcatcaagaaactgcggaaggcgctagaagaattcgagaaaaccgaaatgtgtcttctcgaatgagtttgatgcatcttctcttaattttacccatacgatatgagaaaaaggatgctcctgctggtgagaagccagagccagtcaagacacatctccgtaacatgatcattgtccctgagatgattggaagcattgttggggtctacaacggcaagacattcaaccaggttgagatcaagcctgagatgatcggccactaccttgctgagttctccatctcctataagccggtcaagcatggcaggcccggtatcggtgccaccaactcctcgcggtttattcctctgaaatgagctgttacccggctctgtagtctcccaagagtccgttggcaatggtcattcggcgtttctacttgttttgaacagntaatgacaagacattttgttttgttcc

SEQ ID NO: 81565 - DNA, 430 bp, Zea mays
  unsure (1)..(430): unsure at all n locations
  Clone ID: MRT4577_174403C.1
tcgcgatctagaacctctcctgctctgcctcctcctgcttgccggcgccgccgacgccgcgccgctgctcgtaggcgtttttcccaaaggcacttcagcttgtccagaaggcaagttttactgcagaaatatcggagatacccctcgattgttgttctcttcgtttgtgaatgacaaaatttgcgattgttgtgatggaagtgatgagtacgaaagtggtatccattgccagaacacctgtagaaatataaaggatactgctgaggctgatggtggtggtggcgacctcgcagtaacacatttagattctactgatgattttatgagtaaacatgcaattgctatggaagaccatatccagaacaacagcaacagagaccttgtccagaagataagaggattgagaacagncctagttattgagctgggc

SEQ ID NO: 81566 - DNA, 784 bp, Zea mays
  Clone ID: MRT4577_174404C.1
ccggccgggccgggacatcccgactccgccgccgctccgccgccgctccgcctcagcgcatcgccctccgccacagcgtaccgcgacctcatcgatcaccttcaactttcaatcatggtgagttccccgccaaaactgtacccacctccaagatcctgggcgtccctatgactcgcacatggactaatttgtgttgcgcaggcggacgtcgatgtcgaaccggaggttgccgccggcgctcccaagaagaggacgttccgcaagtacagctaccgcggcgtcgacctagatgcgcttctcgacatgtccacggacgacctcgtccagctcttccccgcgcgcgccaggagaaggtacctttcgtgccgcgactcgtttgtttccgtagtatttttgtttgctgagtttgttttggtaggttccagaggggtctgaagaggaagcccatggcactcatcaagaagctgcgcaaggcggtcagtttccaaccgcttagttttcattaccactttttgttagcgtgccccgatcaagataattgcgtggatctgttatggtgccattattaacgatgcttattagattcttttttttctattcttatgtctttcgtgttcagctagaagaattcgagaaaaccgaaatgtgtcttctcgaatgagtttgatgcatcttctcttaattttacccatacgatatgaggtgtgatcttggtgtcaaaattttgagcaaatctcagtgcctattggtgtatagtgtaaatatcgtcttggaatgatatgct

SEQ ID NO: 81567 - DNA, 1357 bp, Zea mays
  unsure (1)..(1357): unsure at all n locations
  Clone ID: MRT4577_174405C.1
atgtggaccccacgaccgagtcgtcgcgtcgtctcctccgcttccgacactctcctgctctgcctcctcctgcttgccggcgccgccgacgccgcgccgctgctcgtaggcgtttttcccaaaggtgaacttcgctcacgcgcctacctccgcacctcgtttcttgacttgctcaccgagtcgtttcccaaagatgaggcgtacttcgcgacgcaggtgatcgcctgcagagacggctcgggctctttcccgaggagccggctcaacgacgggtactgcgactgcggcgatggaaccgatgagccaggcacttcagcttgtccagaaggcaagttttactgcagaaatatcggagatacccctcgattgttgttctcttcgtttgtgaatgacaaaatttgcgattgttgtgatggaagtgatgagtacgaaagtggtatccattgccagaacacctgtagaaatataaaggatactgctgaggctgatggtggtggtggcgacctctcagtaacacatttagattctactgatgattttatgagtaaacatgcaattgctatggaagaccatatccagaacaacagcaacagagaccttgtccagaagataagaggattgagaacagccctagttattgagctgggccttgttgtatgtatttttgctttttgcattgctcggcgtcgcactagaacacgcaggagacagcatattttgaaacgttagctgaacagtagtaatatacaaagacgatagatcggtgctcatttgcaaacattaaagcttccggagatggtggagaatcagagatgggatgaaggagcctgcacgtcatcctctttaaatcacgaggtccatctgctgttctgaactttgtagggtaggaaaattaagtatgtactccctctagtcgcagaaacttgtcatttaggacagatatggtcaaacctttaaaagtgcaagtatttacattatttactttggaaccatgtaggtctaatgtcgatctgcattcgagattcatgcaaaatctcttatatcggaagggttttaagaatatattctagaatagtggtaaaaacatgcactgaagatcgtgcaaaatcaaatgtgtcaagttgtgaccagatggagtgtacatgtttaacataaataacttaattgttgtaactgatttgtggccccgtcgtgcttcctctgtaactatgagttgctcctaccaggaggaattgacgatgctccatgcctgaaccttgcaacttgttgtatctataatgtttgtctctagcagtgtactctatacctattctatgtgttcgttctttatgatcttctctanaagattcactctata

SEQ ID NO: 81568 - DNA, 1619 bp, Zea mays
  Clone ID: MRT4577_174406C.1
atccctacccgactccgccgccgctcccgctccgccccagcgcatcgcccgccgccacagcgtaccgcgacctcatctatcaccttcagctttcaatcatggcggacgtcgatgtcgaaccggaggttgccgccggagctcccaagaagaggacgttccgcaagtacagctaccgcggcgtcgacctagatgcgcttctcgacatgtccactgacgacctcgtccagctcttccccgcgcgcgccaggagaaggttccagaggggtctgaagaggaagcccatggcgctcatcaagaaactgcgcaaggcggttagtttccaaccgcttagttttcattaccactttttcttaacgtgttccgatcaagataattgcgtggatctgttatgctgtcatgattaacgatgcttattagatttttcctattttttccattctagaagaattcgagaaaaccgaaatgtgtcttctcgattctcgaatgagtttaatgcatcttctcttaattttacccatacgatattaggtgtgatcttggtgtcaaaattttgagcaaatctcagtgcctattgttgtttagtgtaaatgccgtcttcaaaggagatgcaattaatcaaccagaaggctggttacttgaatgcttggcaaggttgctagtattgagtgttgcaattacaaatgtcgtagcaaggttgctagtattgagtgtagcaattacaaatggtgaaccttgttatctatgtctagaagaagttgctgtattttgtagagctcctatgggcattgttctctcttttctctagacaaataagcttgttggtttagaaggtgcaactaaatatacttttgaaattgctctgttttgtgacctgccttgtctcaatcatactattgttgtgtctgccgaatactattgggatattgataaatcaaattttctatcctgaatgtacagtatgctagctgcagtgccttttgttctgtgccaggtagatgcggtcaatgcaagattgtatttaccagtcatcatctgtggaagtttggttacctatacttgttacacaatttcctcacgagctatatcccactgtcctcaacagaaaaaaaatgctcctgctggtgagaaaccagagccagtcaagacacatctccgtaacatgatcattgtccctgagatgattggaagcattgttggggtttacaacggcaagaccttcaaccaggttgagatcaagcctgaaatgatcggccccccccctgctgagttttccatttcctataaaccggtcaagcatggcaggcccggtatcggtgccccccccccctctcgttttattcctttgaaatgagctgttacccggctttgcagtttcccaaaagtcagttggcaatgttcattcagcttttttacttgttttgaacaagttaaatgcccaagatattttgttttgttcccttccagctcaagaattcaaagctaagccttgcccccttatgctgttttgttggaagtttttgagttaatcatatttaagctgggttgctaaaaaaaaaaaaaaaaaaaaaaaaaaaaaaaaaaaaaaaaaaaaaaaaaaaaaaaaaaactcgagggggggc

SEQ ID NO: 81569 - DNA, 562 bp, Zea mays
  Clone ID: MRT4577_174407C.1
ttttccccgatgtacgccccctcaagaccgtaaggagccgaacgagagacagagaatgagagtgatcaggacatggatcaccgctgtgcctgcccgtgctgcttcaccgaaacgagtaagaatctgtacgaatccgacctcacgcatggcaacacgcaaagaacattcccaagaacctcaggctgcggatgactgcactatacacgacagcaaaaagatgctccatgctcattaccgtgtagctgatctggaccgcacactccaggactacactcaatgcttcgggattaaactgctgaggactcgggatggtcctggtcagaagcacaacaatgatttacttcgttttcggacagataacaccaacttagcaggtgctttgacattcgactatggcgctgaccagcatgacattgtcaacatgctttgtgcatttcacgattgctgatgatcatgcgaacgattaaactgatgatatctgatccgaagctagtcagagccacgcttaatctgatcctgattacgtacgatccactgttattggcttcggactcgagcctga

SEQ ID NO: 81570 - DNA, 651 bp, Zea mays
  Clone ID: MRT4577_174408C.1
gggtccccattaaaaaaggtatcggttgggttttcccggtcggtaaatttggtaccctaaaaacggccccccctttttttgtttctctatattttttttttttttttgtttttttttttttttttttttttttttttttttttttttttttttttttttttttttttttttttttttttttttttttttttttttttttagcaactcagcttagatatgattaactcaaaaacttccaacaaaacagcataattgtgcaatgcttagctttgaattcttgagctggaagggaccaacacaaaaggtcttgggatactaaagagccgagtcccagctcatttcaaaggaataaaccgggggggggggggggcaccgataccggccctgccgtgcttgaccggtttgtaggaaatggaaaactcaccagggtaggggccgatcatctcaggcttgatctcaacctggttgaaggtcttgccgttgaaaacaccaacaatgcttccaatcatctcagggacaatgatcatgttacggagatgggtcttgactggctcaggcttctcaccagcaggagcatcctttttcgccttgcgcagtttcttgatgagcgccatgggcttccttttcaaacccctctgaaaccttctcctg

SEQ ID NO: 81571 - DNA, 467 bp, Zea mays
  Clone ID: MRT4577_174409C.1
cggctctggacctttgggctggtttatgtgcttggttggatgttgagttttagatggttcctcctacgagtttaattcttgcgtctgacgtggtggtggttcctgcgttgggtatggatggtgttggtaagtgttgtttgttgcggtgggtgtgggataataatggctctgtggatgtgtcggatcgtagtgattattattagtagtagtagtagtaggagtggactgcttctgtggtgatgttgctgctgcgtctgtcggttagactgcgtctttcggattgctgtgctgagcctggtgctaagaataggagtctgcggtcgttttcttgtggtcgtgaggttatggtgttggtgttggttgatttgcgggagacagagttgctgctggaggatcatatgcgtgctactctttgtgggttcaatttgaggatggcgtatactcctggtgattgtgctgcggaaggt

SEQ ID NO: 81572 - DNA, 923 bp, Zea mays
  Clone ID: MRT4577_17440C.1
cattgggtacctcgaggccggccgggagtgccaatgattcggtaatctcatcctcgttctagtggtaccaccacagcctcctgtgccctcctgccgtccgtgacgtgacgcagccgagccgcgcgcgctctccgggccggacgcctccgctcgaatcgatggacgccgaggccggcgtcgctggcgccgaccagcttccgcggaggcagtactacctgaatctactgcttttagcttaccagagctttggtgttgtttacggggacctgagcacatcgcctctctacgtgtataaaagtacgttctctggaaagctcagacactaccaagacgaggagacagtgttcggcgtactttcgctcatcttttggaccttcactctgattcctttgcttaagtatgtcaccatcgtcttgagtgctgatgataacggcgaaggtggaccatttgctctctattcgctcctttgcaggcatgcaaaactcagcttgctgccaaatcaacaagcagctgatgaggagctatcttcatactacagaaatgggttcgcgcctcgcaatggatcttcaccttggttaagaaggtttctggagaagcacaaaaaaatgaggactctgtttcttctcatagttctctgtggcgctagcatggtgattggtgatggtgtccttaccccagcaatctcagtactctcgtctatgtctggattacatgttcgagctactggtctacatcatagttctgtagttctcctttcatgcattgtggtgggttggtctatttgcattgcaacaccgaggtactcagaaggatgactgtctcggctctgcttgcattcatgtttgcaccaattgtcatcatctggctgctttccattgggaggaatcggttatacaacattcttcagtgcgacccaaatgtat

SEQ ID NO: 81573 - DNA, 757 bp, Zea mays
  Clone ID: MRT4577_174410C.1
tttttctaaaccctacccgactccgccgccgcccgccgctccgcctcagcgcatagcccgccgcgacctcatcgatcaccttcaactttcaatcatggcggacgtcgatgtcgaaccggaggttgccgccggagctcccaagaagaggacgttccgcaagtacagctaccgcggcgtcgacctagatgcgcttctcgacatgtccacggacgacctcgtccagctcttccccgcgcgcgccaggagaaggtacctttcgtgccacgactcgtttgtttccgtagtatttttgtttgctgagtttgttttgataggttccagaggggtctgaagaggaagcccatggcactcatcaagaagctgcgcaaggcggtcagtttccaaccgcttagttttcattaccactttttgttagcgtgttccgatcaagataagtgcgtggatcgttatgctgtcatgatttacccgtacgatatgaggtgtgatcttggtgtcaaaattttgatcaaatctcagcgcctattgttgtttagtgtaaatatcgtcttgaaagaagatgcaattaatcaaccagaagactgtttacttgaatgcttggcaaggttggctagtatgagtgttgcaattacaaatgtcgtagcaaggttgctagtattgactgtagcaattacaaatgttgaatcttgttatctatgtctagaaggagaatttgttgtattttgtagagctcctatatcatttgttctctcttttctct

SEQ ID NO: 81574 - DNA, 1468 bp, Zea mays
  Clone ID: MRT4577_174411C.1
ccgggaaaccctacccgactccgccgccgcccgccgctccgcctcagcgcatagcccgccgcgacctcatcgatcaccttcaactttcaatcatggcggacgtcgatgtcgaaccggaggttgccgccggagctcccaagaagaggacgttccgcaagtacagctaccgcggcgtcgacctagatgcgcttctcgacatgtccacggacgacctcgtccagctcttccccgcgcgcgccaggagaaggttccagaggggtctgaagaggaagcccatggcgctcatcaagaagctgcgcaaggcggtcagtttccaaccgcttagttttcattaccactttttgttagcgtgttccgatcaagataagtgcgtggatcgttatgctgtcatgatttacccgtacgatatgaggtgtgatcttggtgtcaaaattttgatcaaatctcagcgcctattgttgtttagtgtaaatatcgtcttgaaagaagatgcaattaatcaaccagaagactgtttacttgaatgcttggcaaggttgctagtatgagtgttgcaattacaaatgtcgtagcaaggttgctagtattgactgtagcaattacaaatgttgaatcttgttatctatgtctagaaggagaatttgttgtattttgtagagctcctatatcatttgttctctcttttctctagacaaataaggttgttggtttagaaattgcttactgaatggtgcatacttctccattttctttgttatgtagtctgctgttttgtgacctgccttgtatcaatcataccattgttgtgtctgccgaatactattgggatattgataaatcaaagtttctatcctgaatgtacagtatgctagctgcagtgccttctgttctgtgccaggtagatgcggtcaatgcaagattgtgtttatcggttatcatctgtggaagtttgttttcttatacttgttactcaatttcctcacgagctatatcccactgtcctgaacagaaaaaagatgctcctgctggtgagaaaccagagccagtcaagacacatctccgtaacatgatcattgtccctgagatgattggaagcattgttggtgtctacaacggcaagaccttcaaccaggttgagatcaagcctgagatgatcggccactaccttgctgagttctccatctcctataagccggtcaagcatggcaggcccggtatcggtgccacccactcctcgcggtttattcctctgaaatgagctgttacccggctctgtagtctcccaagagtcagttggcaatgttcgttcagcttttctacttgttttgaacaagttaaatgcccaagatattttgttttgttccattccagctcaagaattcaaagctaagcattgcacaattatgctgttttgttggaagtttttgagttaatcatatctaagctgagttgctattttgggttgttt

SEQ ID NO: 81575 - DNA, 483 bp, Zea mays
  unsure (1)..(483): unsure at all n locations
  Clone ID: MRT4577_174412C.1
ccgtacgtcgatgtcgaaccggnagttgccgccggcgctcccaagaagagacgttccgcaagtacagctaccgcggcgtcgacctagatgcgcttctcgacatgtccacggacgacctcgtccagctcttccccgcgcgcgccaggagaaggtacctttcgtgccacgactcgtttgtttccgtagtatttttgtttgctgagtttgttttggtaggttccagaggggtctgaagaggaagcccatggcgctcatcaagaaactgcgcaaggcggttagtttccaaccgcttagttttcattaccactttttcttagcgtgttccgatcaagataattgcgtggatctgttatgctgtcatgattaacgatgcttattagatttttcctattttttccattctagaagaattcgagaaaacccgaaatgtgtcttcttcaaatgagtttaatgcaatcttctcttaattttacccatacgata

SEQ ID NO: 81576 - DNA, 800 bp, Zea mays
  Clone ID: MRT4577_174413C.1
cattgggtacctcgaggccggccggggaaaaccctacccgactccgccgccgctcccgctccgccccagcgcatcgcccgccgccacagcgtaccgcgacctcatcgatcaccttcagctttcaatcatggccgacgtcgatgtcgaaccggaggttgccgccggcgctcccaagaagaggacgttccgcaagtacagctaccgcggcgtcgacctagatgcgcttctcgacatgtccacggacgacctcgtccagctcttccccgcgcgcgccaggagaaggttccagaggggtctgaagaggaagcccatggcgctcatcaagaaactgcgcaaggcgaaaaaggatgctcctgctggtgagaagcccgagccagtcaagacacatctccgtaacatgatcattgtccctgagatgattggaagcattgttggggtctacaacggcaagaccttcaaccaggttgagatcaagcctgagatgatcggccactaccttgctgagttctccatctcctacaagccggtcaagcacggcaggcccggtatcggtgccacccactcctcgcggtttattcctctgaaatgagctgttactcggctctttagtatcccaagagtccgttggcaatgttcattcagatttttctacttctttagtatcccgagacattttgtgttgttccattccagctcaagaattcaaagctaagcattgcacaattatgctgttttgttggaagtatttgagttaatcatatctaagctgagttgcgaaaaaaaaaaaaaaaaaagcggcc

SEQ ID NO: 81577 - DNA, 479 bp, Zea mays
  Clone ID: MRT4577_174414C.1
gctagacgtccggcttgagccgactgatcagaagactgcactcaagatctcactatcgatcgccatagttgttgccatcggtacacgacaccgaacacgacaaccacttgctggtgctgattcacggaagcatctacagactctggctgatgctgctgagcctgctgcacagaaggcttcgcacaggatatctaacagtcggcttaacagatgatggcacatctgatgcatatgctagaccatatgctggactgaggtagtgatggaccttgtcttgacctctaatgtgttgtctagtgcgaagacttgacctaatgaatgagaatatgaatgtttgtatgcataccaggatccgaaccatactaagaacacctaccaggactcatacaattactagctgactcacatgagggaacgcctgaggcagtgacatgtggagatcatgggatataatctaagaatggatcttatactggtgt

SEQ ID NO: 81578 - DNA, 221 bp, Zea mays
  Clone ID: MRT4577_174415C.1
gcccattattagcccaaccagacataaaagcacgggcgattaatgacccttcccgacttggggataaataaggtgtagcgctgcttgacacagaggatgagaggcgcagaacgtattgcgggacatgatgtatacgtctacgaaacagtcgtgagcgtggataacctgcctgaacgtgctgaccaacgagaacctggagggggtggacacctcactgataa

SEQ ID NO: 81579 - DNA, 245 bp, Zea mays
  unsure (1)..(245): unsure at all n locations
  Clone ID: MRT4577_174416C.1
ggggggggggggggaggcaagacaaaggcgagnccgacaccccggcagccaccgggagaaggaagggcaccncngaaaaggagancnnggaaagcacacacgcggnacncaccggggaagaacccaanaaaaaaanggagcaaggaggggggggggggggaattttttcttttaccaccnnnngncnancananncggggggggggggggggcacgnccccacaccaagagncaccanacagcag

SEQ ID NO: 81580 - DNA, 729 bp, Zea mays
  Clone ID: MRT4577_174417C.1
cgggatgttgatagagtaactcatctctccgtgctgtatttctctgcggcgctggcacaggctacacgatcccggcggggtggggtgtcatggtgtgcccaccggcggtgcacttgaaccctgacatctacgaagacccgttggcgttcaacccatggaggtggcaggttcgtctcttgctcgacatctcagcagcaacatctcacctagctagggttctgtcacgcgaggtcgttagcttcagtgcgtattaggttgcaagggaatgagtcgttcgttctgttctatattctgtagtctgaagtgctgtgatctgattcgctcaccgaacttgcatatattctctcctctcgagagtcgagtctcgccattaaaacggaaatcacgaacaagaatagtttaaccaactgcaggtctccaataattggcagagtggttaattggtccacgatcggggaggctctgatcccaagtaccaacttggcctggccgcggagatcaagaagaaatgcggttcgcgtccacatgacatactagtgtatttgtcctcgaactgacgcagaagcttcctcgcttagtagtttaagtttaacaacaaggtcagaatggcaacagatggactcatggacatgcatggtatagatcagtaacaggaggcaactgtgcagagcagccagctaccaaaaaaaaacggacagatagtgcttgattgtactctcatcactgtct

SEQ ID NO: 81581 - DNA, 1857 bp, Zea mays
  Clone ID: MRT4577_174418C.1
aattcggcacgaggcggcttgtcgccgtgcgcgccgccaccatcaccacacgaggcgccggagaaagacatcaagcgcacgcccatggccatgactcctcacgcctcggcggccaccgtagccgttacccctgcgttgcgctttccccacactttgtctgccacgggcctctcctcaccgcctctggctgggggctgcggcggctgccgggttcggttccggcccagccagcgcggccgaggcacgcaggggcggcgaggtggctctcacgtgtcgcgcgtggggggcctgctgggcaccgtattcggcgggggcggccgcgacgacggggaggccacgcggaagaagtacgcagacaccgtggcgcgtatcaactccatggagcccgaggtctccgcgctctcagacgctgatttgcgtgcacgcaccgctgcgctccaggaccgtgctcgctccggggaatccctggattcccttctccccgaagcatttgctgttgtgagggaggcttccaagagagttctaggcctccggccctttgatgtgcagttgattggtggtatggttctgcacaagggggagattgctgaaatgaagaccggagaggggaagactcttgtggccattctgccagcatacttaaatgctttgagtgggaaagaagtgcatgttgtcactgtaaatgattatctcgcaagacgtgattgtgagtgggttggtcaagtcccccgatttctaggactgcaggttggcttaattcaacagaacatgacacctgagcaaaggagggaaaattactcatatgatattacttatgtcacaaacagtgagcttggttttgattatctaagagataaccttgcaatgactgtagatgaacttgtcttgaggaacttcaattactgtgtgatagatgaagttgattcaatccttattgatgaagcaagaacacctcttataatatcaggcctagctgaaaagccaagtgatcggtattacaaagcagcaaaaatagctgaagcttttgagcgagacattcattacacggtggatgaaaagcagagaaacgttttacttacagaagaaggttatgctgatgctgaagaaatactggacatagatgatctgtacgatcctcgtgaacagtgggcttcgtatattctaaatgcaatcaaggctaaggagctcttccttaaagatgtcaattacattgttcgtagcaaggaagtgcttattgtagatgagtttactggcagagttatggcgggcaggcgatggagtgatggtctccatcaagcaattgaagcaaaagaaggtgtacctatacaaaatgaaaccataactctcgcatcaataagttaccaaaacttctttcttcagttccccaaactatgtggcatgactggaactgcagctacagagatccaagagtttgagagcatatataaacttaaagttactgttgtcccaacaaacaagccaatgatacggaaggatgagtcagatgttgttttcagagcaacaaatggaaaatggcgtgctgttcttgttgagatatcaagaatgaataaagttggccgtcctgtgcttgttggtaccaccagtgttgagcaaagcgaatctttatcaaagcaattgcgtgaagctgggattcctcacgaggtcctgaatgctaagccagagaatgttgagagggaggcagagatcgtagctcagagtggacgccttggtgctgtgacaattgctaccaatatggcgggacgtggaactgatattatccttggtggcaatgcagaattcatggccaggttgaagttgcgtgagatccttatgccaagagtcgtcaatccaatagat

SEQ ID NO: 81582 - DNA, 200 bp, Zea mays
  Clone ID: MRT4577_174419C.1
cggacgcgtgggcgccgccgcaagcttgtgtaaggtgtaaccctaaccctaaaacacttacctgggcgtgcagcaccaccctttcatggaggggcacggaggctaagtatatgcaacctatacaccatatccgcatggattgaacgaatgcccaaggcatggatacaaactcttatctgcaagaggtgggcgctatggac

SEQ ID NO: 81583 - DNA, 596 bp, Zea mays
  unsure (1)..(596): unsure at all n locations
  Clone ID: MRT4577_17441C.1
cattgggngaaaatcatccccgtccctaccacgtcaaatttcgggtccccaccctgtcatcttcgcgggggaaattttggccccatccccatcctcttcaagtcccactgggaaaattgctatccttaatcactcttacgtagttacgtgtagttacgtgcaactaagagcatctcgttgaattaattttgtgtgactggctatggctaaagatagcggaactgactttattgagcttgttctagatgtcaaaaactacctgacgtctggcagtttcatctagaatcgatgcaactcaaaaagaatatcatttagctcggattaaatgacattgccctacagtttcgttagaagacaaaagttactatgttggcaaaggttgtttcatgtgtgggtcccagtagcattggtcacgccaatacagcaatgataaacacctgattcacatgtatatgccaaaacttagatgctcatttttgtctaggcgcttgtatatgttgagaccagagagcttctcctagagccatagcctggtgatgctgccatggatgttgatatcatcattggtagcgacgttctattagacaatgataatt

SEQ ID NO: 81584 - DNA, 395 bp, Zea mays
  Clone ID: MRT4577_174420C.1
caaccggttcatggactcgcgcactattttctctctgcattgtgccaagaaggtgtcagaatggtggggaagccgcagcagatctacgaggatgccgaacatctcatgcgcccgaccttatcaaatctcttggcttcgaagacggtaatgcaggaagatttgtgtgagacgaggtcgtctccgtgctcgagggccaacaaagcgagcgcctcggcggcagccttcctggcggcccaatcgtcggccgtgagcgcgtcgcggaggcaaggcacggcggcggaggcggcttcaccgccggatgctgccgaggcagcgccgatgatggaaatgagcgcgggcttggccttgaacgccgcgctgcggatgaccttgtataggctccggaagagcccccg

SEQ ID NO: 81585 - DNA, 1190 bp, Zea mays
  Clone ID: MRT4577_174421C.1
aggcatgcagatctttgtcaagaccctcactggcaagaccattacgcttgaggtggagtcatccgacaccatcgacaatgtgaaggcaaagatccaggacaaggagggcattcccccggaccagcagcgtctcatcttcgctggcaagcagctggaggacggcaggacccttgctgactacaacatccagaaggagtccaccctccaccttgtgctgcgtcttcgaggaggcatgcagatctttgtgaagaccctcactggcaagaccattacacttgaggtggggtcctcggacaccatagacaatgtcaaggcgaagatccaggacaaggagggcattcccccggaccagcagcgcctcatctttgctggcaagcagctggaggatggccgtacccttgctgattacaacatccagaaggagtctacccttcaccttgtcctgcgtctccgaggtggtatgcagatctttgtcaagaccctcactggcaagaccatcacccttgaggtcgagtcgtctgataccatcgacaatgtcaaggctaagatccaggacaaggagggcatccccccggaccagcagcgcctcatctttgctggcaagcagctggaggacggcaggacccttgctgactacaacatccagaaggagtccaccctccaccttgtcctccgtcttcgtggaggcatgcagatctttgtgaagaccctcactggcaagaccattacgcttgaggtggagtcatccgacaccatcgacaatgtgaaggcaaagatccaggacaaggagggcatccccccggaccagcagcgcctcatctttgctggcaagcagctggaggacggcaggacccttgctgactacaacatccagaaggagtccaccctccaccttgtcctccgtcttcgtggaggcatgcagatctttgtcaagaccctcactggcaagaccattacgcttgaggtggagtcatccgacaccatcgacaatgtgaaggcaaagatccaggacaaggagggcattcccccggaccagcagcgtctcatcttcgctggcaagcagctggaggacggcaggacccttgctgactacaacatccagaaggagtccaccctccaccttgtgctgcgtcttcgaggaggcatgcagatctttgtgaagaccctcactggcaagacattacacttga

SEQ ID NO: 81586 - DNA, 255 bp, Zea mays
  Clone ID: MRT4577_174422C.1
ttgttttttttttttaattgttgcttgttattccttgttccatctggtcttcaagggctaatactgtcaaaggcggggcccccacttggacaagcgtcaaactggcgagtcccactttggtagcggtaaatatgcaaactcagcaagaccactgctcgggaacaaggagaaaagccaccttggccaaccaacccccaaagctggctcagcatcgcttacatagctaacatacggaacctcaccatgtgaaaggcc

SEQ ID NO: 81587 - DNA, 306 bp, Zea mays
  Clone ID: MRT4577_174423C.1
agctatacaaaagtccatagccatgatcattagtcccctcatcatatatcgggcgggatgcttactaatcctccccccaatacatttgtcccatcacaaaccacccattcaacgcctatagccagttaaacacacagccatcttcctaggagtgactttagttgaccccttcagcatttgcatatcactgtccatgagttcacaatgcagctgtaggattcttgattttctcattttcaaccatggatggcttcattgactttttctccacatacagctattacgttagtaacaacggggggggca

SEQ ID NO: 81588 - DNA, 167 bp, Zea mays
  Clone ID: MRT4577_174424C.1
gttgctatctctgctggtctgaacggatgggccttataccctcactaactttcgaacagaggcttgcatgtaattttggagtctgggaaactaagacgatggagaggctctggagagagaacttttttgacactgcgacaaataactggaccaccaataacacaaga

SEQ ID NO: 81589 - DNA, 482 bp, Zea mays
  Clone ID: MRT4577_174425C.1
ttttttttttttttttccaaaaatgttagagtacgacgattatataaaaataaagtatatgaattcatacagccaccacgtgacttcagaagataaaggcccacaacacttgttgctactgctaacacatttttccactttctagtgggcagcatgaacaaaccccacaaataaaaaatctggaagccttctttgtgcgactatgaaaaggaacaaacaaaaaggatgtggggttcaccacatttcatctctcagagaccaagggcctgtcaagccttggttggtcagcggtcatgaccttcgcgatgtcttccatgacgtcttccatgcttggaaccagtagtggctccatggtgtaggtgaatacaggtccttgtttgcagctaaggccaacaactaccaataactaaattaactaaattagatgtgcaaactactgggcgagacatgcttttatggcagtcttatataaacaccaaaac

SEQ ID NO: 81590 - DNA, 443 bp, Zea mays
  Clone ID: MRT4577_174426C.1
tttttgggggttatataaaatattgggtgtgtaaccaaacaattatcaagatgaaggggtccatagggcatgatctacaaagcgatagatctctattatgaaaagtactccgcccattatgcgtttatggggattttagacgaattgtatgatcgactcttatagaagctaactgaaaaattgagcgtttaatagttcgcagcagatataggtgctttggtggtatgaagctgtaaaatcgaaggcacctagccaaagcctgcctatgacaaccatcatcgacgctggccaattggagcaaatgcgctgcgcgcaacaaatctcgcgtggaagagcacgcagtgcctagtgcctacaggactgtcctgcgacatgaagggtgttggcgtaactcacttaccactgggactgggccttgaagagctcgttttaatacagtatgg

SEQ ID NO: 81591 - DNA, 416 bp, Zea mays
  Clone ID: MRT4577_174427C.1
cgggatattttgtcggcggcggttggcgcggggaagctgggagcgggaggtgatgcagtggcggtggaggttcgcctgccgcctttgtcagaggcggatccccttctcgcagagaagaagatgatattggaaaaaaggaacctatcttgtgagattcagattcctgttgcatgttctgctgtcgatgccctcaaattactggatcacattattgaagctgctagagtagtgtacatggacgaggtatttcagtcgtgtcactcattttgattggctctggattttattcacctctacattctaacgagatgagctgtgcgatttttttttcagctagaactttattttgcaagagatgatgtcggtccattctctgcgaagaatgaacttgaatctttaaatcttttgttgaaaac

SEQ ID NO: 81592 - DNA, 1376 bp, Zea mays
  Clone ID: MRT4577_174428C.1
gagaaggttcctcaggcctccgcaagctagctcaagggtacctcgagggccggggagcaaggtgaactcaggcctccgcaagctagctcaaagaaaaacgaaataatgagggatgcggtggcaaagcgggaggcgatgaagggaggcgcgagctcgaaagggccggtggtggtcacgggagcgtcgggcttcgtcggctcctggctcgtcatgaagcttctccaggccggctacaccgtccgggcgaccgtgcgcgaccccgagaacgttgggaagacgaagccattgctggaccttccaggagcaacggaacgcctgtccatatggaaagccgacatggcagacgaagacagcttcgacgaagccatcaggggctgcaccggcgtcttccacgtcgccacacccaccgacttcgagtccaaagaccctgagaatgaggtgatcaagccgacggtggaagggatgatccgcatcttgagagcctgcaaggaggccggcaccgtgcgccgcatcgtcttcacttcctccgctgggacggtctgcgtcgaggagcggcggcggcccgtctacgaccacgacaactggagcgacgtcgacttctgccgccgcgtcaagatgaccggatggatgtacttcgtgtctaaatccctggcggagaaggcggccatggcgtacgcggcggagcacggcctggacctcgtcagcgtcatcccgacactcgtggtgggcccgttcctcagcgcggccatgccacccagcctcgtcaccgcgctggcgctcgtcacggggaacgaggcccactactcgatcctgaagcaggtgcagttcgtccacctcgacgacctctgcgacgccgagatcttcctcttcgagcacccggccgccgccggacgctacgtctgctcctcgcacgacgccaccatccacggcctcgccgccatgctcagggataggtaccccgagtatgacatcccgcagaagctccgcgggatcgaggacgacctgcagcccgtgcacttctcgtccaagaagctcctagaccatggcttcactttcaggtacacggtggaggacatgttcgacgccggcatccggacgtgccgggagaagggcctcatcccgctcgccacggccggaggggtcggctctgcctcactgcgcacacccggcgagacggatgtgacgaatggcgcttagacaacaatagcttgtttcaagaaaaattactacaacttgcctctacacagtagaaatcctacgaataagctatatgtagaggctgtgatgtaatattattgttttcctgcaacaactcaaaacacatctgttcccaaatcaaacagaacttcttatatatatgacaactatttatgcgt

SEQ ID NO: 81593 - DNA, 769 bp, Zea mays
  Clone ID: MRT4577_174429C.1
gcaaggaggaggaggcaagggaagccgccgccgccgccgccgccgccgcccccgccccgtccctcctcgccggcccgccgccacaggtttcaagatgtcaacctgcacgtttgcgacctcctgcgtgctcttgggcaatgctcggacaaccgatgtcccccagaaagcgctcaagagccgtgtgagcttccttggccgaggcgcgctgcagctgccgagcctgaggtcctcctcaaagaagaagctggatgtctcagcggcggccacgtacaaggtgaagctggtgaccccggaaggggaggagcacgagtttgaggcgccggacgacgcctacatcctggactcggcggagacggcgggggtggagctgccctactcgtgccgggcgggggcatgctcgacctgcgcgggcaagatcgaggcgggcgcggtggaccagtcggacgggtcgttcctggacgacgcgcagcaggaggagggctacgtgctgacgtgcgtcgcctaccccaagtcggactgcgtcatccacacccacaaggagggcgacctgtattaggggtctcacctctggctcccccggttgtgttgagtagaaccttgatgctctgtaaaaccaatcttgatggttgtttatcccctgcctgcctgcctgtgtgctttggtcgttagtcggattgttgggtgaacccccccatggagatggagatggagatggagatggaggagaatgagaaataagggactaaaatgcagtttcatggtttttgcg

SEQ ID NO: 81594 - DNA, 112 bp, Zea mays
  Clone ID: MRT4577_17442C.1
ggctcaagccttcccactggggatcaccaattctggacaaatactggtcaacagccccggcatgcacttgttccaaccttggaggcacccactttgggtttggggctttatc

SEQ ID NO: 81595 - DNA, 657 bp, Zea mays
  Clone ID: MRT4577_174430C.1
cattgggaccctcgaggccggccgggaggcgtaggattccacgtccatcgatggcgctggacacggggacggcggcgggtatcgacgaggcgtacgagttctccgcgcccaggttcttcgacttcgtcgtcgaggaaacggaggaggccgtacgtgccgccgagagctggttcgaggctgcccgcagccacgccccctcgccgttcaacccaaggatcaaggaatcgagggcggaggtcaagctcgcggtcctctgtgatttcgcgcaagccgaggagccggctccagaggtaaataaacagaaggagccagctgacgaaatgtcggggccgcctgcggctcaagaagagagagatgaatcgcccccgtctctggagttcctctcggcgacggacctttctgtaaaatcagcagatggtggttctaccagcacgcttaagatgcagacgcgttatcctgcccctcctaccaatgttgcccctgcgagttcgacatgtgacagctcttcagtgaatactgatgcgcgcacgccgaagatgcaggtaaacatgtgcagagcaggtcctacggctgcttcgacgaatgtcaagaggagcgtgatgatcaagggtggccgtgatttggtggggactggaaaggcagccactgctggcgctg

SEQ ID NO: 81596 - DNA, 359 bp, Zea mays
  Clone ID: MRT4577_174431C.1
gtaagctcggaattcggctcgaggtgaacttaagtttttatgcgttgaggcaatggatactccacgggggatgtatgagtttcaaggggaggacatgcctcatgtcaggaaattggacatcaggaacttgctgtatgcctgaccggctattatctttgaggcctgacccacctctggtatgggttgcacgttgatcggtactacatacttataaatgctgataggcccctcattggataaaggagactgtgcggattggtctgactagcattaaatcttgggtttctgttgctctggactgtcgaagctgtagtaacaatgggatgtgctcgcgtgatagcatatcaactaaatacgag

SEQ ID NO: 81597 - DNA, 409 bp, Zea mays
  Clone ID: MRT4577_174432C.1
gccaaaaaacgcagcagcagatcgactttattgatattcataattcgtacataaaagtttggcaaaccctacaccgcttacagagaaagaaaactggaaacaagacacgagcagagcaggtagtgtagtggcggtagtcgagtactgcttgatctggatcgttaagccggggccgggcgacctaatcccaagcgacgttcttgttggtcccctcctcgggtggtccttcctgctgcgatgagtacggggcgtcggcgacgcggcgggcagcggcgaaaaggtcgacgggctgggagtcggcgatcttgccgccctccagcggcgtgccgtcgaagaacccggtccgcagcatctcgtcgtcgccggccaccttggtatgcgccctcccgggcttgatttcgcgcttgct

SEQ ID NO: 81598 - DNA, 811 bp, Zea mays
  Clone ID: MRT4577_174433C.1
cgggaaaaaaaaaaaaaaaaaaaaaaaaaaaaaaaaaaaaaaaaaacaaaaaaaaggccgcgaccaccgagcatacactagtgcttttgctagctacttgtgcgagaagagagagcgcacggcgatagatatggcgcatagcaagcgcgaaatcaagcccgggagggcgcataccaaggtggccggcgacgacgagatgctgcggaccgggttcttcgacggcacgccgctggagggcggcaagatcgccgactcccagcccgtcgacctcttcgccgctgcccgccgcgtcgccgacgccccgtactcatcgcagcaggaaggaccacacgaggaggggaccaacaagaacgccgtcatcgcggagtcggagcccgtcgacctgcccgcgagcgcgcggggcgtggcggaggtgaaccgtgctgggccggaggagcagacaggccgcggtcggcagggcatggccgagcccaccgccggtggacgtcgcttgggattaggtcgcccggccccggcttaacgatccagatcaagcagtactcgactaccgccactacactacctgctctgctcgtgtcttgtttccagttttctttctctgtaagcggtgtagggtttgccaaacttttatgtacgaattatgaatatcaataaagtcgatctgctgctgcgtttcttggcaccaacaaaaaaaaaaaaaaaaaaaaaaaaaaaatttggaaaaaaaaaaaaaaaaaaaaaaaaaaaaaaaaaaaaaaaaaaaaaaaaaaaaaaaaaaaagggtggtgccttatttaaccctttttttccc

SEQ ID NO: 81599 - DNA, 362 bp, Zea mays
  Clone ID: MRT4577_174434C.1
ggcaaacccaacgatatggatttcattcattacacactggtagggagggggaagagtttttccaacgggtatccccaaatgggcaaaaggaggtggggccaaataaggcttcccccaagcccaaataaggccaatttaggctttccggtcaaaacaaggcaaagaggaggggggggttgggttttcaaaaaaaaaggggggaggccccccccccgggttccccccccactttggggttatataataaagggggggttttttaaaaacctttccttataaaaaccccccacggggggaaaaaaaaaaaaaaggggggaaaaaaaaaccaaaggggttttggggcccctggggggttttttttt

SEQ ID NO: 81600 - DNA, 155 bp, Zea mays
  Clone ID: MRT4577_174435C.1
ctgtgcggcgctcgaggcggcctggcttgcaagttgaccattgtttaacggcaaacatgtaaagccttctcatgttttcatttatattgttgacgttctgatccatcatattcggcgaacaactcgtacaaatttgcataatttaacttctcgcc

SEQ ID NO: 81601 - DNA, 348 bp, Zea mays
  Clone ID: MRT4577_174436C.1
gcccggaatcccgggccggggccaaaagggaaaggaaccagggggatggggggggaaattatggggcggggccgacctgcctgccatccataggtattgtttggggtgtgtgagaaaaaaaaaaccaaagtccttaagttggttatctttttttgcaggttgggcgtcggccttggtcctcatgtccgaccgggggtctacctccttgtgggttgacccgatggcttttgctgtacccatttattaatgggcccacgatgttatgattggatcctatattaatcctaaacccggcctttttattttaaaaaaaaaaaaaaaaaaagggccggccgttttagaggatcc

SEQ ID NO: 81602 - DNA, 227 bp, Zea mays
  Clone ID: MRT4577_174437C.1
gtgtacacaagtgaatgcattgagaaaaaaaaggttggatcatatattacaaaccaccaagacccagcgggcgcccaacgggaacacgagggcccccaaacacaagatcaatggtggaatgctctctatcccactgataacaaaacgacgaccacgcacagactgttggatgcatacacaagcttgagccgaagccgggatgggccaacacaagacaccttccagcc

SEQ ID NO: 81603 - DNA, 255 bp, Zea mays
  Clone ID: MRT4577_174438C.1
gagcacaagtaatctagagttgccacccagagttcttttgagctgacaaagcgtagatatgggtcctatcaaatgttgcttacaggtcacacaaatgcaaaatatttgtggagacgagtgcccattaacctcatacaaagtatctgtatgacaaaagtcccactactcactggacgcggaaatggcacttgacttcgttaataatctaaaaagattggcagcaattaacaaatagttcttttaggggaaataatt

SEQ ID NO: 81604 - DNA, 278 bp, Zea mays
  Clone ID: MRT4577_174439C.1
aatcttcgtaatcgattaattaacacggttgttaaccagcttatgaaacaccgaaaaaagagggagggcttatcaaattatctatccagccccttaaaagattcaacaattgacatacacaaaaccactatttgttttacgtcaagctatacgtagagtaactcccaatatatgcgtgaaaacaaagacgtttctaaataaggatcgactccgtaagatccttattgaaatattatctaaacaaggaaaagcacttgccattcgttggttataaaaag

SEQ ID NO: 81605 - DNA, 162 bp, Zea mays
  Clone ID: MRT4577_17443C.1
atggcgccgtcgtcagatacggtgcccagaacaacccgagtcgccggcgttggcgacgaccatgaggtccccctgtttgacaatggacagcgtagtgcagccactctggaccgtgttcaagcggtggctgcgctggagcttgccatacacagcggcgcatga

SEQ ID NO: 81606 - DNA, 227 bp, Zea mays
  Clone ID: MRT4577_174440C.1
gggcacaagtcatactcactttctcatcgctgagaactgctggacgaatgataatgctacagttggctacatgaaacgtagatgttcacgccgttcgacccagatcactagtagctgttctgtgctaagggacgcgtttgactaccttgcgaaaatcatgggtttacatgaaaaaaacataaaaagataatggttttatctccctttcataactctttttatttatg

SEQ ID NO: 81607 - DNA, 330 bp, Zea mays
  Clone ID: MRT4577_174441C.1
cgcacgctcaggatccacatcttcccgagcgagttctcggacgacctatagctattgggaccacctacaaggctcttggagtaccttgccactgtcaccaatcaaggtttcatgtcagaccttgacattcagatgccaactgccttcgatcccttcgttgaggccaatgctcgcgactctggtgccgccgcacggtcaaacgactacgtacacgtgcgcattcagcagcgtaatggtcgcaagagcctgaccaccgttcatggattgcagaacgagttcagctacagcaagatcctcaaagatctcaagaacgagttctgctgcaatggt

SEQ ID NO: 81608 - DNA, 120 bp, Zea mays
  unsure (1)..(120): unsure at all n locations
  Clone ID: MRT4577_174442C.1
cagcgtntaacccctgtcnnggaccgtgtacccagaggggatanancgncgcctgtctantcggcagagtgcttcancncatgngtagctgtggangcatgccntgtanggttnccgcaa

SEQ ID NO: 81609 - DNA, 744 bp, Zea mays
  unsure (1)..(744): unsure at all n locations
  Clone ID: MRT4577_174443C.1
gtcattcaacatcgagggaagatatacctcagtcctaaacttatgtgtaatatgtttagacttaaatcaaacttctagatatttgcgcaacaatctgagagatgtcctctttgtgaccaaatggaggagacggtgccacatcttttagtgtcttgtgtatttgctagacaaatttggtggcatgtttttccccaatgggctagcaagtcttgactcctcaacctcatgttttccaagaccggtggaggaatgtgtgatagtaggtggataaaagtcagcgcagatgtttcaattgaactgtaatcttagtcgctaggtggctgtagaaacattggaacacttgtgtgttcgaggggcagtttgtgtgtgcccagcattgttgcagttcatccgggatgacgccgttagatggtctctagcaggagccgctgggttggcagacatttggcctcaataggagtagttgtaggctagttctaccttatgaaagtttttatgtatttttgtttctgtcctccgtaagaaggcttatattgtgtctgcagttgttggtctattttggatccttcttcctcttattataatgatgtgtagctttctcgtgcgttcgagaaaaanagggaaaaaaaagaaatagatgatggcctttcttgggtcgttgtttcaattactcaagaaaacttcagaccattttctaatcgggggccaacgacatttctcatgtttgtgatcaatggcacgatt

SEQ ID NO: 81610 - DNA, 178 bp, Zea mays
  Clone ID: MRT4577_174444C.1
cttctaacttgtagagctgcccacagggggggcgtacctgactccagggcgagccgccccaactgctccgatccgcggctaataccaccacgtacaccgctgactataaatcgatcgtgaccggtaacgggccggcttcgttgccctccgcactcgcgcaatcctgtacctaccatgc

SEQ ID NO: 81611 - DNA, 300 bp, Zea mays
  Clone ID: MRT4577_174445C.1
gcctcagatcatccaccatagctcgcgaattccaaattttccccaaatcgaccggaacaccgccgtgaggcatcgcgccgtgtccagccgttctcaggtgatgaaactgctgagctctgctgtttctgttccaaggtggttcccaagcaggaggaggaaaactaaggcttacctgggaaggtgtttttccttccagtgatgtaataataagtttatacccgtatatgtaataatcaactctttctatattttacttatgaatgtgaactatgttattgtaaaaaaaacatcaacaaggac

SEQ ID NO: 81612 - DNA, 689 bp, Zea mays
  Clone ID: MRT4577_174446C.1
cccacgcgtccgcggacgcgtgggatttgctcttgatccatctatcactcgtttccgcctttcggagcctctccgccagcctattctcacagcagagccatctatctatacaagggtgcttaacccacaagataaatttattatttttgcatctgatggtctttgggagcacttgacaaatcaacaggccgttgaaattgtccacagcaatccacgatcaggaattgcaaagaggctggtaagggcagcgttgaaacaagctgcacggaagagggaaatgaggtatgatgacctcaggaaagttgagaagggaattcgccgcttcttccacgatgacattacagtagttgctgtttacatagatcacggattactgcaagagagggatacttccgtgccagagctctcagtccgtggccttgttgactccgttggcccctcaagtttctcagggataaccgccatatcatgactcactactaatcgagcagcacaattttggtgtacggcattcaagtagcatttgactatctgagtgttatgctttaccaggcttttgcttttagtattgcctttatattgagtactactacaatacttcatgtcgctttgttttcaaaaatactttatgtcaattttgcaagtctgatttgctcgaaataagaggctcatgctgttgtgcggtgctt

SEQ ID NO: 81613 - DNA, 304 bp, Zea mays
  Clone ID: MRT4577_174447C.1
aattaccatatgattctgtaaacacctctagctttaaattattgcggtcacccctgcaggacttgctcgagatggatgcacatcagatatggcagctgtactctttgcaagtgtcaaatcagcttgggattctgttgtccaactgcataataaggaagtcaagggagctactgtttgggctcgtcaacttggcggagagggctcaaagatcagaaaatggagagcgattgtcaggaacctgccattcaagagaaggagatcgtggatatgtttagttcagcagggtttgtctgggatgtgacaa

SEQ ID NO: 81614 - DNA, 826 bp, Zea mays
  Clone ID: MRT4577_174448C.1
actgaaggcggagtggagcgaccccgaataaccctagcttcttcctggtcctcgtcgtcgccgtggccctcctacccgccagccacccggccggcgcctcgatcccgccgccatggtgctcggcaagatcgccatcgtcatcggctcagggatcatcggaaccatggtcaccggcggagacggcagcaagcttccggacctcagggacgtgctctccttctccttcaagttcatgaagcaggacaagaaggaaggctcgtccaacacctcgccgcagaacgacctcttgttgtctcaggtcaactatctcagggatcagctccaagcattgtcccgtgaggcccaatgcccgcagattatcaacgtcaatggcggaccaggtgctggtgcttatggtttaacttttattgctgttggagccattggctatttatacataagatggaagggatggaaaatttctgatatgatgtttgtcaccaagcgtggcttggctgatgcctgcaacgtagttggtaaacaattggatcaggtttcagaaagtgttcatgcttcaaaaaagcatttgggctggaaggatcgaccgagtcgattgtagtctagatgaatgccacgaaattattgaagccacagggaaagaggttacagtgatacatggagatctaagtgcctttcaggaggaaatacaatcagttcaccatgttgtccgcactctggagacaaagcttggacgccttgcatatactcaagatcacacaacacgaggaatacatggagttatgtgagttcactaaaagattggatcggagtccgaaagccgatgctc

SEQ ID NO: 81615 - DNA, 1138 bp, Zea mays
  Clone ID: MRT4577_174449C.1
ggggacatagccgcacaaagggaaggataccctcgccaacctcgaagctagtccaaactagtgggaggttgagtgcagggatcgatcggggaagacgagacaagcttcttctgctgctgctgccgcccccgccagctctagttcaccagagttactacttactagccaatctgacaccgatccaccgccggcaccgaccgtccatggcgcggggcaaggtgcagcttcggcgcgtcgagaacccggtgcaccggcaggtgacattctgcaagcgccgcgcggggctgctcaagaaggcccgggagctctccgtcctctgcgacgccagcgtcggcatcatcgtcttctctgcgcacggcaagctctacgacctcgccaccaccgggaccatggaggagctgatcgagaggtacaaagctgccagcgccggagaagcgacgaccgacggctgcggcaggcacaacaggatggaccccaaacatgaaaccacggtgctgcaacaggaaatcaacctgcttcagaagggactgaggtacatctacgggaacagggcgaacgagcacatgaatgttgacgaactgaacgccctagagaggtacttggagatatggatgtacaacacccgctctgcaaagatgcagataatggctcaagagatccaagcactgaaaagcaaggaaggcatgttgaaagctgccaacgagattctccaggaaaagatagtagagcagagtagtttgcttgacgtaggcatggtggtagcggaccagcagaatgggcgttttagcacagtcccactggtagaaaaggtgatcagtagtaaccccctgactgtactgagtggctattctagctgtaggggttcaaagatgggctactccttctgaccgtaataacaaacagcctgggggctccttctgttgattactactagtgtgtaatacatacagtcaataaagtctgtaatgggttggttgttctgctgctttggtgtatcatattcgattattcgtatcatgtaggccttagataagcccttcaggagtgcccctggtattgtgtcgtcgtgccttttacttttccagaatgaagaaatattgtctgttgaggagatctgatgatgtgctattaaatcaaa

SEQ ID NO: 81616 - DNA, 634 bp, Zea mays
  Clone ID: MRT4577_17444C.1
cttttaaagaaagagggttttcaatgtcgctgacccattgccagttatctagagcctgtgccacagttctggaagaaaaggccctacgaccaaccatctgtaccacatcaggggcaatgtcatggatagtattcccatacacccatctatccgaccaaaagagagtagtagccccatttcctatcacggttaacacagacaactcaaagaactgtctaacctgccgctgcactgggagggacatcccatgccagggcctgttcgggtccgtcttttccagccataaccattttgactgtaaagcccagcttttaaattgcaagttagggacaccaagaccaccatagcttagaggcctcgtaattatttcccaggatacaagacaacttccactagtaacctcttttctccctttccaaagaaacccccgttgaattttgtcaattgatttaatcacccactaagggatatttatagcaataagaagatagattggtatggctgaaagaacaaacttcaccaatgttgtccgtccagccagattgaggtgccgagccttccaattagggaggcgatctgcaatcttctcaatccacagcataagatcagtcttcctcaatttcttatcagagat

SEQ ID NO: 81617 - DNA, 1544 bp, Zea mays
  Clone ID: MRT4577_174450C.1
accgcacaaattgaaggagaccctcggcacaatgggaacgagacccaactaatcggaggttgaattcagggatcgttggaggaagaggacacaagctgattctgcttcttcggctcccgcagccgccgccagctccgctccagctcaccatgacttactagccaatctgacaccgattcacacccggcaccgacggcgcatggcacggtgcaaggtgcgggttcggcgcgtccagagccccgtccaccggcaggtgacaagcgccgcgcgccgctgcgggctgctccccaaggcccgggagctctccgtcctctgcgacgccagcgtcggcatcatcgtcttctctgcgcacggcaagctctacaacctcgccaccaccgggaccatggaggagctgatcgagaggtacaaggctgccagcgccggagaagcgacgaccgacggctgcggcaggcacaacaggatggaccccaaacatgaaaccacggtgctgcaacaggaaatcaacctgcttcagaagggactgaggtaaattgtttgttactcacagctttgccttgcagttccccccctgtacaaatcgcctacaggtaaatcagtttgctttctgaagaataaactgctgctgcacccagtcacgcaacatgtcaatctaaaaccaaggcatttaagcaaaaggaatggagagacagaccttcattgattctaacaagaatgactcggtacaagaaatagagaagaattgttagaagaaaggaagcattgtggtcggtaggtaccactacgggagctggacgaacgtgcacatgaatgatgacgtgatgaacgctcatgagctgtacttgctgatagggttgtacaacagccgctctgcaaagatgcagataacggctcaagagtaccaacaaccaaaaaggaaggtatgtcagatccctgttcctattgactctacgaagcaccgaggcttttagcacccatttacttcactaaaagtgtctgcgtgtacgcaggaaggcatgttgaaagctgccaacgagattctccaggaaaagatagtagagcagagtagtttgcttgacgtaggcatggtggtagcggaccagcagaatgggcgttttagcacagtcccactggtagaagaggtgatcagtagtaacccactgactatactgagtggctattctagctgtaggggttcagagatgggctactccttctgttgattactactagtgtgtaatacatacagtcaataatgtctgtgtaatgggttggttgttctgctgctttggtgtatcatattcgtatcatgtaggccttagataagcccttcaggagtgcccctggtattgtgtcgtcgtgccttttacttttccagaatgaagaaatattgtctattgaggagaaaaaaaaaagctgaaatggtgtatcatattagattattcgtatcatgtaggcttagataagcccttcaggagtgcccctggtattgtgtcgtcgtgcgtttacttctccagaatgaaaaaatattgtctattgaggag

SEQ ID NO: 81618 - DNA, 471 bp, Zea mays
  Clone ID: MRT4577_174451C.1
gcagttgtatcttttctttttttttggtgtcgtgcacgctgttggttctttgtagttctccccagcaggaaaaatagacctagccggaccttttataatgccattaccccaaataacaaatgggtttaccctgaccattcccacacatttgtgggaaaaacgaatagggttttcgttgggcccccatgaccccccacgttggggaagggaggcccacattttttttccttacccaaatccccatgggattttttttatcgagctggggacccggggccaccacaaaaattttttttcgaaaaaaaaaaaaagggaccccctcccgattggggttttttggcgagcctaaaataaatttcgaaaaaactttaccatgcccggccattattttctgggaattttttttccaatttccacagttccatttccaagccaaacaaacgcccaaaccacgggggtttggtttttttt

SEQ ID NO: 81619 - DNA, 669 bp, Zea mays
  unsure (1)..(669): unsure at all n locations
  Clone ID: MRT4577_174452C.1
ccgacgnagcaggagcaggccgtgtcgtgcctgctggtgatgtgcagcgccgacgacgaagtgcgtcgcggcggtgctccgggaaggggtggtcccgtccctggtctccgtctcggcgtccgggacggggcggggcagggagaaggcccagaagctcctcaagctgttcagggagcagaggcagcgggacaccgcgccggcgccgcaaccccagcagcagctgctgcagagccagctggcggagggcgggaatggtggcggtgctattatcgcgtgccaccaccgggagtccaagccgttgttcaatgtcaagtccaggaagctgggcaggacgctgagctctctgtggaagaacaggggcttctcgctgtaccagtgctaggatgcatgctagagtagtactaagtgttttgagttgatcagtgggttgtgtacatcgtcttgtgccttgttttccgcttggtccttttcctcttctctggggtattgttctgtttcggggtaagaaagaggagagtgaaaacattggtgttcttcccccacctacctcggtggggtgatgtagggcattttccagtttggctttggccgtgttaagagctgtgtacagtcgtttcttctttacaggtctccggttctctgtcagtggcagtgcccccgtttcagatc

SEQ ID NO: 81620 - DNA, 308 bp, Zea mays
  Clone ID: MRT4577_174453C.1
agaggctaatttggggacgaaacaaagctagaggggtccgggggctcacataacccccggaaactgtgccctgcaaagcttataaaccaggtcgggtggcccaaaacctttggaacctgattccaaaaaacccccaatccgggtgatcacttttttcccggggaaacaccagggacacccccgcagtaaccaaaaaacaatttagggattcccttgcgcagccctcttggggagaagtttttcccgggccttggttttggcctgcgctttgtatcccatgatcccccctccccactttttcctgacct

SEQ ID NO: 81621 - DNA, 374 bp, Zea mays
  unsure (1)..(374): unsure at all n locations
  Clone ID: MRT4577_174454C.1
gtgttctttcttttttttttttttatgttttttcttttttttttttttttttttttgggccggaaatatagttgaaatcgccgatgtttataaagattacaggcgcaaccacattttgggttaaacacaaattaaccttttcacacgggaattatgttcttttgattttagccccagcggtnaaactctcaacttgcaagttgcgaacaaccggttaggcttatcctaaaacttacatgggtccaccctccagcaacctccattttaatgggggcgcggaataaaccctgggaaagggatggaggggtttgcccactctaacacagaccacaggaactcccattacagtcaacatttttggcctgtaaaggaag

SEQ ID NO: 81622 - DNA, 594 bp, Zea mays
  Clone ID: MRT4577_174455C.1
aattcggcacgaggccgagacgacccaggaagagtccaatcaggctcctaacccttctcccctccgacggtctaaaccctgccgccgaaatgctcctccgccctttcctccgccgcggcgccgccgccgccgccgccgccgcggtgtcctctaacggggctcgcgctttagcactccccgacccgcctgtcgctctcgcctcccttttcctcgcctcccgatcctacgcgaaggccaagggcgggggcaagccggcgtcgtccacgtcaaaccgcggcaaggtccgcgccaaggacccgcgcggggtggcgtcggccgatgatgccgcgggagccgaattctccgccggaggtgggggcgacgacattgacaccgagtgcaagctggccaccgtcccgttgcccccttcacaagaatcaggctgagagcataactctgttcattaaagagagtgttgatgaagagctgaaaggcaccgatacatctaagcttcctaaaataggaggttgaccttttgtatagaagggaatatcaagtggtggggaaaactaccttccttcaaagaatagctaatgaaactatcgaactacgaga

SEQ ID NO: 81623 - DNA, 307 bp, Zea mays
  Clone ID: MRT4577_174456C.1
gcgtgttgtttaaacaacccccaaggaaactaaaacctttaaaacagaacagggcaataaactaccacaatcctaaataacccagagcacccaacaggacagggcaaaataacccagctattcatctgggcgacatgtactaaatgacaaacgcacaggtcacccagattgttcaaataggggttttagctccgcaaaactacaaaacccttttgcaccttctactctgactctccaataatatgaaaacacgggctgcacacgccaagacagaggagttgtggcaaactgcgaaccccatttttaa

SEQ ID NO: 81624 - DNA, 2047 bp, Zea mays
  Clone ID: MRT4577_174457C.1
ccggccggattcccgaagtcataaacctccactcgcggacttgccatgacgtccgtaccgctaccacccctctccgccgccctcgcccaatatcgcccctccgcggccgccacccttcgcttccgcaccccctcttccgcgcccggcgtttcggcttcttcgtctacccgggcgcgcaggttctcggttatcgcgtcggcgcgcgagatgccgtggccgcacgtgctgacggtggccggctccgactccagcgccggcgcgggcatccaggcggacatcaaggcgtgcgcggccctaggagcctactgctcctccgtaatcactgctgtcaccgcgcagaacaccgtcggcgtccaggggatccatgctgtgccggagaagttcgtgggagagcagctcaggtcggttctctcggacatgtcggtggacgtggtgaaaacagggatgctcccttcagctggagtagtcaaagttctgtgtgagagtcttaggaagtttccagtcaaagctctagtggtggatccggtcatggtgtccaccagcggtgatactctttcaggaccatctactctcgctacatatagggatgaactattttctatggctgatatagtcactccaaatgtgaaagaagcatctaagttacttggtgatgtatcattgcatacaatttctgacatgtgcaatgcagctgaatccatttataaacttggtcccaaatatgtgcttgtgaaaggcggggatatgccagattcatcagatgcaattgatgtgttatttgatggtaaggagttcactgagcttcgtggtctgcgtataaagacccgtaacacacatggaactggttgcacattagcttcatgtattgctgctgaattagcaaaaggcgcaacgatgctgcatgctgtccaggctgcgaagaaatttgtggaatctgctctttatcacagcaaagatcttgtgattggaaatggacctcagggcccttttgaccaccacttcgagctcaagtctccatcatacaagatgggatcactgcaaaagttcaatccagatgacctcttcctgtacgcagtgacagactctgggatgaacaagaagtggggtcgttcgataaaagatgccgtgaaagctgccattgaaggtggcgctaccattgtccaactgagagaaaaagacgccgagacacgggagttcttggaagctgccaaggcctgtgtggaaatctgcaagtccagtggagtgccgctactgatcaatgaccgcgtagatgttgctctggcatgcgacgcagatggcgtccacgttggccaatcagacatgccagcatgggaagtacgacggctcctaggacctggaaaaatcatcggcgtctcatgtaaaaccccggcccaggccgagcaggcatggaaggatggcgcagactacatcggctgtggcggtgtcttcccgaccacgacgaaggcaaacaaccctaccttagggttcgagggcttgaggactgtgtgcttagcttcgaagctacctgtggtggccatcggcggcatcaatgctggaaatgcaggctcggtgatggagcttgggctcccaaatctgaaaggtgtggctgtggtctctgctctgtttgaccgggaacgtgtcgcggctgagacaagaaacctcagatccatcctgatgaagaatgcttactcaaggtcttagagcaagttgggatatgccgcctgttcatttactttctttgtttaggcccgaaataataagtttgtaatcaatcactttgtcataaggagaaaccaaacaggcgcaggagcaatcttcaataaaccggagtcattatttctctggaaaaggacaattttgtgacatttccgaaatgtggatacatttcaaaggcactgaactgtgtaataagaaatcaataatgtaccagaactatatttgatgcaagtactaacttgggaataaaaaaaaaaaaaaaaaaaaaaaaaaaaaaaaaaaaaaaaaaaaaaaaaaaaaaaaaaaaaaaacccgcagaaggggcccggga

SEQ ID NO: 81625 - DNA, 939 bp, Zea mays
  Clone ID: MRT4577_174458C.1
gcgattgcggccgtcgaggccgggcgtccatgtgttgtgacaccgccacacactagtcggggaaaacgatcgaacgagcacaggcacgcacgcaccatggcccgcgctcttgccctctccgccttcctcctcgtcgcctccgccgccgtggctttcgccgcggaggccccggcagcctcgccgaagcattcggcctccacgccgtcaaaggcacccagcagttcgcccgacaagtctgagaaggcccccacggcgtcgcctgagaatgctgcagagacaccgaaggcaaccccggccaaggccccggcgacggcctccaagtcagaggcgtcgccttccgaggcgcccgactccgggtccagcgctgcgtcacctactagcgagagcgccgcgtcagagaaggccctcgccggtgcccccaaggactcgtcggccagcccttccgcgtccccgtccgaagatgaagccgccgcatcgcacgatagcagcagcggcggtggcagtgccgcctcggaagagccgtcgacggccgaggccggcggcgaatcagccgatagtccacccgagccagcccatgctttggagtcaccagcagagtctcctggcccggccgctgaccacgagagcggcagcccgagcatgggcaccggtatcgtcctggccatgctggccgccgctgccaccgcgatgcttcctttctagatgaccatggtggctttgagctagcatcatagtcacagagcagcaattcttctgggaatctatgttctcatggtcatgcatgggaatgggagtcgatatgactacgcttattaggagtttatgaatttctcctcaagatatctaggcctttgtttcatcctttgggactggttggttaactttttgcatgtttttcttcgtttgtaatttgaatgacaatcaatgaatttattgtgt

SEQ ID NO: 81626 - DNA, 583 bp, Zea mays
  Clone ID: MRT4577_174459C.1
cctactccacccaaatttcccacccctccgggctccggcaccgcgagatgtttcgttagccattcccacgacacaatcagcaccaccggtgccctcgctgccaaggcgcccgctcgtgtgacgagtggcgctccaccaccgcccattgcgcgctcagctccgaggcctcccgctcgccgcggcatcatctccggctcctcccgccgcggcatcatctccggctcctcccgccgccgtggcgatccatctgtttccagttgcacacagaaagctagtgccttgaaagataagaatgggttctgtgaacgtaaatatacctaaaagattaatctgatgtgattatgcaactttacagtcggaagcaaaatcccatccatttgatacagtgacggtctctgacagagatgctgttaagttgccccaaaaagctgaggttaggattggttatttaccccatggtatagtggagtctaactccgacatgaagttgaaaccgttgtggttgacaacaagtgcgcagtccaagaagtctaaacacaaaaatcagttcttgattgctattgctgccggcataaaccctaag

SEQ ID NO: 81627 - DNA, 411 bp, Zea mays
  Clone ID: MRT4577_17445C.1
aaaaccacagagtgtatagagaaaaatggcataaaccatcagagttcttattacatagcggaagactttttacaaaataaaagaataaccctaggagcgaactaaggagtcggcggcgccaattttaacaggggaaacgccacctaaaccaaaacgaactcctcagggaaaggcggctcctcctgaaccacctgcttttttcctaacacttgagattccaaataccagggggatttttcaaaacctcgtgaccttactcgactacatgcccgaagaagacggccctcgaaggaaaacttggagtgcctataggacatggccgggaaaaaaaagttgttgctgcttcccgccccgcaagaaattatgggccccctgcactgcaaatccatcaggcaaagtttggcccccccc

SEQ ID NO: 81628 - DNA, 398 bp, Zea mays
  Clone ID: MRT4577_174460C.1
gggtcgacccacgcgatccgaccacgcgtccgcggacgcgtgggaaaaaaaaaaaaaaaaaaaaaaaaaaaaaaaaaaaaaaaaaaaaaaaaaaaaaaaaaaaaaaaaaaaaaaaaaaaaaaaataaaaaataaaaagataaaaaaaaaaaaaaaaaaaaataaaaaaaaaaaaaaggggggggtcgccctaagggttcaaactttatttccccgttaattggattttaaacctcttcaaagttgtccccaaatttcatttcaggggctttctttttaaaagttcgtgctgggaaaaacgggggttttaccaaattttacccccttaaagaaaattcccttttcccaaatgggggttatatgaaataggcccgattcatttccctttccaaaattttt

SEQ ID NO: 81629 - DNA, 661 bp, Zea mays
  Clone ID: MRT4577_174461C.1
gagaaacaaatccagcgccttatgcggcctggcttaacttctcctcagaaaattgagcatatgttgctcttctccagaaggtttctacgactagaccgagctggagttctagaagcgaaaccaattaaaggtactatagcacgtggcagaacaccagaggaagatgaatgcttacgtctgcagttgagatacagcgaaaaagacaggccgagaacctgatgattgtcgacctcttaagaaacgatctcggcaaggtctgcgagccagggagcgtgcatgtcccacgcctcatggacgttgaatcatacagaagtgttcacaccatggtgagtaccgtctgcggaacaaagaagccagatctaagccccgttgattgtgtgaaagcggcctttccaggcggttcgatgaccggggctccaaaagtcagatcaatggagatccttgattcacttgagacaagcccaagaggagtgtactcaggatcgatcgggttcttctcgtacaaccacacattcgacctgaacattgtgatccgaactgttatcctgcacgacggagaagcctcggtcggggcgggtggggcgatcgtagcgctgtcgagcccagaagcagagtacgacgaaatgctgctgaaagcgaaagccccgactgaggtggttga

SEQ ID NO: 81630 - DNA, 299 bp, Zea mays
  Clone ID: MRT4577_174462C.1
aaaaaccgaaccaaaatcccggattactaaaaacgggggccaagaaaatatgggtcaccaaaaaaggggttaaacggggaacccccgggacgcccacaaaaaaaggggcagggggggggccagcccgcccctgggggaaacacccggggcgggcccaaaccggttagccccccccccaaaactgggggccggggcccccgtttccagccgggggggccttgtccatgccgggggggcccccaatgggggcccccccccccgggaacatttgggcaaaagaaggggttgaaaaggcttcc

SEQ ID NO: 81631 - DNA, 428 bp, Zea mays
  Clone ID: MRT4577_174463C.1
gcacgatctctactgcatgctgctggtgaaccattctgtatatctaatgctgtgttcgcaatcatcagaggtcataaacgtgcccttgatgttacttctgttgtgcagggaaaggcaaggttctttagtgtcctgatgcttacatggggtctggtggctgatgttgatattgaatctgagaagtataggcgggtgggaagtgctcgccttgatttttatcaccaggatacgaataagttggtgatccagtggaccaaactaccggttacgaaacaaacgggtttagcacgggatttcaagacgactgtagaacctgctgtaatggtgagacgtgtggctatctgggcccgtcggagatcaaagaagctggtcttagatggagatcactggatgggccattcgtttcactctggctcggcattgttcct

SEQ ID NO: 81632 - DNA, 737 bp, Zea mays
  Clone ID: MRT4577_174464C.1
gccaggcaacttcgagcgccactggggcctcttctactacgacggcacgcccaagtacccgctcagcctaggcggcaacgcctcctcgctgatgaggccggccaggggcgtcaagtacctggacaagaagtggtgcgtgctcaagacgtcggccagcctcgccgaccagaaggtgggcgacagcgtcggctacgcctgcggcctcgccgactgcaccagcctcggctacaagacctcctgcgccggcctcgacgccaagggcaacgtctcctacgcctacaacatgtactaccagaccatggaccaggacgaccgcgcctgcgacttcaacggcctcgccaccaccacctccgtcgacccgtccgccgggacatgccgcttcatcatcgagatcgacgtcggcgccgccgcgccacgctctgccatcggcttcgcggccgtgctggcagccgggctcgcggcctccgtgctatccgtgttgttgtgaaactcttcactttccctcgtcgcataggtcgtcgtctgcgcgccttttgtcttcagctcgcctctggtgttggcaagagatttttttgacaagtgctactagtacctattaggttgttcaaaatgtatgtgttattgttaatttgtttttttaataaaacgcattatacagacacaacaacatcttgtcgacaaaaaaaaaaaaaaaaaaggggcggccaaaaaaaaaaaaaaaaaaaaaaaaaaaaaaa

SEQ ID NO: 81633 - DNA, 226 bp, Zea mays
  unsure (1)..(226): unsure at all n locations
  Clone ID: MRT4577_174465C.1
cggcattcccgggccgtggtgaccgcggnttatcgcccttaccgtgtccgcatcttcgtcggcatcgtcgcccaccgccccacacggctgataatatnnataagcnnnagccgctnatttccttttcctnntgccccagnnaacttgaaataaatatatatacgatgaaataacgcgggcatgccgaataatggatgtgtgaattctcactaattaagtaatgcat

SEQ ID NO: 81634 - DNA, 534 bp, Zea mays
  unsure (1)..(534): unsure at all n locations
  Clone ID: MRT4577_174466C.1
actggggcgcggagcgaaaccccatgcatggngatagggggatgatactgatcaaacaatctctacccttaacctccccttcatctaatgtacatgccantcactcctcanccctcgctcccttcaaaccatgcatgccttgcaacacnnccccgagtggcagcggggtcanatagattaacacacacaaactgatccanaaaggaacttaaggtttcaatgtttgtcttccagctcatatcacctcaccanccatggatcgtattcctcctctacctcnactcaaccgnaaaaagtctgaatgatggtgttgtgccatgggtcaaacaggtgctgcaccangttgtcaaagggccccttgcccgtgaccttgctcttnatcaagaancctcataacgccancatcaccagcctcccgttggcaatctccttctccttggcctcaaccgtggncgcgaacttaaacgctttcaaaaccctgcccctttagcctcactctttcccccccacgctgtanctcttgaattggggtcc

SEQ ID NO: 81635 - DNA, 275 bp, Zea mays
  Clone ID: MRT4577_174467C.1
cgagaaaagaccatgagctgaacctaaactcccttggaatctgaacaaaggaatataaaatttccatttgaaaactgaccatgtaatcttgacctcagagatagatcagtcagtggcccaaagccatttcaagtacagaaattatagagactacagctaaataaatttgaacattatatataattttaccactttttgtctttataagcatatttgtaaactcagaactgagcagaagtgactttactttctcaagtttgatactgagttgactg

SEQ ID NO: 81636 - DNA, 195 bp, Zea mays
  Clone ID: MRT4577_174468C.1
ggcaaaataaaccaataccctatgtatttctttttctaccacattacctacccagatcgaaaatactctggtttcacaacaactcatgtccggtctatcttacacttaaactcctcctaatatctttcattttaatactatatttatctaaaattctattaccattctttcatactcctaatttattcaataatt

SEQ ID NO: 81637 - DNA, 209 bp, Zea mays
  unsure (1)..(209): unsure at all n locations
  Clone ID: MRT4577_174469C.1
tatatattatggggatcttttcttgtnnagcgatacgatttaataatattgcctgttgggacaataaatatactntctcaataaatgtatggtcttttttcctcgagagctactcatgtgattttgtcgtgtgatcaccaaaatcataaaataactttttttttttaaaaaattaaatttttcttaataactattatttttatatttta

SEQ ID NO: 81638 - DNA, 959 bp, Zea mays
  Clone ID: MRT4577_17446C.1
aaaaaaaaaaaaaaaaaataaaaaaaaaaaaaaaaaaaaaaaaaattaccgagcagcaacaagccaacaactaaaggcaggcgcggcacaccgcgacaccgtaccggcctagacacttggagaaaggagaagcagcgcagcggcatgggcaccagtcccgtcatccctgcgacgatgctcgtcgtcgctctccttgtcgctagtagtactgtctgcttcggcgccacaccgccaccgacaccgacaccgacggcgccattcgtctccccagcagctctggtgctgttggtcgaccgtgggagtgctgtgactatgtcaccaaggagccgtttatcaggccgccccggtggcgctgcaacgacgtggtggacaagtgctccgccgactgccaagagtgcgaggagtcgccggccggcgacggcttcgtctgccgtgactggatcttcagcctgctcgagcccccggtctgcacacccaggccgtgggactgctgcgacttcgccgtctgcacaagggactacatcccctactgccagtgcggcgacgtggtggagtcgtgccccagcaactgcaaagcgtgcaagcttgtggagtcggaccctcctcgctaccgatgcctagacgtcttccacggctatcctggtcccaagtgcacgccatggatcagttagagcaattagctcagctcagctacttgctaaataaataaataaaagtagcgcagctcagctacttgctagtacgtagtacgtccacaataaataaataaaagcggctagcgaacaaagctaacacctgtttgttcgtcccgagtcccgacactctttcgcgcaatcgcgcgtcattaaatataaataataactagctatatacccgtgcgttgcaacgggggccaaaaaaaaaaaaaaaaaaaaaaaaaaaaaaaaaaaaaaaaaaaaaaaaaaaaaaaaaaaaacaac

SEQ ID NO: 81639 - DNA, 1961 bp, Zea mays
  Clone ID: MRT4577_174470C.1
ctcttctgctgcctctcgcctcgcgacctccgcttcgtcctcctcccgcagctgctcctgtttttgtttttgtcgatttttgtcgctggagcgaggattttttgaggaatatttcgggattttggggctatttttcggggacttttttttgggggggagggaggattttcgttattttctttttatttttgggaggcgccgcccggaactaaaggagggagatggggagagcgtgcgtgagctccaatggcgactgctcgtgtcgggaggcttagtaggacgactacgagcaggcgggcgcgtgcggggtgctgcgtgcatggaggccaagccgggggaagccagtgttgggcatgcgcctgcgcctatggcggcggcagcaccggttatggcggcgccaccactagaggagactgtgagcttccagcagccgctgccggcgccggccgcggcggcggagaggggcagctcgagcgccgtcctggtgccgcctcttgctacggcggcgggaggcggcgcgatggcgctcgtgccggtgctgatgaaggtgccgaagaagcgagggaggccgcgcaagtacgggccggacgggagcctgatccgcccgctcaacgccacgccgatctcggcgtccgcgcccttgccggccgccgtggcgcctgggcactacacgccggcctccgcggtgggcgccgccatgaagcgtggcaggggacggccccttgacttcgccgccgccgccgccaagcagcaccagcagcatcaccaccagctctaccagcatcagcagcagcagttcggcttccacttcgactccattggtgatatgggggcatgttcagctggtgcaaatttcactccacacataattacagtcgctcctggtgaggatgtgatgacgaaggtcatatcgttttcccaacaaggaccacgagctatctgtgttctctctgcaaatggtgtgatatccaccgttacactctgtcagcctgattcctctggtggcacgttaacttacgagggacgctttgagttgctgtccctgtctgggtccttcatgccaaccgaaaacggcgggacacgaagtcgatcaggtgggatgagcgtgtctctcgcgagtccagacggtcgtgttgtcggtggcggggttgccggcctgctggtggcagcgagtcctgttcagattgtggttgggagcttcctgccaagctaccagatggagcagaagaacaagaagccacgggtggacgcggcacctgctgccgccgtcccgcagacgcctcccgcagtcccgatctcgagcacagacacccgcagcagcgagcaagggcagcagagctccgcgtcccagagaggggtgaacatgacggtcccgggaggaacctacggcgcggaccagagctgggtgttgtcccctgctccgcagcagccgatggccgaggtgtccaggacgccgtcgtctggggacctgaagatgaccacgtccggatcatgagcactctgaaacccagccggagctagccacccacgcactgactgggagccaaggtccccgctggaagatggaaggatggggtcatggattggttcatttgttcctgactcttgctgcaaatctcgcactagggcggtctagtctagttgttgctgtatgatgagcgcgccaggcaggaggaggggagtctaacaactgcacttgctgccattgtcggggagtgcgtgtgtgtagtgcagcagctattaacaccacagtttgagtgtgctagcggcgtgtgtttttatttaggctacattgtcgattaaattcttgtgtcgggattattacctttaccttacgtgctggtttagtttggcaccctgtatctgtatctgtattggatcacgcccacccttggcttaaatcagcattagaaaattctccaaaatttttttaacacccccccccccccccccccgggggt

SEQ ID NO: 81640 - DNA, 220 bp, Zea mays
  Clone ID: MRT4577_174471C.1
cagacgcgtccgcgcagaagtgacaaaaggctacagcttattcttctggtatttagccttgctacaacccatatccagatctgagctccttagcgagatgagcctatgtcctgtatgagctgcttctctatatcgatgctaagctgggggatgtcgttggctacgccggaccaaattataaggccccctaggatccttactaagaggggcataggatcac

SEQ ID NO: 81641 - DNA, 296 bp, Zea mays
  Clone ID: MRT4577_174472C.1
aatagggccgatggggggttgggctttaacaccctaaaattagagaaaggaggaacagtccggagaactttttagtggaatatgtcgacacaaataatagggcccgggttcacatgggccttaacaaatgaagctggacaagaactatgtcaagcggtccaaaactttacattgacaggctttgacctactattctagtctgcaacagttttcgacaacccgagtgatggcatgcaagggtctgttctctgggtgtgttgggacaaccgagaaagggactgctcccaaagaagggg

SEQ ID NO: 81642 - DNA, 149 bp, Zea mays
  unsure (1)..(149): unsure at all n locations
  Clone ID: MRT4577_174473C.1
aagaagagatgatggggcagcngtgataaaggcctataccgtgtgtttcccgagagagagacagaaagtctgtgaattcgcaggaacaactcccatggagaacaaacgcatgctcaattcctactcacataggaacggaggcaaaccta

SEQ ID NO: 81643 - DNA, 286 bp, Zea mays
  Clone ID: MRT4577_174474C.1
aggaacgacagagctccaacggcaagggccgaaacaggggcaatcagagccgatccactcgggtgtggcccaggtctcatgagctccatttacatgaaagtggccgtggcaaccatgcaagccaatatgctcgaaggaggctggaaccgccgagacaccggcggagtgcggcccacgtgcagcaacagaggatctgccccactagccagctgacattaccgctcaacagtggatgacccaggagggcgccaggggcgcatggcatccaccatatcataccgccggg

SEQ ID NO: 81644 - DNA, 551 bp, Zea mays
  Clone ID: MRT4577_174475C.1
ttttttttttttttttttttttttttttttttttttttttttttttttttttttttttttttttttttttttttttttttttttttttttaaaaaaaaacaaataattttttggggggggacccaacccccgggggaaaaatggcccccccccaactaattttttgaaaggcccctaaagggccaaccatttttaaaaaaaaaagggggaaggatggccctaagtggacaacacccagaaccagttttggggacttaaggacggcccccctaaggggggggaggggggcacttggaaaaacccctagggaaagaaaaaaaacccttttaccccccataagtttttttttttccatttaaggctaagttgcccacaaagggaaggaaccaacttccttccccattggggtttaagtggggggggacccatcctaaaactaaaaagttccataataaaaaattttgggctgggttttggcccccccggggaagtggggattggggggcaacccctaacaaatttaaacccagcggggggatcatgatttccag

SEQ ID NO: 81645 - DNA, 512 bp, Zea mays
  Clone ID: MRT4577_174476C.1
gggcaacacaaaacaaaaggcttttaccaaaaacgcttggggacgaagggggccccgaaccaccacacaaaaaagactgggaaagccggttttacactacttcgccaccccggctaaaagcgaacaaacagcataaaggtacaaaagggcctcctccatccccccgccgccactggggccgggcgcgaaaaacccctaccccccctcgccggggatgcggggggcgaactggatgtttttgggcaagaaggggacccccttggcggggaaggcccaaagggtggggtccccaaacaaacccacgagggaggccccggggggttcctggagggccaaaacgggggggctttggaaccccaaaacccccttgaaggcctgagcgaacccacggaccaggggctgggaagggcaacttccgggagagcaggtccgggcccttttgggacttggggatctcgggcaacgccacggggccgggcctggacctgggggggtttttcacccccccgggc

SEQ ID NO: 81646 - DNA, 737 bp, Zea mays
  Clone ID: MRT4577_174477C.1
cctcgaggccggccgggccggttccttctcgcttttctctttcggcgatacatgaagaacctctgctggactgagagattggatcttcttgaaattgctgcctctgatcttttgagattctccaaatagcatctgctgactaatgtgaatatggctcgacacctcccacattatccctgaccacatgctgcatatcatgagttcgtatgatcacgcatcagttctatgtgcatatcaagtatacacctcatcttgtgcctcttgtcactccatgtcattgatttcataccgcgatttgggtgatctgctctatactgaataggaaacaatagggatgtctgctgatattgacgccagatgatggtcctaatgatgacggcgaaatgttcgcccgacctggaaaactgaccgatcgcttaccacagccttatgctaacgaccaatcagtccgttttgcataatgtgtggtgcataccctccgtgacctatagatctcatcacaaatgcgaggtacaatgatgcacaaatatgatctcgctcttcttacaggatatcatgatccacctgctggagttcacattcacgaggctctgcactacaatccctacttacctgatgtcgccatacacatgccgaagatgcttaatgatgaacgctgatgactatgcatatgatacacctgcaactgaagcccatatgcatgaaggatgacgaatcattccctgcgcgtgcagctg

SEQ ID NO: 81647 - DNA, 524 bp, Zea mays
  Clone ID: MRT4577_174478C.1
ggcgccgcacagagagaatccatccattgacacacgtaatcatgaaacacgaacacggcaaagatggctggatcaacggatcaaccggacctattcgctctcatgagataatgcatacttaacatgggctagcggaccgcaatacgagatccaatgcacacgaagggtgaaaaaaaaccgccgatcgccctttgagaggaggtgcggaccatcacaagagtgactaggcgatcgcgccgaccacggtgagcgctacccctccgctggaccccatgcctgcatttgacgcccgtgacccgcgcactgcgcctcataagtttgtcgacggctgaccgcgtaaccttggaggcgttgtcgaacagggcgtagaccccagactccggtgttcatgttcagcagggcgattcatatcgagacctttgactttgggacgtttcacgacgttgttaacgccatgcagtcatgctaagcgcagtccgagcgactgcacctgtgttcgcccagggtgcgtatgccggatgatg

SEQ ID NO: 81648 - DNA, 530 bp, Zea mays
  unsure (1)..(530): unsure at all n locations
  Clone ID: MRT4577_174479C.1
caggtcgactctagaggatcgccccgacttttatattgtgcccagtgcgattgtcgccacctatgtcctttcatcccatcaacaatggtcagcggggagtaaaaaggatggaactgctaggcgagattcatccatgcgtaaattttccgacccagaagaacactaccgagaagcatgaaaaacaatacaattataggacaaaatattttaggaaattgcaatcttattcccattgacccacattttcgccaaggtgaaatgtcgcctgttcgcctttttgacttttcacccattcagacaggagaaaatccaccaattcagatttatcggcggcttgattatcccgcttaaggcgatgaagttcttcctccacatcntaggtctgtttcacgacgaatgtaataagtgcgcccaatccaatctgggtcacttcttttacccgagcggggtcgtccccgcttaggcgatagggcattagatttcgattccccttcacagaagtggtctgtgggcagaatcaccacaatgag

SEQ ID NO: 81649 - DNA, 1040 bp, Zea mays
  Clone ID: MRT4577_17447C.1
ctggtgtgaattgcagaatcccgcgaaccatcgagtttttgaacgcaagttgcgcccgaagccttctggcggagggcacgtctgcctgggcgtcacgcagcaacaagtaaaggcaggcgcgggcgcgcggcacaccgacagcgtaccggccagcctagacacttggagaaaggagaagcagagcagcggcacatgggcaccagccccgtcatccctgcgacgatgctcgtcgtcgctctccttgtcgctactgtctgcttcggcgccaccgacaccgacaccgacagcgacggcgccattcgtctccccagcagctctggtgctgttggtcgaccgtgggagtgctgtgactatgtcaccaaggacccgattatcagcaggccgccccggtggcgctgcaacgacgtggtggacaagtgctccgccgactgccaagagtgcgaggagtcgctggccggcgacggcttcgtctgcgatgactggatcttcagcctgctcgagcccccggtctgcacacccaggccgtgggactgctgcgacttcgccgtctgcacaagggaatacatccccaactgccggtgcggcgacgtgggggagtcgtgccccagcaactgcaaagtgtgcgagtttgtggagtcggaccctcctggctaccgatgcctagacgtcttccacggctatcctggccccaggtgcacgccatttggatcggtaaaagcaattagctcagctcagctacttgctagtacgtagtacgtccacaaaaataaataaaagtggctagcgaacaaagctgttacacctggttgttaagttcgtcccgacatggacgatcagtcgattagactagctccatcgctagctgctgctactctctttcgcgcaatcgtgcgtcattaaatatcaatctggcgaagccaactaggcctcgatcccactcccatgtgtagcagtactttatatatattactgaaaaatgaatcgccgttgatcatgttaatatatatatatccatctcatattgttcgccgttttcttcg

SEQ ID NO: 81650 - DNA, 700 bp, Zea mays
  Clone ID: MRT4577_174480C.1
ccggccgggagtgagtgttgttcccttccctttataaaccagagaacctgcagtgcagtgcaggcagagtactccgtctgatctcggtgatctgtctccacgacaaggagtgcactgtcagctctagcttgctgcagaacaagggcaagatggcaagaggtggtcggctactgatcctctccctggggcttgtgctcctctacttcgtctcaggtgagctgcggcgtgatccagaagggcgggccgtgctactacccggacaacctggtgtcgcgcgccgccgtcgccatgaacctctactatgccgccaatggcaggcacccctggaactgctacttcaacaactcggcgctcgtggtgcagtccgatcccagctatggatcctgcacctactactgatgtctgtctgatgctcttttgtagcagagatcggtcgatgaaaggaaatataatccctgtgtatgctgtgctgtgttgtgtctagagatgacaatagggacctgattcccccgtggggaatttcctgttgctatccctagttgcgtcctagtagaagtgtctcttgttccatccagttgatatgcatgataacatttggagatgcatgcatgtgattttgtattcgaggatatggtgtgatcgcaaatgaacaaagtgatgcaaggcagcaaccaaaaaaaaaaaaaaaaaaggggcggcc

SEQ ID NO: 81651 - DNA, 378 bp, Zea mays
  Clone ID: MRT4577_174481C.1
cttggaaggaaatctgacgccagcatcgagaacatggatcatgctcccagcttgtgtgcctcggaagaaaacggttattatgaagctgaccatgagtgggtgatgcacgcggaaagagccatggagcagtacgaggaacaaagcagaggatcgcagtcacacgcaacttcccaagtctttgatctcgaggatgtttaacaatagatgctgttctaaacaatttcaacagtgacttgtaaatatacgttttatgatatattttaatcttaaaaaaatatgtagataaataataaaaatggatattatgaatgaaaaaaaaaaaaaaaaaaaaaaaaaaaaaaaaaaaaaaaaaaaaaaaaaaaaaaaaaaaaaaaaaaa

SEQ ID NO: 81652 - DNA, 963 bp, Zea mays
  Clone ID: MRT4577_174482C.1
cggaccgactctcactcacaaaattcacagctccaatcctggtgcaagcgcacagtagcggagcaagatgcggggaggagaccggccatctgcgtcgctccagctcctctcgctgggttcccttcccctcaactacttcacctcaggcagcgcagttcaggcagtggactccgtctgatctcggtgatctgtctccacgacaaggagtgcactgtcagctctagcttgctgcagaacaagggcaagatggcaagaggtggtcggctactgatcctctccctggggcttgtgctcctctacttcgtctcaggaagtgttgctgctgctgctgcacagaaaacgtggtgcgttgccaagccgtcggcgtccaacgatatcctgtctctgaacctcaactacgcgtgctcccaggtgagctgcggcgtgatccagaagggcgggccgtgctactacccggacaacctggtgtcgcgcgccgccgtcgccatgaacctctactatgccgccaatggcaggcacccctggaactgctacttcaacaactcggcgctcgtggtgcagtccgatcccagctatggatcctgcacctactactgatgtctgtctgatgctcttttgtagcagagatcggtcgatgaaaggaaatataatccctgtgtatgctgtgctgtgttgtgtctagagatgacaatagggacctgattcccccgtggggaatttcctattgctatccctagttgcgtcctagtagaagtgtctcttgttccatccagttgatatgcatgataacatttggagatgcatgcatgtgattttgtattcgaggatatggtgtgatcgcaaatgaacaaagtgatgcaaggcagcaatcattcataaatttgtcattctcagattaatcatgagcaaataaagccgagtaagtgtctctgagtgccaaaaaaacaaaaaaaaaaaaaaaaa

SEQ ID NO: 81653 - DNA, 1787 bp, Zea mays
  Clone ID: MRT4577_174483C.1
cctcgaggcctgtcccggggccgccggtacaatcagatgcagatgctaatgatacagtccgtccagaccccacccgccgccgcccacctccgcgctgctgcgcccgccagcacgccaccgctcctcgcgcgtaggctggccggttctcgtccagctcccgcctccgccggaacaatcagatgcagccgatgctaacgctacagtccgtccagcccccacccgccgctgcccacctccgcgccgctgcgtccgccaagacgccactgctcctcccgcgcagagcggccggtcctcctccagcttccgcctccgcctccgcctcggctgagttcccaggatccgttccagacagcgctcagatggcgccccgacggcggcggcgccggagcgtggccggcatcgaccaggacgaactcctcgatcccgaggccctcgcggaccccgacagcggcttctacgagatcaacggcgtgaggctgcaccacaaggtctgcagccacgaggatgaggactcgtccagcgaccagtccaccggtagtaccattgcctcagactcagacgctgtcctgaaaagccagattggcctgcccatactgctgctgcacggcttcggcgcgtcagtcttctcctggagcagtgtgatgcggcctctcgcccgcattgtccgtgccaaggttcttgcgttcgaccggccggcgtttgggctgacatcccgggccagtcgctctgccgatgacgccaagcctctcaatccttactccatggcgttctcggtcttggccacgttggcgttcatcgactaccttggcgctgagaaggccatacttgttgggcactcagctggttgccttgtagcagtggatgcatactttgaggcaccggaacgggtggctgctcttgtgctagttgcgccggctatatttgcaccaaggaaggcggtgaaagagggccagtcaggggaagaagaagaaggagggcagcaaacacagagcattcccaatgatgaaaattcgcctccaaatttgttcgctaggatttcgggaggatttcttgagctatggaagcacgttgcggggcttgttctcaagatgatcacagcaatacgagacgtggttcggtctttgtgtcttaaagctgtcgttgcttttcttcggtcatcgttgggtgtggtgctggtaagatgggtgatggataaatttggtatactgggcgtccggaatgcatggtatgacccgagcaaagtaactgatcatgtcatacaaggctacacaaagcctctaaaatccaagggttgggagacagctctgctggaacacaccgtatccatgatcatagattctgtgtctgcatcaagagtaccagtttcaaagaggctttctgagatctcatgcccagtgctagtggtgacaggtgacaccgaccgcattgttcctgcttggaatgccgagcgtgtggcacgcgctatacctggagcaacttttgaggcgatcaagagttgcggtcacttgccccacgaagaaaggcctgaggaattcctgtccgtcgttgaaaattttctacggacaacgtttgcaaatccaaatgaacaagtatttcaagcagctgtatcatgaattatgtgttgagtacgatctatttgctttataataaatcttaaagacccactcgtgtacaatgagagtggaatttggagtttaagcacatgagaagtaaaagaagttgaagaaaacttatatagtttgtctcctgcttttttttaaacgaaaaaaaaaaaaaaaaaagcggcc

SEQ ID NO: 81654 - DNA, 1179 bp, Zea mays
  Clone ID: MRT4577_174484C.1
ccggattgggcgatagccgtactggtcgcgtccgtctttcacgcccgcgcgatattaaaaggtgagagggtgtcagcttgggaaccatcatgcccggtataccccaccacaatataaacctattcgatctagctttgctcacatttgtctgatgcagttaatgttttaatgcataccatccgtgttgtgccttctgaagaacaaaaagaggggataagagatttgaaaataaggcatgcagaacaagataaaaaggaatgcttggggaattcatcaatagatggaaataaaacaagcatggagcatgctcatatatcatcagtttcctgcgaggatggtggaggtgcactatgggatatttttaggagggaggatgttggaaagctgaaagagtacctcacaaaacattccaaagaatttcgccatatgtactgttgtccagttgaaaagatatttaaccctgtacatgatgaaacattttatctgacgagtgggcacaagagaaagctcaaggaggagtatggaatcgagccatggacctttgtgcaaagacttggagatgcggttttcatacctgctgggtgtcctcatcaagtacggaatctaaagtcttgcaccaagatagctctggattttgtatcaccagagaacattcagcaatgtctcagcttaaccgaggatttccggagacttccagtgggccacagggcaaaagaagataaactagaggtgaagaagatgatcgtctatgccgttgagcatgctttggcgattctgaaagagccttgcacaccccgcgagtccgcctgaacaagctggcatcatatctgggtttctgctagtcaacgagggaaactagagaacatgatgcgatgttgtgcgacagtagacgtggggtagcgctagttgctttgcttgtcggcacaaataataatcttggaaatattactaataagggctcggttaggaagggattggaggagattaatttttttttattttaactgaatagaaagagatttgatgagatccctatacaatcgaaaaaggcctaaaatggtagattttgctgatggtgtgcatcactgaaaagctgggcatgctgaaaaaaatagatgtcatactgtaaatctacaaaatgtggcttcgtttccaaaaggccttgcccctgttatctat

SEQ ID NO: 81655 - DNA, 553 bp, Zea mays
  Clone ID: MRT4577_174485C.1
ggggtgggtttttttttttttttttttttttgtttttttttttttttttttttttttttttaaagggcccaaatcccaaggaccaaaaatttgttttgcaaacaaaaataaatgttctgaaaccaaacagtttttaaaaacaaacagtggttggggggggaggggacaccaaataacttttttatggagggtaaaaaaggaaaggacgcatgaatgacgggaaaataaaacggaaagaaaaccctcaaaaaaaggaaagccccctggccaaaccaaaactgggtggtaagttcaagcctttcactttttcaaatgggggaaacactgggacaagtttgtcttgggaagcttggcctcggggggctccctggacttcaattaaagggggggacaaaagaatgtttgcatgcacactttgcactggaagctcaaggcctttttggtgggctcgagctggctccccttgggccccttggtcttttccaaagtgggctcgggggccaatttggacttttggccggtgccaccggccatgggggatggatccggggaa

SEQ ID NO: 81656 - DNA, 361 bp, Zea mays
  Clone ID: MRT4577_174486C.1
catcagccacaggcgagggggcttaaaggaaaggccgtgaagcgctacatccggccgtacgtagcgatgagagtggcgcacccgcagcggtacggaatggcagccacggattactccgggtcgctcctttgcggcgcacgcctgtcgggcagcttactccctggacgcaggaagatgtgccaccaccagcttggactgcaagactcaccgaggctgatctccttgcaccgtgccacagccacttgcgaagacacgttctgccttcggctgggacgagctcattgaatacctcacggcaaatggggacgccgatgaggacaaagaccaccgactgctgtacggcagctgcgccgtcgatggg

SEQ ID NO: 81657 - DNA, 298 bp, Zea mays
  unsure (1)..(298): unsure at all n locations
  Clone ID: MRT4577_174487C.1
atgtgaagagcgctttcctcaacgggccaatcagggaggaggtgtacttttatcaaccccctggcttctaggatgaatggtacccctaccacgtgtgtaagctctctaaggctctctatggacttaagcaagccccaagagcatggtatgaatgccttatagatttcttaattgctaatgctttcaaggttgggaaagccgatccaactcttgttactaagacatgtgatggtgatttgtttgtgtgccaaatttatgtcgatgacataatatttttgntctactaaccaaaagtctt

SEQ ID NO: 81658 - DNA, 363 bp, Zea mays
  unsure (1)..(363): unsure at all n locations
  Clone ID: MRT4577_174488C.1
gaccggtcgaattttggttgactttgcgtcctttttttgnttgacacagctatccatcacacagtgtgtgattatttacacgcgcacgagctccactccgcactccgcacccaactcaaggcgccactgccatggacgcgggcgggcacgcgtcgatgttactcctgggcgccgtactggcctacgagctggggtggctgctcgtggtctggctggcggtctcagggctgttgctgtccctgttggcgtggctgacgacggtgatgacggagatgaggatcatatgggagacgatgcggttgatatgggtgtacaagtcgtctaacatggagccgtacatttaggagagcatcgactggcact

SEQ ID NO: 81659 - DNA, 180 bp, Zea mays
  Clone ID: MRT4577_174489C.1
cggatgtaaccgaataaatctatactgcacgagtgaatgcagggccagcctcctgaatgcagcgaaccaaacacacactgattcgtgttcaatgcatgtggagagtctaactctcctgatgcggacaaaacaatcccaaccaggataattatgatttatgaacaccacacaatgacataa

SEQ ID NO: 81660 - DNA, 448 bp, Zea mays
  Clone ID: MRT4577_17448C.1
ctcgccgggacatgctcgacacccacccagctcgctcgtcccagctgatcaggtcgagcacctagtagcgacctgctcgatcatcagtgtagagtgtcggtaggtgtctgtctctcttggtggctggttgcaacggtcatggcgacgtcgtctcgtcgggtgcccttgctgctgctgagcctgggcgtgctgctgtacttctccttggaggtgctcagggtggaccccgagctcaacccctgcgagatcgggatgctctccggcatccctgaggagcatctccgtcgcaaggctctaatttcttcaccacctaggactgcatcccagcacggttcaggcaaagttgggaggtggaaaattaattttttgtcatcccacacgcgggagaaccccttgctgggatggtcatctactggggacccatatgcctatgctttccgaagcagga

SEQ ID NO: 81661 - DNA, 150 bp, Zea mays
  Clone ID: MRT4577_174490C.1
gcgttaagaagacctcggtattactagtgattagagagggcaatataagaatacataaatagagaaaaacgagcgaaacaagtaggctcaaggccacccaacgaccctgatgccgtccctacgcaaaggaacggacacaaggaaagaacg

SEQ ID NO: 81662 - DNA, 261 bp, Zea mays
  Clone ID: MRT4577_174491C.1
tagacagggcaaagatacctattgatcagacgcatcgcaatggctccatggaatttgtagaatacccccaacgagacccgtccacattatcgcccaccgatgcaagattatccgcatcgaggactcgcagtgaacccaaggctactggaatccttcctcctcatgaaggcggcgcctcccaagttctcccagagggcacgctagatcacagctaacaactcaagctacgaatggttagaccgcccgccgactgctcaccca

SEQ ID NO: 81663 - DNA, 1535 bp, Zea mays
  unsure (1)..(1535): unsure at all n locations
  Clone ID: MRT4577_174492C.1
ttcccggctccggtcgcgaatgcgcgatgcgttctctcctcctgccccgcaggtgcgccttcgcttcgcggcgcttcctctccgcgctcgccggcagcggggctagggccccgtgcgccggcgttgtgtacgggttcggggataacgccatggcgcggtgggccagcctccaccggctgcccacgcctacgtgcccacgcccgtgccctccctcccgccgtccgtgagcgccgtcgccgccggtcactaccactccctcgccgtatctgccgccggagaggtctgggcgtgggggcgcaacgacgagggccaactcggccgcgggcttcactccccgaggaatacttggagcaatgcagaactggtcagaggattggaaaatgttcaggttcaagctgtatctgcttcaggcgttgtttcagcagcaataggatctgatggttccctatgggttttgggggaggtcaaagcgtggccaacttggacttgggaaggacattgtagaggcagcagtgccatctaaagtgaaagctcttgctagctacgacatttgttaaggtgtcattctgnatgggggcattccatggcactgacaaaggatggaaagctatttggttggggctactcggaaaatggaaggttaggagaaatgggccaaagcactagagctctttctgcagaagaatacactaggaaaaacggtagacaagtattctagtgtaatgctggaggctgttgaaaagaggttgaagagaaaattcggagtgaagacaatatgcccattatctgggaaccatcccttgttcatgaagcgagtcgtcttgaggtgtctgatgtgtcttgtggacttgatcattccttgattctctgctctgatggcattgtactgagcggtggtgacaacacttatggacagctgggtaggaaggccgggccacccaaattgcttcctgttggcatgagctataggccattctccatgtcggcaagtgttggccactctcttgcactatgctacacaacgactgaaggcaccgctggtgtggaaactggcctcctctcatgggggtggaactgcagctcccagctcggacggtccagccaagaggacatccctgcactggtggactctctgagcagggagaggctggtatcggcctcggctggtcgagtccattcagttgctctaacgtcgaaaggtgaagtttggacctggggatcgggcaggaatggcaggctaggcctgggcagctccattgatgaggcggcgccatgtcttgtagataccctggaaggggtggaagtcttgcaagttgcagcagggatggaccataatctcctcctggttgccgagtaggtataggttggtatgctggtgaactgaaagatggtactccatttgttcttaactagctgaatgctcgtgcgttgcaacggaaatatataataccagtatactacgataacttatatacaaaatgtgtgttataccgttataagaaaatgtttcataatcaatttgtgattctggccat

SEQ ID NO: 81664 - DNA, 295 bp, Zea mays
  unsure (1)..(295): unsure at all n locations
  Clone ID: MRT4577_174493C.1
tcctgacccctngcaaaacctgggtgcaaccaccatgaagggcaaggccaacgccttcaagaaggatgaggtcaggcttttggccggnggnggnggngccggaatgttttttattgnngnngngagnggnaagtttaattgtggtggggggggnttntttgttttnatgtntgaatttaggnnggagtagtaggtgtagtattttgtttacaagagtgttgtggtttgtgagtatggtatttgggtgaaaagtggttttttatgtnagatnatgagaagtaattttatttggatt

SEQ ID NO: 81665 - DNA, 2978 bp, Zea mays
  Clone ID: MRT4577_174494C.1
cctcgaggccggccgggaggtatcagcccaagtgacctcctctctttcccggctccggtcgcgaatgcgcgatgcgctctctcctcctcccccgcaggtgcgccttcgcttcgcggcgcttcctctccgcgctcgccggcagcggggctagggccccgtgcgctggcgttgtgtacgggttcggggataacagccatggagcggtgggccagcctccaccggctgcccatgcctacgtgcccacgcccgtgccctccctcccgccgtccgtgagcgccgtcgcggccggtcactaccactccctcgccgtatctgccgccggagaggtctgggcgtgggggcgcaacgatgagggccagctcggccgcgggcttgactccccgaggtgatctaaaactcatctttgctagctcaagaagatttggagtgctcaaataacttgagtcctctttgtacatatatcatgagaagctagtgtaatgtagcatcgggtaaataattgatgaaagtagcacaagcatgaccctcgaggtgaaagcattactacatggtggttacatgattacacgacatgtgtggatttggaagcacaaagcactatgttgtgtgcttatgcagttcagtcagtaatgtgtatgctacacatcaaccaggagagagcatcactgacttaggaagaacaaaaatataaagaaagagaccctgtgattgttggaacaaggtccactgacgttcgggaggggtcactaacgtgtgggccccatgtgcgacagggtccacgtgcagtgaaccaactgcacggtgcagtacgtcattgttaggatctttactttaagccactttttggtggcttaggcttctggcctaaatgacttcagctctactgtttttggtttcaaaagtcgttgttgtgtgtgcacgtttggtagggcttttgattaatccgatggagaagcccaacaaaagccctgccaaagagggtcttaacgtggaccgtgcttcttttaatggtttcagttgtgtgtttttgataatttcatattttccgctatcaagagtattaacactttgcccactctacctaatggaactgtctatcagaattttattccttagaacttaaccattaatgattgtttccttgtccttacgcagtgttacttatcaaggctatgcgtaaaactattcaactatttcactaaatgacaggaatacttggagcaatgcagaactggtcagaggattggaaaatgttcaggttcaagctgtatctgcttcaggcgttgtttcagcagcaataggatctgatggttccctatgggtttgggggaggtcaaagcgtggccaacttggacttgggaaggacattgtagaggcagcagtgccatctaaagtgaaagctcttgctagctacgacattgttaaggtgctaattttctcacagaaatttaataaattgattggtgatgacgttaactgaaggaataacgttaggtatcatttggatgggggcattccatggcactgacaaaggatggaaagctatttggttggggctactcggaaaatggaaggttaggagaaatgggccaaagcactagagctctttctgcagaagaatacataggaaaaacggtagacaagtattctagtgtaatgctggaggctgttgaaaagatggttgaagagaaaattcagagtgaagacgatatgcccattatctgggaaccatcccttgttcatgaagtgagtcgtcttgaggtgtctgatgtgtcttgtgggcttgaccattccttgattctctgctgtgagtatttctttctactacaaacggaactccttgcgtgtcatttgtgatggataatgcttttcttattcttttatgctgagcacgtggtaaccagagtcaataaaactatgctgtaatgttgcttcaataatatttgatgtgatcaaacattggaaatatcttgtactgcggatgcaaatagtacatgttttagataatatttggttatttacctgtcattatcacatcttgacaaatcttacttggtcctattacagttcattgtatggacaatttaacatacaatgcaagtagctgtacatttgttaatgttacttataggatcaacatagaaaaagttatgtcatcttaacctcataggaaacagactacaagaaaatgaaaaacggtgagaatctatcattctcaaattagcctttttggttattcttattttcaaatctctatctcccactctcatatggattctgtaattttccagctgatggcattgtactgagcggtggtgacaacacttatggacagctgggtaggaaggccgggccacccgaattgcttcctgttggcatgagctataggccattctccatgtcggcaagtgtcggccactctcttgcactatgctacacaacgactgaaggcaccgctggtgtggaaactggcctcctctcatggggatggaactgcagctcccagctcggacggtccagccaagaggacatccctgcactggtggactctctgagcagggagaggctggtatcggcctcggctggtcgagtccattcggttgctctcacgtcgaaaggtgaagtttggacctggggatcgggcaggaatggcaggctaggcctgggcagctccattgatgaggcggcgccatgtcttgtagataccctggaaggggtagaagtcttgcaagttgcagcagggatggaccataatctcctcctggtcgcggagtaggttggtatgctggttgactggaagatggtactccctttgttcttaattataggacattttgtcttttttagatttataacttttgctacatatttagatatacaccttgtctatatgcataataaaaatggtgtatttagaaaaaaaaggaaaacatcttataatttgaatcgtttggagtatagttgttagttgaacgggt

SEQ ID NO: 81666 - DNA, 343 bp, Zea mays
  Clone ID: MRT4577_174495C.1
tttttatgtttggttttattttattgtttgttgggttcatttaaaaaaaaacgtaaatagatacactaatatagagccaaaaatgaaaaattacttcgaaatgctttataaggaccaaaacccctcaaccaatttttacaatatttgttataagtgaaaaaaaggggcataaaaaaaaaacttggtcttaatttcctttaaataatggctttcggaactcaaaacaaataaatcttacttttgtttcaccccaccgttttacaaaattaaaactctacttacatcaaaaagaggcaagcacattaagttcctcaaagaaaactacacctccggggcctaactt

SEQ ID NO: 81667 - DNA, 365 bp, Zea mays
  Clone ID: MRT4577_174496C.1
tacgtaagctcggaattcggctcgagctatacaaaacatgtctgtgaatgtgagaaccatgtggtcgtcgatgcgggcacatgttgcgatggctggggctttgggggtcttgggtgagcgggccatggtgcggtccctcccaaagtccccccagccagaacatcacgggcacctttggcaaggactgggtggacccttaaacgacactggattgcaaggccaccggtggccggtcccaacaccaccggtgcgggtgtggggtacaaggacgtgaacaagccccccttcaatagcatgggcgcatgcggaaacatccccattttcaaggatggtctgggttgtggctcctgcttcgagatcaagtg

SEQ ID NO: 81668 - DNA, 387 bp, Zea mays
  Clone ID: MRT4577_174497C.1
caattattgggctatagttttgtcctgttttctttgaaaatagttgccaaagggccccccaaaaaaaattttatttgaacaaacaaaaggagaaacccagttctacgcaaactttagggggtgcaaagggggcgggggaaaaaaaattccccgtgggcaaaaaacagaaaagacattgttgtgccaggaaaagaacctcaacatatttgtgaaaccggggcgaaaccctctctttgttttgagaaaaaacataaaggtttgttttatgaaaatgcttggggatcctttcaattcaacgggcttaaagggggggaaaaacccccccttcccaaaatcttttagagggggagcggaggacggggatgtataaaaaaaaaaaatttccaa

SEQ ID NO: 81669 - DNA, 345 bp, Zea mays
  unsure (1)..(345): unsure at all n locations
  Clone ID: MRT4577_174498C.1
gcggcgtgtgcgtcccctcatgtgtgatgatgccagatgaatacaacaacgtccccggtccgggaggcaaaccaggcaccagtcccaccaccaccaccctctgtcttcgcctccgctgccgattcgaaagcacccgtcctgtcccctcgcaaaaccctagctccagccaccatgaagggcaaggctgacacctccaagaaagacgagggcaagctccgggcgggcggcgccgccggaaagcgcaagaaggccgccgcgagcggcaagcccaagcgcccggccttcggcttcttcgtcttcatgtctgaattcangcangagtatcangcgctgcaccctggcaac

SEQ ID NO: 81670 - DNA, 197 bp, Zea mays
  Clone ID: MRT4577_174499C.1
acccttccgccaggcaaaaacattgcgaccacaaaaagggcgcgctttaaaggcttttttttttgagataacaaagaagaaaaggagaaattgccgtcaccatcaagtgggtgaaaggcaagcaaatctttgacagaacccgcaaccccaacgtccaagtggacgtgggccttaaccacggcagcttacccaagggg

SEQ ID NO: 81671 - DNA, 549 bp, Zea mays
  Clone ID: MRT4577_17449C.1
tttttttttttttttttttttttttttttttttttttttttttttttttttttttttttttaagccacaccgttaaccgcccttttttttctccattccccgggggcattgcggggggattaacggctcttacaacatcaggggggggggaccacacaatacttttttaccgcccccccttacacggttgccggggcaactcccgggggttcccggggttggggccgcccactggcctggtgctgcgtcttcagcaaacttttctagttctcgtcaccctcgtggccctcctcgccctttttggactcagcgccgccctccttgtggtccttttcgggcgccgcccggtcctcacgggcctcagagaactcaccttccttcatacccttaccggcgttcccgggccctaaggcccccttggcgtccctgagggccaacttggggtcgttgcgggagaacccccccccgcccctggggggggtgggggtcctgcccccgggccccttgcccttggcccggtcgcccccccgcccaaccgttggaagctag

SEQ ID NO: 81672 - DNA, 240 bp, Zea mays
  Clone ID: MRT4577_1744C.1
attcagtcgtccgttaggtgcgtccaccatcggtgcacagaacggtggccacgatgacgatcaacaacctcctcctcgtcttcgccctggtttctgcggtccttggtgcggcgacggccgccgccaacgcgttcagcagggcgttcagcatctgggtggagatgaaccagcagtgctacgcgctgtacgtccaggactgcgtcagggaccgcggcaacgagcccctgtacaaggagctgt

SEQ ID NO: 81673 - DNA, 338 bp, Zea mays
  Clone ID: MRT4577_174500C.1
ttcgtctcttgccttcggcgccttgacttaccgcctgcttgccctgctcctggggctgccttttctatcgcctgcttgtgcctctgcacgccatggctcggggcaagaattcggacaagacccgattgccgtagtatgtcctgcaaacattcggcttcaatgtcccgtcctgctgtccctatccgtccgcagaagtctttcaatcgccagacatatgtgcatagaatagacctaagatcaagcctattcgacatggtgattcacgacccgtctgatcaacttccgttatggcgcccatcttcacaaggaatggagccgctccatttagatcatcccct

SEQ ID NO: 81674 - DNA, 240 bp, Zea mays
  Clone ID: MRT4577_174501C.1
tcttcttattacactctatatttccctgagaaagggccttacctccaagagatactgcactcttatcgatcccccttaacaccctgacttcatcaaaaatattttcactcacactaacctaactaactattcttttcttattatttcctcatccactcatttttttcaaacttgcatctccaacaataaccatacccgtttacatactcttcttgctttcacacttcatacacatccaaa

SEQ ID NO: 81675 - DNA, 560 bp, Zea mays
  Clone ID: MRT4577_174502C.1
attgggtacctcgaggccggccgggattcttactctcaccctacagcaccaaaagaaaggctgttttcaatacacacacaacccacaacccatcaaacacagaagacaacacgcaaccatgcagatcttcgtcaagaccctcaccggcaagaccatcaccctcgaggttgagtcctccgacaccatcgacaatgtcaaggccaagatccaggacaaggagggcatcccaccagaccagcagcgcttgatcttcgccggcaagcagcttgaggatggccgaacccttgccgactacaacattcagaaggaatcaaccctccaccttgtcctccgcctccgtggtggtatgcaaatcttcgtcaagactcttaccggaaagaccatcacactcgaagtcgagtcatccgacaccatcgacaacgtcaaggccaagatccaagacaaggagggcattcccccggatcagcagcgtctgattttcgccggaaagcaactcgaggatgggcgcacccttgccgactacaacattcagaaggagtctaccctgcatctcgtcctcc

SEQ ID NO: 81676 - DNA, 470 bp, Zea mays
  Clone ID: MRT4577_174503C.1
tttttttttttttcgctaccattcaagaacggaaaaccaaacagtttttgtcaatttttgccaaatcccgaatggttttgatttttttaatttgaaacatcggatttcggttgtctctagcggttttcacaagatcccgagcggttttcaccattttctgggtgattttcggtgttccccagcgattttttgttttttcaataagatttgatgtacatattttcaaattttaaaaatacgaaattcagcgagaacccgttggtaaactgtgatttctcggcgaaacttgttgttttctacccgaaaacaataacttattttaaaaaaacttaaaattaaatatttatactactctattaggaacctaaactgggcacctgatgctacgatggcttcaccctccgtgctgacactctggccccgctgtgactggttctccaccccacgcgtcccgtctcggcgtcgtgccc

SEQ ID NO: 81677 - DNA, 520 bp, Zea mays
  unsure (1)..(520): unsure at all n locations
  Clone ID: MRT4577_174504C.1
ctcgnccgggaaaaaagaaaaaaaaaaaaaaaaaaaaaaaaaaaaaaaaaaaaaaaaaaaaaaaaaaaaaaaaaaaaaaaaaaaaaaaaaaaaaaaaaaaaaaacctttcaaaaccattgccggttttgaaggggggggggaaatggccatttgggaaaaaagggagctatcctttgttttcaccaccttcctaaaaaaccacaggggctgggttaaggagtccttaaattttttaaaaaagacccttgccactttaaaggggccaaatgatgaatcacctacattgggggatccaaagaaaaaggttgttgcggaaataatcgagttggtaaaaccgcctaatttttttaagggggattggctaaacatgccagttgtttaacagtttgaaaaggacaaaaggtttcggtgggggtataaactactaaagatattccttactaaaaagctggattcctactgggagtttaaaagggcaacctctgactggctgaaagattatggcctcgcccatgacaa

SEQ ID NO: 81678 - DNA, 139 bp, Zea mays
  Clone ID: MRT4577_174505C.1
tcaggagacgccgacgccaacccatcgatctctcaccgcaaactacagctcgccagcgcccggagatgtgcccaacgaatcccgatagctctggccaagccgccgccgggtcctgttagaacacctagtggcagtaggg

SEQ ID NO: 81679 - DNA, 562 bp, Zea mays
  Clone ID: MRT4577_174506C.1
tctgctcaccagttaacctaattaggatcactaatggggtgtctcacagacaaacaccaatccaccatgaagtcctccaacactagcccaagccgtctcacgaggaaggtgctctacctcacccctcccatcctgctcactgtcttcttctacctccacctggagaccctcaccctcttcttcaccgtacaatgcgccagcaggctcggcaatggcgtcgacgaccgcctccgtgcgtcggccaccttcctcccgctcaaggacacccgtgagggcgccgacacgtggttcatcagcaccctgaacgacacctccgagcctccgggcgaggcgaggaaccttcagtttccgtccgctgcctccgcgggccgcctcctctgcctggcggccccctcgcgccgcgacggcacgaagaacgcctacgcgctggcgtggccgggggcgctaccccgcggcgcggagttccggccgggccttgctctcctgtccgagaccttctacgaccactccaacctgtggcacgggctcacgtcgctggtgccgttggtgtcgtggcacgcaa

SEQ ID NO: 81680 - DNA, 150 bp, Zea mays
  Clone ID: MRT4577_174507C.1
acagcaggcagacaagcgaaacccgcccaactgtacaaatgttaccccaagactctgacgtttgctcaagcgccaaaaaagcccagcctggaaccgcttcacataggcccttagcgccggccggaagggcccggataggcatccagcact

SEQ ID NO: 81681 - DNA, 516 bp, Zea mays
  unsure (1)..(516): unsure at all n locations
  Clone ID: MRT4577_174508C.1
gaaacnagggagaagaaaagaaggggaggcagnncgacgggaccaaaggggganaancnaggggaggccaaaccagcagccacaacggaagccgggganaacgcagcaggaaccagagagggggggaaggcagcnaaaggggcagcnangaaagcggcngaannagggaanaggaacanggcagcanngggggcnggaaccgggcgccgagccacggancagaagaaaaagccncnggggggnaacaaaaagaanaagccggcggaggagacaagnaaacngggggacnggggnncggagggggagcgccaagagaaannnaacaaacccaggagncggaggaggccnggggggcnanggnacgncgcagggggggaagagcagggccccggnncaggaaaacacggccgcgagcaaggccgcgagcncagcggaagaagccaagaaacgggaggagcncgacaccaaccgggagaagcannacaaagcaggccnccgcaggaaagaaggcaggac

SEQ ID NO: 81682 - DNA, 293 bp, Zea mays
  unsure (1)..(293): unsure at all n locations
  Clone ID: MRT4577_174509C.1
ctttttcttccttttntttattacccaacttaaagacaatacataggtggggtatcaaacgtccttgccaaagctttccaaaaattacattcaaatgcatacaagggaacttatttcccattaatatgcaccatcttttttatttatatcctaaaaaatacattctaaacaagaaatacgttcttacatatgcggtcagtaacgaaagtattgtccggtagcatcatataaggagcataacggtgaaagcctttagcgccctatctgagcaccatgtcaagggtgccacgtta

SEQ ID NO: 81683 - DNA, 220 bp, Zea mays
  unsure (1)..(220): unsure at all n locations
  Clone ID: MRT4577_17450C.1
gggggttaaaatgtgctttatatttactaatgttgttttaccacagaaaaaaaactgtgaacacaccagccccccncagaagggcnacagaattctttacaaatataacacattggggggggggggggggtccaaacattaaatttttcacaaangaaacccgggtgaggaaggagctgnngaaaccacaggacacacaaatttacaaacttcaagaggg

SEQ ID NO: 81684 - DNA, 317 bp, Zea mays
  unsure (1)..(317): unsure at all n locations
  Clone ID: MRT4577_174510C.1
caccaacaccaccaccgggctctttctaaacagtgaggttgttntccacactcggctcaaacgcttggtttttctatttttcaccatctaatttaccaattctgtcaaccctttactacccaagggactaaaaacactgtccatcctaatattgcagcaattcaatttgcacctgccagattcggtcatttttccaagaagcaatctttggaatatctattcattctacaaagggtttgagattttccccgttctttgacctttttatccccttccaccgcttttcttcgcacaagctgcaaattcaaatacatttt

SEQ ID NO: 81685 - DNA, 208 bp, Zea mays
  Clone ID: MRT4577_174511C.1
gcaggcacgaggacatgctgcggcgaccaccggtcttccttttcgttctctagcgaccgaccaacgcgccgagcgaagatgttgtggcagacgtacgtggacgagcacctgatgtgcgagatcgagggccaccaccttacgttggcggccatcgtcggccacgacggcgccacctgggctcagagcaccgcattccccgagttcaagc

SEQ ID NO: 81686 - DNA, 2595 bp, Zea mays
  Clone ID: MRT4577_174512C.1
agcgtgtctatataaaggggtcccccccggccggcgggggacctcatcccaaatctcaacccaagaacaaaaatggccaccgccaccactgaagccgaagtccgtgagtccctcggcacgaagttcggtcgcctcaaggaacaggcgaaagacatgggcctccaggcaccccgtcgctggagccgcggccgtcatcgctgtcagcgccgtgggcgcctacttcttgtggcccgtggcggccccggccgtggccatgatgaaggcgcctggatccggcggtgtgctcgtctcccgcgcggcgtttctcgcgaagaaggagctgtacttcaagctcttgcgcaccgggggcgttgcggcggcggtcgccgctttggcgtagctgcgcatgcagtagtggtacatgctgttcgtgaacgagcggcgggccggacgtttcaggttgtatgttgaccaagtggttattagtactttcctttcgttggtgttgagtctcgactctcgagtttggattatctgtcaaaaacctatgtatgcgtgcatgatcagtttgatgaataatggaactcttttaagaaataaagcaagttaaagtccagaaaaaaaaaaaaaaaaaaaaaaaaaaaaaaaaaaaaaaaatcgcaattcttcaattgccaaccacagcgcagtccaatgcagcactagagcccgcgcagcctttctttggtccaacccgatgcttgcctgcccaagcacatcaagtccatggccgcagcggcagccgccgtccccgtgcccgggcgggggtggcggcgccacgcgccacgtggcgctcgcggccaggagcaagcggcggggtgcgggccccgcggcggcggagggggtggacgaggcggcggcggaagcggcggagctggtgcgctcgctgctgcggaggacggcgggcggcaaggagaggctggtgccggtgctggaccggcacgtgcgggtggtccgcaccgagcactgcttcctcctcttcgaggagctcggccgtcgcgacgcctggctcacgcgtctggatgtgtgtgggtggatgcagaaacaacggtggtatgttgctgacaacggcatctactccaagttaatatctgtgatgggaaggaaagggcagatacggatggcaatgtggctgttctctcagatgcggaacagcgggtgcaagcctgacacttctgtatataactcccttatcggcgcacatctgcattcacgagacaagactaaggctttggccaaagctctcggctattttgagaagatgaagtgtatagagagatgtcagccgactattgtgacatacaacattctgctaagggcttttgcacaggctggtgacacaaagcaggtagacatgttgttcaaggatctggatgaaagtgtagtatcgcctgacgtatatacttacaatggggtgcttgacgcatacgggaagaatggcatgatcaaagagatggaatctgtgttggtgcggatgaaaagcacgcaatgccgtccagatgtgatcacattcaacatactcatagattcatacgggagaaagcagacatttgataagatggagcaggtgttcaagagcctactgcggtcaaaggagaggcctacacacccgacgtttaattccatgataacaaattatgggagagcaaggctcagagagaaagcggagtctgtggttgagaagatggaagaattgggattcaaaccaaactatgtgacacaggaatgcctcatcataatgtacgctcattgtgattgtgtatcaaaggcccggcaagtgtttgatgagcttgtgacctcgcaaaccaaagtgcacctttcttcgttgaactcgatgcttgaagcctactgcatgaacggcttgcacacagaagcagatcggctgctggatactgcactgcagcaatgtgttgtgcccaatggttccacctacaagctgctctacaaggcctacaccaaggcgaacgataagttactagtgcagaagttgctcaagagaatgaataaacaggggattgtcccgaacaaaaagttcttcctggacgctttggaagcatttggcacctctgacaggaaacccaggacatcgccaggcataaactctgcaagcaagccaagtacagattctgctggtgattcagaaacagctacttctgacaaaccagaggtaagcgtttggcatgtagctgctacataaggctgttggtttgagcaagctcgtcgaattacctgacatcaggaagaacacatttgatctgcaccagaaaccgttaatacagtgtacttggagctacaggagttcctctactcccaacaggacgctcctttcttaacggaagaatgctaaaacctttcgtgtttcggcaaaatctgcttgtacatgtactctgttatcaaacgtaggtattttgtttctagtcattattgggcatcacaaaaattctggctctctgtactcgtcgattgttattacatgcctgttccttcaatccttctgtggtctctatttactgagcatctcccgatacataaaactgggaactggaatgacatgcatgctgcagcacgttgtttcag

SEQ ID NO: 81687 - DNA, 272 bp, Zea mays
  unsure (1)..(272): unsure at all n locations
  Clone ID: MRT4577_174513C.1
tctttccnccaagnctctagnctagtgcngctggangcgaactttacatatgngatcttgctcttgcnactggctcctcggtcnnaannctcaccnttttggcacncaagntgctnattctgacaacattctattatctgaggganattgntgatgctgacngctggttgcagctatccaggcaagaagggtggcaaagcgtggttgttggggcggttatntcggcctcngactgantgctgccctgaagatcatgactttgatgtcctatg

SEQ ID NO: 81688 - DNA, 1539 bp, Zea mays
  Clone ID: MRT4577_174514C.1
gcgcgcggtccctgagtcctgacctccactcaagccgtctcctccctccgcgtccggctcccggttccgttccgcttccgcgatggggcagcaagagggccacagcaacccccaccccgacgaggcggcgctcccgacgaccaccgccgcaccgtcgccgtcgccgtcctcgtccaggctctacacggcgtggctggtggcgtcgtggtacgcgtccaacatcggcgtgctgctgctcaacaagtacctgctctccgtgtacggcttccgcttcccgctgctgctgaccgcgtgccacatgtccgcctgcgccgtcctctccacgctcgcccagcacgcctcgccccgcccccgcagcagctcctccccgcgctcccaccgccagctcgctcgcgtcgcgctcctcggcgccgtcttctgcgcgtccgtcgtcgccgggaacgtctcgctccgccacctccccgtctccttcaaccaggccgtcggcgccaccacgcctttcttcaccgcgctcctcgcctacgccgtcgccgcccgccgcgaggcctgcgccacctacgccgcgctcgtcccctcgtcgccggcgtcgccatcgccaccgggggcgagccgagcttccacctcttcggattcgtcatgtgcgtggccgccacggtggggcgcgcgctcaagaccgtgctgcagggcatcctgctatcgtccgaggaggagaagatggactccatggacctcctccgctacatggcgccggtggccgtgctgctgctggtaccggcgacgctggccatggagcgggacgcgttcggcgtggtggcgggcctcgcgcgggaggaccccagcttcctctggctcctgctctgcaactcctgcctcgcctacttcgtcaacctcaccaacttcctcgtcaccaagcacaccagcccgctcactctccaggtcctcgggaacgccaaaggcgccgtcgccgtcgtcgtctccatcctcatcttcaggaaccccgtcacggtcgtgggcatgctgggctacggggtcacggtcgctggcgtcgtcttgtacggcgaggccaagaagaggagcaagtgaagcgacgagcctgctgcggtgacgcgacggacaggctcctgtacctgtacatttgctgtccggcattggaatgcaatgccggcgcggtgatagctagggagaagacaagcaagcaaagcgacagctggggtggtttgttcgtcgcatcgtttcagaaggaggtgaaccatacaatacaagaactcgtgtcgtagcacagagagagagagagagtgtgtgtcgtttagcatttgaacgagcttgccgtccaaagcctacgattttaatccggcctggagaagaagaaaaaaacgaagctagctagttatcaaaccaacacctagcatctgaacatatgtgcagcaatccaactgggtttccatattttaatgttgtcgatgaattggtccttcctaaacaacatttccgtttgaacatttacgaagagccaaagccaacggactgcattgttcactg

SEQ ID NO: 81689 - DNA, 1262 bp, Zea mays
  Clone ID: MRT4577_174515C.1
gcacgagagagcgttaaaccctatccgttggatgtagcactacaggcgtcgagcactggtaatcctgcaaccttcgtcatggcgcatgcggcggcggccgccgccgtgccgttacgtcgtccgctcctcttcctcaaggaggctcgactcctgtccacactcgcgacccccttacctgggctccgccacccgcgcgccctccgacccacaggccccttgccctccgatgccgaggacaccgacgatccagacgccggcgacggcgccgccgtgtccttcaagaagagccgcaacgaactgaagcgggaggcccgccgcgccgtgaagtggggaatggacctcgccaagttctccccacctcagatcaagcgcatcctcagtgccgcgtcgctggagcgcgaggtgttcgacgcgctaatgctcgtgaagaagtttgggccggatgtgcgggaaggaaggaggagacagttcaattacatcggaagtcttttgcgtgatgcacaaccagaattgatggatactctaatacaagcttctaaggatggagatgagaggaagttatataccttacttagtgaaggtaaactgttggtggaagaagaggaagaggaggaagaggacctacctgatggagaagaggagaatcaagagtatatgaaaattgcagatagatggtttgacggcctcctctgcaaagacatttcagttactaatgaagtttactctgtccatagtgttgaatttgatcgtcaggagctgcggaagcttgtgaagagagcccacatgttccaagaaagcacacaaaataaagatggggaagaatctaatgcgaagctttctggagcaaagaaaccacttatgaggttccttcgttcccttgcaaaggaggcttatgctccataggcgagctacaagctatcctgttaacttcttgtatccttatgtatgaaattgtaaaaattatcactatatttagggttgaaacaggaccggaaagtcttgtcctggtccgaatactgttttttcccgttcacttcagttatttttcggtttcggaacgaaaacaagtaggcagtgtttgaaaacgttttaactgatttttcgtttgttcttgcggttcctgttttttcggtgcagagactgttgccgcggcaagtgtgacatgtgtgtagtgtaatataatttctaactcaaataatgtcactatgtgttaatgtttgacagatgtgaacttaatatatattaatgtttgtcattcagtc

SEQ ID NO: 81690 - DNA, 258 bp, Zea mays
  Clone ID: MRT4577_174516C.1
cgcacgcgtccgcggacgcgtggggttaatattttggaatgaaagggagtgatgaagtttcttattatagcagtaggaaccgcataaaaatatgggagccgtcattgtatgaaattgatgtctaatattggcgtattgttgtaggctctattgatttatatgttgtcgtttttattaaatatttatttatttttttattttatttattttttatatattatattctatttttttatttttttttttttatttattata

SEQ ID NO: 81691 - DNA, 343 bp, Zea mays
  Clone ID: MRT4577_174517C.1
gaaaaaaaaatctaaccctagcatccgcagcgctagggttcgggggttgcgatggcggcggctgcgagacatcgggggacggtgaagtggctcaacgacaccaagggctttgggttcatatacccctaggacggcagcgaagatctatttgtgcaccagtcgttgatcaagtcggagggcttacgctcgctcgcggagggcgaggaggtgcagttttccaactttgatggagactacggcccgtctaaaggcggtcctaccaatcaccgctctggctgcattcaataaggtcggcgcttagcttatatttggcgctgacagccctgctattcaggagaatagg

SEQ ID NO: 81692 - DNA, 333 bp, Zea mays
  unsure (1)..(333): unsure at all n locations
  Clone ID: MRT4577_174518C.1
gaaagccacctgaaggcacggattttccaaggggcaagttacggcatgggaattggcatgccctcctcctaagccttcaacgcaaaacacagaagcagcaaaatctgctagttctggaatctgaactgggttccaacaagctgtagtgatgtgtatgatgtagttccaatatggtttttgtccggtgtcaattacggttcctggtcccggtcccaaacaagagtttgcgtcatcagttctatcagacacgcctgttttgccgntggttgcagcgacactggtggtagcagagctggtaccgccatcttaatccatcaggtgggtggcaacacg

SEQ ID NO: 81693 - DNA, 185 bp, Zea mays
  Clone ID: MRT4577_174519C.1
attcggctcgagccctcacgctggagcttatttcatgagcattgtgtcccaatcctgcacttaggagcttgagattatactcaggacctatccacgagtcatggtttctacttcaatgaccccgatccttacaaggcccaggtttgatgtgtgtaggactacttgtgcgtgaactactgcacaag

SEQ ID NO: 81694 - DNA, 338 bp, Zea mays
  Clone ID: MRT4577_17451C.1
gataaaaattaaggggaaaggggtattatttttacccctatccccagcccccccccccaaaatctacggcgggcagccaccggaacaaactacacaaaaagggaaaattggacgggaaaaaaaaaaacctacaaagaaagacgaatctttataccaaactgtacaagaaacctatgcccaacacaaaatacaatggcatgctccgaacgggtgcatcgctcaactcaaccataaaaccaaagcctaaaaaccgatgctaccaaagcaacatcacaaccaggcaattcaatatccgggatgaaaaggccgaaacttcacgtgcagaccaatgacacatc

SEQ ID NO: 81695 - DNA, 248 bp, Zea mays
  Clone ID: MRT4577_174520C.1
tttttaggtatggacgctggcacacccaaacaatggccccaaaaggccataattactccattttgatcgacacaagcttattagggtgatgcagctgcatcagcggtgcagactgaatcaaggtgaattcatctaccggatcgtcaagcaggttactcagtttttaggatcacggtcataggcagcatatgctacgtgctggacggccgcatccttgcacgggtcaagactggccacaatccttaatc

SEQ ID NO: 81696 - DNA, 307 bp, Zea mays
  Clone ID: MRT4577_174521C.1
ttattatgggtgcgatcgatatagctgatcgggccagtagcgactggctcagacgcgcgtgatcaagtgtcccgactggcctaggggggacatgaaccattagctgctggcttgcgacgatgcggatgttgcagaggacggagagcgacgacacgtcagttgtctcaatgacacggcgaagatgcctggattgatggtgaaggacgaggggtggcactgctaggtgctgtcgttgatggcgctcggcatggcgatgctgaatcaccggaatatgaagacgctcgttatggacagatttagggcggtg

SEQ ID NO: 81697 - DNA, 292 bp, Zea mays
  Clone ID: MRT4577_174522C.1
aaaaaaatgaaacaggggggttcccagttccgttttttttacatgccccattggttgttccccttccacctgtttgcctccccgtttttaaaataacgtttaggggggcttgtcacattttttacaacccccttgaacaaggggggggaacaactgaggcggggttcccaatcccccttggcgcgggttttttaaaaaaccgtttttacttggggaccctttgggccttggttgaaccaaccagccttggaccccttgaggccccccggggggggggggggggcccaacccc

SEQ ID NO: 81698 - DNA, 1080 bp, Zea mays
  Clone ID: MRT4577_174523C.1
cattgggtacctcgaggccggccgggaaaacgataatcacgaaacaagctatccgacgcagttttgaccacagccgacggcaatagaagtagagaactccgacttcttcactcacacacacatggcgctgatgagccttggcgccgccgggtacaccacggccaccgcgccgcctcgtccccgaagatgcaccctgccgtttcgcgccgccgcctcccctgcggcactggaccgccggcgacggccgcataatgtggctggcgacttcttcgtcgaccaccgctgcatcgactgccagacctgccgatggatggcgccggaggtgttcaagagggtggatggcaaggccgccgtagcggcgcagcccagctccgaggaggagaggaccaaggccctgcaggcgctgctatcctgtccaacatcctcaattcacactgagaaacctccaaaagacattcttaaagtgcaaaacatgtttcctctaccaatcgacgacaagctactcccagtggaggaggctaccgcagatgttgagtggaaacttgaaggaaatggtccatggaacttaggaacagattttgaacttatccatacgccaggccataccccaggctcagtgtgcttgtacttcaaaccgctaaaggtgctgttcactggagaccatgttgcaaagtcagaagaatcagacgatctgaacctctttctgatgtacagcaagcagtcagtgagccttcagctggaaagcatcaggaagctactggagctagagttcgagtggcttttacctggacatggctatcgaatcaagtacaaagatgtgcgtgccaagaatgtagccatggagtccctcctagctaattacacaagctaggagcctatgagcatcttacttgagttagtgctcgcaaataagcattccaggaggctgaatgttgatgctatgtttccagagaatagtgtgcatgatgctcatcagctcttgaatgtgcatttgttaccagagactgtaccttgtgctgcacaccaagcaagtgaatgaatcaagcatacatgactcggcccaatgaatgctttttccag

SEQ ID NO: 81699 - DNA, 434 bp, Zea mays
  unsure (1)..(434): unsure at all n locations
  Clone ID: MRT4577_174524C.1
aagcagtggtaacaacgcagagtactttttttttttttttttttttttttngnnnttttttttttttttttttttttttttttttttttggacacaacacaggtacttaaaattgaaggagatttttttgtggattacacacgatattttgtttgttaaaaaaatttaggaaacagtttttgtggatgataaaaaaagccaaaatttgcagcagtttgacgaaaacagcagttttggtcgtcaaaaaggttgaagccccccgggtacttttttttttttccactggtaaagggcgaaggggggagananccaggacacnggcggccgggcgagcangcannnaaagggcccaannngcccaaaagggaggnggannacaanncacgggccggggnnnaacaacgnnnngacggggaaaacccgggggnnaccaa

SEQ ID NO: 81700 - DNA, 1348 bp, Zea mays
  Clone ID: MRT4577_174525C.1
ctcgggccacggggggaagcatctcccatccgacaccctttcaaacacagccgacggcaatactcgtagagaactccgactcccgcgcgggcacacacatggcgctgatgagccttggcgccgccgggtacaccacggccaccgcgccgcctcgtccccgaagatgcaccctgccgtttcgcgccgccgcctcccctgcggcactggaccgccggcgacggccgcataatgtggctggcgacttcttcgtcgaccaccgctgcatcgactgccagacctgccgatggatggcgccggaggtgttcaagagggtggatggcaaggccgccgtagcggcgcagcccagctccgaggaggagaggaccaaggccctgcaggcgctgctatcctgtccaacatcctcaattcacactgagaaacctccaaaagacattcttaaagtgcaaaacatgtttcctctaccaatcgacgacaagctactcccaggtgtttatctctgtgggtataattctgaagactcatatggggcaacatcgtacctggtaattcatccacaaggaaacatactgattgacagcccaaggtatactccaaagctggccaacaatattgaaaagcttggtggagcgcgctacatgtttttgacccacattgatgacgtagcagatcacaggaagtgggctgagcagctaaaatgtgaaagaataatacattcaggagatgtggaggaggctaccgcagatgttgagtggaaacttgaaggaaatggtccatggaacttaggaacagattttgaacttatccatacgccaggccataccccaggctcagtgtgcttgtacttcaaaccgctaaaggtgctgttcactggagaccatgttgcaaagtcagaagaatcagacgatctgaacctctttctgatgtacagcaagcagtcagtgagccttcagctggaaagcatcaggaagctactggagctagagttcgagtggcttttacctggacatggctatcgaatcaagtacaaagatgtgcgtgccaagaatgtagccatggagtccctcctagctaattacacaagctaggagcctatgagcatcttacttgagttagtgctcgcaaataagcattccaggaggctgaatgttgatgctatgtttccagagaatagtgtgcatgatgctcatcagctcttgaatgtgcatttgttaccagagactgtaccttgtgctgcacaccaagcaagtgaatgaatcaagcatacatgactcggcccaatgaatgctttttccagaaatcttgcaagatcatatgattgatttgttatatgcatgatgatatattcgac

SEQ ID NO: 81701 - DNA, 173 bp, Zea mays
  Clone ID: MRT4577_174526C.1
ggcaccacaaattatctttcaaaaatcaccaaatctaaggcccaacacgacacaccagcataccaggagacagaatcagaaggtgctttcccttctggataaagaacacgcatggccatgggacggtattcagtataaaccctaaaacacaactctttccccggtaaaatcaa

SEQ ID NO: 81702 - DNA, 275 bp, Zea mays
  Clone ID: MRT4577_174527C.1
ggacaaaagaattccgagtcgatactcgggctgtcatttcgctgatgtagatctgatttgatgagaaggaactgattgatgccctccgagtgaacaacaaccagcagatcgcagcttttgaatggctgctgggagaccggtagtcatctactgatgagttcgaccatggcatcgatcccaataggactcctcttacaggtgatgctggacaacccagtggtgcagctgggtgtgactagccctaagacattgctagcatttagaagacatgctgg

SEQ ID NO: 81703 - DNA, 445 bp, Zea mays
  unsure (1)..(445): unsure at all n locations
  Clone ID: MRT4577_174528C.1
cgtctctttgctttgtgtgcgtggcaggacatgtgtcccacgagcctagtgcaccntggtgtcnngctcgcaaccccaaattaagggaccgtgaggcatnnggcatccaaggggcgtnncctcttcttggctgctcaacnnctcctgtgtcttcacattgtgccannacgcctgcggcnnagctgcccgaccccgaacgggcggggggtctatctcatccgccgccgccttcctgcttaccccaccccgcttgagtcctccaagtgggaagtgcgccgcgtgaacgcgcctcaagttacggccgtgtgccgtcaatgccgctcggccctcctcaaaggcgaggcgtggcaaggtaccatgctgagccatgctgcaacctcatcaaaggccttgcagacttcgaggccgccggctgcctctgcacggccatcaagggcaacgtcct

SEQ ID NO: 81704 - DNA, 349 bp, Zea mays
  Clone ID: MRT4577_174529C.1
ggggggcgtcgcagctgggcgtgtaccgcgggctctccccccccgggggggggggggggggggttttctatttgttggaggtttttttgggttaggggttacgctgggttttggtggtttctggagggggtggacccaggggaacatcctaaagaaaataaaaaaaaaaaaaaaaagggaaaaaactggggggtctaaattagggaaacaaataagaataggggatttgccaaattggaaaacgggcagggggaaaaacttggggtgtcgagggactcggggaatcgggcaaagaccgggaaaaggggaaagagataatggccctccacccggtcgcccttgaaaaggg

SEQ ID NO: 81705 - DNA, 665 bp, Zea mays
  unsure (1)..(665): unsure at all n locations
  Clone ID: MRT4577_17452C.1
ctcaaagacatgaccaacaaatgagattaaagcaaatgaaaatatgtccgatctgctgatagctgtgtcaaaagcagagaggcaagaagcgagaatgagaataaggcaggaatctttcagacttggaaatgttgctgttatgagagctggaactatcatatctgaaacttgggaagacggtcaggcaataaaagatcttaatgctcacctgaaatctttgctggaaactaaggagactattgaaaggcatcgtaaatcacttaagaaaagacaatctggtgactttatttctgaagttcatttttccctttattgcattctgttgacttgaatccttcataagattttgtaggtattatctggcatatgttttgcagttgccgacctcaatgcttgtcaatattgtttcataaatagcactagaaaaaaattaaagtcaatgctggatttattcttgtgatattccagtttgtttgtttatacagagcaaaccttcctccattattgcaagtgcaatacaaaggtcatagcagcttaacaaaataagaaaaacatccactagcctaattgtattttttttctggctatatattcctacgttctttctttgttattatttttttaaatgattntctgtttagacaagggtgatggcagtgatgctg

SEQ ID NO: 81706 - DNA, 229 bp, Zea mays
  Clone ID: MRT4577_174530C.1
gtcgttaccaaacttaaaagagtggagcctcaggccgcaccaccacactggggggaacataacacacaaccccccgcccggggaacagaataatttatctttggcaccacgcggcggataggcaggggcgggggaacggcgcaggacactatagggcagggaagaacctgccatgcttaaacagccaggggggagggggtgggcttacccccccggcccagatgggacg

SEQ ID NO: 81707 - DNA, 336 bp, Zea mays
  unsure (1)..(336): unsure at all n locations
  Clone ID: MRT4577_174531C.1
cgtgtcagnntctgtcaggaagggaaaggnagtgnannagctattattncnncctcttgnnttgtgatccccgcgccctgttttnnngcctcttnnncccccctnnacccnngtttcctttcccnnntcgtgcctggttnnngtggttctttaaattcctgnatnntgccggcgcgtggcggcgcttgcttncnncttgccaagnnacgagnacttcnntcctcctncnnctgccacttgcttttaccgctgctttcctcttcaactngnngtgaacctggnatttcctgattntnnggggaggaagggttnnaaactggnatgcnnnctttccat

SEQ ID NO: 81708 - DNA, 355 bp, Zea mays
  Clone ID: MRT4577_174532C.1
cggacgcgtgggcgaagctcaagaagaagctcttcggcaagcagtcccgcagggatcagcggcagcatcagttcatgcgccaggcggcggcaagcaatgggatgatgaagcaagaagcggcaaccagggaggcagccggaagcagtatcatggcagtggccaactacaactggcaccaccaccatcaagccatggcggccgtgcctgtgcaaccaatactaggctcgataatggaaggccatcgcgcaggggatgaggtagatgagtcgattcggaagcttctgtataagctaggaggagcaggcccttccacagcactctcggatcctcagtgtgttcctccaatgtactgtgg

SEQ ID NO: 81709 - DNA, 174 bp, Zea mays
  Clone ID: MRT4577_174533C.1
tatttttgggttgatcccatcgcgtccggtaacattgcgtgtgtcatcatccccatatccaccgggatcattttctttttggccttgcggtgtctggcccatgggtgcgtagatctctgcgatctgttcacggcgtccacatcacattacaaagacaatgaagaaggctgcctg

SEQ ID NO: 81710 - DNA, 403 bp, Zea mays
  Clone ID: MRT4577_174534C.1
attcggctcgagagatcagccaaaggcttttgagtttctacaccacacctccaactcaaacagcgggtggaattaaaaggtcactggaggcactgaaacccacactaaacgcctggtcttatgggctagaaactagatcgccacctgccccgggaacattgagcgagctaacactggattctttttttaccctatgccgtctgacgtgatacctgtccatagatgcagagtttaccctatgtttgatgcacgggcttacatgaagtcatctattcctaaaaatcaaccaagctcatattctgaagaggagtaattacttcttacaatgcattggcctgtaacaggagctgctgttgcatcggccataggggccacgttttgaaaaggggcagctaatgataaa

SEQ ID NO: 81711 - DNA, 288 bp, Zea mays
  Clone ID: MRT4577_174535C.1
gtgtgtgtgtgtgtttagtttgtcctcatttctgtagagtcctggattccgttgtctgttattgtcccctcaactgtgttgttgtaaacaacggcatgtactgaaagagctgcgcctgaccggataagccctctgcaggtatcattggaatctaagaatttttccctgtgcttctggaaaccaaagttgtttatcacttttatagctatgaaagagaaatagctgaaccacaacatgtgtctgtgcctcctttgtcatagctataaaagtgataaacaactgtgcttc

SEQ ID NO: 81712 - DNA, 339 bp, Zea mays
  Clone ID: MRT4577_174536C.1
aaaaaagccaaaaaactttggggaaccccattcggggtttttaagaccgaaaacccctgggtcacggggaaatcccaacccggatagcaatttccggggggattccccaatttaaagaccgggggcggtttttccaggactttccaacaaaaaacaggcttaaaatctaaacagggcccggggtttccccggggttaacgggccaaaaaaaaactgggatgaccgggccccccaatcaaaaagggtgaagcccaaataaaaaagggttttttcctttttttccacctttttttttttttttgccccaactggaggagcaactcccccagcaaaaggggc

SEQ ID NO: 81713 - DNA, 243 bp, Zea mays
  unsure (1)..(243): unsure at all n locations
  Clone ID: MRT4577_174537C.1
cccgcaagcaccggaacccgaaataatgcggttacgacaagctcactattccccaggcgccgctgcggcgggcaggatccggaggtgattttttacaaggcggcgaggcacacggggacgccccttcgccgcgcgtaaacaaaggccgtcattaaagacacaaaccagggcagccttctttatggacaccgggggggccaatccncctccccttcccaaaccttttttttacacaaattacac

SEQ ID NO: 81714 - DNA, 1644 bp, Zea mays
  Clone ID: MRT4577_174538C.1
cattgggtacctcgaggccggccgggccccccaaccttcacatttccacgtatgtagaatactccacctccacccccgtccatttcccatccccaacctctctctctcccccctaggagtgggagctcctggctccatctatccgcctgcagatatcacaagcttttcctgctgctgctgctgcagcagcacctgcagcttctccgtctgcagtgcgagcagctgctaaaaattcccccataagcctctggcttcctgcccccctcactttcttggaagcccagcacaacacgaggatcatattcactccctacagtggcgtactagaataccagttgtgcgcaaacagcggcagcagccgtgatgtacaggtgagctggctctgccgctccactccatggaggatctgtacagcatccacccggggatctcgcgggtcgtcggaggcgcggcgagcgaggcgtccgtcgccggcgccggcgccggcgggccctcgccgtcggatctgacggagctcatgaaggcgcagatcgccagccaccctcgctacccgtccctcctctccgcctacatcgagtgccgcaaggtgggagcgcatccgcatgtgacgtcgctgctggaggaggtcagccgggagaggcgccccgacgccggcgccggggagatcggcgtcgatcctgagctcgacgaattcatggacgcttactgccgggtgctggtgcgctacaaggaggagctgacccggccgttcgacgaggccgcgtcgttcctgagcagcattcaggcgcagctcagcgacctctgcagcggtggaagctcgccggcggctaccgccacgcactccggtgaggaaagatgacatgatgggctcctctgaggatgagcaatgctcaggggacactgatgtgccagacatggggcaagaacatagctctcacttaggtgaccacgagctcaaggagatgcttcttaagaagtacagtggatgcctcagccgtcttcgttcagagttcctgaagaagcggaagaaagggaagctaccgaaggatgctcggacggtgttactagagtggtggaacacgcactaccgctggccttatcctacggaggaagacaaggtgaggctcgcagcaatgaccggtctcgacccgaagcagatcaacaactggttcatcaaccagaggaagaggcattggaagccatctgaggacatgcggttcgcgctcatggagggtgttgccggtgggtcttctgggacgacactctacttcgatacaggcacaattggaccctgaatcatacaccacttgggatgacaactggccagctcatattagtaataagatctggcatgtggagtgacgatctgctcggtgaaaattgaaaataaatctgctgagctgaggttgatcagactagtcagttgccctattattttacaagatcatgtgtatatggtgccgtcgtatcagaacaaactgtatgcatgtatgggcgaattgagacctgcaaaaggagtttaattagtagtttcaagtattggctcatggatttgtaatactcgctacccaatttaattgttagataggctgaagggcttataaaggtaaatttacttctgctcttccaaaaaaaaaaaaaaaa

SEQ ID NO: 81715 - DNA, 566 bp, Zea mays
  Clone ID: MRT4577_174539C.1
ccggccgggagagagctcaccaataaactgaacatgtaggcgcacctactcctacctgaaagcgcaccggccgccgacaaaggcgaacacctacttcccgggccgcggggatggctgcagtggcccgcacgtgggcctggagcgctgccttcttgcgtggcttctgctggtgacgctgtgtcgtttctggtcgactgcctgcacgcgcactaccggtggctgaagacgctggcgctggaatcacgagtaaccattcctcggcctaaacctggtcagcgactggtgagggagaatccgaacttgtgcaccatgctatggtggatccccctgacatgggcagagatcaagaccctgacactggcgcagtccgccccgtcgacttccttgcagggcgcgtcaacggacagtacatcatcgaggaactctgctacggattcatgttcctccttggcggcattggaatacatcctgctagaccatcttcgggaccgcacgaggccccggagcctccgcgtctagttcggaagcgccgcagcagccgccggtgtgatcgcctacgatcatgg

SEQ ID NO: 81716 - DNA, 535 bp, Zea mays
  Clone ID: MRT4577_17453C.1
cacccacccacccgtgtctgcgtccggcgacgacggcgaggaaccaaggaaaggaaaggggatcgcggagcagcagcagcagccatgggcgtgatgggcaggctcaagatcttcgtcgtcaaggagcccgtcgtcgccgcctcctgcctcatcgccggattcggtctatttcttccagcggttgttaggccaatgttggattcttgggagactgagaaaaatgccaaaaccccggttgaactaaaagatgtggtcgcaggggtcactggcaagaaagcttagtgatcaacgtctcttcactctgctgatgttgtctacacattttgtttcgcctgtttttggtgcccagacgagggggctctcttctgggatgtagtcggatctcggccaaaataatcattgtgtctgaacctatttttaccatagtgcaatgagatggacttgttgtttcagtgattccaagttgtaagaaagtgaatgcatggaaggccgttgttacccttttgatcgaatgcgtgccattgtcacttgtttt

SEQ ID NO: 81717 - DNA, 217 bp, Zea mays
  Clone ID: MRT4577_174540C.1
tcaagaaccgatgcggattctccttttgtccctcctgtcctatggcgagcctgccgccgtccctcgcgagatatctagatgattcgctgttcagttcaggtggtgtgatagccgttggggaatatgatattcgggagacgtacattgacgttctgcctcctgttgaccacatagccttctcacggagcggctgcttgttcccgggcgcggcgcgtct

SEQ ID NO: 81718 - DNA, 505 bp, Zea mays
  Clone ID: MRT4577_174541C.1
ccggccgggacagactcacctccgtgaccgtcgggcttgccagccagacgccagcccaccttctctgggttataaataggaacagaggcatctcccatccggtagctgccatagcccttccatgcaaacgccaagtttcagcttccgttcgtgtcaccgtgttcgtcggaaagagagaggtgcagggaggcatcgtgcgaacatccgcgtcgctctcgagcgcggagaaggtcctgggccccggtcaaacctgttgtagtgagccagcaccgtagcgcgtgggcagtcctgccacatgctgagtccagtgaggtcacgaggatctgaagaatcatcctggtacctggaatctcaagtcccaggtcaagaataggtaccgcaggatgaggcgcatggaggatgctgagatgtgttcgtgagaggtctaggtcgtcgtctcccagtcaactttgggttgctggaccgttgtctccttataatgcaattattcatttattttgcatag

SEQ ID NO: 81719 - DNA, 128 bp, Zea mays
  Clone ID: MRT4577_174542C.1
gagcgttcccgcttagatggaagcaatctttacacgggttccgatacaccggtagggggagtgttgtcttgagtaacgaaaacactggcgagaatacaatggccggagaacccacggtttcttacgca

SEQ ID NO: 81720 - DNA, 389 bp, Zea mays
  Clone ID: MRT4577_174543C.1
gtctcactctctcttctctccccaactagcccgacgaccgcgccgtcacccactacatggttgaaacacaccggtggcaagaaatcgggtgccaaagtgcccaaatcggcaaaattgatataagaattagggagaggaggctgatacaaacatgatggaggtatcacacaccttgaattgtgttgcgccgagccctatcgaccacggacggtggcttaacggcaatggtaaattctggtaagaaattcactggtatttggttgctcgtctagctttaatctgccctggacacaatccttgtatctaggcaatctgcccaaccacaccggggacactacacagcataagaggcctaagcgtgggcgtaacggcctgggatgtctactact

SEQ ID NO: 81721 - DNA, 172 bp, Zea mays
  Clone ID: MRT4577_174544C.1
cggtccgattcccgggtcgccccgcgtcgcaggccggctgtccgtcgcgcggttcgatttctcgggggagacgccgtctgcccggggagacgctcgagaacctcaagctcggcatcaagtccaccaagaagctgtgcgctgttatgcttgacacgggtggaccggagctgca

SEQ ID NO: 81722 - DNA, 720 bp, Zea mays
  Clone ID: MRT4577_174545C.1
atttctagctgctccgcactaaatcacttacgcacaagaagaagtcgagacgaagacgatgggatctctctccggcgtccttgcctttgccgtcctggcggcgctcgccgccggcggctcctgcgcctcaaacgtgccgcccggccccgacatcacggcggactacaaccaaccgtaccgtcccgccaaggccacctggtacggcctgcccaccggctccggccccgaagacaacggcggcgcgtgcgggatcaaggacgtgaacctgtctccctacaacggcctgatcgcctgcggcaacctccccatcttcaaggacggcaagggttgcggctcctgcttccagatcaggtgcaccaaccattcggcgtgctccaagaagccggtgggggtggtcatcaccgacatgaactacgagctcctctcgccgtatcgcttcgacctgtccggcaagtccttcggcgccatggccaagtcggggaaggagcaggagctccgcagcgccggcatgatcgacctgcagttcaggagggtgcggtgccagtacgcgcccggcaccaagatcgtcttccacgtggagaagggctcccacgccaactacctcgcagtgctggtgaagttcgtcgcccatgaaggcaccatcgtgcagatggagatcagggagaagaactccaagcagtggaagccgatgcagcactcgtggggagctatctggagggt

SEQ ID NO: 81723 - DNA, 261 bp, Zea mays
  Clone ID: MRT4577_174546C.1
ggaaaccggaagggaggaagagagatggattcctccacctaggcggaggctgcaggggaggcggccttgccagcagaggacgacgtatgctccgtctgccacgaccgcttgcggatcccgtgccaggcgaactgctcccattggttctgagaggatgcaagacctacccttgttaatccgaacactgctcagagaactaatggacccccagaggaccctaccactcgagttcagggcgcggatgctgatgatggcatgctg

SEQ ID NO: 81724 - DNA, 357 bp, Zea mays
  Clone ID: MRT4577_174547C.1
ccaaaaccggggcacatcaggggaccagggttttgcccaaggcccggcggttttccaaaatttccaaaaccggaaatggggggatttaacaaaccccggccggtaggggccggccctttttcaagttttcccaatttgaaaccggggtggagagcaccagccacccccttggggcccccggacaaaattcccaacaggggggaaaagggggccgtcttgccccccctttttcccagcttaagttggggggccgggccccaggagggcggggccaaccggccaaccaaaatgaggtggccccgggatgcccccccggggtcccccccaaccttttggtcctttgcgcggggggggggg

SEQ ID NO: 81725 - DNA, 404 bp, Zea mays
  Clone ID: MRT4577_174548C.1
gtgacaaaacatttttgtttttttttttttgttttttttttgggggggggcacaatacaatctcatctactttttttttgtaatgaacagacgtgccaaaacaaaaagagggagtgttttttaaccccccagagaaaaaaaaaagttccacccaaaggaaaacccaaggggggcccgagcaacataaaaaaacccaacccctgtatgtacagccgatcgtaaaaaaaacccaccaccccgtaccgtcccggccggtgagggggcaacctttacttcctgtctcgtgcaccagcgaacccggtggtctgcgcgactccgtgcgcctcccgcttcgttgtctaccgggacgacccggcgccgttaatgcgggggacgaaggcggcgaacctccgccagattttcgg

SEQ ID NO: 81726 - DNA, 245 bp, Zea mays
  Clone ID: MRT4577_174549C.1
ataaagggaaaaaaacatttcatctgtgcgagggtgccactacaaaatgaacaaagaatagttccatacaacacatgtcccgctttttacaaggaaaccccgcaaccataaacctaacaaaaatgtcacccctgctcagaaaactggtgatcctccgttaaaatgacacacagaatacattttttttcactgagggcagcaacttaacataagcatatatatatgccttgagaccggtcatagta

SEQ ID NO: 81727 - DNA, 574 bp, Zea mays
  Clone ID: MRT4577_17454C.1
cacccgtgcgcccacgcgtgcgctccgcccagaaaaacgagagagagttaatttaacttcaagacgttagcaggttagggatcagcagtcgccaaccacggctgctgcgcctccactgaccagcagcccagaccggtgacggagctcacagcctgacgggcaagccgtagttgggaaaagaccggatgacgccatcgcggccggcggtcacgatgaccgtgctccacgcggcggatagcatggagaggcagtcgtccagccgcgggctgctttccacaggcttcgctgcagaaaggagcttctcctcgggccacgtcgccgaccccttgctgctgctgccgccgccgtccacgaacggtcacggcccgggggccgactggcgcatgatgggcgcgctggcggatttctcggccacacaggcaggtttcgcgctcgcgtgcccgtcttgttgccgcactcccggccatggcactgcggtcgtcacgttcttggagaagaacagctcgcacgagtggactggctttgcgtcgtctctcgagttggccaagtcccagatgtataccttggaatcttt

SEQ ID NO: 81728 - DNA, 757 bp, Zea mays
  Clone ID: MRT4577_174550C.1
cagattggatatgtatcaaatagctgctggacatgaggtgcaactgcatcagtcagctccttaactttcttgcctgcatcagtggtagcatctatagtagacttgcgagcattgtccaagatttcaatccatgaacccccaccagccacctgcagtgccaacctcagagctttctgtagaaggaagattagagacaccactctgtgaagcttctggcttgattccagtatctgaggagtatccacgatagaagcttgaaacacctaagaatcctggcaatgcaccatgtctggactttgaagtaatcaaccaattagtgtccatacggcatgaaaggggcaaccttctgatcgttgacacataattaactgaagaatgcaaatccaccaccctgatatggttagcaacagataagtcaggttttcttgagtgcttagcgccactgctgaaccacctcagaacaccagaagatacagatgggccaaaatatgtctccattagaatctgactagcagctaatggacatgaccgacgccaaattgctgtgatccctgacataccaacttgacacaaatatttctggtgggtcgtcgtcgccggtgaaaagaccgacgaaggccttcagcacctggcttagggcggcggagccggtagcccaaagagagagcgatcccggatcgcggcgtaaaccgtgtctcctgaagcatgcgtggagtcgtggagaactggagacagaccgagcccagacccggccggc

SEQ ID NO: 81729 - DNA, 1414 bp, Zea mays
  Clone ID: MRT4577_174551C.1
caatgaagtacaagtgagtccgatttcaaccaccatgccttctattgactccgcctttatgtagtcgtaaactgagaatggcttagatgattgcaagtagaacccactaagaatgttaccaagaacatctctagcagcaaaagcagtagcaacaacctcccacaccaccaacagttaatattgattgaacagctataccacaagcttcagcaagacccattactcctagtccaatcagtcccaatgaagaaaccttatcgaatgccgatatcctgtcgcgatcaacacttgaggcatctagtttggtcatagctttagcaatgaagttggttttccacctctgaaggaaccatacaaaagacagaacaaatgcacctctccatgcctgtggaaggtaagttgatacgcttggtgcaataagtgttgccatttctgaaaatgccatgaacgtgatcagatattttgcaggatcctctaatgcacaccagagactagtttggtacaaaacatcattcttggtggagttccccagaagtgctgatataggactttgtgatgcgtacttgtgaagcctccttagaatgataggcatgaccaaccatgccatcattgtaccacatattgttccaccaagtggaacaactaccttttcaagatttggatatgtatcaaatagctgctggacatgaggtgcaactgcatcagtcagctccttaactttcttgcctgcatcagtggtagcatctatagtagacttgcgagcattgtccaagatttcaatccatgaacccccaccagcacctgcagtgccaacctcagagctttctgtagaaggaagattagagacaccactctgtgaagcttctggcttgattccagtatctgaggagtatccacgatagaagcttgaaacacctaagaatcctggcaatgcaccatgtctggactttgaagtaatcaaccaattagtgtccatacggcatgaaaggggcaaccttctgatcgttgacacataattaactgaagaatgcaaatccaccaccctgatatggttagcaacagataagtcaggttttcttgagtgcttagcgccactgctgaaccacctcagaacaccagaagatacagatgggccaaaatatgtctccattagaatctgactagcagctaatggacatgaccgacgccaaattgctgtgatccctgacataccaacttgacacaaatatttctggaaacaaaaatatgccaggaaaattctttcctggtgggtcgtcgtcgccggtgaaaagaccgacgaaggccttcagcacctggcttagggcggcggagccggtagcccaaagagagagcgatcccggatcgcggcgtaaaccgtgtctcctgaagcatgcgtggagtcgtggagaactgg

SEQ ID NO: 81730 - DNA, 1278 bp, Zea mays
  unsure (1)..(1278): unsure at all n locations
  Clone ID: MRT4577_174552C.1
tacctcgaggccggccgggaccttttctctcacgctgctttcctctcccagttagcagtcagcagtcagcagcaccaccggtctcctccacgacaaaaaacagatattctatcgtcagcaatcctgcgttccctgcccgacggaggtgcttccctcgttgctgcgttgcactgcggcggcctcgcgcttgttgtcgattccagctccatgcgcccatgatttactttacttgtgttttctcgagtctgtagcggtttttatcagctgcttgccttctgcagaagaaaaagaaaaaaaaaagaacagccttgttagttgttactacttcccatcgttcacccattcatattttttttcttggttcacaaagtaagaggaagcacaaactactccaacttcatggcggacttggcgctagttggcttaaggtgggcagcatcgccgattgtcaaggagcttcttactaaagcttcagcttacctcagtgtggacatggtgcgtgagatcgaacgactacaagacactgtcctgccacagttcgagttggtgattcaagcggcccagaagagcccccataggggcaagctggaatcctggcttcggcgtctcaaagaagccttctatgatgccgaggacctgctggacgagcatgagtacaacgtccttaaggccaaggccaagagcggaaaaggtcccctgctccgagaggatgaaagctcctccactgcaaccactgtcatgaagccttttcattctgctatgaacagggcacgcaacttgctcccctgggaacagaaggctaattagcaagatgaacgagctcaaagctattctgacagaagccaagccagcttcgagatcttcttggcttgccacatggncaataccgtcgagtggccagctgcagcacctaccagtgttcccacagccacatcacttcccacttccaaggtttttggtcgcgacagggatcgtgatcatatagtagattttcttctcgacaagacaacaactgctcaggcaagctcagctaagtactcgggtttggccattgttggagtaggaggaatggggaagtccaccttagcacagtatgtctacaacgacaaaaggatagaagaatgcttcgatgtcaggatgtgggtgtgtatctcacgcaaacttgatgtccatcgtcacacaagggagatcatggagtctgcaaaaaagggggagtgcccacgtgttgataatctcgatactctccagtgcaaattacgtgatatactacaagagtca

SEQ ID NO: 81731 - DNA, 361 bp, Zea mays
  Clone ID: MRT4577_174553C.1
atggggagggtttttttttttttgcgaacgtgcagaagagattataaaggttttaacgaatcaggtataagtctgtcccaataacaaatccgacattttacaacttttttcccccggatggcaaaaaagttggcttctgcaaaaaaaaaaaaaaaaaaaaaattgtgcaggggaacgctttgtcaaaaaaacttttagaggggggtcccagtgtcgtgcccgtcccacccgaaaaagctcttgccacctgtttcagcagagagcatgtgcattgcagccttcagctcttgtcaaaagcaaagcctcgtaaggtcgccgtggggctcctctcggggggccagggccagtgccaacgggcggg

SEQ ID NO: 81732 - DNA, 353 bp, Zea mays
  Clone ID: MRT4577_174554C.1
gtgtacctgggccagcgcgccaccgcggcgtggaccgattatggggaggtgctgcagttgctcgacaggttccgggaggagttccggcgggtggagaagcgaattacggagaggaacatgtacccgctacataagaactggaagggacccgccaaggcgccgtgcacgctgttgttccctgacatcggcggtaaggagaaggggatcaccttgaaaaggatacccaacagcgtgtacatatgacaattgacaagctcgctcgtttactatttttatagttccgttggacaggatctgattatggatgcctgatgaatggcatgagagcgtcattgagataatatgttttattg

SEQ ID NO: 81733 - DNA, 152 bp, Zea mays
  Clone ID: MRT4577_174555C.1
ctcactcgtaagtacaaacttgctgagaacgatgacctgccggattgcggccattgtagaggcaacggcccttttcccgaggtaaaagaccagggatgatgtcagagctgatgggctttctcaacaatatgaactttgttaggcatcaacca

SEQ ID NO: 81734 - DNA, 954 bp, Zea mays
  Clone ID: MRT4577_174556C.1
aacagggaggagagaagagtgaggaactgaggatagagatattttaagcgcccctcgatttccttcgccttgtccccacgcgttcgctcatcgcatcgcacgcatcgcacagacactccactgcacgcgcagcaatggcgacgaccacctcgccgccgctgcagctcgccagcgcctcccgcccgcacgcctccgcctccggtggtggcggcggaggtggggttctcctcgctggcggttccggaggtggggtcgcgccaggttggggtcgagggcgattgcagcggcgggtgtcagcgcgcagcgtggcgagcgatcgggacgtgcaaggcccccgtctcgcccgcggaagggcttccaagtgtgctaaactccatcggctcatctgccattgcatcaaacatcaagcaccatgcagagttcgctcccttgttctctccagatcacttttctcccctgaaagcttaccatgcgactgctaaaagtgtccttgatgcgctgctgataaactggaatgcgacatatgattattacaacaaaatgaatgtaaaacaagcatattacctgtccatggagtttttacagggaagggctctcacaaatgctattggcaatctagagattaccggtgaatatgcagaagcattaaaacaacttggacaaaacctggaggatgtcgctagccaggaaccagatgctgccctgggcaatggtggtttaggccgcctggcttcttgttttttggattctttagcaacattaaattatccagcatggggatatggacttcgctatgaatatggcctctttaagcagatcataacaaaggatggtcaggaggagattgctgagaattggcttgagatgggatatccttgggaggttgtaagaaatgatgtctcttatcctgtgaaattctatggtaaagtggtggaaggcactgatggtaggaag

SEQ ID NO: 81735 - DNA, 607 bp, Zea mays
  Clone ID: MRT4577_174557C.1
cctgccgggaaaaagtacttgttgtctatttaacacgcaccttctgtgacaatggccatttcgtacaattaatggcgtcaccaaaatactacctatgacaaataaacactagttagtgacgtaatcataatgtcactgaaggcctaaaatgttgtagtgtattttgagtagcagcaaggtgtccttgagtagcagcaaggacacttgtttgatcaacatagcacggaccctagcaaggacacttgagtagttgctctctaaaattcatgcagctcaataagcagcagcacggtgttgtgatcatgcagttctgttgcgttcaactattgtatatttagcttaatcatggagcaatggtggtatctattctatagtttattttgtaatggatttctaagtagtctactaatgatttgggttttaattttgtcaggagggaggtcctagaggtagtaagtcacttgtttactccatgatgacaatagcaagcagatcgcggtggtgcctatggatgctacaacaagaaagatcaaaagttcttttggatggatgcagctagatattttgttttgtattttgtccaaaagagaaattggaagtgaactta

SEQ ID NO: 81736 - DNA, 376 bp, Zea mays
  Clone ID: MRT4577_174558C.1
tttcggtcagcctagcaataagctcatcgacgccagattggaaaactcgagaccatgaaggggctattcgtggccttggctctactggcgctcgatgcgagcgccggctacagcacaagcggtggctgttgatgccagacaccaccgagttatgtaccgagtccgtgctatatgcccactacgacttatctgccgacgtagcagaagccgaaaccatggcaatacctgactcaaccaccgaagctaatcgcgtgctagcagttcggatcctgcatcgtcggcagctgtctgcagtaccttcctgggccagtgcgtcgagtgcctgaggcaccagtgctagcccggcggcgactccctacagctagccacatgtgcc

SEQ ID NO: 81737 - DNA, 318 bp, Zea mays
  Clone ID: MRT4577_174559C.1
atgggcgggtccggagccgccacgtgtccagagaaggtgatatactccaaggcatcaacaataagtccggacccccatggaagagcgccggacccctggatatacagttcagacctccaagactgttggtcagaggtcagaggggtcagagaccagctgaactgcccctcaggaccagttcaactggtcttgaccagagagtttaggagagaaaaccccagctcaactgcccggaggcaagttcagctggtgtatggtcaaagaggttcacagctgaagttgagttcagctgaagttgagaaagctcaactcagctga

SEQ ID NO: 81738 - DNA, 647 bp, Zea mays
  Clone ID: MRT4577_17455C.1
ctcgaggccggccgggccgggcttgccccatcctctacgctagtgagtcgtgtctccctgcaaccgcccgcggcgtggccgcgaacgaatagcgcaggcgaatagagcgccagatgaacaaggacaatatcctcagcaccagaaagacggacaaggagaccaagatcaagaaccacaagtccacggtgttgctcctccgggtggactacgcgatcctgctcgcattcaacaggcttcctcacatacctcggcggcgcacgtatcctcccctccgcgcgtcgagtgcacctagaccaagccacgttcgcggatctctcttctttctaccacaataatctgctccccatcgatgtccgaccaacgaaaacttgccgcatcgcgtctcgtctcgatctgaagccgctccctctaaggaccgagaggacaaatagacgagaaaagaactaccccatggtgacttgtgatatcaactgctaatgcgaaacagctatacgcagtccgtagcaaatgatactatgactatccctgctcgtgtcgtgtgtgcatatactgtgagactgcatgacgatgtatacgtccagttccatgactggatctgtgaggtctgctggctactgacgccagcttaaagtaaacccatcagcttt

SEQ ID NO: 81739 - DNA, 267 bp, Zea mays
  Clone ID: MRT4577_174560C.1
atccgaccaaaacgatcaagaatatcccaatctgataaatcagtccaaacgggtttactaataggatgccctgatccagtacaaaattgagcttttgataaggatccgacaaggggagttgcaaggactgtggtatcaaaatttttcattcgagtatctattagaaaagtattctccagcatttgattccttactagcaaagtatttattggtacacttgaaaggtaccccagaaaatcgaagcaagagtttgttaattggtttaga

SEQ ID NO: 81740 - DNA, 830 bp, Zea mays
  unsure (1)..(830): unsure at all n locations
  Clone ID: MRT4577_174561C.1
gttactgcgcagccagccagttcttttctcccccgcacctcattagtcctcgccgccgacccagcgccaccgcccccgatttaggcgagttcgctgaaggtcgcagcgaagaaaaacggtggctgccatggacgggggtggtgaactggggatcaccaagaaagaggcggaggccgagtaccattgccacgacttcgagtgggaggacctccgggcggatgtggaagccaacccttccttctcctaccacctttcccctttccccacgatcaccgcctcgccgcagccaccgtcatcggaggcctggagaagcttccaccgctgccacgcctccggcaaattcttcaaggaaagaaggtatttgctgaaggaatttcctgaactgcttaacagcaaaggatgtgcaaaggttttagaggtggggtgtgggaatggaagcactgttgtccccattctacgatgtagtccaagcatcagtgtctatgcttgtgattgtagtgaagacactctagagaaagcaaatgagattgtgtgtaatacacagggggttgatgccaaggataggttccacccttttttgctggatgtttctaaagaaaattttccaggttggttgttctgcaaatgctgtcaaagttcagatggaaaagttgttgatctctcaccagattcaagtcatctttatgtaaggngaaaaaactcaatctcgctgaaagaagatcagtgttgtgttggcggcatagattttatcaccatgatatttatgttgtcagccatacccttcaacacaatttcagctactctagagcgttgtatgtctgttctaaaac

SEQ ID NO: 81741 - DNA, 199 bp, Zea mays
  Clone ID: MRT4577_174562C.1
cttaagcaagatggaccgcccggcagacacacacctgactgacctgatgaccatcactcaggtcattcttaactaacaaatcccttacctctattgccgctactacttcaccattctgctctaccacatcatcctatgctacaagtatatcacctccgtcagtcaacaaggccgagctctcccagctcatctgactcac

SEQ ID NO: 81742 - DNA, 192 bp, Zea mays
  Clone ID: MRT4577_174563C.1
gcgagcgatccatgtctacacgtacacgaggcagcagcaccaagaagcagccgcatcatggcacgcagcgcaaagcgatggagtcgctcaccatgatggcgtccgtcgccgccgtggcggtggccgcgctctcgcgccacggcagcttcgccgtggtcaagtccgccaagggcgacctctgcgaggagcccg

SEQ ID NO: 81743 - DNA, 401 bp, Zea mays
  Clone ID: MRT4577_174564C.1
caacaagcaacacaaaaagagctatccaaccgcatcaatacaccaacaccggccactcacgatcaccctcctccttatgcttcttgctcttcctacatgtgttgctaacgcgacaatcgcccctcaatgctcacaagctgctattgcttgcctttttccccgataccttgcatcaattatagcctcagtatgcgataacccagctcttcaaccctataggctgcaacaagctaccgcaccaagcaacatacctgcatcgaccttggtgcgtcaacaatcgccagccctatcttgcgcgcaggcattggtacaaaccatcatgccacaacagctgcagcaactcgtgctacctgtgatcaatcaagtaggtctggcaaacccttatccctactctgcgcaac

SEQ ID NO: 81744 - DNA, 489 bp, Zea mays
  unsure (1)..(489): unsure at all n locations
  Clone ID: MRT4577_174565C.1
cgaccggccggngggcggcggcggcagccagcggcaggcagcggcgccgcgcaggcgacggcgaacacggcgcggcaggaggacggcggcggcgacccgcggagcaccaccaagaagcggaacancagcnacccgggcgaccncaacgccaagaagacggccgccgagggccgccgcaccgccgcggcggggggcggcccggaccccaccngcaccgagaccgccgaccgcngcncgcaccncaagaacccccacgccancgggnngganaaggcgcacccccgggaccncccccaggnggggagggccagggcgcagcccaagaaagaagacggcccccccgccncnccccgcgccanaccgaagaagcagccgaggacccaggcagcagagcnagggcccaagcancacggaaggccaaagaagcaggagccagcgcccanncccggnggccagcgcaacgagcacaaaaggcgggcnngcgaaaaa

SEQ ID NO: 81745 - DNA, 540 bp, Zea mays
  Clone ID: MRT4577_174566C.1
atttcgagaaaaaaaaaaaaaaaaaaaaaaaaaaaaaaaaaaaaaaaaaaaaaaaaaaaaaaaaaaaaaaaaaaaaaaaaaaaaaaaaaaaaaaaaaaaaaaaaaaaaaaaaaaaaaaaaaaaaaaaaaaaaaaaaaaaaaaaaaaaaattttttttctttcccggggggctcttttaaaggggaaattttttaaattttccttcaccttgggggcctttaaaccttctttttaaggggcccatttgcccttttaagagggttttttaaatttactgggccgcttttttaaaacttttcgatgggaaaaccctttgggtcccccaatttaatggctttttaaaaaaccccctttttaaaagttggggaaaaagaaaaagggcccctcccattcccttttccaaaaatttgttaacctttattgcaaaatggccccccctttttgcccccctttaaccgcgggggggttggggtttccccccctttgaccccttaattttccccggcccttaacccccgcttttttagtttttttcccttt

SEQ ID NO: 81746 - DNA, 499 bp, Zea mays
  unsure (1)..(499): unsure at all n locations
  Clone ID: MRT4577_174567C.1
cccacgcgtccggccattcatgacagagggttcttgtttacacttaatgaagatctcataccaagaaggttttgatgagccggtcattggctccattctaaaggaaactcttaaggctctggaataccttcaccggcagggncaaatccctcgcgaaggtaaggctggnaatatccttattgatggtgctggggtagcgaagcttggagactttggtgtttctgcttgtatgtttgatagaggtgacaggcaaagatctaggaatacatttgtaggaacaccatgctggatggctccagaagtgctccaacctggcactggatataatttcaaagctgacatatggtcatttggaatcactgctcttgaactagcacatggccatgctccattttcgaaatacccccctatgaaggttcttctcatgacactccagaatgcaccacctggtcttgattatgaacgtgacagaagattctcgaagtcatttaaagagatg

SEQ ID NO: 81747 - DNA, 616 bp, Zea mays
  Clone ID: MRT4577_174568C.1
cgacccacgcttccgcggacgcgtgggcggacgcgtgggcggacgcgtgggcggacgcgtgggcggacgcgcacacacggcgtcacactcacacagtcagacgctccattcttccagagttccagttccaggcttcatcgccgcgccgccgccgccagcagcagctccacgtccagccaggcaaccagcagccaggtggtagccatcaagattcaagactcaagggctccaacgtcaagccgagccagcagccaggccgcagccgtacagggctccaacgtcaaaaggtggtccaggagggaagctgattccttcggtggtggctgaagttgaatggtgagctgctggagagtggagacgtggagtggtggccgcctggccggtgggcgcatgggcggtggctgctggctggtgcaaaactgcagactgtgcacttgtgccgtggtggctggcgctaatctattcatctattgtgcttgtgtgttgtgtcattgtgtgtggctgtgtgcatttgtgcttccgtgtgagacttagtttgagttgtgttgtgaacttgcgatcgtatgtcactgtctactgtagtcttctttttattttattcatatcttgtttcctg

SEQ ID NO: 81748 - DNA, 318 bp, Zea mays
  unsure (1)..(318): unsure at all n locations
  Clone ID: MRT4577_174569C.1
ccgggncgacccagcgnncggagaagagaccaggccgaaggaaaacagggcggagaccaagccaagggncngcaggaggaannngaggagcangcngagaaggcaaagaccnngccngagaacacgagcangagaacaagcnganccnanacgggcncnacaagcaagccacggnnggagangngaanaccgancgggcggggaganncnaccaaaaggacagggccaagngggangccnggaaggcngnngaaggcaaancgaaggangaggcgangaangacnacancaccaaggngaagcagcnccaggaggagg

SEQ ID NO: 81749 - DNA, 509 bp, Zea mays
  Clone ID: MRT4577_17456C.1
atccactgaaacttatcctgtatataacacaatgttaaattcttgttcctgagtatgacttacagcctgtttatgacacctattacgcaacgagggcacaggcattatacactgaggaccagttcccctcctttggcagcgcacggccgaaacatgcccagttttctggacacgtgtgctttgtacaccgcgaaccgactaactaaccctcccccatattcaatcccggtacctaatattgactcggccagaactgtaatccaaacacatgtcctgtttctctgaatccagacctggtgcaggaaccacatcaccctccatatcattggcctgctcaactaaatttcatccaaacactcttaggctgacccaatcacactagcttctgtctacggacattacacctatgggtactcatagagcacttgatactgcattgtatgtgctcaagagcactttgataacccataagctgcctcacaagcttggcacaactgaaccacgggtga

SEQ ID NO: 81750 - DNA, 889 bp, Zea mays
  Clone ID: MRT4577_174570C.1
ccctcgggttggccggggagccgtcgccactccagttctctgtttctcacgccagtagggttttgtcacctccgtgccgccgtctccgcggtcgcggtttcggtcatatcgctcaaaactctagcaaccgcgcctccacccatacccgattcccaatccaggttcgatcccccggtggcgaggacacccgacgccgattcgtccccgtagatcgaccggacaagctcctcctcgccatgggtgagtccgacctcgaggctgatccctgtatcagcgcccaaatcccacgcccggcgagatgagattgcttaggacggggcctcagcctcggcctcgacccggatctcccctcaacgtcaggatgtgcacctctgcacacggtggactgcggtgatacattggctatggctgtgttggatataaaagcaaggaaaaaatgcaatcacaaccagggatcaattgctacaatcttatgttagtgctcacaggtgacaacggctgccgcgacaactcctcggtccaggtctccttgcccatgagccacatgcttcgacgaccaagaacatggtccatctagctcaaagtaggtcttcgctccgaggctaatacaatacatggccgcatggaaagtttttagttgttataaagaagtgaagttatgtttcctctaaatgtatcctcaaactgtcctaaattcttgtttactgttttttatgtttatttaattccccaagctagagtatccatcatatgtttgaattgcttactgagaaacattaggtggaaattatatagttttgatacaggttgttgtatgaattgattactgagaaacattgggattctgtacttgtacttataagttttaaaactgttatactgtcctggc

SEQ ID NO: 81751 - DNA, 325 bp, Zea mays
  Clone ID: MRT4577_174571C.1
gcctctccgagcgccgccagcagcgccgtcacggacgcggccggggcgcaccgccggcaacatgcgcagcagaggaaggcgaggaggtgctggtcgcccgggctgcaccgccgcttcgtcgccgccctgcagcggctcggcggcgcgcaagtcgccacgccgaagcagatcagagagctgatgaaggtggacgggctcaccaacgacgaggtcaagagccacctgcagaaatacaggctgcacacgcggcgcgcgtcgtcggacggcggtgaccagcacgcgggcggtctgtggtcgtcggcccctgagcagcattacacgacgt

SEQ ID NO: 81752 - DNA, 346 bp, Zea mays
  Clone ID: MRT4577_174572C.1
ggggggtggttttcaaacgcatcatcttcgaagggggcttaccttcagtgaaacagtgggccaaatccggggcgtaaccacgcgcgttattcaggtcactcgcatctcacttgcgggaagaaaaataaaacttgggggctggagacaaacaaaccaacccacgcgggtcctacttattattacagtaaaattgggcgcgggctgatgaggtgtgctctgcctgctgtgggaagggccacctggttttctcaggcctgtatagagctcgaacatatggcccttggtcacgtccgcgatgagttggtccatgaggaccatccggccccgtgtgcgggcccgttggtta

SEQ ID NO: 81753 - DNA, 546 bp, Zea mays
  Clone ID: MRT4577_174573C.1
gtgctccctatgtttctttccataggacgtattaggatctgtataactttttaaaagcattttttgaccaatattttttttattatgaatgctagtgctaaaataaaattatattaaagatatgttaaatacacatatattgatataacttttgcacactgagcatgtatataatttgactaattgttagttaaagtttaagaaatctgaccttttcagatcctaacactcagtataataagaaacagatggagtatacatcttacgaaacattttgctttaacaatatccttgaccacattttctcgaccagttgttgtattagcaggttttggcaatttgcctggtgatatggcattctgggattattcagaaaaaaaatggtagcgaaaacaaagcagaatgttctgtcacaagtgaatggtcccctgatggtcgtcattttatgactgctacaacagctccgaggcttcaaatagacaattgtataaaaatatttgaccacaacggatctctgcagtttaagaagatgtttgaaaagctgta

SEQ ID NO: 81754 - DNA, 1820 bp, Zea mays
  unsure (1)..(1820): unsure at all n locations
  Clone ID: MRT4577_174574C.1
ttaccgctcccctccttttttttttttttttttttttttttggactcgtaacagggtgatcatcgttatatttcatatgaacattatgatgtttacatgggctagtttctctcctttcctaaagaacacacaccagcctccgtgaccatccttctgctgtttctgtcattctagcggcctcccccttgggccttggcaaatcgctctttgtttgaacggtaataggctgggcaatcttcgttgggaagaccaatgatccccgggaggaattgaggccaacagtaaccttcctcaaacccatgaaccgtatttatgtcgctgttcggagaaatagaaattggaattaagtggggttgggggtgtatgtacacactgtacaggggatgtgtgtgaaatgatcacagaagggcggaggaggaggaggatccgaacttgggggctctgtcacagggtgcacgaatccatccaattttccctttctcattgtcatatatcaccatgtgatcctgcatcgtaatgtctccaataatgctcaggtccttgagaccgatttcggatccgttgaggatgcccagacaggcattcccgttttctgtgacaatgaggtagttctcaggagggatctccatgagcgtcttcttgccactggcgaagttgagcaccaaagacttgaactccttcctcacatcaagcacagacttgaatggttcctgccctttccagcagagaggcagcgaagtgtcgggttcctcttccagcgtcctgctcaggccatccttaagagcggtgacaagtgcttggtatggctttgcagcgaagtaggtgaacgagcttccactgtcgaagaccactttcgccagtctcacgcccagtgaccggtcaccgaagtacaggcttgcggagccaggggagtagtagttccggaacgcgctgcgagccatgggagtccatgtcgcgcgttggtaaggcacgagatcgtcaccgaagaagaggaacccgccgcccctcaggctgaggcagtggccgaccacgttcttggtgacgccacgctgtttgagctgcgagagcaagctgactgagccggtcccgagccccagcacgccgtcggtaggcgaactcaggtcgccgctgcggacctgctggtcgtaaccacacccgaaggcgacgctggggcgagcgacagagccgttggtgaggcggagcgcgaagctgtcgttgatgagcacgccggtggacgacccctggtctgcgtacttgatcacgtagtcgcattgctcgtgcggcgagtcgcatctgtgcttcccggtcagcccgttgtgcagggaagcgcacagccggtgcacgcatggcaccagcttgctctttgttggccggtacagcgggtgcggcacctcgttgcagctcctgcagggcgcgtcgcactgcagccaggtgaggtcgctgccggagtccacgtccaggaagtatggcttgggtgggttgccgatgttcatagccacgtagtacaacccgtgcgggtagacgtcgccgtagagcgggaagacggcggaggacggctccgtatccgccccggcggcgatggagctggacgccccgcccctcgccggcttgtccccgcgcgccggcgccggcgccagcgccaggaccagcgcgagcagagccacgagcacgaggcccgcgggcggtggtgccatgtgggggcttggctagcggggactctgggagccgaggggtggaggcagacgcggatgggctccttcctgtctgtttctcccttcccccctttctctgaatttattttcttgtcccacgcgnccaca

SEQ ID NO: 81755 - DNA, 2178 bp, Zea mays
  Clone ID: MRT4577_174575C.1
aattcggcacgagcccaaaaacccacctcacctcgcccggcccccaacccctccgctgccgagtcccgagtcccgactagtattctattgcatcccctccggggagggctgaaccaattcaacacgctgtgcctgtgcgtgcgcttgtgtcgggcggggtcgcagcagccagccaggatataatccccgcgcgcgccgctcgtaaacagaggagggcgagagggagggcgagctgagccagtcctccgatcacgcgcccgcacacacgcacgcagcgcggcagggagaggaagagcttacaaggccacagcaggcagggcacggagaggctattcaccaccgctgccgcacatgcgagcgggcgcagcagcgcgcggggactctcctcgtgcaatgagcgccgccgcgacgccgcgccaccggctcggggtcgcgctgctgctcctgctgctcctcggtggcgccgacgcgaaggcgcacaactacgaggacgcgctgcggaagagcctgctctacttcgaggcgcagcgctcgggccggctcccgcacagccagcgcgtcacctggcgccaccactccggcctcaccgacggcctggagcaaggggtggacttggtcggcggatactacgacgccggggatcacgtcaagttcgggctccccatggcgttcaccgtcaccatgctgtcgtggagcctgatcgagtacggcgccgacgtcgcggcggccggcgagctcggccacgcgctcgaggccgtcaagtggggcaccgactacttcgtcaaggcgcacaccaggcccgatgagctgtgggctgaggtgggcgacggcgacacggaccactactgctggcagcggccggaggacatgacgacgtcgcggcaggcgtacaaggtcgaccgggaccacccgggctccgacgtcgccggcgagaccgcggcggcgctcgccgcggcctccatcgtcttccgccgctccaacccgcattactcacacctcctcctgcaccacgcccagcagctgttcgagttcggagaccggtaccgcggcacgtacgacagcagcatcgatgaggtgcgcagctactacgcgtccgtgagcgggtaccaggacgagctgctgtgggcggcgctgtggctccaccgcgccaccggcagggctgactacctcgactacgtcgtcgacaatgccgacagcttcggcggcaccggctgggccatcaacgagttcagctgggacgtcaagtacgccggcgtccagatcctagcagcaaggttgctgctgagaggggagcacgcgacgcgccaccggagcacgctggagcggtacagggccaaggcggagcgctacgtgtgcgcgtgcctgggccggaacacggaaggcggcgcggacgccaacgtggagcgcagccccggcgggatgctctacgtccggcagtggaacaacatgcagtacgtgaccagcgccgcgttcctgctctccgcctactccgactacctggccgaggccggcgtccggaccgtgtcgtgcgcgggcggcgagaccgtggcggcccgggaggtggccgcgctcgccagggcgcaggtggactacgtgctcggcaccaaccccaggggcgtcagctacctcgtcggctacggccccaagtaccccagccgggtgcaccaccgcgccgcgtccatcgtgccgtacaagcacagcaaggagttcatcggctgcacgcagggcttcgaccactggttcggccgccggagctccaaccccaacgtgctcgtcggcgccatcgtcggcgggccggaccggcgggacaggttcagggacaaccgggagaactacatgcagacggaggcctgcacgtacaacacggccccgatggtcggcatgttcgccaagctgcaccggttggcgcggcaggagcgggaacaggggccgacgccggcgccggcgccggcgcccgtcacgtctgcagcggccgatgtgtaaatagataggaatgtagagggggggctgtacaattttccccattctttggttcattttttgttgggctctgaatttcattttacacagatccaggttattgtatacaaaagaaaaggtagaggcatcgacatgtgcaaatgtaaatccactaccagtacatacgagggaaagaaatggcattcttaacttattggt

SEQ ID NO: 81756 - DNA, 298 bp, Zea mays
  Clone ID: MRT4577_174576C.1
ccaagatgctggacatgtttttggggcgacagggctgacattacattcattgcgaccgggcaaaacaagcatatggagaaaagataggacagtactatacataccaactagacactcactactatatactacgagtgaccgcacatatattactcactccataacataccggaaactaaacggtggagacaccagcagaacaagaacaacagtgcacaaacacaggggtatatatagtgacgactagctatcatacagcatgcgagcgtcttagataaccacaaggaccagcggacat

SEQ ID NO: 81757 - DNA, 587 bp, Zea mays
  Clone ID: MRT4577_174577C.1
gatcgtttaaatattaatagagctcctcagagatctgggggggggggggggggggcacactcttcgctgccggggcaccactggttcgcgacactcactctcgtctcgtaggagggaggtacgattcgtactacaccctgcacccaacgttgaactctgaactacccgccgacccaatgtgtctgaccagcacaaccaggccgcgcactcgcagctgtagattccgagcactgagctgggtaatgcagatgttgctaagtgcgtccccgtggcagctaccgactgctcccttgcacaccacttagatgctactaggactaggagtaggttgaactggagtgaaaaccttcgacgagtgtttgatctttggtcactccgggttttacgatcacgcaacaactcgcaccaccgggatcgtaaggacatacactccctcgggttaaggcgtcacgaagggtccggacaacgtcctcgcgacaaccgtgccctcgttggatggtttcacgctcatactgccctcgaggaggtcagctccgccagagttctttcgcaatcatcgtgtcgtcccaacccatacgcggagaacc

SEQ ID NO: 81758 - DNA, 359 bp, Zea mays
  Clone ID: MRT4577_174578C.1
ttttttttttttttttttttttttttttttttttttttggtttttttttttttaaaaaaaaccggggtcttaaccccaaataaatcaccccaaatttgggtttgggaagtttttcttaacccacggggtaaatttacgggcccccgggaaaacaatttcccccttgggaaaaaaaagttttgggggaaattaaaaacccccccccctgttttttaaaaaaaaggggggggcctaaaaccttttttaagccttttctttttttgggagccttttgtggtaatttgcccaacggggaagggggttaccccccaaagcggggggggggtgggaagtttatcgaacaaccctttttccggttg

SEQ ID NO: 81759 - DNA, 599 bp, Zea mays
  Clone ID: MRT4577_174579C.1
ctcgaggccggccgggccggggggacctgagcgaagtagaacccgagcccctctccgcctccctccccgccgcacagcctccacagcccgaaaccctcgccgccgatcggtttcggagaagagaagcaaatcaagatgtttctcggctcgctcccgcggcgcccgagcaaggaggctgcgtacaagcagctgcggtcgcacatcatcatcatggcctcctgcgccgccgtcatccgcgccaccccttacatcctccatttcctcgcccgcgacggcgacatccaggaactcaagctcgatctgtaggcccgtccgttgcttccccacctccagaggtgctacaaaggcaaccgttagttcgaggccactgcaaggtaatatggagttagtggctacagtgcctgcttacgtttttttgtcgttccaagtttagtgacaaactgacaatggtgtagcaactggcttgtgctgcgaccagcatttcgtttttgcctatctgtatggtctagtctttgtttgcactggtggatttgcagagatgttatcattcaacaatgttctgtggtcaaaaaaaaaaaaaaaaaaaggcccctagggcc

SEQ ID NO: 81760 - DNA, 351 bp, Zea mays
  Clone ID: MRT4577_17457C.1
gggggggcaaccaggttccattggcccccggggggggaacaggtctagaatgctaagggggagggggaatttttcttgcaagccgctgggggcacatagagggggggggaaaggcctttggtgaaaaaaaaataaaaaaacgttgggggggggcccccgggggccaaaaaaaaaaaaagggggggaggaggggaaactctccccccctccacggggggggggggggcccaaccccctacccggggtgccgatgggaaaggggggccatgtgttccccccttgaggggagggggactggcaaaaccccttttgggaaagcggaactcaaaacccgcccaggtctttggccct

SEQ ID NO: 81761 - DNA, 1033 bp, Zea mays
  Clone ID: MRT4577_174580C.1
gtcatatgcttgtctcaaagattaagccatgcatgtgcaagtatgaactaactccccctgtccctcgccgccgggcgctttcggtcaggcgcaccgcacagcctccacagcccgaaaccctcgccgccgatacggcttcggagaagagaagcaaatcaagatgtttctcggctcgctcccgcggcgccccgagcaaggaggctgcgtccaagcagctgcggtcgcacatcatcatcagggcgtcctgcgccgcgagcccctctcccgcctccctccccgccgcacagcctccacagcccgaaaccctcgccgccgatcggtttcggagaagagaagcaaatcaagatgtttctcggctcgctcccgcggcgcccgagcaaggaggctgcgtacaagcagctgcggtcgcacatcatcatcatggcctcctgcgccgccgtcatccgcgccaccccttacatcctccatttcctcgcccgcgacggcgacatccaggaactcaagctcgatctgtaggcccgtccgttgcttccccacctccagaggtgctacaaaggcaaccgttagttcgaggccactgcaaggtactatggagttagtggctacagtgcctgcttaagtttttttgttgttccaagtttagtgacaaaactgacaatggtgtagcaactgggttgtgctgcgaccagtatttcgtttttgcctacctgtatggtctagtctttgtttgcactggtggatttgcagagatgttatcattcaacaatgttctgtggtcagttgcaattgtccttatgctctgtgaataatgcttggactgccgactgtgtatgatttggtttcggcttgaaaaaaaaaaaaaaaaaaaaagaaaaaaaaaaaaaaaaaaagcgcggcagcccccctacccccacagtcgcgaagggacctttacaagcgcaagagtctatggccgtcaccttcccatatttcctcgcgccgggggggtcgcctgagatcacataaacaagggtgaaagctgttgctgggcttg

SEQ ID NO: 81762 - DNA, 661 bp, Zea mays
  Clone ID: MRT4577_174581C.1
cattgggtacctcgaggccggccgggctccccgccgcacagcctccacagcccgaaaccctcgccgccgatcggtttcggagaagagaagcaaatcaagatgtttctcggctcgctcccgcggcgcccgagcaaggaggctgcttacaagcagctgcggtcgcacatcatcatcatggcctcctgcgccgccgtcatccgcgccaccccttacatcctccatttcctcgcccgcgacggcgacatccaggaactcaagctagatctgtaggcccgtccgttgcttccccacctccagaggtgctacaaaggcaaccgttagttcgagcccactgcaaggtactatggagttagtggctatagtgcctgcttaagtttttttgttgttccaagtttagtgacaaactgacaatggtgtagcaactggcttgtgctgcgacaagtatttcgtttttgcctatctgtatggtctagtctttgtttgcactggtggattttccgagatgttatcattcaacaatgttctgtggtcaaaaaaaaaaaaaaaaaaaaaaaaaaaaaaaaaaaaaaaaaaaaaaaaaaaaaaaaaaaaaaaaacccaaaaaaaaaaaaaaaaaaaaaaaaaaaaaaaggtcccttcccggggggccctttaaagggga

SEQ ID NO: 81763 - DNA, 250 bp, Zea mays
  Clone ID: MRT4577_174582C.1
cggacgcgtggccggacgcgtggggcgctagtggagggttggagaaggaggtaaaggatgagggttcatcatccctccctgcctgtggaagctaacagcatggccctgctgcccctccctgcctccacccacagtggagagggctacaaaggaggacaagaccctctcaggctgtctagtctccgctagagcttccagagctctgacccacagcctccaagtcaggtggggtggagtcccagagctgcac

SEQ ID NO: 81764 - DNA, 390 bp, Zea mays
  Clone ID: MRT4577_174583C.1
aaaccaaaaaacaccctaagtttaaagcaggaacaggggggaagtttaacatagcggaaaaaaagagggaacgggggctttaaggagcgcggctacaaaaactttaaaaagagaaaagggctcggccaaaggagtattataaaccaccagaggccccaacaggggggtgccaacgagggggcagcccctaaaacaagcaccggagctgaagttagcctagcgatggggaccctgaagggggagcaagaaacgtaatccaccccagtctggggaaaaaaagcaaccgaggaaggctctccaccaggttctccaaaaaggcccaccttaaagtaaggccaagcttgggggcccctttttgaagaaagctaaaccagttggcccactcctttt

SEQ ID NO: 81765 - DNA, 766 bp, Zea mays
  Clone ID: MRT4577_174584C.1
actcctatgggcgattgggttcctcgaggccggccgggctctttagcacccccttcgccattttcgttactactacagcagcattaacccatagagacaatttagtagatctagtagtttgattaatttattaactccatacactgttggtttcaggtggacccgaccgaggccgacggccaatcaatcaagaacgccaccgcaccgctggtcagggcgcgttgggcctgcaatggggggcgatcaccatctgcaactgcgcaggccggcgtcgatcgggaagatcgcggtgccggagaagaagtccctgttcctccacgccgccagcgcgtcgcccgggcactaccagcagcaacagggcggcgcctcctcgcacgaggcgcccgccgtgagcgtcgggggtggcggcggcggtggcgattccgtcggctccggcctccaagagatgagcagcaggaagcccggcgtatgacgacgacgcggcgcggcgggcgacgagcgctcgtacgccttaccgcaaacgcgcaggtgcaatgcatggccaaggcaaacgcacaggtgcaacaatgcatggccaaggcaaacgcgcaggtccaacaatgcatggccaaggccaaatgttttagatgttctgttgttgtcccctctcatttgtcgtcgctgtatgcagaggaaggggatcttttttctttctttcttctggacctttcctgggaaggtgtaaggattcttacactctcacaaaaaaaaaaaaaaatttgcgggc

SEQ ID NO: 81766 - DNA, 329 bp, Zea mays
  Clone ID: MRT4577_174585C.1
aaacccaaggacgggcacatttcacttaccgccgtaaccccaggggccgcacgacacaccggataatagagggattatgccgcttagaccaaggatacctaccaaaattattaactaaagagactttgacctttgtagctgtgaaccgaccttggctctaggccatgacatgaccaatgacagtgtcactcatctttgggcagtacagagcatacctgggacatagtggagaaggaaatttaccatttatgctgtattgtggaccaagtatacaaattactgatctgaacatgagtgcaatgaacttgttttgcaacaaccaatttatt

SEQ ID NO: 81767 - DNA, 816 bp, Zea mays
  Clone ID: MRT4577_174587C.1
tcgggccggccgggtctttagcacccccttcgccattttcgttactactacagcagcattaacccatagagacaatttagtagatctagtagtttgattaatttattaactccatacactgttggtttcagggttggtcagtggacccgaccgaggccgacggccaatcaatcaagaacgccaccgcaccgctggtcagggcgcgttgggcctgcaatggggggcgatcaccatctgcaactgcgcaggccggcgtcgatcgggaagatcgcggtgccggagaagaagtccctgttcctccacgccgccagcgcgtcgcccgggcactaccagcagcaacagggcggcgcctcctcgcacgaggcgcccgccgtgagcgtcacgccgcggacggccacgaataagcagcagctgcacctgccggcgagcccccgggcgtgcctctgctcaccaaccgtgcacgccggctcgttccggtgcaggctccaccgcggcgtcgggggtggcggcggcggtggcgattccgtcggctccggcctccaagagatgagcagcaggaagcccggcgtatgacgacgacgcggcgcggcgggcgacgagcgctcgtacgccttaccgcaaacgcgcaggtgcaatgcatggccattggccaaggcaaacgcacaggtgcaacaatgcatggccaaggcaaacgcgcaggtccaacaatgcatggccaaggccaaaagggtttaagatgggtctgttgttgtcccctctcttttgtcgtcctgtatgcaaagagaaagggggatcttttttctttctttcctctga

SEQ ID NO: 81768 - DNA, 373 bp, Zea mays
  Clone ID: MRT4577_174588C.1
gagctcacttgtcggcggccgcccttgttttctttttttgctgcgttttacgacaaacgccccagtaccacattacacgtcaccaagggccaatcctactggccagcacgtaaggtcacattaacaaggtcactcccgagactcttacgtggaaaacgaacggacgactagttccacgcgactgcacgcccgagaagctgcacagggcccaaatcacacctggtgaacacagctgtctgaagcggacgccgacaagcaccaaggcatggtgaggaacagccacagggcgtttcgaaagaagaggatcccgatgcaactgacgggaacgccatagatacagtggagcctgactaacaaggaggcccaataggag

SEQ ID NO: 81769 - DNA, 220 bp, Zea mays
  Clone ID: MRT4577_174589C.1
gcgcgggccactcacatcaccgcatttaatgcaaagcatatactaaccacaaaggggcgggggcatgagggacgcagtgatgtacataaagacgggagccaacctctgcccagccgatccgatgattcaagaaaactcgaccgatcgcacgggaccgagcacccaaaggcagcaccaaaaagaatgcccgagaaccaacaggggaaagggcgcataacgc

SEQ ID NO: 81770 - DNA, 249 bp, Zea mays
  Clone ID: MRT4577_17458C.1
ggcaaaagatcatatgtttttttggttcactgttttatattggtgcatatttgaatttcgtttactgtattgttattttgtctgatagcactatttttttcatcttttcagcgggttaccctcttagggaaaaacaagttcactccacacaaacccccgtccttgccactttgtatgaaccatcctcacaaacgggaatggattgcccccgaacatccacctaacacctaataccccttgggggccccc

SEQ ID NO: 81771 - DNA, 384 bp, Zea mays
  Clone ID: MRT4577_174590C.1
atttgatgcagccacaatcaatggctggatgcacaaaaggctgcatgagctgctgggggatcaaatactacaggtgaacccgacggtggctctcatcctagaactggctttgttcgcaccctacatgttggcgcaacaaaagatcctctttctggactattaaataagcgtgcagcgaacttacatacccctatagggaccgttggtgtcacatatcaaccaactggctgagcgacatattgagttctacacaaagaatcatgagacaggcgttaaacttgaactgtgcatcttctatgtgacacattctgaatgtcgtttttataaactccactgaagcaaccctatcaactaccttaggttatgctttaaaccgatcaccat

SEQ ID NO: 81772 - DNA, 203 bp, Zea mays
  unsure (1)..(203): unsure at all n locations
  Clone ID: MRT4577_174591C.1
tccttctcgttgacgccaacaacgaacatgggggcagccttgctgggagcagagnngacagccttcttggctccaccctttaagtgagctgtggccttctcctgggcagggaaaacactagtagactcaccaccctattcaggggcgaccggtctccgtgttttcgccttctggtttctggngccgnacgcgggagcctcctt

SEQ ID NO: 81773 - DNA, 277 bp, Zea mays
  Clone ID: MRT4577_174592C.1
ccgcctcgcaggaccgtccggattattcccggtcgacgagctcactagtcggcggccgcccttttttttttttaattttttttttttttttttaaccaaaactttttttttttggattttttatgggggagaccacacatgataatgaggggggccgtaccgcaatttacatataaacatagaaagggatggatagagaagaatcccaaaaaaaaaaaattaataatagggcggaaaggaaccggaaccccacaaggggtggtgcgggagctgggca

SEQ ID NO: 81774 - DNA, 434 bp, Zea mays
  unsure (1)..(434): unsure at all n locations
  Clone ID: MRT4577_174593C.1
agcctcacgaatcgcgaggtagtcgtctaatcgggcaaacttatcccttccaacacggcgcgcgctgttgggatcattcaactcgaaggatgtcggaactagaacgccccacaacgacggacgaatctgacccacgtgcgctaaccggcctagcggcaacccagtgcgtctttacaattacaaacgcacttgatataactttggaagtcgaccggatntcgggggatcgaaagagaggtctccactggaagggttccccggaaccctaatttgtaggttaacctntagaggagcctacggtacttccaagacctcgactcccagtgctctagaggtaaggtagtagtgaacaactcctgtcacctcctccagtgcttacaaggaccacacatacaacgggaactacccacgccgcggttggacagcatgcgggt

SEQ ID NO: 81775 - DNA, 362 bp, Zea mays
  Clone ID: MRT4577_174594C.1
ttttgccttttaatgtgggaggcgtttcatgacaaggcccaccccaaattacgcaagccggtggttgaccctcacacgttcatgttcagaggatgcacaccttggcaaaatgagcacacggactcaacctatgcggatgaccaatgacccctactacaatgctaatccatattaatgcgagccacccctttctgactgacccacgaccctggttggggttgacaagacaatcactgtatcaatatttcaagacacactggagttaatatcgagacatccgcgctatgcccttgcatgcgatttttcgggggcagtgtgagcttgtcctgcccaccggggcggggttgaacagttttgactcc

SEQ ID NO: 81776 - DNA, 374 bp, Zea mays
  Clone ID: MRT4577_174595C.1
ggggaaaaaagggtaaccccagggccaacccaaggggccaaagggggccataaaagcggggaaaaaaaaaaaggtggaaaaaaaacggcccctattctaacccttttaaaaacggcaaaagggaaaaaaaaagcccccaaaccattggggaaaaaccggaaaaaaattggggcgggaaaaaccaggttttgggcccgcgaagcctttaagggggcaagaaaaaaaatgccccaaataaaggaggtgaaagggggttcccattaaaaagggggcttcccaaccaaaaacccaggtgaaggggggggggcccgtttttttggtcttttttgggggccctttggttaacccccgataccctaaaaaaagggggaaaa

SEQ ID NO: 81777 - DNA, 525 bp, Zea mays
  Clone ID: MRT4577_174596C.1
gggtacccgcgcccccccccgacccccccccccacaccacccaccccccccccccccccaccaaaaaccccacccaccccccaaaaaaaaaaaaccaaaaacaaatcccggggctggggccggaagcccaaaaagggaagggccaaccccctggcgggttggagggaccagccaaaaccgtaacctgttattcggcatcatcacctccctggggcattttccttggacccaccatttgaaaccaatggaaaaaccttttttggggggcccacaatataaatccccaacggttttttccccagggatttccaaaaaaagtttcagaaatttattaaccaaccttttcttaaaatttcccaacaagggaaccaggaaaagtccccccccggtgccttggaattcctttccccaccccggaaatttcccggaagtaaacccccagtttccaaccccattcttcttggggggcgctaaattaaattccacattttgaggctggcaaaaagtgccccaaatggaaggaga

SEQ ID NO: 81778 - DNA, 287 bp, Zea mays
  unsure (1)..(287): unsure at all n locations
  Clone ID: MRT4577_174597C.1
ggacctttgggctgatttatgtgcttgttgtatgtgttgtggatgtgngggtattnngnntaattaagttngttgtagggtacagggtgggctgaagaatgatgagaacttgnggaagggagggtggaggagaaggaagaagaggggatgagggtgaacttgttggagagaaggggagtganggtgaggtcggtggcggttgtgagggtgcctcttgtcgtggttactggtggtggtgcgcttccggcgtaaggggtgccttggggggactggttcagagcctgcgt

SEQ ID NO: 81779 - DNA, 340 bp, Zea mays
  Clone ID: MRT4577_174598C.1
gggctaagatcttctataacattcggagtcaatggaccgaccctttgatgtgacattgctatcatctggtcatgcctgtatcgttgtggtttcaattccgtagccggcgttctactatcttctatatttgtgttttagccctctattggattatcatgctacaatcaagactataatagcctgacttttatatcccgaagacgatacatgtccataacaagtgctctttgttttgcagttaccaagaggatctttttgtagtgacctctgataataagatactgtaatctgacatgttttacttactagcttaacataaaaatcaaaaatagaaaactgt

SEQ ID NO: 81780 - DNA, 297 bp, Zea mays
  Clone ID: MRT4577_174599C.1
gtaccatagagatgaacttgcttgccagccgtcctccggctggccagacttttcctggatgcctttctttgtgccttgggagacaaactggcttgaatctaagtgacctcacagagctgtgagcaggcatgctggagaaccccggatacattcccccaaccagtctcccggtagtgcaaacttgcagccttgccgaggacagctacagcttaatgtctcagacagggaggacagtggtctcctgggctctgtcagactgaatcagcgctgttgattgtctggtgtatctttgtgggg

SEQ ID NO: 81781 - DNA, 402 bp, Zea mays
  Clone ID: MRT4577_17459C.1
tttttttttttttatgcattttaagacaagaccccttcagtacgtcccttccctaaactcagggtaggtagactgcttacaacccaaaaatgtccttacaattgtcgccatgggcgccggccccaaaaaccacaaggaggtgagccccgttatgccagatgggggggccgcccacgaggacgaaaagcccccggaggctaaggccccggaggccttcaattacttggcccacagggggccggtcgagatggggaagcaccagtccgtccacgtcttcagagggatgacgtggaagagctggaacttcgggatcctttgttgactcggccataaccacgagttctgcaacaaagacctcgaaatgggaaactttggaacaggagcaccatgtgggcactatgg

SEQ ID NO: 81782 - DNA, 262 bp, Zea mays
  unsure (1)..(262): unsure at all n locations
  Clone ID: MRT4577_1745C.1
cctcattnnttatgggacccacagtcacagcattttcgaaattggaaatcgttgaaggaatgcaaatttttcaactccttgggggggaaaaagagcagtcccaattcaaaatggtggctttcaccgtcctgaactttcaaattcaaatttaccgtcctgcattttaacctgacctcccccggttaacccctgagcgggcccatttttcctagccctaccttgtaccctgttaattccctcaataaggcgtttttgttttttt

SEQ ID NO: 81783 - DNA, 568 bp, Zea mays
  Clone ID: MRT4577_174600C.1
ccggggttagggttacccctctatataaggaggggcagggtgttattataagacaggcaagaacaatagatctgggtttactcaagggcctcctacgggagggcgagtaccggaaatatcttgtcaaatatccatgttcgtaatagattggtactagagccagtctggtgcatcgcctacatggccagcggcgtccccgatcctgcgacatccttctctgccagactcgatctactcatcgtgcagatcgtcaacatcagtgcgcagttggctggcatcagcgcccgacttgacacaagtgcgattagcatgtctggagggtgactttgacttggatgtctacgatcgggtcgatgtgctgcaacccgacgcacccaaggaagtggaggttgtgttcgacgttgaggtggccatgccaccgctgcagcccgcctctgtgcccatggagatctaggtgccacccgtctaagtccgtgcgtcgatctgctcgcccgacctgcaaacaatcaatcggccgccatggtggcccaactcgtagtggtgctgtcgtggttctgctcaccccaat

SEQ ID NO: 81784 - DNA, 377 bp, Zea mays
  Clone ID: MRT4577_174601C.1
attcatactaattccattattataccacttagtacacttagccatttaatttaattctaagggaaaatcagttcaaaataattaccagccaaaaaaaaaaagcatcatcaaccaaacctttgcatctatattgcgaaagcaaaaaccaaaaggctatagcttgaatcgagagacaaaaaaactcccgtgcctacgggatagacccactcgaacagccggggccaccccaatcgggaggcccaccaaaacatcagcgcttagaagacactgactgcgaagggaacatactggaatcgggactccttgtaagcaggcgtggataaaaaaaacagctgcaccaaacgggggaagaggccacagcgacaccgcaagcaatg

SEQ ID NO: 81785 - DNA, 469 bp, Zea mays
  Clone ID: MRT4577_174602C.1
ccacaaaaaccccccttattcatcaaaggtttccacaaaaaatttacccaaacagggaggcccttgggggaaaacccacctgccccccaaaagctagttgaaaacaaatggccccaccggggggaaacgaagaaaccctggtttaaaaacaactttctcccaacaaaaacccgggttggggggcaaaccaaacgacacccccgaaatcgcaacgataaaaaaaaaaaaaaccccaaaagaaaatcgaccccaaaaccccgttttactcataaagaaccccatccttccccccaaaagaatcaaacttcccccaaaaaaaaaaaataacccagttggcagcccttccaaaaaggggcggcattccccccatcaaagcagcaaaaaacggttttgggggagttaaaaacggggttttcagaaaaaaaaaaactctggaaaagagggaccccccccccaggaagccccggct

SEQ ID NO: 81786 - DNA, 2026 bp, Zea mays
  Clone ID: MRT4577_174603C.1
gctgcctagtcttgccttctaccaagggtgtgccacacatcaaacaccattgatagatagatactgatgactgcttccttggaacaatctcctatttaaaagctgtgtgcataccaggcactcaggcagcacaaaggtcgacgagttaggaaggatggcctttctggtgccgtttctgctgggtctttcctctgtcctcgccgcgtggatctactctgaattcctgggatacagggcatcatcgtctcatgaaaaagtccactcggatgttcatgtcggcgataaaaccatcaaagaaaatgacagggcggtcctacttgaagaaggtgaatctaaaccgccatcgacaaaggcacccaacatgtctgccagagccaaattaatacggtttattacgttggacgagtcctttcttgttggaaaccgcgccacactgagagccatagctgaattcggcattattcttgtttacttttacacctgtgatcggaccaacatatttgcagagagcaagaagaactacaaccgcgacatgtttctgtttctttacattcttcttgtcgtcgcatcaacgattacctcactcaagaagcaccctgaaaattcagtagtttcaggaaagaccgttttctatcttaatcgcaaccaaactgatgaatggagagggtggatgcaggtcttgtttctgatgtaccactatttcgctgcctcggaaatatacaatgcaatccgtgtgttcattgcttgctacgtctggatgactggatttgggaatttctcatactactacaagaagaaagatttcagtatcgcaagatttgctcagatgatgtggagggtaaatttctttgccatgtcctgttgcatggtccttgacaatgactacatgttgtactatatcgctccgatgcataccctgttcactcttatggtgtatggatcactcgggtttctcaacaagtacaatgagatcccatcagtcatggccattaagatcgcaggctgcctcttgactgtcattctgatatgggaaattcctggtgtgtttgaaattttctgggcaccatttacgtttctgctaggttacaaaaacccagagccttctaagatgaacttacccctgttacacgaatggcgcttccgctctggccttgatcgttacatatcggccattggaatgatttatgcttactttcaccccaacgttgaaagatggatggaaaagctggaagaatctgagactaaggtgagagtgttaatcaagggaaccattgttacagcttccttaatggccggctatctgtggtacgaatatatctacaagctggacaaacatacatataacaagtaccatccctacacgtcgtggattcctataactatctatgtctgcctacgcaattgcacccaacagttgaggagtacccatttgtctctttttgtttggcttggcaaaattacaatggagagttatatttctcagtttcacatttggctcaggtctagtattccgaacggacagccaaagttgcttctatctttcttaccagattatccgatgcttaactttttgcttactacgacgatatttctgtcggtatcattccgggtgtttaagctcacaaacgtactgaaagaggcatttatccccaccagggacaacaagtgtctatatcaaaattttattgctggagttgcagtctttgcatgcctatattgcagctcattattcttcaaaacctaccaacagtatagctgatacatagactctaaatcttagctatctcatgtagctcaactcagaaagcacattgtttttcctgggatggagaaattccaagtaattaagtgaacttgttaatttgtttcttttgtatgtatttccaagtaattgcgtgtttttagagacatccatagtcgtgtccttagttttggtggttttaactgcctatgtaaacaaaacaacaagtcttgtaaaatcagttctatagtagtgttctaaattagttaagctttaaagggaaaa

SEQ ID NO: 81787 - DNA, 245 bp, Zea mays
  Clone ID: MRT4577_174604C.1
gagcgccgccgcccttcgcacagttgcccgggttacgctttgccggcgacgcgcgctcagcgcactcccagcatatcggtcactttacgattgctgccgttggtaaggttgagcaaacgttgagttccgtctgcgaccatcgctgacggagcggaagatctcctgtacgaggcctataactttgaccaaaagatggctttgtcgtcgtctagcagctctggtttgaatctcacagtcactggtgt

SEQ ID NO: 81788 - DNA, 600 bp, Zea mays
  Clone ID: MRT4577_174605C.1
agaaagggcactcaaacataaacaattctgaatagtccttggtactaaatctgtccacgaacttgtaccgtatatacatatatcttacaagcttctagctcatgcatgagctcatgttaatggacagggtcgtcgcgctaataaattttcgtttttcatgatttcgtcaacaaaagagtcgaggtttctgtttgctgcacatctggccccacccatcacgactctttctctcatctcatccacattcacctgcatacgccttccctcttctccttccataatcctctcgatgcaatcctccacgacgtttctgttggtgctaggaagcctgatccccgtctcccacaccttgacgatgtaagcgcagttgatgaactggtcaccggacactgggtagcacagcagacgcaccccgttctgtatggcctccagcgtggagttccagccgcagtgcgtgaggtagcagccgacggccttgtgccggaggacgtcttcctgcggtgaccaagcgacgatcttgccacggccggcgaccgcctccgcgtactggctggggagaccttctcgccacgacggctcgtccttaagcgcccacaggaa

SEQ ID NO: 81789 - DNA, 318 bp, Zea mays
  Clone ID: MRT4577_174606C.1
aaaagcaaaggtttgttattttacataaaaagggggccaaatggctgaaaatgttttttttttttcccctacaaattttacaaattccaaaattgattaaaggttcattctttaaccataacttttgaataaattgggagccaaattttccaaacttttttatttggagttttttttgttttttccggggccccaattttggtttgaagggcaacgggtccaattttggcgaccatatggtggactttaattattaccttggggattttttggctgaaaatttttttttgtgcttccaaccttttccgcttcctttta

SEQ ID NO: 81790 - DNA, 396 bp, Zea mays
  Clone ID: MRT4577_174607C.1
aagtcacacaccaaccaaccaacctgttttgactgccgatcctactgatgggggcgggggcacctgcaagttctacaggaggacattcgcttccattactgcgactgccgacgatcacatgaaccagtagcggaggcttagattgcccacgaccgcaataaatttcccgcatggctcgtacggccgcgtcctcgctcgtctcccgctgcctcctgacgagggcccctgccggcgcgccgcccgatgtcccctatgcgctgcgcaagacagtgcctgcagatgggatgcacaggctgttgccaggtgtccttcacaggttcagcactgcagcagcagtagaggagcccatcacgccgtcaagacatgtgaactacacaaagctgctcattaatggca

SEQ ID NO: 81791 - DNA, 554 bp, Zea mays
  Clone ID: MRT4577_174608C.1
tagttcgaaagggcgcccaatttctagttcgggtaaagaggtgtcgcaaggtgaacaagtgaagagcctaacaactggaactggtgaattaatttcacaatccaataatcaacctgttgatatcatgaagacaggagccgagcaaactatctgcagaagaggttaaagggttgccgtgcggactccagagctgtgagaatctaccccgaggtaagctcttagagtcgtagtcaaagaggacaccactccgtgacatcacatcaatcgtcaaggtggtggactatttcattgctattttatgcgttcttctctgaaagcgttgcacaccatcaccatttctgctaatgtctatttccattttgttgtatttggtgcatgcactgtactctataatatgatacagtgtggcaatgtttcatttgtgagtccttgtgttcagaatgcctggttagtggccaacaagataggttatgtagtaggtttggtaattggtattcagaatgttgagccttgtacactattattctataatacaatagatctgtcaatttctg

SEQ ID NO: 81792 - DNA, 498 bp, Zea mays
  Clone ID: MRT4577_174609C.1
tttttacatgttgaagtcgtctcatttctccctctaggagagaaggcataatattgagcctcaatactccgcggttatcattcgcggtgctctgccgactatcctaagatcgccttcgcttcctaaccatacatactgtctgtagaccagactcttcacattcatgtcaagcggctagtccagtcaaacacagccttctgcatcaagcttgcctagccttcttcgtgaatcgctcacaggacatgttctggaacgaccatatgacttgatcaagggtcacccatagcttgaagccagcgctgatcgcccaccatattttgcctggaacgggtggcctgaacagtcttccacaccctttaacacaggggccaccccacctgtcacatgttcagcatcgcactcatgaaaagagacgacaccgacaggctgatcccctcttctcactgttccgaacaaaccagccaagatggcacgacagtcaatcgctaattgctggcc

SEQ ID NO: 81793 - DNA, 163 bp, Zea mays
  Clone ID: MRT4577_17460C.1
gcggtggactacataagcaaaacgagacgaggaagggcgtacaagcgacgaaatgattcgaataagcatagatcaggagattcccaaataggtcccccttttgaaatgaatgatgaatccatgaaacacagcaaaagcgattcccgtagtagcggcgagaaaa

SEQ ID NO: 81794 - DNA, 415 bp, Zea mays
  unsure (1)..(415): unsure at all n locations
  Clone ID: MRT4577_174610C.1
acagcagacccaatcgggtcaaccaacatgcatgtagacacacgtccatgagtacaaaggctgacgccaaacatgcagagggggaggatggcaaactgaaaaactctggttctttttctttttcacacaccacacaatacctatgtttgggagccagctcggcctcgcttattattggtcaaccaccaccacangctagatagataataatcatatccatgggcgtnaatcgatgtgaacaaaagttgtaggggtcgcacttggagctgctaccacaaccgcaggggtgtgcgggctcgcgggactccgccggggcctanacaaactcgggcgcgggctttttttccggggccccccccaggacaacggtagcctgcgcggaggtgcttgtttcccccaggtcagggtacttttt

SEQ ID NO: 81795 - DNA, 304 bp, Zea mays
  Clone ID: MRT4577_174611C.1
gttcaatcagattactattctcgactgggatgctgtcctgactaaacgagtgcgcgctgctggctcacttcccgctggattctagggtattgctatcaacgaaatgctaactccggcacctttgatggttgaggtactcccggaacactgcggctgaagcaaatccagcactattgtttgcattatatcggtattattcatcggacgggcatacgcgaaacagacatggttagcgctttcttataaggaaacgacgcccttcttgagaagataccgccacaacatctgaaggacatctcttgga

SEQ ID NO: 81796 - DNA, 776 bp, Zea mays
  unsure (1)..(776): unsure at all n locations
  Clone ID: MRT4577_174612C.1
atccgctccatcaaccggagcgtgctgcagtacgcgccctgctccgtcgccatcctcgtggaccacggcctcgcgtccgggtcggcgtgcgccaccgccgccaacagcctgctccagcgggcggcgctctacttcctgggtggcgccgacgaccgcgaggcgctggcgtacgcggcgcggatgccggagaccgggaccatgtcgctgacggtggtgcggttcaagctccggaactgggtcgggatgggcgggcgcgacgaggcgagggacgaggagctgctgcaggagttctggagcaggcacagggacaacgagcgggtggtgtacgtggagaagacggtggaggacgcggagggcacggcgtccgtggtgcgcgccatgagcgagaagttcgacctgctcatcgtgggtcggcgcggcgggaaagncaaaggtgacccggaggggtccacggcgctcaccagcgggctgtcggactggagcgagttcccggagctgggcgtgctgggggacatgctcgcctccgcggagttcgcgtccaaggtctccatcctcgtcatccagcagcagccgcccaagaaaaccatcgccactggaagctccgtcaatgattaatcatcgttccgccttgtcggccggtgtcaatttaatttaatttttgtaatcaatcagttgagatcaggtaggagggatccaaactattgtgatgtgaacagccctgtaatctcccgtttatgtcagtgactcgtcaactgtgaggaggacatgtaattctg

SEQ ID NO: 81797 - DNA, 173 bp, Zea mays
  Clone ID: MRT4577_174613C.1
gagcttatttgtcggcggccgccctttgcttttgggggggtttattcaaatattgtggggagaattaatagcaacctaaccataaccagcgtgtggtgaatctatgctcttatacacaacccactctagacaaaacccattttcaacaacccggtacccaaatcttatcactc

SEQ ID NO: 81798 - DNA, 452 bp, Zea mays
  Clone ID: MRT4577_174614C.1
tctttgaatcctaggccgacacgttggccggaccctaggcttttcccgttaggttcttcccaaaattgggcaaacgactcttttgcccaagttgtttttgttggcccctgttgcgaattccgagaaggaaacaggaactttccaaaaggttccggctttgaacgaagggttcttgccatccatgtccagaaggtctgtggctgcacaccttgggcataatctggaaataggtcttggtgctccacccatatacatttgcttgattgaaataccaaggggcagcagggttaaatataaacttgacaaaaaaactgcactgatcaaggggaaccgtgtgctgacttcatcagttgttaaccctcacaactatggatccattcctcgcacgctttgtgaggacagtgatcctaaggatgtactggtaataatgcaggagcctgttatcccaggct

SEQ ID NO: 81799 - DNA, 620 bp, Zea mays
  Clone ID: MRT4577_174615C.1
ggggcaaaaataaacccggtttttggaaaaaaaaggccccccgcccaaggaaagggggggggcccgaaaataaaaaacaaaatcggacccttttgttaaggggggaccctttttgttaaaaaaaaacggggggatcccaaaaaattttccttgaacccaaaaaaccccggcggggggccctttcccccttaaaaaaaggggcccgggttttcgggggtttttgttcccgccaaatggcccccccccttttggggggggggtaagggggccccccctttaccccaggggcgctaaatttgaaatcccgggggccccccccggggggcaaaaaaccaccggacccccccccccggggggggccaaaaccccaggccccttgggccttttgggccccgacccttttttggactccctttttttcccgcccccccccccccccgtatccggaagcccccccccgttttagggcccaggggggccccccaacttttccacgggaaacccaagggccaaaaggcttctttccggggaaaggccccccgatccccacaaaaccggccccccccctggggaaaaccggcgggcccccccacatgtttgggttggggaggggacccccc

SEQ ID NO: 81800 - DNA, 1007 bp, Zea mays
  Clone ID: MRT4577_174616C.1
gcacgagcggacatctcacccttgtcgcggcgtcgtgcactagggcgattgggcctcgagccggccgggaggccggttgtgtcgatctgtggagaggagacacgtcacgttacgatccccaacttaacgccgaccggaggccggagagaccggctcagcctcgctccgccgccgccggcgaccatgtccctggcggctatcttcgtcttcctcatcgtgtccgcgctgcagctgctcgaccgctacctcgacctcgccagaaagagcggaggacttagtgatgagcagatcaaagtgcggcttgaaatcaagcaacttctcaaggaggctgatcagttgtcaacgccgtccacatttgcacaagctgctaaactcaagcgcctggctgctgccaaggagaaggaactggcaaaaatgcaggaacatgaccttaaagggaagcaatccttatacgacaaatacacaaaatttttgttggttactaaggtcataatttatgctgtgctcgttctgtgcttttggagtactcctgtaactgcagttccacaacatcttctacagcccttcggaaaaatgttttcctggagaggtgttgatactgccaccggcaatgttgtggttggaatactcccgtggctgtttttgacctctcgggtcagcaagatgctgtgccagaaactgggcttcgtgcttgtgcgtccgtagcgcctttccatgagaaagtcagcaagttgctgcacctaaacaagactgctaactttgttcttcttctatatctttttataatcaactgtttcacttattgtccactatatactctgtccgttcttttttatttgtcgcgttttagtttaaaaattagcgggcgacaaatattcgagaacggacttttatgcatatgaatttgctgtgctatgtgctcaagcggatacgtgtataagttactagtagccgtgaatgatgtgtagtttttccaaaaaaaaaaaaaaaaaaaggcccctagggcc

SEQ ID NO: 81801 - DNA, 384 bp, Zea mays
  Clone ID: MRT4577_174617C.1
gtgttgtgtttttttttttttttttaaaaaacccggggccggcatttaaaaaaacctttgaaataaattggacatgaaattaaacacaccttaggtggccatgggttcgaccaaaatttatccccatgcctttgtttacccaggattgggtttttttattgggagcccactagcaaaggcaagttttaacgctttgcaacccaaaagaatatgggacggaattaaacgtttcccaaacgtaaaataaaaatatcaggaaacccttggggttcaaaccattccatctttggttttaagcgggttaaaaaagggaaatttttttccttggggggggcccttttttttcttgtgtttgccccaaataaaaaaatgggtttgccctta

SEQ ID NO: 81802 - DNA, 701 bp, Zea mays
  Clone ID: MRT4577_174618C.1
ccacgcgtccgcggacgcgtgggcagctatcaatccagtattccagatttccagcgccgcttccttttctccgtcgtgctctcctccgcctccggtcaccattaacctagccgccactctcctcggtgcggcggagcccgcctgcccggatcccggacaccggggcgacctcaagtgttccacatgcatcatgggacacgacgctcaccgctcgctatcgctggcggactacggacgactggagctggatttctgtggagaagtggattgctgactgctgtggagaatttcggactttgaagcctgaagtgtgaagtctgaaccatctgtgaagtccgaactgtatttttcttgtggatttgtgatgcaatgcaatggcacttggcggctgtcactggcaggcagcagcagcaccgcagcaggcttaatgccttgcagctttgcacttttgtatcttgtcgtcgtcgagtactcagtacattagtgtagtagtaggtagtacctgtcggctgtattggttcttgaattctcgctcctctgcataaggtttgttatctatactagattatgatcttaagatgttctgttagtagtaattcattaatctgcgttttgttcagtgagctgttgctttatgcctgtgcgctgttgctttctgtatatgcattttgttcttgttaaaaaaaaaaaaaaaaaaaaaa

SEQ ID NO: 81803 - DNA, 1534 bp, Zea mays
  Clone ID: MRT4577_174619C.1
ccggccgggcaaacgggctgcgtgcacggacatctcgcccttatcgcggcgtcgtgcacccgagttccgtggagacgagacacgtcacgttacgatccccaacttaacgccgaccggaggccggagagaccggctcagcctcgctccgccgccgctggcgaacatgtccatggcggctatcttcgtcttcctcatcgtgtccgcgctgcagctgctcgatcgctacctcgacctcgccagaaagagcggaggacttagtgatgagcagatcaaagtgcggcttgaaatcaagcaacttctcaaggaggctgatcagttgtcaacgccgtccacatttgcacaagctgctaaactcaagcgcctggctgctgccaaggagaaggaactggcaaaaatgcaggaacatgaccttaaagggaagcaatccttatacgacaaatacacaaaatttttgttggttactaaggtcataatttatgctgtgctcgttctgtgcttttggagtactcctgtaactgcagttccacaacatcttctacagcccttcggaaaaatgttttcctggagaggtgttgatactgccaccggcaatgttgtggttggaatactcccgtggctgtttttgacctctcgggtcagcaagatgctgtgccagaaactcggcttcgtgcttgtgcgtccgtagcgcctttccatgagaaagtcagcaagttgctgcacctaaacaagactgctagctttgttcttctatatctttttataatcaactgtttcacttattgtcctctatatactctatccgttcttttttatttgtcacgttttagtttaaaaattagtggacgacaaatattaacggaggtttatgcatatgaatatatgatatgaatttgctctgctatgtgctcaagcggatacgtgtgtaagttactagtagtcgtgaattatgtgtgttttttcccctttccctaccgcgggcatccctgtggtgtcgcttacctgtcaaactgcatccacgaggggtctgaaattgttcccttttgcagcgaagcagtggacagtggtgctgggcatctttcaattcgagaaagaggaaaccgttggaccatcacgtccgtcagtccatgcccgtgcagccgtgctcccatgcccctgctccagccaattagcgcttcgggacaatctcctttgggcatgtgcgtcagcaatggcgggttaacagtgaaagtaccagcagaacaccaggttctcggtctctccgagaaaacaatggcacgaagctcgaggcactacggttttctctctctctctttgcccttgcgtgaagaagaccacatggaggagattcttttgctctccgcctctcacttccttccgcactatcatcttcttctagaaaaccaggctaccttcaccaaaagccgttaaaggtctcctctaaaatttaaaggagatctttcttttccgactccttcaacagtgttctctaaatatagagtatattaaatctaaatgaaatatttcttctttagct

SEQ ID NO: 81804 - DNA, 415 bp, Zea mays
  unsure (1)..(415): unsure at all n locations
  Clone ID: MRT4577_17461C.1
ggggaaaggagggggggttggttaaaagggggggccctaaacnggaangaaacggagggagggggtgtttttttttttttttttttttttttgtgttggtgagggggggaaaaaaaaaatnatgagcacgggggggggttgatacnnnnnggggggnggcgggttttgggggtaaaaaaaaatctttccaaaaattaaaaaagggggggtgctttaaaggggaaccataaaataagttttgtttttgggggaattgggtttttgggttattagaaaagaagggtgtttgaagggttgtttttaatggggatgaaattgtcaagaataagctccttttcaagggggggttgggtaaattttaaaaacttttttaaatcatggaagaggttttttggccagcccttgtttgttcgga

SEQ ID NO: 81805 - DNA, 274 bp, Zea mays
  Clone ID: MRT4577_174620C.1
cagtgatgaagacagtgcagcagaacattgaagtcctgattgcagcagtgactctgcaaccttggataaattatttcaatctttattttgtacaacggagataacggcctataggattgttaagactgaatattttaaaagagcttagaatggtgcctgacaaatgagaaacaataaatactgattattggccataaagtggtattaaaactggatctcttttcttccatggcactactctcattttgaagtttatgaacggtacgacagtgta

SEQ ID NO: 81806 - DNA, 888 bp, Zea mays
  Clone ID: MRT4577_174621C.1
gccggccgggttcttcgacgttacgatccccaacttaacgccgatcggaggccggagagaccggctcagcctcgctccgccgccgccggcgaccatgtccctggcggctatcttcgtcttcctcatcgtgtccgcgctgcagctgctctaccgctacctcgacctcgccagaaagagcggaggacttagtgatgagcagatcaaagtgcggcttgaaatcaagcaacttctcaaggaggctgatcagttgtcaacgtaggcaattaaccttcctttcgctgtgactcagagtttccctattgatcgaagaatgatttccaactgcaaattactcctcgcttctttgcctgtatgtctgctgtaggccgtccacatttgcacaagctgctaaactcaagcgcctggctgctgccaaggagaaggaactggcaaaaatgcaggaacatgaccttaaagggaagcaatccttatacgacaaatacacaaagtttttgttggttactaaggtcataatttatgctgtgctcgttctgtgcttctggagtactcctgttactgcagttccccaacatcttctacagccctttggaaaaatgttttcctggagaggtgttgatactgccaccggccatgttgtggttggaatactcccatggctgtttttgacctctcgggtcagcaagctgctgtgccaaaaattcggcttcgtcctcgtgcgtccgtagcttgtttccacgagaaagtcagcaagttgctgcacctaaacaagcttctagatctttgtataatcacttgctcacttgttgcccacatttgttctgccgtgcccgtgtgctcaagcggatacgtgtaagaacttgattttttataagttactagtaactgtgg

SEQ ID NO: 81807 - DNA, 853 bp, Zea mays
  Clone ID: MRT4577_174622C.1
gagagagagagagaccccaggtcctcgctgtatctggcggaaaccggcagctatggctcgcagaatcggagcccgtggcccggcgcggctggtttcgagagagcgcggaggccggagaagccaaaccatggccgcccgtgcccaccggttgccggttgggcgccctctcccggctcccgataagtccacgggatcgggaccgcgccacatgccgcacatcacatccccaccccttccaacttccaaactcggcaaacccaacgggcaggccccgtgagccttgccgctctctcggagcactagcgtctagcggcagagaaaggaagattcgacccgatggacgatgtgtacatctcggaggagtacgtggcccggcggcacgccgagcggagggccgcgcggatcgccgcggcttcttgctgcggagaggagaccatcaaggcgcgggcggacagcgagcagaagaggtggtcgacggagaagggaagaaagcggcctgccgacggcggcaatgccgacacgaatgtcggcggcggtggcgccgcctgctggctggtagggcagcaggacgccgttcttagctacttctcggcttaggagactgctgtcccgccgggctcccggcccgctgcatgcgtgcgtcgagctaggcaatgcaagtagacatgcccatgcgcaattgtgtcgatggcaggttttggtttgtacgtaattattagtgcaggcgatttgtgtgtgattgttgggcgatatcaatttagctagctcatctaccttttttttagccggcaggtttaattcgcaagagtattgttaccacttctttcacatgtcaagaacacatctttgtgcc

SEQ ID NO: 81808 - DNA, 627 bp, Zea mays
  unsure (1)..(627): unsure at all n locations
  Clone ID: MRT4577_174623C.1
cattgggtacctcgaggccggccgggatacagtgtagatacctatgcgccgcctcctccccaactctccttgtcgtgattgacagctctgcggcttccgtccacacgtcaagcgagagcatggacacccaggggtagcttgctggtgcgatgaatgcgatcgggcatgaccggctcctgcggtcaggtgacccacgtcaaaggtaagatcttgtatgcacccgacacggactcatcttgaggaatgtaaaggggaccgcccgctatgctgacatcctcaccctgctcacacacaaatatgtagagcggataggctgctctcatacgcctactgctcgttgtgcgctcttgtttgccgtatcgtcgtcttcgaatcttgtgctatgtctaaacttctgtgaccctgttctacatactaggaatactcgcacgataagattgcaactactcgttatcctagtggaaaatgcaactagctggtgagagatgggtatgcttgttatatcatctactatacgactcatgctgttcatactggaaatgctctanactttgagcgtatctgtaagttccactctgggtcacccgaacgaggtactcatgcgctgatgatctaacttggtgatac

SEQ ID NO: 81809 - DNA, 564 bp, Zea mays
  unsure (1)..(564): unsure at all n locations
  Clone ID: MRT4577_174624C.1
cccagggggcgcccagcggaagcacccacgaccaccacggggcggcacgaacgcacacaggggcgcagcacccaccgcgcgcccgnggcaccaagcccccgcgnggagcacgcccagcngcgacccngccgagcnccgccccgacgccacgacaccggaacgggcggggcgccccacgctttttttttctgcaccctggagctccctgctcggaccctgccgagcgcctgactacagctccagctcgcggcgaccactctgctaagccaggattggcgagcctctgatggctgatttcaccagcccgagaagcttatactatgcgcaacctccctggaacgggcgtgggcatagccgagcgcccgacgaaaaggatggggggaggcggagggagcgggcgngggccgggggagtggggggggggtggggggcgggccgggccggggggggtgggcgcctcggaggggnagggggggcggggccggggggggaggggggggggcccggggggggggggggggggcgggggggggggggggggggccggggcgcgagcgagggggg

SEQ ID NO: 81810 - DNA, 261 bp, Zea mays
  Clone ID: MRT4577_174625C.1
aattcggcacgaggagtccctgcagctctcgctgttctttctattgtggtgttttgcttggttgtgcgtgtggttccttggcgtgctacctgcaacatagatccgcacggtgctttatgtttttagttctttttgcttggtttggggcatttgatttgtaaggataggtttagagcggtgcggcgggggagggaatggtaggggacaacgtttctgggtcgtgtaatttatctgcgtgctgattgaatcactaggagagag

SEQ ID NO: 81811 - DNA, 346 bp, Zea mays
  Clone ID: MRT4577_174626C.1
atcggccgagctccgcgccgctcccgctccgccccagcgcatcgctcgccgccacagcgtatcgcgacctcatcgatcaccttcagctttcaatcatggccgacgtctatgtctaatcggaggctgccgccggcgctcccaagtagaggacgttccgcaagaccagctaccgcggcgtcgaactagatgcgcttatcgacatgtcgactgacgacctcgtccagctcttcaccgcgcgctccaggagacggttccagagggctctgaagacgaagcccatgtcgctcatcacgacactgcgcaacgcgtacaaggatgctcctactggtgagaagttcgagccagt

SEQ ID NO: 81812 - DNA, 594 bp, Zea mays
  Clone ID: MRT4577_174627C.1
atgctaagtaacatggatatcatttttgcatgcacggtttttcaagtttcgagtggcctgcagttcaaatctgaattttccgaagaaattcaaataaacgaactaaatctactaacgattgaaaactctgttataattgtccacaaatgatacatgtaggtctacatagtgtaggaacataccacaaaaagtttgggagacaaaatctaaaaaataaaaatatgctttgccgagtgtctagaaaagacactcggtaaagagtcctttgccgagtgccgaccctcagccctcggcaaaggctgacgaccgtcagctctaggacggccgctgacggccctttgccgagcaccacaattgccaagtgtttgacactcggcaaacatctctttgccgagtgttatcctgtgccgagtgtcctgcactcggtaaaccacctcgttaccgagagcaggaattcgccgagtgcggctctcggcaaagccaccttttgccgagtgcccgacaaaaggcactcgacaaagcggccggcactcggcaaagtcccggattccggtagtgtgatggtgatgaaaggggagtgagtctatggtacat

SEQ ID NO: 81813 - DNA, 337 bp, Zea mays
  Clone ID: MRT4577_174628C.1
agcagtggtaacaacgcagagtacgcgggggaacttggtctgaatgacatggatacgtcctctgcagacgcggcttacaacacgaccaacacataatttttttagttttgttgtgccgaatgtatttgttacgctatcagtttactttgatgaactttcagtgtgtatactaatatcaacaacttatatttcctctgacgataaaaaaaaaaaaaaaaaaaaaaaaaaaaaaaaaaaaaaaaaaaaaaaaaaaaaaaaaaaaaaaaaaaaaaaaaaaaaaggaaaaaaaaaaaaaaaaaaaaaaaaaaaaaagacctttgggttgttcccactgttt

SEQ ID NO: 81814 - DNA, 273 bp, Zea mays
  Clone ID: MRT4577_174629C.1
acgaaatgcacagttctcagaatgattctgcaaatagtgatatagaaggttctttctttttcaagccacaaatgagagcttctcttctgtctcctggagtttcaataatgaacaacacgaagttaatcggcgccaagcttatgtgctatgatccgcctgacatatcacatgaccgcaaattgttctcaaatggtttctcatcaacagagcatgactttacaaatactgtactgctcaccaaccgaatggtgctagtgttaggagcacagctga

SEQ ID NO: 81815 - DNA, 798 bp, Zea mays
  Clone ID: MRT4577_17462C.1
ccggccaggaggtcatcccatagcgtgcggctcctcccgatctccgtcgcctgctcccagggtagccgattcgtgtttgtgatggattccttaggtcagcaaggttcacatcaaaagagatcaaagaaggcctcttcaacatctagggctgcagtaaattcaggtgttctagcacctccaattgctctgggtgttgctagcagtctaggaattgcaggcccactcatgggtgctggaactgcttctgcatttttgaggggaatgccacttgggggttcattctcgtctgaatcatctcctagcagctctgaatggctatatccaccaggtgggtttgtgaactctttaaggatgccatatccttatgctaactgtccagagaactcccattttgttggttgtccaagctctgtagggactccatcaccaattaatgacacagaagtacatgaaccaattgaaattgatgtcaatgacacacttgagcctagtagaactgacaagcgattgaactggtcacatgatgaagatgtcatattgggaatgtcctgtggcatggaagggaatgtatacccgtggtgatcaaggtgttcctacagtcattctagaagcagtagcttcgcatgatcgttggatatggcatgccttctttggagttcctggatccaacaatgatatcaacgtccttaatcaatcacctttgttcgttcaacaactggagaggggaagggcctcaggtgcagtacattgtgaatggaaggcaatacaacaccgattattaccttgcggatggcatat

SEQ ID NO: 81816 - DNA, 545 bp, Zea mays
  Clone ID: MRT4577_174630C.1
caggagacaagaaaaaaataacgccaaacttaataacccagtagcaaagggggggaaaaaaggcttacaacggaggggggaaaccacacaacggccggatagataagaaccggcggaaacataacacggtgggggccactcaggggagatcaaaggatagcagggggacaaaagcccgacgacgccgggccaggagagggtttagtactcggaaccctggggggcggcctcacccttggaaaactaagaaccgacctcctgggagtccttttggggggcagccagatcctcacgagcctgggagaactggcccttctccatacccttaccgacgtaccagggcacgaaggggcgcttggggtacatgagggcgaacttgggggcaatgggggagaaaacccccacaacactgggggggggggagaaaatgcacacgggacgctggaccttggccaggtcaccgccggggaccacgctgggagggtgggagttgattccgcacttgaagccaggcgggcaccaatccacaaactggatggggggct

SEQ ID NO: 81817 - DNA, 654 bp, Zea mays
  unsure (1)..(654): unsure at all n locations
  Clone ID: MRT4577_174631C.1
cttcngattcatcgccctcctcgccaagcccaagnattactacaagatactggaagtagattactatgcgtctgaggagacgatcaggtccagctatatccgccttgncactgaaatggcaccctgacaagaagcaggggcagggcgaagagaattcaacctccaaatttcaggaaattaacgaggcataccaagttctgagcctgaaccggcacaaggggctaatacttacgtgcaatggtcttggtataaggtactcagtatggtgaacacgctcaagggcccacagtttgcactcatctgcagtcttggagaatctgtaatgtatgccatgaaaataatttccgatggcatacagggaagcccttgattcccttgatctgaaaatggtatattgcagcagtgccatgtttgaaagccaaagattgacaacttgagttcatcctacaaggctacaacagagttgatttttatttgtcgatcagctgttgttgaatgaaagagcagatatgttcctgctgctccttgtatgtaacatactgttcctaaccatgcaatgtaagcgtttgtttgtcttggcgctttgtattgacgttatgtggacctgaatgtctgtggaaaaacagaagtggtgccttctgggtggtgccttct

SEQ ID NO: 81818 - DNA, 276 bp, Zea mays
  Clone ID: MRT4577_174632C.1
cgccgggtggctcctcacttcccgccgccaccctacaggtaaggaagaggaggaggggaggaggtcgcaccgtaagttcgagcacccgaggcacggctccctcggattccttcccaggaagcgctcctcccgtcaccgcggcaaggagaagacattacctagggatgaccgcaagaagccgtgccatctaactgcctctcttaaatacaaggatggggggggtgagaatgtaagagaggtgaagaagacagaaaccaaactgcataagaaggaaaa

SEQ ID NO: 81819 - DNA, 307 bp, Zea mays
  Clone ID: MRT4577_174633C.1
aggacgcgctcatggacttgttcgaggactactgcgtcacaccatggatcgctagactacagtgtatacccggtttgcaacaaaccttcttaagtgactatgtgattgatctactagtcctgcaacgctgaaacctttagcgagagaggcctcaagagagccccccgggtcatctgctcctgggctgctttcctgcatcaggccacccagactgctctgcagctttcagggaacgattcagaccacgtcggacaaaaaatggtcaagtgctctctgaaagacgcaacgcagctgaacaaacatggac

SEQ ID NO: 81820 - DNA, 196 bp, Zea mays
  Clone ID: MRT4577_174634C.1
ccggcacaaggggctaatacttacgtgcaatggtcttggtataaggtactcagtatggtgaacgcgctcaagggcccacagtttgcactcatctgcagtcttggagaatctgtaatggaagcctttgatctgaaaatggtatagtgcatcagtgccatgtttgaaagccaaatattgaccacttgagttcatccta

SEQ ID NO: 81821 - DNA, 391 bp, Zea mays
  Clone ID: MRT4577_174635C.1
cccacgcgttcgcccacgcgtccgcccacgcgtacggggtctcggaggtatctcggtcggaaagctggggcctattctttaggattaggaggagccgtatgaagcaagcttggatactgtagattcagaggggtggcaatacatgcccgcggcagagcgcaggagatggttttttcgttagattcctgccaccttgtttgcattgcccctgacgcgtgcagaaatgcttacctagccttccgatcgttcaactgaagagaagaatgagagatccgttctttagtggggagatatccaatcatcgatatgcgctccaaaatgtcgcagattggagaagacaaatgccgtgtttggatttagcctatgcgatgattcgcttcgggtagcacag

SEQ ID NO: 81822 - DNA, 1072 bp, Zea mays
  Clone ID: MRT4577_174636C.1
cattggtacctcgagccggccgggacacatgtcctggcccgtgacccgaatacataatgagaaaaaataaaaactctcgttcaagcccacagaatccactaagccacggcgtcaccgccacgccagcgccactgccatctcggggaagaaccgaaccgacccctgaaaagaattcggtgtgtcggaaggaagagcaaccctgcggctgcggtggtggagcgaggacccgggttgagggatgaggtgggagtgggagggcgacggtggtgaggcgccgcgggaggagactcctgtcgacttcgatttcatcgccctcctcgccaagcccaaggattactacaagatactggaagtagattactatgcgtctgaggagacgatcaggtccagctatatccgccttgcactgaaatggcaccctgacaagaagcaggggcagggcgaagagaattcaacctccaaatttcaggaaattaacgaggcataccaagttctgagtaatccagcaaaaaggcaagagtatgacaaaaaaggcattctatatgttcaagatcagaatgtagtggattacctgaaccggcacaaggggctaatacttacgtgcaatggtcttggtataaggtactcagtatggtgaacacgctcaagggcccacagtttgcactcatctgcagtcttggagaatctgtaatgtggggccagtggcacacaagggatgaaaataatttccgatggcatacagggaagcccttgatctgaaaatggtatagtgcagcggtgccatgtttgaaagccaaagattgacaacttgagttcatcctacaaggctacaacagagttgatttttatttgtcgatcagctgttgttgaatgaaagaggcagatatgttcctgctgctccttgtatgtaacatactgttcctaaccatgcaatgtaagcgtttgtttctgtcttggcgctttgtattgacgttatgtggacctgaatgtctgtggaaaaacagaggtgccgtttggttcacgaaatgtaacgaaatgtaacgtaaatggtaatggtaacgattcacactcg

SEQ ID NO: 81823 - DNA, 382 bp, Zea mays
  Clone ID: MRT4577_174637C.1
ggaatcccggggccgaccaacccttccggccgtggaacagccaataatggccttttccttttggcgggggcaaagaaggagggcgggaggagcagtcgccatgtttggcttaatccacaaaatcgaggagaacctccacatggggggcgaccccaaaagggaggttgagccccacaggagggccggggggcaccacaggagggaggagggggggcaccacaagaaggacggcggggagcttaaggaaggcttcgtggaaaaaatcaaggccaagatcaccggcaggcacggcaacaagtccggcgaccccaaggaaaagaaggccaggaaaaagaagagggggaggaagaaccccggcaggggccacaaccccaacggcggc

SEQ ID NO: 81824 - DNA, 1305 bp, Zea mays
  Clone ID: MRT4577_174638C.1
gtccgtaagctcggaattcggctcgaggagttgcgggggtaaaagaaaaaaaatctagatccttcccgggttcaagcccacagaatccaccaagccacggcgtcaccgccagcgctactgccatctcggggaaggaaccgaaccgacccctgaaaagaattcggtgcgtcggaaggaagagcaaccctgcggtggtggagcgaggacccgggttgagggatgtggtgggagtgggagggcgacggtggtgaggcgccgcgggaggagactcctgtggacttcgatttcatcgccctcctcgccaagcccaaggtaacgcgcgagcgcgacggagacgctagccccgccgccgttgtcccctcgatcctgccacggtgccactcgagctgcctgtattttagagaccatgtcacggaaaatcgagttccactttttctcattctcgcgcctagggttgtttggtatcgtgttctatgctaattgcgcatctgtgtttgcaggattactacaagatactggaagtagattactatgcgtctgaggagacgatcaggtccagctatatccgccttgcactgaaatggcaccctgacaagaagcaggggcagggcgaagagaattcaacctccaaatttcaggaaattaacgaggcataccaagttctgagtaatccagcaaaaaggcaagagtatgacaaaaaaggcattctatacgttcaagatcagaatgtagtggattacctgaaccggcacaaggggctaatacttacgtgcaatggtcttggtataaggtactcagtatggtgaacacgctcaagggcccacagtttgcactcatctgcagtcttggagaatctgtaatgtatgccatcaaaatttattttcatcccttgtgtgccatagaatggcatatatggatttttgtgtgtatgacaggtggggccagtggggatgaaaataatttctgatgacatacagggaagcctttgatctgaaaatggtatagtgcagcagtgccatgtttgaaagccaaatattgaccacttgagttcatcctacaaggctacaacagagttgatttttatttgtcgatcagctgttgttgaatgaaagaggcagatatgttcctgctgctccttgtatgtaacatactgttcctaaccatgcaatgtaagcgtttgtttctgtcttggcgctttgtattgacgttatgtggacctgaatgtctgtggcaaaacagagtggtaccatgctccttccccggaaaaaaaaaaaaaaaagggcggcgctcgcgatctagaactag

SEQ ID NO: 81825 - DNA, 224 bp, Zea mays
  unsure (1)..(224): unsure at all n locations
  Clone ID: MRT4577_174639C.1
ggggtatagactcctatagggcgattgggctcatcagagccggccggggcgccgtccttctcctccggctccggntccggccgcnccaggnccaggctcatccggaacgcccccgtcttcgccgcccccgccaccgtcgtgggaatggaccccancgncnagngnttgaagagnggnntnnngaagnnnnagaacgaggtctatgaaaagaagacgaagatgtt

SEQ ID NO: 81826 - DNA, 588 bp, Zea mays
  Clone ID: MRT4577_17463C.1
gctcggcagtcccccgctcgaggtattccattcgcagtcgaccgggtcctcggagcgccggagatcacgatgaagttcattgctgcctacctgcttgctgttcttgctggtaactccagcccctcagctgaggacttgacagccattctggagtcagttggctgtgaagttgacaatgaaaggatggaactcctgctgtcccaactgagcggtaaggacattaccgagctcattgctgcgggcagggagaagtttgcttcagtcccatgtggcggtggcggtgtagctgttgcggcagctgcccctgctgctggtggagctgctcctgcagctgaggcgaaaaaagaagagaaggtggaagagaaggaagaaagtgatgatgacatgggcttcagcctcttcgactaagctgcgcagtcatagagtattattttgggcagtggtaccagacgaaaaccagagtcatgtttagattttacccttgttttgtgtggaaaatactggaaagacagctactgtcttcatattttgtattcacccgtagattgctatgctggttggggtttactggtgacccaaagtttctct

SEQ ID NO: 81827 - DNA, 829 bp, Zea mays
  Clone ID: MRT4577_174640C.1
ctcccaagtcttcttctccccacggcttctctctgtctgcacgaagcgcgtccgccggcggccggccggatcttcatcttctcgcgcacccagggtggagcagccccaccatgcctggtcctcccctcctctcctccactaatgctgccccatcactgctcctcttctcccgctagccgtcagtttctcctccacttacgactcgcaaacgtctgtagtaaagccgccgccattaatgaccaataaaactccacctgcgtccgttagtctctcagcctcgctcctagcctataaatcgaacaccgcggatctacgtgcttgttactagcctctcttttcttctctcacgctgtcctatgtgctgctcacggagccgagccaccgccgtcatcatccttcgccgccgtgccgtttcagagcctatccgccgccggtgaagacttcctcgtgaccttggacgcccgctcttccactttcctgtgctcggcaacgccccggttcgcctcgacgccgccagccgtggtcccatccacctctgcgcagaagctgattgtgtggtagaggatccgaatacgtttgaggacgacacgcaggacacttttgagcaagagggtgatgctggagactttgatggagaatttatcgacgaagaattctaagtctaacgatgcgccggtcaacttcctgtggaagattgcccagttgtttatttccgctctactttgatgtgatacttgtttaagacactatgtctcagatgatgtaataaagttttatactctttttacgcctttattacattgtcttttgatagggccgcggccgctct

SEQ ID NO: 81828 - DNA, 239 bp, Zea mays
  Clone ID: MRT4577_174641C.1
gggggttcggcgcgaggtctggtcgtggtgcgttgctgcgtctgcgggttgtgtggctgttggtagaatgagggtggagcgatgtttccggtttgtttgttattttcccctttgtgttctgttgctgtggttgtagtttgtggggtgcgcaagcggtggcagtggcgctcgatgttggtgctgtcgagctcaggtggcttagtgaggaccacgtgtaggcgggtgccagcgaggaattt

SEQ ID NO: 81829 - DNA, 601 bp, Zea mays
  Clone ID: MRT4577_174642C.1
cgggccgtacatatgaagagctagctagtagtgagtgataaagtgggaaagtgaagcatatatagtgcgtaaaaacaatcacatgaattgctattaggcaccatatatatgcacttaattatattggttgaggagacctaataaatcatttgacctaccatgccaaaaaaaaaaaaaaaaaaaaaaaaaaaaaaaaaaaaaaaaaaaaaaaaaacaaaaaaaaaaaaaaaaaaacaaaggaaacctaaaaataaaaaataaaaaaaaaaaaaagaaagaaatagttctataaaaaaaggaacaaaacgaatgccaatgaaaaaaacttgccacaagaataaaggaaccggggcatcggatcatgcttaacatatgagaacgcgcaactggtactgttggttgagaatgcaaaacaaggggacattgacaccatagacatggtggcttttgcatggaacgttagtgaggcttttcaggaactaggagagccacgattgcactgctgatcaagcacattgttgatgaaaaatttgtgggatttaaccatgcaacgacaagttggtaaggttatacaatgttgcgcatggcacacttgaagagc

SEQ ID NO: 81830 - DNA, 218 bp, Zea mays
  Clone ID: MRT4577_174643C.1
ttgtgattattttactactttgtgagctgtcgaatctgtagttcttaatataatgatatttagctcttctacgtgtttgatcaaaaattctctagctcttttttattgttcccgaggaccagattcaccaatgtttcttgtttcatgtctaatgtggaagtctctcagaactgagtacttttgtttgaagaaagatttgttcagtccagctttgcaaa

SEQ ID NO: 81831 - DNA, 371 bp, Zea mays
  Clone ID: MRT4577_174644C.1
gcacgagcaggacaggaatgcctgcgcaggagcacgacttccagattgccccgccggtggcgtggaccaccgatccagcggcggctgccgcgacatgacggcgttctctctccctgccatcgcgacggccacacagttaagttttacatcgtctgacatgaccggtgggcgaaggctagatcagagcgcgagaagtttggaattggactgggcgtgatgttacatctggatcatgatggctagcaagcattatatcagttatatatgaatgacactcataacgtcttcatccacatgatcgaatcgaacgcgtcgtcctttcaaaaaaaaaaaaaaaaaaaaaaaaaaaaaaaaaaaaaaaaaaaaaaaaa

SEQ ID NO: 81832 - DNA, 492 bp, Zea mays
  Clone ID: MRT4577_174645C.1
ttgtcgcgtgggcgagatgttaaggttgcactcgaactatcatttatggaagcagttcaagggtgcagcaaaacggtcaccttccaaacgtctgtaacatgtgaaatctgtggtggagccggtgtgcctcctggaaccacacctgaaacatgtctatcttgcaggggttcaggattgtgttagttcttcctccggcacattgcttttgtctatccagtttaactagtgatcttatttatgttagtttttaactattgttgacagatattcatgcaaacgcacccttaaagtaccagctttataagagatattagatttgtcagcaggtgcaaaaaaatagtgtaggacaggtgtactctcaagcctcgtactctatgaatcatcatagcactaatacacctctggcacgaatatttgactgaggctgatgatccttgggcccttaatactttgaaccttaccatatgttatcctactagtcataaatgaatt

SEQ ID NO: 81833 - DNA, 2074 bp, Zea mays
  Clone ID: MRT4577_174646C.1
tcgaggccggccgggccgggaagcatagaacgggtcggcaggtagcccaattctacagcaaaaatctacagcactagtctttttcgtctcggtcgccatgtccttcaacgatgacgaaccgatcatcccttctccaaactcaggttcattcgtgaacacgaattaaaattaaaccaaatcatttttgctttgaatcgatttagtttgcgttgcattgctgatatatatcgatggagaagcaagaagagaatgcgtttacatccatatatgcggctgaaatattaacaatggagatgggaacggtgagatgcagggccgaggccgacgccgatcgtgcccgggagggtgcagctggtgagcaagaacaacaacatggctccactggaggagaatacccagaaggtgctgcttgagctgaccggcggcgactccaccagcgaccggtcggggcttgacctggtggcggtgctggacgtgagcggcagcatgcagggcgagaagatcgagaagatgaagaccgccatgaagttcgtggtgaagaagctcagctccatcgaccgcctctccatcgtcaccttcctggacaccgccaacaggatctgcccgctgcgtcaggtgaccgagtactcccagccgcagctgctgaagctcatcgacgccctccagcccggcgggcacaccaacatcagcgacggcctccagacggggctcaaggtcctcgccgaccgcaagctcagctccggtcgcgtcgttggcgtcatgctcatgtccgacggccagcagaaccggggcgagccagccgccaacgtcaagatcggcaacgtgccggtgtacaccttcgggttcggcgcggactacgaccccacggtgctgaacgcggtggccaggaacagcatgggagggaccttctccgtcgtcaacgacgtgaacttgctgagcatggccttctcccagtgcctcgccggcctgctcaccgtggttgtgcaggacctcaccgtcacggtggcgcgcatcgaggatgagtccaccatacagaaggtggccgccgggaactacccgcagacgccggacgcagacgccggctcggtcaccgtggccttcggcgacctctacagcaaggaggtgcgaaaggtgatcgttgatctcctcctccccgccatcgacagcgaccgtggcgcggacatcctggaggtgacctactcgtacaagacggcaggaaagctgttcgacgcgccgcccgccacggtgacggtgcggcgcagcggcacggctttcccggcggatgatccgccagtggacgtgcagacggaggaggcccggctgaagacggcgacgatgatccagcaggcgaggacgatggcggacggcaagaagctgggcgacgcgcgggacaagctggcggaggcccagaacgcgctggaggacgtggtggcgcagtccgacccgctgctggacgccctcaggacggagctgcaggagctactgaagctgatgaagtcgcaggacgtgtacgagaagcagggccggccctacgccatgtcgtcggagacgtcgcacgacaggcagcggttcgcggcgaggggcgacatcgagagcaatcgcctcttctcgacgccgcgcatggacaagtacctggagcaggccaagaagttcgacgaggacccggctgcgccgctgccttcggcggacaaggacgaggaagaggaggtcgccgccaacccgctcgcgccattggtcggccccatcaccttctacatccgggccgccgtcgaggcgctgcaggccatcgagaagctcatcaacaagggagccaattaatgcgatgtaatgaacgggcacgcagtcagatccagtcctgttttgtttacatggccatggccatcctcgtcatcccttcttctctctgctatatctcgatgaataaaatctgcgtgtattgtgtttttcgggggatttccacgtcaccttgctgccatgtatgcagccggataataatatatttaattttgctgaaaaaaaaaaaaaaaaaaagcccctaaaaaaaaaaaaaagacgagaaaaaactcgatgtacc

SEQ ID NO: 81834 - DNA, 365 bp, Zea mays
  Clone ID: MRT4577_174647C.1
taaaatgcatcctattctttttttccttcgtcccgcagcatcttaacgggatggccaagatcaagatcgggatcaatgggttcggcaggatcggaaggctggtggccagggtggccctgcagagtgacgatgtcgagctcgtcgccgtgaacgaccctttcatcagcacctactacatgacctacatgtgcaagtacgacactgttcacggacagtggaagcaccatgaaggcaatgtgaaggactccataacccttctctatggtgagaaggaggtagatgtgtttggctgcatgaaccttgaggagatcccgtagagatcggtaggcgctgaatatgctggtgagtcttctgttgttttcact

SEQ ID NO: 81835 - DNA, 255 bp, Zea mays
  Clone ID: MRT4577_174648C.1
gaaatcgattcccccgcatccgatctcttatgtgctagacaaatatacgccgcagcctcatcctcattcggtgaaatgtgagcggctacagtcgggatatctcttgactcatgatacgagcagcagaattcgatgaaggccgctcgatgatgggagaggtccggaccttcgtgggatacttgaaaattcaatgttctactcgactccaagggtagcaacaagaagtctagcactagtctgtcctccctgatgtac

SEQ ID NO: 81836 - DNA, 165 bp, Zea mays
  Clone ID: MRT4577_174649C.1
tggtaaaagaaagccaagactaccgtatggacctacgggacctacatctagaaggcgttgcaacacgtgcaaacacgactttgaggcatcgaaccaagccatctccattatcaactccttcatcaacgtcatcttcgctaacgttgcagctgattcctccaagca

SEQ ID NO: 81837 - DNA, 351 bp, Zea mays
  Clone ID: MRT4577_17464C.1
aagttcaaatagcaaacttaataacggtgcaagccatactgctgcacaagacctttgggtacaacacataagacacaacaggcccattaaaccaacgaagccacaaccacgattcatgacacacaaaccacagatgttaattagacgacgacattcatatagaggttcaccatatggcacgcatactacgcagatacccatacccagcaacggcttaaatgaaccatggcttactgaccaccgccgaggcggagcaccacgtggggagtgctctccttggggacgcttttaaacgctacggtgcgggcattctccagatgatcgccggcgaagatcagacacttcttgcct

SEQ ID NO: 81838 - DNA, 237 bp, Zea mays
  unsure (1)..(237): unsure at all n locations
  Clone ID: MRT4577_174650C.1
attaaaggagagccctccatttttatttntcaaacacaattccatcttttcaaattccttcccacaacaacataaaaccccactaattccccccactttacaaaccacacccattataattgtcatgtttctacactaacactacacactaactatactaattaaacttatcctatcaaaattaatattattttccaacaacatacaaatctctatattaaaaaaataaaccccata

SEQ ID NO: 81839 - DNA, 381 bp, Zea mays
  unsure (1)..(381): unsure at all n locations
  Clone ID: MRT4577_174651C.1
ttgtgggtgggggggttttttttaatccanntatatatttatnntaacaccaataaagtaacttttgaatacattccttacagcccacccttttttatttggttcttcactaaactccccattggcttggtttactattaacaaccaaccaaacctggaaactccacacaaaataattgcaccacccaaaaactgtaaacggattccattccctaaaatacaaccttttaactaaaacacccaacctttaacaccccaaaaactcacttaatccatacttactccatctattccaacctctatcaacaacaacaaaaaaaccacttttagagcaaaaaaacaacaccacggcaccccaaaaccttgacaaaatactagggg

SEQ ID NO: 81840 - DNA, 244 bp, Zea mays
  Clone ID: MRT4577_174652C.1
gccggccgtttcgaagatattcaaaaaacattttgaggtgtttcgggtgaagaatgccacaatggaattggatcgacggtggtgtggtgcccccactcaaagcagctgcagcttatcaccaccgcctcaggctcaggattgcacggctccgccgcgctcgaattccccccccctctctctctctctgctcttgtagctccttctgttttatcgttattatgtagcgacaacaacgacgacgacc

SEQ ID NO: 81841 - DNA, 647 bp, Zea mays
  unsure (1)..(647): unsure at all n locations
  Clone ID: MRT4577_174653C.1
tcgacccaacgcgtccgcggnacgcgtgggtnngacggtcgnagggtcgtcgagcgcgtctctagatagcatccaagacaaatagcgttgttggcgatctgaggcagctggtaggcagtctgggcttgggcgcacgcgagccagagagggagggctgggagcacgtcatctccaagagcagcgacgacgtctcctacaaggcctggtgcgacaagcccacggtagttgccaattgcgtacatgcattgcaacagatctgggctctagaagctgctaacttggtagcagaaagattgaggcattgcatagcaaaccactggatcaaagagtttagtgaatggccacagtgcatgttcttgagttgcaatcaaagttccttccatataataataacaaaatatttgacataatgaatctgttggaggatagacttcaacatgcaaatggagtcgttgttttggcaacaattaaagtttttctccattcccatgactgttgttcatcaacagcaagagaagaaggaagacaagtcagacaaaacagaagacgagaagaactgatgtagccatgttcatgcttccactgttgaaatgcatattcaacatagcttgctcagctcctatctgttgtttcaacgttgatttaaa

SEQ ID NO: 81842 - DNA, 611 bp, Zea mays
  Clone ID: MRT4577_174654C.1
tttttttttttttttttttttttattcatctaaatacagcagtgtgtgataaaaatgacaatagacctgtgatatagtatttcagctcattgttcatgtgactacaaactaaataaagtacagaatacacaagtaaatgaccggccttcttgatgaccttattcaacgaagagagagagatactttgacagatggctaatcgtgacgactatgggaacaaaaattgtgacgccaactattcactatccactatccaccatatgatgattgcatccgctgcaacgacccctgatgtgcctccggaataatcacaaggtgctgttctcttgttgctgccatagaacaatcagttgaagtttaacagcaaaactagagcatatcatggaagccatggccaaaaatctcactgtcaccaggaaactgggtggacgtactcccagtcaaaatttggatggccggtgccagcaagcatgcagctgcctcaactatagtttctgtagatataagatatcaaaaaacttttcatgcttagccaggatcatgattttgaccggacgcgtggggctgcatgtgaacatctgttatgtcttcccagtggttttttttttgat

SEQ ID NO: 81843 - DNA, 413 bp, Zea mays
  unsure (1)..(413): unsure at all n locations
  Clone ID: MRT4577_174655C.1
ctttggttcactgataatgacggtgcttctcattaagatgtccttttntctganaaaactgattatattggtgacttgcaggtagttgccaattgcgtacatgcattgcaacagatctgggctctagaagctgctaacttggtagcagaaagatgaggcattgcatagcaaaccactggtattttaattttacctattaatcaaatgagtttcaatctggcttggagccttttctattaaataatgccaatgtgaattttcctgagttctctatttttatctgcaggatcaaagagtttagtgaatggccacagtgcatgttcttgagttgcaatcaaagttccttccatataataataacaaaatatttgacataatgaatctgttggaggatagacttcaacatgcaaatg

SEQ ID NO: 81844 - DNA, 401 bp, Zea mays
  Clone ID: MRT4577_174656C.1
ccggggaagcatcacccctccaaggaccgcgctccagcgctacatcgatcagagacgaggaggcgaggacagatcccggaaaacaacgactattctaatggcgcttaacgcccattaacagcgccgcccctataagcccagagcagtgctgatcgcgcccaagacaacggacaagcaggcaaaaagccaaggccaggaaacgcgtcactcgccaacgccgcagggggggggggcggggacactacggctacgacccaggcaaagacatcggcggagaccgacaagatctacatcgtcaaggtgctgaagcaggtgcacctggacattggcatctcgcccaggccatgtgcatgatgaactgcttcatcaacgacatcttctagaaggtggcggtggaggcg

SEQ ID NO: 81845 - DNA, 257 bp, Zea mays
  Clone ID: MRT4577_174657C.1
ccttactaccgacaggttcccatttcgctaggctagcggctcgtggatcgcccgtcctcacctcctccagcggcgacagcttacgtagccgccttcttaagaatgttatagacgccgaccgaaggacccggccgccagacgcagcatccgttggtgaaggcgaagtacgcaggctccgcttctaaggacgacctagctagcccgctatgaaccacaggaaggccatcttacgggcgaagctacgtgagacgaatgag

SEQ ID NO: 81846 - DNA, 318 bp, Zea mays
  Clone ID: MRT4577_174658C.1
gttagtcgagtcgaagaagaatgaggaattttataactactcaaaaacgaccaatcctttcattggacataccttatttcggtatgtaaataacggatacgggaaccgaacccgagacctcagggttatgatacctccagtgtttccagactgctctactcagttctgtgggaccgaaaactggcggaccaaagaaaaaggtggaatacagggctctaccatgtctagacaaacaaagggaatagcctttttatacagaaaggagcggatagcggtaatcgatcccgcatctgtagcttgcaaggctaggggttatgg

SEQ ID NO: 81847 - DNA, 520 bp, Zea mays
  Clone ID: MRT4577_174659C.1
aggaagtttaggagggcaggatgtcgcaccgtaggttcgagcacccagagcacgggtgcctggggttccttccaggaagcggtcctcccgagggcggggatagggaaagacattggctaaggatgaccccaggaaggcaacgcttgcactgagttgcttggcttcgagcgtggcctgactgagggggggggggaaggcggtgaaacgacaaccgggggacgtgaagaggaacttaagaagttgttcccgtagattggagctgggaagtatgtgttccgtgctgcttttgttgagcttgaacccactgtcaggcatgagggcaggactggcagctaccgccagctcttccaccctgagcaggtgatcagggggaaggaggatgctgccaacaactttgaggagggttaccacaccattggccaggagattgttgagctatgccttgaacggatcaggaagcttgccgacacttgactggtttacagggcttgctcgcttcaacgctgctggcggagggaag

SEQ ID NO: 81848 - DNA, 1543 bp, Zea mays
  Clone ID: MRT4577_17465C.1
tcgcctttgtttagaccctggtaagggcttagaaacagagaaccattgagtatccagctcttcaatccctttaagttcaaatgatagcacatctaacaacagcgagggggcatcctcgcctgacactgcctgcccaacatcatccttcaaactagctgggctacagatttcgatagtcacagtgactgaatcaccaggtctgtacgtctccttatctgtctggagtttcaacgttggggataactgctgtttggctgctgaatcaaccttccggtcctcaaaccatccaacacttcttaagaaggaaagcccttgcggaattggaagtttcagtgacatcgtataggagtatcagaccagtaataagctctaactcatcaaatttccgccaatggccgggtgctcgacgccggcgaagatcccgaatacgaaagacctggtcacctggcgtagggcggtggcagcgtcggccgcccagtcgtcgccaccagagacaggaaacaccgaaacaggaaacaccgaaacagagcgcaagcgaggagggagacgagtgcctcagcctggatgaagaggaaggcccattaaaggcccaattaccacgaagcggatatgtatatatgtgcacactgcgaagcaatcctaaccgccaccagcatccgcctctcttctcagtgccagccgccgtgcgctcgctctctctgtccctcaaggccttcgccggcgaagagcgcctagtcacccaccaggatgaagtttgttgctgcttacctgcttgctgtccttgctgggaactccagcccctctgctgaggacttgacggccattctggagtcagttggctgtgaagttgacaatgaaaagatggagctcctgctgtcccaactgagcggtaaggacattaccgagctcattgctgcgggcagggagaagtttgcttcagtcccatgcggcggcggcggcggtatggctgtggcagcagctggccctgctgctggcggagctgctcctgcagctgaggcgaagaaagaagagaaggtggaggagaaggaagagagcgacgatgacatgggcttcagcctcttcgactgagctgtgtgggcagtcatcacatcagagtagtttgttttgttttgacttttgagtcgtggaaccagaggaaaatcgtagtcgttgtttggactttaacctcgttttatgttggaaactagtttgaaaggctcctactgtctttaatatttggtaattcagccgtaggtcgacattgcctccagagatgttatgaattggtcaggtttcctggctgctcactgttatgttgttacatgtcgacatcgcctcgttcatccttgcgtacgtgcgtggtaccatggaatctgttgataggaggccccagccttgtcgtgctctgaattgtcagcaactactctcagaggctggctgtcggtataaagctgttcgatatttggagcactttcatacgagtgaataagtttggtttagcttttaaaaaaaaccgttctcatttgaaaaattaacatatctt

SEQ ID NO: 81849 - DNA, 363 bp, Zea mays
  Clone ID: MRT4577_174661C.1
ctaacgcatggtctcaccagagtattagtgccttgcctcgtttatcctagggtctggagcaaactttggtgtgacagatacaatacagaacaagttcaaggtataattcaacacagggtactgtaccagtcatgcccataccaggtattgacattgttccttgttgagacattcctcgattaatttttgaccaaccaaaatgtttttactatcgactacacaactgaagttctgttcttcatcgtgctatacagcctgatttcagtctacatgaactttagcactttaatcgtgatcgagaagacgtttaccgtaacctaccaagtgcttggccatttgacaacatgcttgatcactaacctt

SEQ ID NO: 81850 - DNA, 261 bp, Zea mays
  Clone ID: MRT4577_174662C.1
ggcctgcacactgctgcagacgctgttgaatatctcgattcacgcaaatgcgttgcgcagtgtgtcgtgcccgtggacctgagcttcctgcctcggagtggccataacgtggatcagaccatgttagatgacctcacacattatattatagctctttcaactcaaaatggataagctaaacgtgcagctcttgtgcaagtcattttgacgatgtttctgaaatctgctgcattactcaatgccaaagctgaaacgatctca

SEQ ID NO: 81851 - DNA, 219 bp, Zea mays
  Clone ID: MRT4577_174663C.1
ggtcgtgcgcactatacaggcctcaacctctgcttttggctgcccaagaatagaagcaccataccatccgctgtcgatatcactgtccattcgctgagcacagaccttggcgaacctactccttttgccagagaaccggtacctcttttttattgaggggatgtgggagcactccctaattcacaggctactggtagcactcatccagggaagcgggct

SEQ ID NO: 81852 - DNA, 250 bp, Zea mays
  Clone ID: MRT4577_174664C.1
gtccatcatagacatcaagcggccgatagattcattaaaaccaaaactttattatgaccatgcatatattattggtcataccacacatgaaaatggggggggggtcactgcattattacatattttgattgagagagatggatagaggagatttcccaaaggtagggaatcaggagttgggcggaatggcaggggaaaccccacaggggtaggggcgggggctgggcacctggtccctgggccgggccgg

SEQ ID NO: 81853 - DNA, 1411 bp, Zea mays
  Clone ID: MRT4577_174665C.1
cacggcccgctcgaggccggccgggacttggcctacccggccaccgtgttagtctggcaggtcctgtgcataatccaccatctcgctcacaggctcgccgcccccgccggcaatggagggcgttcacagcctcctggcccggcccaactccgcgccgttcgccttctcaccgctgcccctccgcaggagccacaggccgccaccgcctggcccctccacctgccgcgccgccagccgctgggccgaccgcctcttcgccgacttccacctcctccccgccgccgccgacccgccagccgcggcctcctcttcctcctcgtccccgttcgtcccgatcttccccgaagccgccgaccgcgccttgcccctcccggtcgacttctacaagattcttggtgcggagccacatttcctaggcgatggcattcggagggcgttcgagtcgcggatagctaagccacctcagtatgggtacagcacagaagctcttgttgggcgacggcaaatgctgcagattgcccatgatactctcacaaaccagagctcgcgcaccgagtacgaccgtgcgctttccgaggaccgtgatgcggcactcaccatggatgttgcctgggataaggttccaggtgtgctgtgtgtgcttcaggaggctggggaggcacaactggtgttagcaactggagagcacttgcttcaggaccgtccacctaagcggttcaagcaggatgtggtgctagcaatggcattggcttatgtggacatatcaagggatgctatggcagcaagccctccagatgtaatctgctgttgtgaggtgcttgagagggcactgaagctcctgcaggaggatggcgcaagcaatcttgcacctgaactgctttcacagattgatgaaactttggaggagattacacctcgttgtgtattggagcttcttgctcttcctactgatgaaaaacataaaaataaacgccaagaaggtctgcaaggtgcaaaaaacatattgtggagtgttggcaggggtggtattgctactgttggaggaggattttctcgtgaggccttcatgaatgaggctttcttgcagatgacatcagctgagcagatggatttcttctctaaaacaccgaatagcataccacctgaatggtttgagatctatagtgtcgcacttgcccacattgctagtactagaaagcttggttaggttgctgagtgatgagctcctgaggtcgaaatttgtcatgtagtttgtattgatagataatttggtgttactattgctgggtcagatcctctgaaacgattgatattaatgaaggcggcagtgcatcactgcttaccaaaaaaaaaaaaaaaaaaaggaggtgggtacgttgtagaggaacgcaatcttactaacgcgtgcatg

SEQ ID NO: 81854 - DNA, 362 bp, Zea mays
  Clone ID: MRT4577_174666C.1
cgacccatgcacttttacgtaagctcggaattctgctttagctttcttttttctaacctacacaccccaggggcagatttacttataaatttgtagggctaccaaaccaacattatctcatatcaattatcacctcgatacaccactcaatatcatcatttgctctcaccaccaattccttattcaaaccaaagttccctatccaataactgtatatatacctcactgacctcttgataaatcaccttatagaaccccatatgaccattatcaactctacttatacataatgcttcttcatgccaataaaaaccagaaccttcagctactaaagactattctcagtgcaattccataatcat

SEQ ID NO: 81855 - DNA, 343 bp, Zea mays
  Clone ID: MRT4577_174667C.1
ccacgcgtacgcacacgcgtccgcccacgcgtccgatcgtttcaaacaatttgagtgggaatactgtacgcaacatgctacagagagagatatatatatatcatcagaacgaaggtttttggagcggggcttaccgtctgtctgaaaccacaggcggggatacatcacaagcccacaggcgctttatttgccatcgtagaccaaactttcagtgctgcctacatcaccaccatgcacacattgactccagccttattcacagctgtcggcctcacgacccctccaagttgtacaataagatccacaacaccttattttttttttctctcacgtaccctacgta

SEQ ID NO: 81856 - DNA, 249 bp, Zea mays
  Clone ID: MRT4577_174668C.1
gggacgcgtggctgcttacttttttgctactcaagcaccaataaacgaacagctcaattacaagggagtgccactgactaaggtgatccacgaccctcagtgctatgcactagaccagcctggatagatagcaagaggatgtatttcatacggtacctggcgctatcaggatggagctcactgcgagaagatttcgatcgctgatgacgcaaatggacgcagacagctactggcggatcactagggagg

SEQ ID NO: 81857 - DNA, 811 bp, Zea mays
  unsure (1)..(811): unsure at all n locations
  Clone ID: MRT4577_174669C.1
ccgtcgtcgacaatcgaatggaggcggagcagcaaaagcagcagccccagcgcccgcgccgaaaggggctgaagcggaagctggaggacgaggcatccgccgccgtcgccgccgccgccacatccgcagcagcatccgccgccgccgcctcgctcggcagcgcgggcgccgacgatgacaacgaggaggaggacggctcggcgggcacccccgagatctgctgccgccactcccacgcggctcttgcccgcgaggtccgcgcgcaggttgatgccctcgtccgctgcgcctcctcgtggcgccacgccgaccgcgccgccgccaagcgcgccacccacgtcctcgccgagctcgccaaaaacgaggaggttgtcaacgtgattgtggagggcggtgccgtggcggccttggtgtgccacctagaagagcctgctgtggcggcgccaacgcaggaggaacaacaactgcggccgtttgagcatgaggttgagaagggcgctgccttcgctctgggcctcctagctgtaaagcctgaacatcaacaacttgtagttgatgctggtgcattacctcctctagtgaaactcttgaaaaggcagaaaaatactacnaaattcgagggtggttaatagcgttatcaagagagcagctgatgcaattaccaatcttgcacatgagaatagcaacattaaaactagcgtcagaatgggaggtggaatcccaccacttgttcaattgctaggatccaggatcttaaggtgcagagagcagctgctggggccttgcgtactttagcccttaaaatgatgaa

SEQ ID NO: 81858 - DNA, 926 bp, Zea mays
  Clone ID: MRT4577_17466C.1
cgagagtaacggggttttcaaatttgaagttacaaagcgctcgggatttacgaaattcaacgaatttctagcgatttttcgttttcgcagacgaccaccggaaaaatgcgttcaaaacctgcacgtactaattcatcaaagaagattactacgtacgtgcatcgcttttgagaaacgagcagagcaacctgcattgtatgaaactggaaaccgttggccatggctactcagaagatcaaaacggtggcaagcttggccagtagctccttgagaacagcagggcagctggcgttgagcacctcgaagccatccgtcgtctgagtgaaggagccaaggttgccgctagaagagaggaaacggaagcacgcctccttgagcgcagggcaatggtgtcggtcagctaaaaccagcatcgtggccaccgagtccgcgcgtatgtgcttgcacagcttctcctggcaaaccagcttcatcctgtcgacgccgtacctgtccgcggcggcaagcagaagctgatactgcaccatggcttcatcgtcgtcgtcgtcgtcgtcgtcgccgctgccagtctccggcggcaacgagtcggtgtagatgaaggccagcagggcgctgaacacctgggcttccatgtcctcaaccggtatgacgacgccggtgcccttgctgctctccatcatctcgccgaacagctgcgctctgaacacgggcgaccgcgccgcgagcacgcaccggtgcgcggagaacgtctcgccgcccgcgtcgaccagctggaacgtgacgtccgcgccgtccttgcgcgccagcaggtcgccgaggtgccggtggaggtcgtcggacgggggcgccgcgacgaaggcgtcgccgtcgccggccgtggccgcggcgaagggcttgatggcgatgtcgcagcggacgcggaagca

SEQ ID NO: 81859 - DNA, 540 bp, Zea mays
  Clone ID: MRT4577_174670C.1
accagatactgatgcgccatgacagagcctgtgactgatgattattagctgtcaaacaagggtctttggctgcatgatttaaggaccagtcttgtttgttgatccgttaatatatgtttttctaactagccacatcccttggggggggtttctttagccttacttggacctgtcttccaatggatgacccatcttggggagcggaaagatggctatgagtttcctgtttccatttggccggaggctagatgccagggttctgtgctgtcaattcggcgggaacctgttcttgtcttgcgaaacccgggtgcgcgttgtcataagctggggttaagttctacttacgccctgtggtgtagcgtcccaatcctttgggactcctgtttggtacatttactagtcccagggggctggttaacacatttatacgtcagatggttccagatctgttgtaccgagacttacctataaaggtgccaatccacttttagagttggttcacatcttgggtaacatcatcagtaggggggctccgagcaa

SEQ ID NO: 81860 - DNA, 383 bp, Zea mays
  Clone ID: MRT4577_174671C.1
gagaatcttaaatcccctcctcacccctcctgcctcaccagatttgatgcacacacatgcaaatcctgcaggctgttgcttctcagcagggccaaaagctgttcctttggcctagcagtagctaccactagtaccaggagatcttcccgtcccaactcccaacatcttcgacagaggaatcagctgtgggagctcgtgaggcagagacgagctgacagacactcgtgtgtaagggcgggcagagacaagatggagaaggaacacatcaagatggccatgctgaggcaagagcaaacattcaggcagcaggtacaacttccttcctgctcacacacaggtagagccgtagagcagtacacattttactacttcataacgatgat

SEQ ID NO: 81861 - DNA, 274 bp, Zea mays
  Clone ID: MRT4577_174672C.1
ccttttcttttcctggttttaataacaaatctaagaggttattctgtttcaagacatactgctgcaaaagaataacgggcacagcggaggggtctcaaaacgttgacaacagcaacggggccacccaggccattgaaggcatacgaaccagccatgcttattagatcacaacatgcatagtagggtaggcacagagggcacctggcggcctacataactgagtacgggagctgcttcaagctaggactgctgactgtgcaacgcttacacatct

SEQ ID NO: 81862 - DNA, 609 bp, Zea mays
  Clone ID: MRT4577_174673C.1
tccccacagccgccacaccggtcctcctcccacctcccttctcgccgtcatgaccctccgttctgttctcctccaccgctccttcacgtcgacgtgctcgcaccgagtaccgcgtccacccccaatcctctttgttgcgcaagaccgcagaaggacgaacggcagcggtccgagcgccgcctcctccgccagcggcaacggtgaacacgggagcagcggccccgttcgcccgttccaaggtgaggaacggaccccctcgacctgtcctctacggcgccgctccccttcctccgtttccttgatcgcgggcggtgggaggatacccgggggaacagaggagggagttggacaagggcgtgaagaggcacaagtcaagcaggaggtgggcatcaccggaggagcacaaccgcatggggagcggaggaggtcgatgcagggggcgcaataggatggttggagagcacgcaacatcttgcgacacaagtcggctgctaagaagaggatgcagcagcgctggctcctcctctccccacgctgtcgccttcctgcgtcgttgttgccgccacggccttgctcgccatcgacctccccgagtgcttctctctgctg

SEQ ID NO: 81863 - DNA, 285 bp, Zea mays
  Clone ID: MRT4577_174674C.1
aattcggcacgagggcaaaatggaaggcaggagagagaaaagccatattggctggtactgtgaccgacagctaaatttttcattcttgactgacccctggaccccattgtctactccattccagctgaacgtatggatgactgtgctgttgtaaagatctaacgtatggctggacaggtaaactacagtcaccagccaaaagtatatatggctgcccgatttgcatgctaaagggggggggggggggggggggggggggggggggccgcaggggggccgggtacc

SEQ ID NO: 81864 - DNA, 244 bp, Zea mays
  Clone ID: MRT4577_174675C.1
gcacggacgaccatgtgcacactgatttatgaacgatgcagtgagatcacatgagccaagcactattctaacggtagcgctaggaatcaaccagagttatatgatatgtgctgatcttgattctaacagaaccttatagaggggtgtcagcgcgacacttactgaagaattaaagcgtgccgcggaatgcattatctagccagttggcgcgagcaaggggatatgtcattaaacacaagcagtc

SEQ ID NO: 81865 - DNA, 496 bp, Zea mays
  Clone ID: MRT4577_174676C.1
cggacgcgtgggcgacatctggcgcgagatcagcggcgccggcgaacgcgagcccggccgcgccgacgtgtacatagtcagctggaacgaccacttcttcgtgctcaaggtggagagcgactgctactacatcatcgacacgctcggcgagaggctctacgagggctgcgacaaggcctacatgctgaggttcgacggctcgtcccagatgcaggccgagggcacggacgaggtcatcgccaccgggaaggagtgctgcagggagttcatcaagagattcttggccgccatcccgctcagggaggagctggagatcgagagaaggggcgccggcggcgtcgacggtggcggcgcgccgcaccggcggctgcagatcgagttccacttcaccgtcctacaagacgacaacagatgaccagttggtgacccgacagcggcttggggatgttccttgcttcctccctgattgcagcactgtactaacataatgtaaatt

SEQ ID NO: 81866 - DNA, 863 bp, Zea mays
  Clone ID: MRT4577_174677C.1
ggcgcgccgtgtcgcccgcgtgctagggttcatcagttcgacgagcggcggcgtgtgggcacgtgcaggcagccatgtctttttgcgtatagggtactggttgctttactctatgggctggaccgctgggccaaaatttccaaattccaatcaaggcagatggatcgtccatgatttaatcggacgatcaggtttctggtcgctctgattacgtcgttaccgctgatcagcttcacagttacgatgggtcgattaatcatgattaatggacgatctgaaaacactgcaagtaactttgtaatacagactggtgcttgtggcggccacactgcacgacacatcgcacatctatctagttgaactaattcatgagctaccctgttgcactcccttaaaatctctctggaaggtgatggattgaaaatgccacaccactgatctgactccatcgatgccaaacgatacgttgacaccacttgcacaatccaactaaagtttagtcagtttctgcacccactccgcagcaagctgcaatgtttcttaggaagctataattctacttcctcagcacaagcacatacactcactaactggccatgttgaaagagctatctgtcaatcatgatgaaggattataataccaacacttaattcaagatgaaaatttctgtttgcagtgtaccacagacaattgtcatgtctattcttgtgttaaactgttaactagttgatctgttaaaaagaaaaaggtggtctcgatggccaatatggtatattatttctttttcctgtcttctggatgctactttgcagtccgaccagtttccaatgttgtttttcctaaacttcaatctaagtgatgc

SEQ ID NO: 81867 - DNA, 750 bp, Zea mays
  Clone ID: MRT4577_174678C.1
ccggccgggataaacaaccacccttcgtctcttgttctcttcccaaacacctcacccatctcagctctctcttatcttcaagacatgtccacccatctctcttctcggaaatccatcctcccccgccccgcccctccccacgccacccccggccgatctagacggggacgggttgaataattccatgtgtacgctggtgatgagccgacgagacatggccctccttgccgtcttccacagctttcttgaactgcatgccgccggctggtggatgctgcgcgcttgaattccggtcgatcccaagaggcgcagttcaataaagctgtgggaaactgcagagagaggccaccagccgatccgatcgatcggatcggatcgcggcaccagatctcgaccaccgccggaactgggcgggggcgaagcagatgatgcggcgattaattaaccggcgtagcagcggctggggatctacctgcatcacgtcgatccacccgcggtagatcgatgggaccgtcacaacaaggacaaggtacggattaggtttcttgtactggtaggaatggatggtggttatgaatgcatgtgttgaattccgtacacgtgtgtgtgagagagagagagtgatggtgcgtagggctggttaatttcgtcgtctcagcttctttcccgtgcaatttaatctcaacctatgtgcatactacaagaaaagggttgttgttaattaccagtgtctgaaattgtggcttttct

SEQ ID NO: 81868 - DNA, 521 bp, Zea mays
  unsure (1)..(521): unsure at all n locations
  Clone ID: MRT4577_174679C.1
gtgctcgccgggggagatcctgcaggagctgggtgacaacggtgctgccggctcactacctgtggcgtctgcggggagtgcgagtggcggcgccggtcaggatgccccggcaatggctgcggcagcggcgtccggaaggaggaagcggtggaggatgatgccagtgaagagcgaggaggaagtggagagccagcggatgatccacattgcggtggagcgcaaccgccgcaagcagatgaacgagcacctcgccgcgctccgctcactcatgccgccggcccacacgcaacggggcgatcaggcatccatcgtcggcggcgcgatcaacttcgtcaaggagctggagcagctgctgcagtcgctggaggcgcggaggcgttccccgcagtgcgctgcctacgccgtcgatcccgacgacgcggggccgttcgcggacttcctcaccttcccgcagtactcgatgtgcgccgtcattgcggccccagagaacactggccaccaccgngagggcggcgccgtcg

SEQ ID NO: 81869 - DNA, 2078 bp, Zea mays
  Clone ID: MRT4577_17467C.1
aagttatcgtgtactcatgggctcgctcgccctagacgaactccggcgaggccccgccgccaacgccggccatggcacgacgcgcgagcgccgggatcccgagggcgtcacggccaggcggcggggtgtcacgcgcgcctcataagggcgcgggcgtctgctgcctggctgtccgagacccgacctggtggagacggagtgccagaggtggaagagcaaaggcgtgaacataaagtacgaggtgagggggaatcggaaggggtacaaggccggcgcgctcaaggaaggactgaagcacgactacgtcgctgactgcgaatacatcgccatgttcgacgccgacttccagcctgactctgacttcctcctcaggacgatcccgttcctcgtgcacaacccggagatcgccctcgtccaggctcgctggaagtttgttaattctgacgagtgtctgctgacaagattccaagagatgtcgttggactaccatttcaagtatgagcaagaggccggctcctcggtgtattcattctttggcttcaatgggacagctggtgtctggaggatctcagcgatcgatgatgctgggggctggaaggaccggacgacagtggaagatatggacctggctgtccgtgcgatgctgcagggatggaagttcctttacgtcggcgacattaaggtcaagagcgaactgcctagcacattcaaggcgtaccggtttcagcagcacaggtggtcttgtgggccggcaaacctgttcaagaaaatgatggtagagattttagaaaacaagagagtgtcgttgtggagtaaaatctacctatggtacaatttcttcttcgttgggaaagtcgctgcccatacggtgacattcatctactactgctgcgcgatccctgtgtctgttctgttccctgagatccagatccctctctggggagttgtctatgtcccgacagtcataaccctcttgaaggctcttggcacaccgagcttctcgccgttacagttcctttcacctggtgatcctctgggtcctgtttgagaatgtcatgtcgttgcaccggattaaggctgcagtaagtggtcttctggatgctggtgggcgagtcaatgagtgggttgtcactgagaagttgggcgacaccagcaaggcaaagcctggcaccaatggatcagacactgctgtaaaggtgatagatgtgaagctaacagaaccgcttgttccgaagctagtgaagaggcgagcaagattttgggagaggtaccactgctcagaacttttcgttggaacctgcataatcctgtgtggtttctatgacctgctttttgcaaataagggatactacatttttctcttccttcaaggcacggcgttccttgttgttggttttgggtatgtcggcacactacctccttgcactgcataagctgtcatggacaactgatattacctgctcaccagaaactgagcaagcaaagctcctctctcctgcacatatcaaactcttgaattcaatgatagttgagcaatgttcccccatcagtcttggcctgacatgatccaccgccgagaaggttgttcagatatcgccgtcgttctcctgtcagtgttggtcagatttgagccaaaccattctttattgtcagaaggccattcaaatagtgtcaccattgcaaattttataataacggtgtttaccgaagcatcatgaaaagaaaaatgattggtgcagcagcatttcgttcgcattccatagagatgcagttcacatccagtatttttttttggaaatctagtgttattactcagagttcagatccataatggaagattgttggcttcctcagttcataacctgtgtaggcttaaaacttgtagatgtaaattgttattaacactaatattttttattgaatccgggtattattgaaatgcaagtgtagcatgcatttcttttcctgtaagaagccaaagatgacttctgagtaacacgtctaatcagacattttacttgatgtggcacatggaatagtggatctattttaactatgtagcagcaaccatttggtcc

SEQ ID NO: 81870 - DNA, 374 bp, Zea mays
  Clone ID: MRT4577_174680C.1
cacgtcactggctcgtataggtctacaacagcaacaaccggggtaccctgccctgacgaattcgccgcaagtccaaaggcaaagggcaaagcggaaggtgcggtgggcctcgtgctagcgttctccagcgcggctcaaatctatgctggcggtgagggcgtaggtcatggaggctcaccccgtgaacccgaaagcccgagagaagatatgaaagagcagctgcgcactaatatagactacagaaagggccagcgggcagaggcagagtacaaccacgagcggattttgaacaacgaagcttgagacaaataagaaccctaaaccagcgcagcgcaacagcagcacacaattgctacacatcactagaaccacct

SEQ ID NO: 81871 - DNA, 305 bp, Zea mays
  Clone ID: MRT4577_174681C.1
ggtttttgaggttctccggagataggttacttgggtcagcggatggagatggctgacatcacaagctgagtaccgatgcttcgtcggcggcctcgtctgtgccacggacgaccactccctaaaaaacggcttcataacctaccgccaggggccacaggccaagatcatgctttaacctgagactcaataagaccacagattgggccataggacattacccacggacagaggcatgcggaacgccatctatggcatgaaccgaaaggagctttacagacgcaacatcaacggcaactaggaccaaa

SEQ ID NO: 81872 - DNA, 701 bp, Zea mays
  Clone ID: MRT4577_174682C.1
gggtacctcgaggccggccggggcttccatcttccatcctcaaagcctccggttgcccgaagcagtcgcatctgctcttcgtggcaccgaactcttggagcaatcaacttttgaatcgtgtatggccaatggttaacgtttgacgagatgattgtatagatccgtttagcgagctaggtcgtcaatggccagttaatagatcatgtacgttgcactatgaactggaactgatgacttgtcgtttgttgtgcttccaatcggcagcaacaggacagccgcgcgcgtcgtggcgaaggctgcaggatggagcagcagacgaagacgacgacacagcaagagggcaaaggcctcgccaccatggagcggtcgatcgtggacaagccgccattcacgctagcggacctcaggaaggccatcccgccgcactgcttccagcgctcgctcatcaggtcctgctcctacctcgcccacgacctcgccatcgccgcggggctcctgtacttggctctggccgtcatccccgccctcccgggcgtcctcctccgcgccgccgcctggccgctctactgggcggcgcagggcagcatcatgttcggcgtgtgggtgatcgcgcacgagtgcgggcacagcagcttctcccgctacggcctcctcaacgacgccctcggcctggtgctgcactcgtgcctcctcgcgcccta

SEQ ID NO: 81873 - DNA, 361 bp, Zea mays
  Clone ID: MRT4577_174683C.1
accattcatctcctggctgcgctacctgtctttcaactaccacacgtacaggctcctgttgaaagtgcagtacgaccccgtgccggacatcctggcctacctgtccctgagaagggcgaaggccctgggcagctagcgcatcccttcacgcgcagtgactgaagcctgagctcgtggagcgggttggatcattgggtgtgtggggaagtttgtgctatattgcgctgtgaaaagatggaaatctttttttttattacttttctgtctttttcaactaagttctgagcaagtgccaacactgaagaacaaggatctgtagcgagtgtaccagagacaagctgtgctgtaatttttccttcac

SEQ ID NO: 81874 - DNA, 1553 bp, Zea mays
  Clone ID: MRT4577_174684C.1
cattgggtacctcgaggccggccggggcttccatcctccatcctcaaagcctccggttgcccgaagcagtcgcatctgctcttcgtggcaccgaactcttggagcaatcaacttttgaatcgtcaacaggacagccgcgcgcgtcgtggcgaaggctgcaggatggagcagcagacgaagacgacgacacagcaagagggcaaaggcctcaccaccatgcagcggtcgatcgtggacaagccgccattcacgctagcggatctcaggaaggccatcccgccgcactgcttccagcgctcgctcatcaggtcctgctcctacctcgcccacgacctcgccatcgccgcggggctcctgtacctagctctggccgtcatccccgccctcccgggcgtcctcctccgcgccgccgcctggccgctctactgggcggcgcagggcagcatcatgttcggcgtgtgggtgatcgcgcacgagtgcgggcacagcagcttctcccgctacggcctcctcaacgacgccctcggcctggtgctgcactcgtgcctcctcgcgccctacttctcgtggaagtacagccaccagcgccaccacgccaacaccgcgtccctggagcgcgacgaggtgttcgtgcccaagcagaggcccgagatgccctggtactccccgctcgtgtacaagcgcgacaaccccgtcgcccgcctggttctcctcgccgtgcagctcaccgtcggctggcccatgtacctggcgttcaacacctggggccgccgctactcccgcttcgcgtgccacttcgacccctacagccccatctacggcgaccgggagcgcgcccagatcgccgtctccgacgccggcgtcctgggcgtgtcgttcgcgctgtacaggctcgccgcggcccacgggctctggcccgtggtcagcgtctacggcgtgccgctgctggtgacgaacgcctggctcgtggtggtcacgtacctgcaccacacgcaccgcgcgctcccgcactacgactccagcgagtgggactggatgcgcggggcgctcgccaccgtcgaccgcgactacggcgtcctcaaccgcgtgttccaccacatcgccgacacgcatatcgctcaccatctcttcccggccattccgcactaccacgccatggaggccaccagagcgatccgtcctgtcctcggcgactactaccgctccgatagcacgcccatagccgaggcgctctggcgcgaggctaaagagtgcatctacgtccagcgcgacgaccagaagggcgtattttggtacaagaacgtgttctagctgcagagctgctggacgacgcaaaccccgagcggagccataggggcacagaaataatattatttgtggtcttgtacattttgttatatatttaccttgcacatgtcacaaataaaaaactggcatatatatataacaaaatgtatactatacgtatatatatgtatcatcttgtgttatatgttaaatgtttaagatgttttaaatgccaaaaaaaaaaaaaaaggggttctagatcgcga

SEQ ID NO: 81875 - DNA, 629 bp, Zea mays
  Clone ID: MRT4577_174685C.1
gccggccgggtcgggagccttctcggcttccaccgccaaatggagccggagggaaacttgccgtgcgtgcgagagtgggaaaccaggccacgctcctctcgcgcccgccaacgccgcgccctctaggcggtcgcccggatgtggctccggccgagccacggacgagcagatgtacgacggcgaatacaaacagacgggggactccgagcagaccctgcgccgccgcgaggggctcatggccgacgtccgataggtctatcgagaggagaagcctgcgaaataaaggtcgcgatgatgtccccgtggacgcatcctcgccgacgatgggtgactgcaccgcgctccagcatgagctccacgtgttgccgtggaggttacatgtcggtcgctccacccaccccactgtggaacttgcgggcaccacgcattctcatgaagcaggtctccatatagggtatgccccgaattgacgaggagagtctgacaagagtcttgacccgattcattgagttgcttacctggaggaccatccactactccaatttgacggtgcttgaacactctacttgattgcatcgagaacgtcacagaacactaaagcgatgtgtgaaaatgatgctacgcacatc

SEQ ID NO: 81876 - DNA, 1429 bp, Zea mays
  Clone ID: MRT4577_174686C.1
acccacgcgtccgcgatgtctcagtcccttcagaattagatggggtggtgcatatggaaaatcacaatttggagaacaataattccaagattgactacaggccatcagcacaagatgttcatgagtatttggtagatgcctatgagactcgagtggcttttaaggagaagaagaagcttctagcaccactgcctatcagtgatgatctgaaggcaactataacatcatcgaagcgagagtggggcacatcctggtggcagcaatattccatcctcttttgtagagggatcaaggaacgacgacatgattacctgagttggatgagaatcacccaggtcatagctacatcggttatcttaggtttactgtggtggcactctgatcccagcacactaaaaggtctagaggatcaggctggcctgctgtttttcatcgctgtgttttggggcttctttccagtgtttactgcaatctttacattccctcaagagagggcaatgctgaacaaagagcgcgcagtcgacatgtacaagctcagtgcatacttcttggccaggacgacgagtgatctaccacttgaccttttcctcccaatcatattcatggtgatcgtgtacttcatggcaggcctcaaagcaactgccacacatttctttctcagcatgttgaccgtctttctcagcataattgctgctcagggactcggattggcaattggagctactctgttggacatcaagaaggcgacaactctagcttcagttacagtcatgacattcatgctagcaggaggcttctttgtaaagagcgttccaccattcatctcctggctgcgctacctgtccttcaactaccacacgtacaggctcctgctgaaggtgcagtacgaccccgtgccggacatcctgaccaccacgaggcacatggacagcggtggcaccgaggtggcagctctcgtcgccatggtcatcgggtaccgggtgctggcctacctgtccctgagaagggcgaaggccctgggcagctagcgcatcccttcacgcgcagtgactgaagcctgagctcgtggagcgggttgggtcattgggtgtgtagggaagtttgtgctatattgcgctgtgaaaagatggaagtctttttttttaacttttctgtctttttcaactaagttctgagcaagtaccaacactgaagaacaaggatctgtagcgagtgtaccagagacaagctgtgctgtaatttttccttcacaacgattgcgtggttaaagtgattgagtataagcgtgagtttagattgccggcatattcttaggatgggtagctctaggacaaattctgttcatactcccaagaacgcgtacatttcatcaatgacattatacgagttcttcgcgaaaaaaaaaaaaaaaaagcggccctcgagcttc

SEQ ID NO: 81877 - DNA, 346 bp, Zea mays
  Clone ID: MRT4577_174687C.1
gggaatgaccctcgtttcttcccggcggaaaaaaaactacatataaagccttacacattcggatccgaccacgactagcttgaagaggggacatcccatgaatgaatataagctatctaggcgggatcatgacaggcataacttgagcacatgaaactctatgcaaacagccgcgtagttctcccaggccatatcagctacttccgtgaaaccatgaggaaggggtcgtccctgactacaggactcaacgtgcgaccgagccgggtccattatgaccctagacactctgccgaatgatccaccccatcataaatgcaccttcattgccgccgcacaagacaagcct

SEQ ID NO: 81878 - DNA, 409 bp, Zea mays
  Clone ID: MRT4577_174688C.1
cagatacaacggcagaggagcagcatgcgcctgatttaagccgtttatcagggcacgtggcagcactgctgtcgggcctgggggcggcgatgcgagctcgagcgcggagcggatggccactggtataaccgacggggacctggatgagctgaggggatccatggatctcggcttcaggttcgacgagcagaagggcggacaggacctgtgcgacaccatgcgcgccctggacttctatgttgacgacaaccgtcaggagtctgagcccaagatgtcctttgccacgagcacgatctgaaggccgtctatgtcggtcaccaagtccatgcccaacctctgttgcacgcgcacaccacgtgggcctggtgcgcactctagtcaccccttggagccatgggggattggcaac

SEQ ID NO: 81879 - DNA, 358 bp, Zea mays
  unsure (1)..(358): unsure at all n locations
  Clone ID: MRT4577_174689C.1
cntttcgatcgagagcgccggccatgaagctcttctgccttctcctcgtctccttttttgccgcggcgtacgcgtcgtcggagagagcgatcgcggtcgcgggcgccggcggcctcttatcggatccggagcaacagtgcgtgtacacggtgtacgtgcggacggggtcgatctggaagggcgggacggactcggcaatcggcgtgacgctgctgggctcggacggcacgggcgtccggatcgccgacctggagcagtgcggcgggatgatgggcgccgggcacgactactacgagcgcggaaatctcgacatcttcagcggacgcgggtcctttttttagtttttcccccccccccc

SEQ ID NO: 81880 - DNA, 526 bp, Zea mays
  unsure (1)..(526): unsure at all n locations
  Clone ID: MRT4577_17468C.1
ccggcacagaagctagctagcgcagccagaccagctagccagcatttttcgttagagcccgtccttctntcctcgcctctcgggccgtggccgttcctgtcccgccctgccgccgctcgccgcacttcacgggatggtagatgatagaagatccgcctgcgctcgtcctctgtcgcccgcctcggcaggccactcgtggacgctcgctcgcggagggctccggctctcggctcccacctagcggcttcctccgccgtcgcgtcccgccgtctggcgccgccttcggggcctgtcgtcgcctccttcttcgcctactacattcagcgagccggccgtggccggtcgtccggaggccgaggaagagacgaagcgggagagagagtgacatggctgcgcgcattccgatgcgtgggcatgtttttgattcgactcacctttagtcctctttttctttgttccctctctctccttaatttaacgaattgatgcatgccgctgatggtcttcctcctgatagagggattaa

SEQ ID NO: 81881 - DNA, 241 bp, Zea mays
  Clone ID: MRT4577_174690C.1
acgcggacgcgtggggtgcgtcgagcttcgccctctggattcagccggtatacagcgccgtcggtcgggtctccgaccgtcgggtgaatgcggttcaagacgttctgtagtgtgatcgagcgcccaggcccggtggaactacagctagaacatacgacgactctacatgatcataaaagcggccgagcggaacagtgatctggtggacgccatattgctgatgaggaccacgacctacatt

SEQ ID NO: 81882 - DNA, 606 bp, Zea mays
  unsure (1)..(606): unsure at all n locations
  Clone ID: MRT4577_174691C.1
gagcagcgcgccgagcgtgcgcaggacgcacggggagcacgcgcccgacccctcgcttctcccgcgccgcttcttgcccccgccgcgccgcccgttccggtagcgctcggcgaggtaggcgttctcggggggcggaacgcggtatatctggtccttctgcacctgcaccacgtacgtgtcgtgcgcgggcgtcgcagccgccgtcgcggcgacgggcacgagcggtgagccgaacgccgttgagaccgcggaggaggaggccggctcgggcgacgccggcaccgcgggcgggagggccctctccgccatgtgtagaggagggacgggtggtgatggtggtggcggaggcggggatggaactggcggagggcggagggccgagggcgtcncatcaggggtggcggggcccgcgcggacacggttttaacgatacgcctattattgggcggccacgacccggtcaaaggcctacgccaccaaccctgaggatggttcatcggtttcgcctgccgccggcgcggttgcatgcaagaatgcaacggcgttcccgccngacacggcgccggcctagcttggctgctgattagggcatcatggactgcaata

SEQ ID NO: 81883 - DNA, 314 bp, Zea mays
  Clone ID: MRT4577_174692C.1
gccacgcgtgggagcgaagaacagttttcatcacagcacgctacccgcactgaaatcctgcattgcacagcacacaggtctactaacacagctcgcacactcacgcgcaccaagcggacatcgatcaacatgaaatcttgctggtgaggctgcaaagctgagtgcagacccattctgtgtggacactctcagaacgttcgacaagatgttccggtccatggtgcaccctgctttgtcgattcttgagtctgtgcgacacacggttccctagtgcccgcattgactggaatgagactaccgacgcgcacgtgctt

SEQ ID NO: 81884 - DNA, 150 bp, Zea mays
  Clone ID: MRT4577_174693C.1
gaagagttggatgaccataaaattcaggtgactcctccaggcttccagctggtctttttaccctttgatgatgagagaaggaagatgccctttactggaaaaatcatggcaaatcgagagcaggtgggcaagatgagggctatcgttgag

SEQ ID NO: 81885 - DNA, 1450 bp, Zea mays
  Clone ID: MRT4577_174694C.1
accggcccgggatgtccaccgtacctacgcagctctctggcggcgtcggcggcgaccggggctcctcctcctccgccggcccccaccaccagcacagccaccacccacctcccccgccgccgcccaagatccttccgtatctgacggagaacagtgatttcatggtgattggggtaattgggccgcccggtgtaggcaagtcgaccatcatgaacgagctttatggatatgatgcgagctcacctggaatgcttcctccttttcctacacaaactgaggaaaccagattgatggggaaacactgtactactggtattgacatcaggatatctaatgagcgagttatactccttgacgctcagcctgtgtacagtccctctgttctaatcgatatgatgaggccagatggttcatccacaattcctgtccttaatggtgaacccttatcagcagacttagctcatgagctaatgggaatccagattggtgttttcttggcatctgtttgtaatatagtgttggtcgtgtcagaaggtatgaatgatttgtccatgtgggagctcatgcttacagttgatttattgaagcacgggatacctgatccgtccgtgttgacgtcatcagcttcccaagacaaggaaaacaaaaacgaagaccaaacgggctgcgaagactatatttccgatctctgtttcgtgcatactaggctgcaggggcaagatttttctccttcaaagttcatgcttctaaggagaactcttgagaagcacttcaactcatccacttttagagtcgggagctctaatgcaacgggtcatgcttctgattcgctggttccttcaagcacgaaagttgaagatttaacctccagtcggcaggacatatttcttcttcccctgagagggcacgacgactcgacaaagtttgagtatggaacgtactcgtgcatgctaggcatgatccgtgatcagatcctgtcatggccggcgaggtcattctcgaagaacctctcggagcgtgactggctgaggagctcagcgaggatctgggacatggtgaagaagtcccccgtcatctcggagtactgcaaggcgctccagagctcaggatggtttaggaagcaaccgtagtagtgtctagcagctacttgttgggatgcgcccgctttggccggcttggaaaaccagagaatcgccatcagatcaaatgaattcgcttgctctgttctgttcaatcagtcgactctgatgagataccgtgcatgtgtttgttagtttgttgggctttgtgtaatgagctcagagccagcgacagcaggtggcagtcaaaaaaaaaaaaaaaaaaaaaaaaaaaaaaaaaaaaaaaaaaaaaaaaaaaaaaaaaatgcgacgtctcataaatttcatcttctaaaaaataaaaaaaaaaaaaaaaaaaactcgaggggggg

SEQ ID NO: 81886 - DNA, 444 bp, Zea mays
  Clone ID: MRT4577_174695C.1
cgcagctctctggcggcgtcggcggcgaccggggctcctcctccaccgccggcccgggccggcagcacagccaccacccacctcccccgccgccgcccaagatcctcctcgccaagccgccgctgccgcacgcctcgtcctcgggcgccgacgacgacggcgggaccggggccgctggtggccgcgcgcgccaggcgccgcagccgggttcgctcagcctcgtctccgacgcatgggaggcccacaccgacaagatccttccgtatctgacggagaacaatgatttcatggtgattggggtaattgggccgcccggtgtatgcaagtcgaccatcatgaacgagctttatggatatgatgccagctcacctggaatgcttcctccatttcctacacaaactgatgaaaccagattgatggggaaacactgtactactggtattg

SEQ ID NO: 81887 - DNA, 975 bp, Zea mays
  Clone ID: MRT4577_174696C.1
gggacccgtttttcccctgtatccaaatagtttacaataacttggcttttgggacctggcagtaatgcaataggttgaatggatgttccgatacatttcttatgcctgtaggtttttggttcaggatctaagttttcacctattgacctaatttcaaagaaagattgagctgcagttctagctttgtaatgattctatcccaatcccatcatacttgtttctcccaccacatttttctgtattttacagcaacttggctttcaggacatggcagtaatgcagaaggctgaatggcagaaggctgaatggatgttccaatacatttatgcaggttgatttatttaagcacgggatacctgatccgtccgtgttgacgtcatcagcttcccaagacaaggaaaacaaaaacgaagaccaaacgggctgcgaagactatatttccgatctctgtttcgtgcatactaggctgcaggggcaagatttttctccttcaaagttcatgcttctaaggagaactcttgagaagcacttcaactcatccacttttagagtcgggagctctaatgcaacgggtcatgcttctgagtcgatggttccttcaagcacgaaagttgaagatttaacctccagtcggcaggacatatttcttcttcccctgagaggccacgacgactcgacaaagtttgagtatggaacgtactcgtgcatgctaggcatgatccgtgatcaggtacagatgctacgctgaggaagttagctcagtacaaaaggaatgttcagtagagagttacaaaccctaggccactattcgaaaacgtggcagctacatgggctgggtttaggctctattaaaatctaaacatgggctgggtataggttctatcaaaatctaacacagcattttattatgtaaatgaaataagtgtgagcaagtcatccctgcctaaacactagagtgtcatgcaaacattgttg

SEQ ID NO: 81888 - DNA, 334 bp, Zea mays
  Clone ID: MRT4577_174697C.1
ctcactcgtgcgctcacacgtacctggattcaccaatctgtatcaccttttcggaccgggggagattctccgtggattaggcataactatctgaccacacatctccctttataagggctattagaatgaccctaacagaaagatcaactacgactccagcatgctttagatcaaacaaatcctgatgcacgtaaagaacttaatcttgtaagtaaaattcaactcataacgatctcactactactcagctcctactgcataatgagtgctacgcaatttgatactcacttaccttgattgaggacgcatatgcattacacaaaccccccttttt

SEQ ID NO: 81889 - DNA, 327 bp, Zea mays
  Clone ID: MRT4577_174698C.1
cacgccacgcagccacgcgtccggcaaaacatcgcgaagataagggttcaagcagttcacgcaggcaccatcttgacctgtacaagcgccgtattcactggtggtatatgctctaatggaccccactacgagctgggcagcccgttggttgagaattggcatgttcattcctgggcgctatgcactcgctgtctgtgacgaccatccacattagtatcaaatggtcaaggagggtcatccagctctaatatggaggaccggatcctgcttgcatgtgatcaccacgtctatgatggtgacttgcggctgaagcatgctagataatta

SEQ ID NO: 81890 - DNA, 339 bp, Zea mays
  Clone ID: MRT4577_174699C.1
attaaatgggtaaatggaaaaaaatttttcacattataaaaacttaatggtccccttggggggggttgttataaatgcggttaaaaccgtttatgaactttttggcccccgggaaaactgaaaaagtagaccgggtttaaaaacttttggtgttaggaagtggtgaaaaccgggggtagagcgggcatatttaatatttgggatttaaaaatattagcggttgcaccggggaaaaacgaaaatttccagttatctttgttcaaatatgataaacgtgaaaaaaaaaaaacccgcaattttctgtgctgtttgaaaaagaagaaaaatgttcaaattggg

SEQ ID NO: 81891 - DNA, 476 bp, Zea mays
  Clone ID: MRT4577_17469C.1
acggggaaacggaaccccgtaaaggagcatgttaaacccggaaaagaaaacatggccgcacagtgggtcgagtttgcggaaatatcgaacaaccatagaggaaaaaccacactggatcccgagctaacaaggcggctttcccaggaaacaattctataggatcaaggaaaaatttgcaaggaagcacttccagaaaggccaaaacaggcggcggaaaaacactggaaagaaactttataggtcaagaagcacccacctggggccccgaacgaaaagctgaagacaacggacgaagaacacaccctctttgccaggcaacagccgggggaaaaatgccaccgcgaggaacataaatggcctcgcaagaaagccaccattcaaaaaaaaaaggcattgaacaaaagaatgcacccccaaaatggaccactgacgggggtggataaaaggggaccctaggaggcttccatcaaacccgg

SEQ ID NO: 81892 - DNA, 379 bp, Zea mays
  Clone ID: MRT4577_1746C.1
tgggaccctcgaggcggccggggtaaattgacgcagcacggcgctgcggcgcaggacggcgtcatgatcccgttggtgaggttctccgggggtcggtgtcgtgggtgagcggatcgagatggcggaggcggatgttgagtaccgctgcttcgtctgcggcctcgcctgggccacggacgaccactccctccgcaacgcctgtcagcacctacggtgaggtcctcgagcccaagatcatcctcgatcgggagacgcacaggccctgcggcttctgcttcgtcaccttcttcaaggaggaggcagatgcacaccgccatccacggcttgaacgacaaggaggtgcaaggccgcaacatacccgcctcccaggcccagtccc

SEQ ID NO: 81893 - DNA, 407 bp, Zea mays
  unsure (1)..(407): unsure at all n locations
  Clone ID: MRT4577_174700C.1
ctaagagaaaaggttcacccagagtttgttcgagaacgacgtgcaatgaagagagaatacgaagaatttaaggttcgcataaacacagtagttgctaattcatgcaaagttcccgagggaggatggtccctaccagaaggagctccatggcatggaaataatgttcgagaaccatgccggatggtccaggtcatcactggtaatgattgtgtcatggatgatgctggaaataagctgccttggttggtctatgtttcacgtgagaaaaggcctggacatgatcatcataaaaaagccggtgccttgaatgcattgattaacatgaaaggtcttgatgggatccaagaccaatatatgttgggactggntggttttcagaagacatgctttgtatnggtatgatgccc

SEQ ID NO: 81894 - DNA, 189 bp, Zea mays
  unsure (1)..(189): unsure at all n locations
  Clone ID: MRT4577_174701C.1
aaaaaccggccgacgcacgcgtccgtnacaaaatacactttatcatgcaattgtttttcaaaaacaccttaacaaacatctgcatgttctatacanaatgacatctcgtgatacaatattacaccaatacttgaataattaacatagtaaattctcaatcaacacttcataaaatgatgcactacatca

SEQ ID NO: 81895 - DNA, 640 bp, Zea mays
  Clone ID: MRT4577_174702C.1
ctgatttatattagaatcgataattcggcacgaggatcgatcgatgcttgataacatgttaaacgattcgaccagtaccaatccaaatcacttgataatgacggattttaacgacgttataatttaattggtgtacatgtacatcgtgtcagcttatatccgttttaaaccgtttgaaattcaataaatccaaaaaacatattaactaagagaatattcctaccattttctccacagccacgtgaccagtttcacagactcacagctcaaggaggtatttaatttgccaattttgcacctcacccaataactgtcgtacatataatatagtctaacatccaagtttcgaaaagaaggcactaaaattaatttaggatgttattaaccaaaaatcattcttcaacacattcttaaacgaggtatctaaatattccaacttcttaaatattcatatttagtctctagacttagggacctcttgtgcactccttatagcctatttcgtacgtcaatcataccgtaaaatcatttaccagccacgagtgatggactttgaataattgaagccgtggaaagaatgaatttaaaattctcgttggccaagtttgaagatgacttttttcaaaaaaaaaaaaaaaaa

SEQ ID NO: 81896 - DNA, 553 bp, Zea mays
  unsure (1)..(553): unsure at all n locations
  Clone ID: MRT4577_174703C.1
tacgttatcacctaacggctggtgatggcggatgcgtgcctgatagaagggaatgcgctcttgccgccggaggtgaactggctgctctacttgcggaacctgccgttcaacatctctggcgaggagatgtacgacatcttctgctagtactgatcaagccggcagattcgattggacaacgtcatagacacgcgcgtgaccgcttactttttctactaggacatttacgactccaagaacgccgtctaccacctctcctgcttcaacctcggcaaccgctaccttatcgtgctctactatcagccagccaagatgtacaataagtcggatcttaacaagaaggaggacgagatcaccaggctacacgagaagtaatgaatcaggtccaatacgcccagcccgggctacagagactgagcggccatngtattgtctctgcagcctcttgtatgtatgaagagcaatcaaaaggaacatatcggttgcgctgtgctgagttacatacagcgacgataattactctggcgttattcaggctacataacaattgaat

SEQ ID NO: 81897 - DNA, 335 bp, Zea mays
  Clone ID: MRT4577_174704C.1
gttgctcttgaggcagggctcaacatgcatgatccctgtcgctcatctggggtatgacatggatgatagagaggtcggtgacacgctgaacgattgtatgcacgctattgcctcgctcatgccctcgttccgctgtattttccctgatccttcctgagctactacatagactagatcctgactggaaggcgctactttttcgcacctcctgatgagaagaatgatagctcactacatagatgaaaaacaagcttatatctgactaaactaccaaccatgactcggataccgccacagctggtaatactctgaaagaagctatgatctgcctgatg

SEQ ID NO: 81898 - DNA, 348 bp, Zea mays
  Clone ID: MRT4577_174705C.1
caacaagcaacatatatagtggaatccagtttcaacaatagagcaacaatggcgaccaagatattgttcctccttatgctccttgctctttttgcatgtgttgctaacgccacaatatcccctcaatgctcacaagctcctatagcttccgttcatctaccataccttgcatcaatgacagcttcagtttagcaaaacccacctgttcatatctatacgctggaacaagtgactccagcagtgcacataccatcatcacccatgttgcacaatcgccaatcctatctttgcagcagtcattgtaccatactcatacggcacagcttatgctgatactcatgctaactg

SEQ ID NO: 81899 - DNA, 328 bp, Zea mays
  Clone ID: MRT4577_174706C.1
gtcaggcaagcttccaaggatgacttggtagccagtgatggacatgagagtgataggttagccatgcagattagcgccagccggctggatcatgaccttctggctctagacatactactgcaagatactgcccaactcgctggtgatgagacgttcgagaacaacggagatgtgtcacgagataactctgatcaacttcaagctcatgcacatgaacatgtacgatgacgaggacatgctgatcaacgacgttaatgagacgactcacgatgacatgaacgatactgacgacattcacataggcgactaggctggtgtcacgatcacc

SEQ ID NO: 81900 - DNA, 345 bp, Zea mays
  unsure (1)..(345): unsure at all n locations
  Clone ID: MRT4577_174707C.1
ctccgaccacttcacctgcgatcccgctactattacccaccctatcctttgacgtcccgatgnnnnatgaatagcttacccgcatgctgtccatgagggactacggtggcaacggtggcgcctactacgagtggagcctcgccgacctgtctatgctaggggtcgcctccatcggaccagccaagctttctgtatccgncggtgggctcgcgctccgcagctactgcgactgagtcaaggtcgactacttccttgaagggactggcacctgcggtatggtgctaccagaggcgacgaaggagaacgtggtggaccggaaggaaggcgacgctctagcgctgccct

SEQ ID NO: 81901 - DNA, 319 bp, Zea mays
  Clone ID: MRT4577_174708C.1
aaaacaattcgggatttggatggaaaacaaagttgagttggttttactactttacataggccccagcctaaggcccttatttttccaacccccgattggtccccaggcccaaaattttaccatctccctcacagggacctggggcaacaaacctcgggggggctttgcttttttgaccttaccataaagcgctttgtccccgagccattgggctccaccttcccaagttttatcttttgcaagcccttatgccccactccctcattttcattttaaatataccactgttgcaaatgtttgcaaacccttttattttctt

SEQ ID NO: 81902 - DNA, 629 bp, Zea mays
  Clone ID: MRT4577_174709C.1
aaactctcctatacagatacctacgcaaatatcaatcagttacaaagacctgcgccgagccctcctcctcaatctgatcgttcagcactcatgagagatccaccgacggactggcctcccgctcgccgcgcgctaccttgctggatgtgtcctcctccaccacgaccatctccatgatgctgcctcccacgctgcagctacacgtcaccacacatcgaaaatacactaccctcgctctcactctctgcattgctctcgtgcacgccttacctgcatcgccctaccgtctactccatattatactcctgttgcataacctgacgacattcctggaagccacaattcttacatggatgctcccggccaacatcacgattatgtctgtctggacattcagctcaagcgacgcctgctcccacctatacatgtatgatataccgatatgcgtattaattaaccatgtcggataaccccaatcaacgctctgttgcaatatctacaacctgtgaggattcaccaccatgaaaatatatattgtgtgtgtacggcacaagattgagcggggcctctatatccctcaagaaccggcatgtgctcacaataatgaggtgtatatgtccaaccccacc

SEQ ID NO: 81903 - DNA, 539 bp, Zea mays
  Clone ID: MRT4577_17470C.1
atatgaataaatatccatttttatttgagtcaacaaaaaaatgaagacttcaaatcttctgtcaaactgtcataacatatatgatacggaagtcgtacccaacagccgaacacacttagcaagacccactttctttccaaatcagatctgcatcttctaccagaatgtcacaaaatattaacggcccgttaccagtcgcatgtctgtcttacatgaatgacacccgatccgtagacaacgtacaacacacctacgaacaagatctatccttgccgaatcagatttgcatcaagaagcgtatccagtgtccatgatctgcgtagcgtcatgaaaggtaataagaccataacaaaaccattgtccacattccaaggacattcgcttctggataatgcaatctatacacgttagtgggtggggtttttataagacaacatatcttgtgcatcaacctgtgcacccagacatttagagacattcaattcgcatccaacacaagcgtagtagtttttttcttgaaaacaaaacacctacataat

SEQ ID NO: 81904 - DNA, 419 bp, Zea mays
  Clone ID: MRT4577_174710C.1
agcacatggtcaaaagcaccggctgtgctttagaacatagtgtgggtccgcttaacttgtaacggcgggtcatcctacgtggtgtgtggcgtcggggttctaggccgaaccatgctgcgttcggagctaggcgaagcaaagcatactgtctggctgctacgttgtatgatagagcgcacttgtgctgttagcctcgcgcgaggaggacctggcctcccgctccgccgcactcgacgaagccctagccgccgccgacgtttccacttccgagactctcgcagcgctcgaggcccgcgagtcctccattcccgcgcgcctcgctgaggcctccgccgcgctctccgccgccgtcgctgaggccgagactgaatccaccgggccaccacccaccgacatcaagggcgcgctccggtggatat

SEQ ID NO: 81905 - DNA, 416 bp, Zea mays
  Clone ID: MRT4577_174711C.1
ttttatctcgcgtttttttttttttcttttttctctttcattttttgtggtggtcacttattttttttcttttaaaagaacttgccaacaggcctttttattattatccattcaatcgaacaaaaacccccatttggggaaccttacattggggctccccaccaccgcttttattttggaccaaaaacatttaacttaaaaaaaccccaattaataggaatccaatatctagatcccgccattctaaatgggccatggatgcctggcccccccgtgaacaactgcggttaaactccctaaaggcctgagttgaacccccctttaccccggggcaagcatacctgcattcatgcatgcttgggccattcattccaaggggcttcctttcaaaaaagggggggggggcacgacctttt

SEQ ID NO: 81906 - DNA, 577 bp, Zea mays
  Clone ID: MRT4577_174712C.1
ggggggggggggaaagggcccacacccagtcggaaaccggactcatacctcaaaccacctacttcccgcccacaaccagtcgtaaaccagacgtgtccagattcagggactggggctaccctgtccacccccaccgctttttgacgcgtgacgagacgccgaggctctcgagatgctcactcgggaccttgtaaagctcccaactggtgaatagacctcgcacctccaccgctccactagctcctctcagcctaacggtcgccgccagtgatcacccccgtgaggaaaggtagtactcctctgttagacaggagtgggactctggcaggggggtcttcctgaggtgagggttgaggagtgccgggaccacaaggaggtcaccgaggagtagaggaccaacttccctacattcgtcgaagggagagccagtactggaactcgctgcagaaaaacgctttcattggacactggagtattggaagctcaccaagttcaaggggtgcagactagttaagactcgttttccgtaaagttcgaggaggaaattgacatttcacaggtttaaatagttagagag

SEQ ID NO: 81907 - DNA, 371 bp, Zea mays
  Clone ID: MRT4577_174713C.1
caattaaaaaactacaattttttcttgggattacacccttgagccggtacaaaatttgcacccaaaaaaagtatgggaaaaaggttttttaaaaagaaatggaaaaacatgggaataaccagaggagaacgaacgccttcaggcttttccacccgtttgcttcccaaaaaaaaaaaaggagaaatggcccctcatctatttcattatccgcatctggatggaactccaaacagttttagcttgagatattctggattacaaacgctggtgcacgcaagaaaggcttttaataatggttgaaggcagggcatacttttcttatctcttgggccttcccagggtttacccttagccttcccagcttgagcatg

SEQ ID NO: 81908 - DNA, 417 bp, Zea mays
  Clone ID: MRT4577_174714C.1
aatataatcaccatttctgttcacgcgatcgagaggcaaaattaagcatggtgtcccgaaggttcaagccgatcgagctgtgcgactccgaggggcggtcgcgccagacggtcgccgccgacctcgacggcacgctcctcctgtcccgcagcgcgttcccgtactacctcctcatcgcgctggaggccggtagcctccttcgcgcggtggcgcttctcttgtccgtgcccctcgtgtacctcacctacgtgaccgtgtccgagaccctggccgtgcgcgcgttcatctacgtcgccatggccgggctggaggcgagggacatcgaggccgtcgcccggtccgtgctccccagcttctacgccggcgacgtccacccggagggctggcgcgtgttccgctcgttcggcaggaggtgcg

SEQ ID NO: 81909 - DNA, 469 bp, Zea mays
  Clone ID: MRT4577_174715C.1
gcaaaaagcaaccccatttaagtttatataccggggccacacttcctattttacaacttaaaaatgctaacggggggatttaatccaacttgctgggaaaacccacaccgaggatgtttttttaaacacttttttgccacgttttttgtttgggctccaaacattaaggatttcaacatcctcatcgttccacaaaatcctaacaggggctgggttttttattaaaagcttggctactaggaaccccccaataaaccacctttgggacaaccccgactggttcccaaagaaacgggccctcttgggggcggagaaccccggccctttgtcaaaagcgattcccctctcaactacttttataactttggcaacaaggtctgggctgttcatcttggagcctgccactgggagctgccacaataatggtggccaaaaacccccattgggggatgaccaaggggtgttttta

SEQ ID NO: 81910 - DNA, 1329 bp, Zea mays
  unsure (1)..(1329): unsure at all n locations
  Clone ID: MRT4577_174716C.1
nnnnnnnnnnnnnnnnnnnnnnnnnnnnnnnnnnnnnnnnnnnnnnnnnnnccacacccccactttgtcccggcctttgttccggagagaatcatcgagtcggatagagtcctgggctccaggcgctgcgtactgaacgaagaggcgtgtctcttcgatcgacctccaggcttccagctagctagctagcgagcgatggcattgagggagatcgagtcgacgctgccaccggggttcaggttctacccgagcgacgaggagctggtgtgccactacctccacaagaaggtggccaacgagcgcatcgcgcaggggacgctcgtcgaggtggacctgcacgcccgcgagccgtgggagctcccagaggtggcgaagctgacggccaccgagtggtacttcttcagcttccgggaccgcaagtacgccacggggtcgcgcaccaaccgcgccaccaggacgggctactggaaggccacgggcaaggaccgcgaggtgcgcagcagcagcagcgccaccgccgccgtcgtcggcatgcgcaagacgctcgtcttctaccggggcagggcccccaacggcgtcaagtccggctgggtcatgcacgagttccgcctcgacaccccgcattcgccgccaagggaggactgggtgctgtgcagggtgttccagaagacgaaagccgccgacggcgacggcgatggcggcgcccaagacggcgactcctcgtccccgccggccgccttcaccggcccgtcacggccacgcgccgtgtcagagccgccggaccattccgcgccgccggcgggaggaggctactactacggcctcgcgttcgggccgcggcaggtggaggtggcgcagcagcagtgttacggcggcggcggcgccacggtcgccgaccaccaccacggcttcacgcgagacagcgggggcgctgcagggtttggcgcgacgtggggacgaggagtcgccggcggtgagtgcggggctggctacctcgacatggacggcgcctttgacgtcatgatggccggctgctttggcggtggagacatggatgagttccctcaagtgtggaggtgatcgattgggcaacgtcacggggttattaccatcctcttgaaagaggagaatacatattgttcttactggagacactgggtcagttaaatttattggttgtttaatacacatggggtttggctggtagattagaatgggtttgaaatgctgtgagctcgacaaggttcattgtgaacgtgaactatcaaatgtaaattaattgggaaatcctttcttttctatattatttagtgtatagagttaattgat

SEQ ID NO: 81911 - DNA, 275 bp, Zea mays
  Clone ID: MRT4577_174717C.1
gtggattctttattatttatttaaaaaaaaaccctcctgttgcaggggtttatcaaagagataaaaggtccacaaaccatgtttcaatcgaacaaagcatggaaacccccacacaatttcccattttcatacagttcagggtttaagacacaagaacagacatgtgggttgttacatggccatggcccaaccgttgaagccatttcttattgggtgggaaacaaggaacatgacttgcacactcctgtttattttggaaagggggggggggaaac

SEQ ID NO: 81912 - DNA, 1668 bp, Zea mays
  unsure (1)..(1668): unsure at all n locations
  Clone ID: MRT4577_174718C.1
gtaaatcataattttgatacttcacagaagcatctataaaggtatggatatcaaggaaagcaatgcatcaaagggttccaagcaattcctattaacctaatgcacatttcactagacttaagtgtgcgaaaagtatttaaaaacacaaggaaaggggttgcatgcaccggggcttgcctgggtaacactaggttagtgttgttagacgatgttcacttgacgatcatcctttgtttcggcacttgatcagatcatcccatcttcaggttcgtccattcgcttcaccatgcggagtagcccgcgcttggggttgacttgggtcgtcttccgcatcgtgcgattaattaacataccatttcaatatttgactcgaatccgcgaggttggtaatgattttccgatccagacaatttgtcgagcacttggcagctactatacgaacttcacgcacatcttcatccgacgctcagcaagtttctccataaccggctaggacccctttttttctgtatctccccgtcatacaccacatgacaaactctcaacaccggtcaaaagtaatccgagtaacccggcgaaaccaaactcaactcacagccggcgtggtcaactgaaacgacaacgccggagttagagaaacccgcgcgacatgggtaggggcgagctgggctgaatccgagctggagctcgcggcaacagggagcagggcgctggttccagggagcctattggtgttgccaagctgggctactactgctccaaagcatccatggccagagaagggagagaacagggaggaatgcgctgaacaggggagcacagccggaggagctcgacaacagagagcttagcagaggaacaacgccgagctgggtgcgagcagaggcgcggttcggcgaggtcacgacctgcgcgagcctggtcggagcaggacgtgaggaatggcgtagcagagagagagagcagcgtggagagagaaacgccatggggacgagcgcggtagggaacagcgccggcagaggaggagctcggtcggacgccatggggcgagcagagagctcggagcggagctgggacgacgcgcagaggaggagccggctgcgcgcggctgccaagacaagcgcagaggaaactccgaccgggcgccagaaagaagaggccgccggggcgaagctccatggtcaggagctgggggcgaactcgagcaggcagggaagagcgcgcgcacggaggaggaagaatacttggcgaccagcacacatccgcggcgagcagaaaccagggcacaggggagcgcgtagaaacttgaaaccgagcagagaggagcgccatggggcttgggaccaagcacgcaaggagcagggcgcacgccggcgagctggagcaccggcgagcagcaaccgagaacagggcgcggtgaccagggaggagcgctcgcggcagggaagaagaaaaccgtgctggagcagagaccaagcgtctgcagtacgtaggaaatggagaattggagatagacgcgctggatagcagaagaaatagcagaggaggcacgacggctatggagcttgggctagcggctgttgcaaggatgaggaagacggctgctgcattccaggataagaagcangaggtaagcggcgatggggaaaatctgcccggattaagata

SEQ ID NO: 81913 - DNA, 354 bp, Zea mays
  Clone ID: MRT4577_174719C.1
gctttgtctgtattatacataactggttcaagtggagcatgattagttgccaacatagatggacactctaataaaacagtcaccataaatgggaggaatgctcatgttttgagacctaacctatatgtaccatcaaaacaatattcaaattgcaaggaaggtgacctaacaattataatcgcgattgactagcaaccaatggccctgataggtgatattcaagtgtagagcgacattcaataatgctcggacaacggatgtggcatatctatggatgcaaagcacacttggttgattgcgatggaggtttcggatagtaagatattatatgagtgcaagagaactactcttacc

SEQ ID NO: 81914 - DNA, 1058 bp, Zea mays
  Clone ID: MRT4577_17471C.1
gcattggcaagattgataattttttgacttttgaaagggggtttctgcatggggatagaggcggccctgtttctgatccctcaagtcaccttggacgtgttgctggtgttgcaatgtttgttgacttggagacaagctcatgtgacataattaaagatgtaaacagcaagaagctatcaagagtgagatcttttgtttccggtgactgcgttgttatggggccatggattggacgagtgataagagcatttcatcttgtcacacttttattcagcgatggagcaaagtgtgaaatcctgttaagggattcggatgtactgaagcccattcctcctgttctttttgaagatgcaccttacttttattatcctggccaacgtgtgaggatagtcgatccgtcagtttccaagtcagcaacatgggtatgtggatcatggaggcccagtagagatgatggtattgtctctcatgtcaatgtagggctggtgcatgtgaactggatcacatctgtaaccaatgtttggggagataaatcatcatagtcttcaaacattcaggacccaaagaagctcaccttgctgtcatgtttcccttacgctaattggcaactaggtgatctggcgtgctcttatgactgacaacaatggatgcctctggatggattctggcaagtcttgtattcttagtgaagacagatgtgtgactgtcatgcacacatgtattttgaaagttatggttcagattgttctcaaacatttgttgttgccaagacaaagagcactgttgatgttctgtggcagaatggaactgtatctcttggtctagaaccccaggcattactccctgtgagtacccttggtgaccatgatttttggccaggtcaatttgtcctagaaaaactgactgtagaagatgctgcaagatgtccgcgaacggcaatagtgagtgatgtggatgcactggagcgaacagtaaatgtaaaatggattggtccagcacatagtgacattgtcagctatggaagtgaccctgcagtggagactgtaaagtgttatgag

SEQ ID NO: 81915 - DNA, 216 bp, Zea mays
  Clone ID: MRT4577_174720C.1
tttgggctgatttatgtgcttgtaaataacgttaatctatggtcagcaactcctaggaaacgaccacttcagtcatatcgatcggagtagcgtcccgttatttgtgagcattgagtccaccgggctcgtagtcgtcgacacagacgaagacctcgtcgagaacgattatgcatgagattacgaataatttggtcaagggagttcagtgagtactga

SEQ ID NO: 81916 - DNA, 464 bp, Zea mays
  Clone ID: MRT4577_174721C.1
cccccccaaaacttttttttgggttcaccaaaacaaaatttgggggttggattttttacacaattgcaagcaaagaacaaataaacatttttttggggcgaaactagaagtccccccccaaaaaaaaaatcctttaagccgggcattagaaggccagataagcacaaaattttgatttgtacaaataggggggggggtttgacaagtaacgaaggccccaagggaagttgggtgttatggccccacacccaattgactggtccaccacaccactaccttgggggtcccccctcttttttttctcggttaaaaaaaaattgttttttggaagctgggatttggataattactcggggatataaaaactggggcaaccctgtccgatagaccaacgctggaatccttagctccaaaagaaccaaggttggccctggaatccttagctccaatcgatttacgggggg

SEQ ID NO: 81917 - DNA, 420 bp, Zea mays
  Clone ID: MRT4577_174722C.1
ttttttttttttttttttttttttttttttttttttttttttttttttttttttttttttttttaaacccaacgtccccaacacacaattttacacattaaaatccgacgggaaacaaccttttccacccatttctttgtttggctggggggctttggtcccccccaacaaaaatgccaagtggttttcaagcaaaatcacccctgtaattttttaacatggggctcaggggggcaacattacaatacacaagtgggggtgcccgggttcttttaaacaacaaaattggtcagggcattaaaccctttttgtcgggtgggcaacccaagaataccccctttttttgtcacggggaaagctccacaaacgtttgcaaactttagggttttttttaaccgacctttattctggaacaaaaaa

SEQ ID NO: 81918 - DNA, 1403 bp, Zea mays
  Clone ID: MRT4577_174723C.1
cggacgcgtgggctgcttaaccaaagcggtctagagcaaattgaactgatggataagaagaccaaggttatagtttgtgttgctgctgcacataagttactgtcaatgatggctatgattattcattctagaaaaagaaaacgaaatgcaaggaggacagggattacctatgcaccaatgcatgaaagggatagaattagaattgaatatctcaacacaaagatttggagggatgacacaacatgtataaacatgattagaatgaaaaggggttgtttctttcacctaactaaacattttagagagcgtggtttacttcaggacactatccatatgtgtgttgaacaacaagtggccatgtttctaaatacaattgggcataaccttagaaataggttgattggcacgaattttggtagatctggggaaacagttagtcgttgtttcaataaagttcttcgtgcaattggtgagctacgaggggaactaattaggccaccttcattggacactccaaccaaaatatcagggaactacagatgggatccgtactttaaggactgtattggagctattgatggtacacatgtaagagccactgttcctagagatatggagcatgcctttcgtggtaggaagtcctatgcgactcaaaatgtaatggcggctgtagattttgatctacgcttcacttatgtgttggctggttgggagggaacaactcatgatgctaatgtattacgagatgctttagaacgtgtgaatggccttcgcgttccacaaggtaaattctaccttgttgatgcgggatatggagcaaaaccaggattcttgcctcctttccgtggtgtgagataccatttaaacgaatggggcaataatcccgtacaaaatgagaaagagttgtttaatctaagacactcatctcttcgtgtcacagttgagcgtgcattcgggtcattgaagagaagattcaagattttagatgatgcatctcctttcttcccttttccaacacaagtcgatattgttgttgcttgttgtatcattcataattgggtcatacaagatgggagtgatgattttattatacaagattctaattggcctagtcatagccatgctacatctttagttggccaagcaagtgagcatgctgctatggttgctttgaggcaaggaattgcagaccagatgtggacagaccatcagaactacaatgaaaactagtatcttgtaatatttgtaagaactatttgtaaggatgctatgttattgctgaatagatccccatgtaacttaagtgtgattgctaccgtaaccatgtaacttaaccatgtaacttatttgagctcgtacaaatgctgaccactgataatgtctgttggtcacattttgcatcc

SEQ ID NO: 81919 - DNA, 1226 bp, Zea mays
  Clone ID: MRT4577_174724C.1
atcgaggccggccgggaaaaaaaaaaaaaaacaacaaaaaagattggattcttgaggagcgcaacgtgctggctccgtgtctctctcgcccttctcccgtctccgctccgcctccgcgcgtccggcgagaccgcgagagcgagacgatgggaatgctacaaattccccttctgagtccgaccctcctcatccaatagtaccacctgctcgctgctccgccaccgctctcgctcgatcgcccccctcgttcgtcggccttcgcttccagacctccgagtcctcaatctgcagctttggtaattggtcgtatagtccctcatcatcggaatggtggggtcacttatctttcccacacctaatgtggatccgaaggcagagaatcctaatgagatggttacagccggtgtgctttcaagccttcagaatttcctacgcaagtgcctcatagccatcctctcatatggcccaatgcagttaatggaggaaaaaatcaacgaactcttagagaaccgaagtgtaatcaacaagattaactgtaagaccaacttttggggtaacttggacttgttatatgagccggtgcggttggcggctgagaagctgacggcgagcacagctgggaacacagggctggtcttttctatctgcatgccatacaactcgacttctgagattgtcaatgctgtcagtcaagtctgtgcggaaaggatggaaatgtttcagagcgaacatattggcgaatgcaatggtcatgctgcaaataacggtgtgcgatcagagatttcagtggcggatttggatcgccacatgtatagtgccgaatgcccagatcctgatattgtcatccggacttcgggcgagactcgattgagcaatttcctcctttggcagacaacgtttagttacttgcagaatccagatcctctgtggcccgagttctctttcaggcaccttgtttgggctgtcttgcagtatcagagagtttaccctgctctggagcataacagaaagttggctaagaagcagttgtgattccatgttacttgcaaggaggtatcatgaagggctattaacatcaaacttttccttctcaatttcctggtaatggtaaatgcaaagaagaacatactagcatataacattatgaatagatcaccatgtaacttaagtgtgattgctaccgtaaccatgtaacttatttgagctcgtacaaatgctgtgattac

SEQ ID NO: 81920 - DNA, 1446 bp, Zea mays
  unsure (1)..(1446): unsure at all n locations
  Clone ID: MRT4577_174725C.1
cggggtgagcgagcaagtgagagacgagagcgggcggagagtgtgagttgcgcccgatgtgccgtggcggcatgggaggaagagggagaagggcggacaggatcaaatcgccctcgacccccacactagagctccacctcccttgacatccttctccaccgccctagttgcaagacgaccgccgccctgcaaggaccgtcgacgacggtgctcatcgccgctttggtaattggtcgtatagtccctcatcatcggaatggtggggtcacttatctttcccacacctaatgtggatccgaaggcagagaatcctaatgagatggttacagccggtgtgctttcaagccttcagaatttcctacgcaagtgcctcatagccatcctctcatatggcccaatgccgaagcacattgcatttattatggatggcaatcgtcgatatgctaaattcagaagcatgcaagaaggagcgggtcacaggatgggtttctctacccttattgcaagtctgatgtactgctatgaaatgggtgtgaagtacatcactgtctacgcattcagcatcgacaattttaaaagggacccaagtgaggtggagtccttgatgcagttaatggaggaaaaaatcaacgaactcttagagaaccgaagtgtaatcaacaagattaactgtaagatcaacttttggggtaccggccgggttgtatatgagccggtgcggttggcggctgagaagctgatggcgagcacagctgggaacacagggctggtcttttctatctgcatgccatacaactcgacttctgagattgtcaatgctgtcagtgaagtctgtgtggaaaggatggaaatgtttcagagtgaacatattggcgactgcaatggtcatgctgcaaataacggtgtgcgttcagagatttcagtggcggatttggatcgccacatgtatagtgccggatgcccagatcctgatatcgtcatccggacttcgggcgagactcgattgagcaatttcctcctttggcagacaacgtttagtcacctgcagaatccagatcctctgtggcccgagttctcttttaggcaccttgtttgggctgtcttgcagtatcagagagtttaccctgctctggagcataacagaaagttggctaagaagcagttgtgattccatgttacttgcaaagaggtatcatgaagggctattaacatcaaacttttccttctcaatttcctggtaatggtaaatgcaaagaagaacatactagaagcggcactcgcacgatcaatgtacacattgcccgtccgccccaccacatccagcatcgtcgccagcctcgccacccccgcgccgtccttctcctccggctccggccgncccaggctcaggctcaggctcatccggaacgcccccgtcttcgccgcccccgccaccgtcgtgggcat

SEQ ID NO: 81921 - DNA, 1419 bp, Zea mays
  Clone ID: MRT4577_174726C.1
cctcgaggccggccgggctctctcgcccttctcccgtctccgctccgcctccgcgcgtccggcgagaccgcgagagcgagacgatgggaatgctacaaattccccttctgagtccgaccctcctcatccaatagtaccacctgctcgctgctccgccaccgctctcgctcgatcgcccccctcgttcgtcggccttcgcttccagacctccgagtcctcaatctgcagctttggtaattggtcgtatagtccctcatcatcggaatggtggggtcacttatctttcccacacctaatgtggatccgaaggcagagaatcctaatgagatggttacagccggtgtgctttcaagccttcagaatttcctacgcaagtgcctcatagccatcctctcatatggcccaatgccgaagcacattgcatttattatggatggcaatcgtcgatatgctaaattcagaagcatgcaagaaggagcgggtcacaggatgggtttctctacccttattgcaagtctgatgtactgctatgaaatgggtgtgaagtacatcactgtctacgcattcagcatcgacaattttaaaagggacccaagtgaggtggaatccttgatgcagttaatggaggaaaaaatcaacgaactcttagagaaccgaagtgtaatcaacaagattaactgtaagatcaacttttggggtaacttggacttgttatatgagccggtgcggttggcggctgagaagctgatggcgagcacagctgggaacacagggctggtcttttctatctgcatgccatacaactcgacttctgagattgtcaatgctgtcagtcaagtctgtgcggaaaggatggaaatgtttcagagcgaacatattggcgaatgcaatggtcatgctgcaaataacggtgtgcgatcagagatttcagtggcggatttggatcgccacatgtatagtgccgaatgcccagatcctgatattgtcatccggacttcgggcgagactcgattgagcaatttcctcctttggcagacaacgtttagtcacttgcagaatccagatcctctgtggcccgagttctctttcaggcaccttgtttgggctgtcttgcagtatcagagagtttaccctgctctggagcataacagaaagttggctaagaagcagttgtgattccatgttacttgcaaggaggtatcatgaagggctattaacatcaaacttttccttctcaatttcctggtaatggtaaatgcaaagaagaacatactagcatataacattatgaatagatcaccatgtaacttaagtgtgattgctaccgtaaccatgtaacttatttgagctcgtacaaatgctgtgattcctaaataaaaaaaaaaaaaaaaaaaaaaaaaaaaaaaaaaaaaaaaaaaa

SEQ ID NO: 81922 - DNA, 1403 bp, Zea mays
  Clone ID: MRT4577_174727C.1
gggtacctcgaggccggccgggccggggaaacactatctcgcccggccggggatcatcctctcagtccttgcttgtcctcccatcccggagatcgacggctgcttgccgcactcgctccagcggccagccggccacaggcaactatggccgcctctgccgccgccgcggggcctgctacctttctcccgcgcctcccctcgccacggtctccgtctcctatgctccctcctctcggacggagagcccatcccgtcgccgctccgctctgtctctccgccaagcgccgcgcctgcgccgccatgggctccagctcctcctccaactcaggaaatcaaacgtcactgatgctgccgttcagctttacattcgatgaagattcttctagttccagaaggctatatagatggaaaagggtattgctcaaagtaagtggggaagctcttgccgggaatcacacagaaaacatcgacccaaagattacaatggctattgcaagagaagttgcttctgtcaccaaactaggtgtagaggttgctattgttgttggcggtggcaatatcttccgtggggcctcttgggctggatgtagtgggcttgaccgctcatctgcggattacatcggcatgctggccactgtgatgaatgctatatttcttcaagcgacgatggagagcatcggaataccgacccgtgtccagactgccttccgtatgtcagaagttgcagaaccatacatacgccgaagagctgtcagacatttagagaaaggaagagttgtcatatttgctgctggaacagggaacccattcttcacgactgatacagctgctgctctccgttgtgccgaaatcaatgcagaggtagtgctgaaagcaacaaatgttgatggtgtgtatgatgcggaccccaggcagaatccaaatgcccgccttctggagactgtgagctatcatgaagttacgacaagagatctctcagtaatggatatgactgctattacactatgccaagaaaacaacattcccattgtcgtgtttaacttgcaagagcctggaaacattgcaaaggctattgtcggtgagaaggttggtaccttcatcggatgcacaagagatcaggagctaaatggaaacacactggttcaagaaagaagattggttaatgaggcgtgatctccagagatgcaagagttgggggggctccctcttctcttattcagtttttatatatacatatgaggtttagggttgggggctggtgctggaattagattagattagctatcaaaatcctgataatagttgtaaccgtgaaataagacacttggacgaaattaaaattttcctgcaaagtgctattgttctaaaaaactaaagataaaaaaaaaaaaaaaaaagcggcc

SEQ ID NO: 81923 - DNA, 2245 bp, Zea mays
  Clone ID: MRT4577_174728C.1
ggtccctccggcctccgggctccgaatcgggcggatagtttatcctcccgggacaagcccctacgagcccttctcatcctcatcctcatcctcttcaccccactagtcggcgagcagcaaactctaggtgcagagcggacatgttcctcacgagcggcgtggagatctcgtccagtttagtggagatctggtacgtggttgagcgaagcgctggctaggccgggatggatgggtggtaggcgacggcagcatggatgggtgcctgggcgccgccagtgttactgacaacagcttccttcatcgcggcgtacgtgactgtgagatatggataagaagaccaaggttatagtttgtgttgctgctgcacatatattactgtcatgtcaatgatggctatgattattcattctagaaaaagaaaacgaaatgcaaggaggactgggattacctatgcaccaatgcatgaaagggatagaactagaattgaatatctcaacacaaagatttggagggatgacacaacatgtataaacatgattagaatgaaaagggcttgtttctttcacctaactaaacattttagagagcgtggtttacttcaggacactatccatatgtgtgttgaacaacaagtggccatgtttctaaatacagttgggcataaccttagaaataggttgattggcacgaattttggtagatctggggaaacagttagtcgatgtttcaataaagttcttcgtgcaattggtgagctacgtggggaactaattagaccaccttcattggacactccaaccaaaatagcagggaactacagatgagatccatattttaaggattgtattggagctattgatggtacacatgtaagagccactgttcctagagatatggagcatgcctttcgtggtaggaagtcctatgcgactcaaaatgtaatggcggctgtagattttgatatacccttcactgatatttttgctggttagtatggagcagctcaagatgttaaggtattatgggattgttaagaacgtttggatagtgttcgcgttcctgaagatatggtaattggtcgtgtaatgtctttttatcggaatgttggggtcacttatctttcacgcacctaatgtagatccgaaggcatagtatcctaatgagatcgttgcagcaggtttgctttagaactttcagcatttgctacgcaagggcttcatagttatcctatcatatggccctgtgccgaaggacatcttatttatcatggattttagtctgcgatatgctataataaaaagtatgctagcaggggatggtaacaggatggtattttcgacgctgttttaatttctggtgtactgcaaggagatagcattaaaggatatcaatgtctaactattcattatcaataatttgtaaagggaaacaagaaagatggaattactagtgcattaaatgaagaagaaaaccaaataaatcttagagatccaaagtgtaataaacatgttaatgtttaagatcaatatatatggtgagttgcacttgtaatatgatccggtgcggttggcggctgcgaagctgatggcgagcacagctgggaacacagggctggtcttttctatctgcatgccatacaactcgacttctgagattgtcaatgctgtcagtggagtctgtgcggaaaggatggtaatgtttcagagcgaacatattggcgactgcaatggtcatgctgcaaataacggtgtgcgttcagagatttcagtggcagagttggatcgccacatgtatagtgccggatgcccagatcctgatatcgtcatccggacttcgggcgagactcgattgagcaatttcctcctttggcagacaacgtttagtcacttgcagaatccagatcctctgtggcccgagttctcttttaggcaccttgtttgggctatcttgcagtatcagagagtttaccctgctctggagcataacagaaagttggctaagaagcagttgtgattccatgttatttgcaaagaggtatcatgaagggctattaacatcaaacttttccttctcaatttcccggtaatgggaaatgcaaagaagaacatactagcatataacattatgaatagatcaccatgtaacttaagtgtgattgctaccgtaaccatgtaacttaaccatgtaacttatttgagctcgtacaaatgctgaccactgataatgtctgttggtcatattttgc

SEQ ID NO: 81924 - DNA, 1335 bp, Zea mays
  unsure (1)..(1335): unsure at all n locations
  Clone ID: MRT4577_174729C.1
ccggccgggacggctcatccggccgccgccctcctctctcggtctctcctctcctccaacggctcagccggcgccaccgccctcctccctcctatcctccaacatctccggcgcgtctctcctcagccgcggaggcaaagccggccgccggccgtggaggcacagcagacctgcgccaccgctggccgcctaccccacagcagatctgcactcaagaccagcagccagccagccatcctctgcggctccactctgccagcgcccaagaccagcactagcagccagccatcctccacctccactgctctccatttgatcatttgcttntggtaattggtcgtatagtccctcatcatcggaatggtggggtcacttatctttcccacacctaatgtggatccgaaggcagagaatcctaatgagatggttacagcgggtgtgctttcaagccttcagaatttcctacgcatgtgcctcatagccatcctctcatatggcccaatgccgaagcacattgcatttattatggatggcaatcgtcgatatgctaaattcagaagcatgcaagaaggagcgggtcacaggatgggtttctctacccttattgcaagtctaatgtactgctatgaaatggggtgtgaagtacatcactgtctacgcattcagcatcgacaattttaaaagggacacccgtgacatcctgatcctgatgtccgtctcctttaccaaactggctggcgagcagcaaactcgaggtgcaatccggacaagttcctcacgagcggataattctacctagatgatgacggatatggagcaaaactgggattcttgcctgctttccgtggtgtgagataccatataaaccaatggggcaataatcccgtacagaacgagacagagttggttaatctaaggcactcatctcttcgtgtcacagttgagcgtgcattcgggtcattgaagagaagattcaagattttagatgatgcatctcctttcttcccttttccaacacaagttgatattgttgttgcttgttgtatcattcataattgggtcatacaagatgggagtgatgagtttattatacaagattctaattggcctagtcacagccatgctacatctttagttgtccaagcaagtgagcatgctgctatggttgctttgaggcaaggaattgcagaccagatgtggacagaccatcagaactacaatggaaactagtatctttttcacatgtgttagcagcaacaaaattgttggttgtacttttgacctagaatctcctgtactatattttcatgtgataaatcttcctgtactatcttt

SEQ ID NO: 81925 - DNA, 812 bp, Zea mays
  Clone ID: MRT4577_17472C.1
cacctcaacaggtcgggaaggtttccctgctccgctccggcgaagccgccacctccccttctctctcgtgaagctggcgcctcctcgtctccctcccgaatccgtcgccgcccattgcctcgcactcccttggactagatccgtcgccacccagtgatttcgctgagcaagggcactccatcgcacttgcgcgctcgatgaagcaccagagcttcctcatacacagtcgcgtcctcttcttcacgcaagcactggatcttcctcctcttcttcgcacaaggcaccagatctccctcctctgctctagagagcttttctggagcctaggcgtgaggatcctgcagaccggcgacgtggagcacgcgttccagcgtgccttgttggtagagaaaggcgagcgactggtgaagttaatgttcagtttttaagaaaagttaatattcagttttttcattctttgcacggcggcctcctcggctcgcgtgcggtgagctcctctacctcgcgcagggcaccagagctctctcctcttcctcgcgtactgcacttttttcattctttgcgagattcattctttgcgagattctttacacttgttgtttccttttgctcgataaaaaataacttcaccatgtaaccagtccacgtgtataggatttctttagcctttttagcaattcagtattttacgcatgtccatagttacctacagttaccctgaaatacatgagtcatataatgaccacctcacattattagttgatctaacaacccagctgcaaacactgcacattactgtacccaggaacaag

SEQ ID NO: 81926 - DNA, 1335 bp, Zea mays
  Clone ID: MRT4577_174730C.1
gcaacgttctggctccgtgtctctctcgcccttctcccgtctccgctccgcctccgcgcgtccggcgagaccgcgagagcgagacgatgggaatgctacaaattccccttctgagtccgaccctcctcatccaatagtacctaccacctgctcgctgctccgccaccgctctcgctcgatcgccccctcgttcgtcggccttcgcttccagacctccgagtcctcaatctgcagctttggtaattggttgcatagtccctcaccatcggaatggtggggtcacttatctttccctcacctaatgtggatccgaaggcagagaatcctaatgagatggttacagctggtgtgctttcaagccttcagaatttcctacgcaagtgcctcatagctatcctctcatatggcccaatgccgaagcacattgcatttattatggatggcaatcgtcgatatgctaaattcagaagcatgcaagaaggagctggtcacaggatgggtttctctacccttattgcaagtctgatgtactgctatgaaatgggtgtgaagtacatcactgtctacgcattcagcatcgacaattttaaaagggacccaagtgaggtggaatccttgatgcagttaatggaggaaaaaatcaacgaactcttagagaaccaaagtgtaatcaacaagattaactgtaagatcaacttttggggtaacttggacttgttatatgagccggtgcggttggcggctgagaagctgatggcgagcacagctgggaacacagggctggtcttttctatctgcatgccatacaactcgacttctgagattgtcaatgctgtcagtcaagtctgtgcggaaaggatggaaatgtttcagagcgaacatattggcgaatgcaatggtcatgctgcaaataacggtgtgcgttcagagatttcagtggcggatttggatcgccacatgtatagtgccgaatgcccagatcctgatattgccattcctatctcgggcgtgcctcgacagagccatactgttgttgggcgttctatcattagtcattgggtcataccagatgggagtgatgagtttattatacaagattctaattggcctagtcacacccatgatacatctttagttgtccaagcaagtgagcatgctgctatggttgctttgaggcaaggaattgcagaccagatgtggacagaccatcagaactacaatggaaactagtatctttttcacatgtgttagcagcaacaaaattgttggttgtacttttgacctagaatctcctgtactatattttcatgtgatcaatcttcctgtactatcttt

SEQ ID NO: 81927 - DNA, 348 bp, Zea mays
  Clone ID: MRT4577_174731C.1
aaagcgggcggaagcaaaataatattatttgggccaaggcatgcccaaaaacattggcttgagggggcacgggtattggcggggaaatgacggaccccaatcggggtaaatatatctaagcttaaagccttaaacccttcacaacaagagggacacaatcgccagcgccgccccaatagtccaaaaagccgggtcccttggtgggttgttcttttgaactgcaggcgggtggccccccccctttggcaaaagaactggggtagtgtgctctggcaaaggcgctgggcaacccctgggcccaggtgcattcacccgaacaagggcaagggggggggggggtgcatgtgc

SEQ ID NO: 81928 - DNA, 1991 bp, Zea mays
  Clone ID: MRT4577_174732C.1
tacaaatgtacgacagttcttgtcaatttgtgtttcttgcgctactgaattgtttttagacttgagtaatgtaaataattctatgcaaatagtgtatgtagatcataatgtattaatgtgcagatcgtaattgctattagttcctttatattttgtttgcatgaacacttgattgtacacctatatatcaattctacatgattgttgtctttttgaatttgatgcttacatgtagatggataggaagaccaaggttatagtttgtgttgctgctgcacataagttactgtcaatgatggctatgattattcattctaaaaaaagaaaacgaaatgcaaggaggatagggattacctatgcaccaatgcatgaaagagatagaattataattgaatatctcaacacagatttggagggatgacacaacatgtataaacatgattataatgaaaagggcttgtttctttcacctaactaaacattttagagagtgtggtttactttaggacactatccatatgtgtgttgaccaacaagtggccatgtttctaaatacaattgggcataaccttagaaataggttgattggcacgaattttggtagatctggggaaacagttagtcgttgtttcagtaaagttcttcgtgcaattggtgagctacggggggaactaattaggccaccttcattggaactccaaccaaaatatcaaggaactacagatgggatccgtactttaaggattgtattggagctattgatggtacacatgtaagagccactgttcctagagatatggagcatgcctttcgtggtaggaagtcctatgcgactcaaaatgtaatggcggctgtagatttagatctacgcttcacttatgtgttggctggttgggagggaacaactcatgatgctaatgtattacgagatgctttagaacgtgtgaatggccttcgcgttccacaaggtaaattctaccttgttggtgcgggatatggagcaaaaccgggattcttgcctcctttccgtggtgtgagataccatttaaacgaatggggcaataatcccgtacaaaatgagaaagagttgtttaatctaaggcactcatctcttcgtgtcacagttgagcatgcattcgggtcattgaagagaatattcaagattttagatgatatctcctttcttcccttttccaacacaggtcgatattgttgttgcttgttgtatcattcataattgggtcatacaagatgggagtgatgattttattatacaagattctaattggtctagtcatagccatgctacatctttagttggccaagcaagtgagcatgctgctatggttgctttgaggaaaggaattgcagaccagatgtggatagaccattagaactacaatggaaactagtatcttgtaatatttgtaagaactatttgtaaggatgttatgttattgcaaggatgtattggctactgtcttttatctgtaagaactatttgtaaggatgcgatttcagtggcagagttggatcgtcgcatgtatagtgccggatgcccagatcctgatatcgtcatccggacttcgggcgagactcgattgagcaatttcctcctttggcagacaacgtttagtcacttgcagaatccagatcctttgtggcccgagttctcctttaggcaccttgtttgggctatcttgcagtatcagagagtttaccctgctctggagcataacagaaagttggctaagaagcagttgtgattccatgttatttgcaaagaggtatcatgaagggctattaacatcaaacttttccttctcaatttcccggtaatgggaaatgcaaagaagaacatactagcatataacattatgaatagatcaccatgtaacttaagtgtgattgctaccgtaaccatgtaacttaaccatgtaacttatttgagctcgtacaaatgctgaccactgataatgtctgttggtcat

SEQ ID NO: 81929 - DNA, 484 bp, Zea mays
  Clone ID: MRT4577_174733C.1
acacacgcccggggggtttgtttgggtttttataatttttttttttttttttttttttttttttttagggttgcaggcacccggccccctggcctcaacgagcaacatccaaggcgcaaaaccctgggcggaccacacggggcggcccacacaccaccaccggggggggggcggtttcccctccgtttcgcaacccacccaccgcccaccgggaagggaaaggggaaacccggacccccgcccccccatgagtgagggaaggagggctaccaaagctccggaaacttaaagcagaaacaaaagccccccgccgaccgcaagcagactatgaaaactccaccctcggcttggcccccgcggaaagaaaaaagggcaagggacaaaccgcaaaacaaaaaacactacgttccgcccgcccccctaaccccaggggggccgcgggcccgcagcccccgctacggggcccttggtttagggcccgcgg

SEQ ID NO: 81930 - DNA, 298 bp, Zea mays
  Clone ID: MRT4577_174734C.1
ggtgtggcgggaaccagatataaatgctttattttcactaccctatgggcaaagaccaatgtatactgcattgcaatggccagactcacacctcgctaggattttaactaccaggcgttactgtatgtaacgatgcggaggagcccacgtgggagaatggacgtggacgctcatgccttgtcacgggtaaacccactgaagtcttagaagagggcgaaacaaaaacaaagcttaatgttatatttcggagagcctagagacctttctattgaacagaacacctcaacaagacggtttt

SEQ ID NO: 81931 - DNA, 609 bp, Zea mays
  unsure (1)..(609): unsure at all n locations
  Clone ID: MRT4577_174735C.1
gccttcgccgactgcccaccccccgcggggctcngaaggttctccgttgggtaccgttccctagaccttgtcgggcgccgcgaggtcctccgttccctagccgtcaactacaatgtgccccgcgcgcgtgtccgggatctgatgaaacagtacatgagcgtcacctccgccgaaccatcaggcgtggatgacgtggaggcgaacgatgggaaggagggcgccacatcggccctgtaccggatggagagggggctcagagatgcacttcggccccggtacgccggattccttgaggacatgaactcgcaagcaggtgggctcaagctactcaccgagctccgtgccaatctcctcttcttgctgggagaggagaacgtttaaacgctgcggactctggactcgtacttgaaggaaaaactgatgacttgacttacacctgctgcattgacgctacaccagataacctgagatgatcctgcctagttgctagagaagattgtggcatatgaagccgtacatccaatcaggaatctgatagactttaacagaagatggtcattgaacgacaagctttaggtactttcatccacaataccaggcgaaccactg

SEQ ID NO: 81932 - DNA, 333 bp, Zea mays
  unsure (1)..(333): unsure at all n locations
  Clone ID: MRT4577_174736C.1
caactccaaccaggctcaaattgattttttcaggtacaaaaatccatccctcgtantaggaggggaagcaatatctccctaacagggatgtccattatgtgtttcatcacaattctctcacatcatacttgctttatataccttgggttgctaaaaataatgccggcgcccggcccaaataagggggcctttgagtttgcctggaccccaacaccccccccttttccgttttcaaagagcaacccgaatcaccccgttggtttttttgggcaaccaacaacaaaggggttttttggggggggtgaaccggcgggggcggcggcaagggccctt

SEQ ID NO: 81933 - DNA, 388 bp, Zea mays
  Clone ID: MRT4577_174737C.1
aaaatcgtgcgtgagggtataaaccaatttattcttcagcacgctgtttcgaagacaaactcgcatatatgttcgcagatattgtttcgactaatttcggtcgaatcatgccgaacaaattatcagtgccgaaatcagtttatttcggtttgtcgtttcttacctgatccaaaactttggatataaaggacgggtacaaattcatctgatttcaaggattcgctaaatcaaaaccggaacagcgcgttcgagaattttaattgagctccaattcactggtaaattatccgtggctgtggaaccaagtgttcagtcgcggttgaaattatttctaatcaaatagaacacaggccggaatactgttctgatttgttccgattacgtcttg

SEQ ID NO: 81934 - DNA, 812 bp, Zea mays
  unsure (1)..(812): unsure at all n locations
  Clone ID: MRT4577_174738C.1
gacccttcgcgcgcctggcctcgaacaacctcctcaaccttcctcctttcaagatcgcgctcaaccccccgcccccgccactcccgacgcgcccatcggtcttcttggcaccgcgtcagatcccaccctgccgctctctactccgcagcaagccaccgccgcggcaaggcgtccgatcatctacgtctccgcagctagacactgccaacaccccgtcgccgccgtcttcgaggcaggaggccgtcgcccaggcacggtcctgcctcgccacggcgctgcagaagccgctcaacagctcgatcccgctcaagaggcagcggcagccgcggttccgcgcggagatccccgtagtcgacgaatcgccgggctccctcgcgcgcctcgcgttcgacgtgctctcgggcggagcaggggcgtcgaggaagggcgcgccggcgaggctgctgctcatctggccctcggccgaggcgctgtccgtggccttgagggagttcgaggaccagggggactcggcgacggcgcacgcccgactgggctcgatggcgccggacgcgctgggcgcctgcgatgccgcggtgttcctggccaccgggccggcgcaggtggagcaggtgaaggccgccgccgcggcgctggagcccaggcccggtggtgctgttcaacccgtcgtggagcttcgacgaggagggagacggggagaaattcggcgccggcgcgagggggcttcgtggngtcccttcgacgtggtctactccttcaccgggnctggaggtgcggggcctgctgagcaagaagaggggcgtgctgctgcg

SEQ ID NO: 81935 - DNA, 288 bp, Zea mays
  Clone ID: MRT4577_174739C.1
atttttatttgcagcttgagtttttatatgaagttgcattattgtggacttggctgtcttgtgatgaatttttttcatatgtattctgtgccatactattgttaaaatgaactgttgctattgtgagatggattttaactgacctattaagggtttctttcgaatggcactactttagggacattctagtatttgcttctattgtttgggccttgtggataatgtacagatttaaaaacaaatcttgttgctgatttgtccatttctttccctgcactttgttacatc

SEQ ID NO: 81936 - DNA, 566 bp, Zea mays
  Clone ID: MRT4577_17473C.1
ttctcctcgcccctcgcctccctccacctgcagagagcgccacaagagcgcttcgttctagcagcagcggacgagggagacaagaggaggaagagatggcaggccgtgatggagccaagtcatcggcgtccatggaggaagaggcatgcggggagaagaagtacggaggaatcgcacccaagaagaagcctttgatatccaaggaccacgagcgcgcctacttcgactctgcagactgggtgctgggcaagcaggctgcgaacagtagcacgagggccaccgtcgagtctctgaagcccaagctgaagagaacgcctcaccaccagctgccccctcgcaagcccacctgcgcttccggttgagacgaccggacccatggctacgcgttgcagctgctcggaggtgagggagggaggacgccgaggccgagctcacataaatgtctagctggtcggaaaccgtggtagggacgaatccgagatgcaatctggcttgttggccgttgcattgcagcacctattgtgtctttatcagttcgttatcaattatctggctttaagtttggc

SEQ ID NO: 81937 - DNA, 645 bp, Zea mays
  Clone ID: MRT4577_174740C.1
ttggggtgaccacgcgttctcggacgcgtgggtcggacgcgtgggcacgagctctgtctgtgtgaagatgaggacgcgctgcaaccagctggggccgcctctcgcgctcttgtttgccgctcttcttggcggcgcgcaatgccagagctctcacggcggtggcggcgccgccgctaacctcacggtggtgggcaccgtgttctgtgacgcctgctccaccagctccttctccaagaatagctacttcttgccaggtgtccgagtccggctggactgcatgatcaaagtgaactcgaactccaaggaggagatcaagatcacggccgagaaggtgaccaacagcgacggcgcgtaccagctggacatcccggcgatcgacggcttcgagtgcgcggcgcccggcgcgaccgccggcgagtccttctgccgggcggccgtgctggacaacccgtccgcgctgtgcggcgtgccggccgtgaccaccaccgtcggccacatctccctgccgagccaggaccccagcgcctgcttctacagcctcaactcgctctactaccgccccagcaagccgggcccagctcagtgcggcggcgccgacggtctgttaccgtctgcggtggtgctgaacacgagcctgtactactg

SEQ ID NO: 81938 - DNA, 644 bp, Zea mays
  Clone ID: MRT4577_174741C.1
ccggccgggaaaaaaaaagccatccggtcacaaactgcgatgcggaatacgaagcgttgtcgccgcggcggacgctcctcgccgccgccgtcctcggcgccccagcccccgccgcagccgctcttgcgcggccctcaattgcgacccccttcagccatcctcatcgattccgtcgggacggcgatctgacccggtttaacgcttctttgctgcagccgttgggatccgctacggtaagtactgcggtgtgggatggagcggctgcgacggcgaggagccctgcacctgcacgacctcgacgcctgctgccgcgaccacaactgcgtcgagaagaaaggaggcttcagctttgagaataaggtgtgcatggtatgaaggtgcagtctggaggaaggataaattagctccaaagttgtggctgaagaagcttcggcttagcacgaggacgatggtgaaagatgaaaccgacctaaagaagaaaagactgcttagtcctcgacggcttgccttatggtcaacagtaaatgtcggggacatgaatgtaattttgtgcaggctacgtcctgtgcctataaatagatgaacaataacaccgtgctgttcacgctgaattctaatcgaaaaaaaaaaaaaaaaaagcggcc

SEQ ID NO: 81939 - DNA, 1821 bp, Zea mays
  Clone ID: MRT4577_174742C.1
tacaacacccagtagtaatccagcgggtccgtactcatctgcttcacctccgggctccggctacggcggcactcttctctggcaaccggaccacagaaacctctaggcgacgaatcgagcaggtagaggagtaatcaggcatccatggctgagcatcttgcgtccatctttggcacggagaaggaccgcgtgaactgccccttctacttcaagatcggcgcatgccgccacggcgaccggtgcttccgcctgcacaacaaggcttcctttttcccttcggcgcgtgcccccccccctttccttcagccctctttttttttttccatgccgcctcgcgcagggaagcccatcgtcccggaacggggcccttcggaggcggtgctaatccagcgggtccgtactcatctgcttcacctccgggctccggctacggcggcactcttctctggcaaccggtcggaagatgttggatcttccgcttcaaatcgacgcataaaggatgcagattagttttgttcgcgtcaaatttattttgctcggtgtagttctgtccattaattaattatttgtactggatttaaggtgctgctattttgaaggttttttctcccggaaattttcacatcccgaaacgactggaaattgaagaccacagaaacctctaggcgacgaatcgagcaggtagaggagtaatcaggcatccatggctgagcatcttgcgtccatctttggcacggagaaggaccgcgtgaactgccccttctacttcaagatcggcgcatgccgccacggcgaccggtgctcccgcctgcacaacaagccttccatctccccgacgctgctgctctgcaacatgtaccagcggccggacatgatcaccccgggcgtggacgcgcagggcaaccccatcgacccggagcggatccaggaggacttcgaggacttctacgaggacatcttcgtggagctgagcaagcacggcgagatcgagagcctccacgtctgcgacaacctcgcggaccacatgatcgggaacgtgtacgtggagttccgcgaggaggagcaggcggcccgcgccctgcaggcgctgcagggccgctactactcgggccgacccatcatcgccgagttctcgccggtgacggacttccgggaggccacctgccgccagttcgaggagcacagctgcaaccgcggcggatactgcaactttatgcacgtcaagcaggtcggccgggacctgcggcggaagctgtttggccacctgcatcgctccctccggagccacagccgaggcagccgcagcccgagcccataccgccgccgcggtagctcgtccaggtccagggaccgcgacgattaccacgactactactaccactactaccgtagtggcagtggcagccgcaggagcagcgagagacaccgcagccacgacagcgacgggagccgccgtcgacgcgggcggtcgaggagccggagccggagcccggtgagggaaggcagcgaggagcggagggcaaagattgagcagtggaaccgcgagcgggaggcagctcaggtgtaagcaagttccccttccctagttgccatgttggttgctgcagtgttattggccttgctagttgccatgttgctgttgctgaagcctgttatcatgtattgtggtgtggttcaggcagggtaaggccataaattgagcctgaaattggactgtgatctcttttgctgtggacgggttaccattaaaaaaaaaaaaaaaaaaaaaaaaaaaaaaaaaaaaaaaaaaaaaaaaaaaaaaaaaaagggaaaaacggtacc

SEQ ID NO: 81940 - DNA, 585 bp, Zea mays
  unsure (1)..(585): unsure at all n locations
  Clone ID: MRT4577_174743C.1
ggccgccagtgnntgatggatatnnctgcagnannattcgccctttagncgtgngnntcgcggcccgaggggtacctcgtcacgcagtcgggtagtgcgtgcatgtcctccaatgacccggaatgggaatgctaccggaggcacctggcccgatcccatgatttcgttatgctcaataatggctaagctacttgaaatgttattgcacatagctcatacgactactttgaatcgcatcctagtgtaagcagaaagatgaaaacttcatcagcatacgcagatggttactagcgaaacttaatatctactatgagacccaaatttttttggcatgcgaacccttagccagattgagataagtgcaaccatgttgataccgcaacatctactatgaaggcagctacctggtggctacaccgagctgttgataccatgtcacccgcctgggcggatctgatactatggtgcatattcacagcactgacaactactactattgagatcagatatctggagcgagccctgctaccttcttgatacaaccacagcctgtgccaatctaccatcacgctacagcctaacgct

SEQ ID NO: 81941 - DNA, 666 bp, Zea mays
  Clone ID: MRT4577_174744C.1
ggttcaggtgacgaagagtataaagaggaagatcatatccctgtggatgcacacaggcagtcttcttctcatggtgataagtttgaggttgagtatgctgctgaagtggatgcagaaggaaatcaagaggcggataactatggccagagagagggtgagtctgacgactacgagacaattgaaggtcacgactacaaatctgaagatgaaaatgcatacgaagatgacgaagatttcgacgatgatgatgactttgctcggaaagtgggggttgtattctcttaagcgctatggtgtcattgcttctgttgcttgaggcaaagagctctaggttttctcattggtcctgttgctttgaggcaaagagctctaggttttgtcattggttctgctgcttgacgcaaagctgaaatgcctgctttgcttagtgcatctcttgggtgatttcatctggcgctttatgtttccttttattttgatagtgccaaagcctattattttgtgaggctgattactgataattataggtcagataagaagcgaggtagcgttcataatcgatttgaggtttacatgtaaacagctgtgatgttcagcatatctgacctaccctcagactttgtattgtattagtttccttactaacagcaggatattccttggatc

SEQ ID NO: 81942 - DNA, 1099 bp, Zea mays
  Clone ID: MRT4577_174745C.1
ccggccgggatagaagcccggccggggaagcaccccggaatccagcgggtccgtactcatctgcttcacctccgggttccggctacggcggcactcttctctggcaaccggaccacagaaacatctaggcaacgagtcgagcaggtagaggagtaatcaggcatccatggctgagcatcttgcgtccatctttggcacggagaaggaccgcgtgaactgccccttctacttcaagatcggcgcatgccgccacggcgaccggtgctcccgcctgcacaacaagccgtccatctccccgacgctgctgctctgcaacatgtaccagcggccggacatgatcaccccgggcgtggacgcgcagggcaaccccatcgacccggagcggatccaggaggacttcgaggacttctacgaggacatcttcgtggagctgagcaagcacggcgagatcgagagcctccacgtctgcgacaacctcgcggaccacatgatcgggaacgtgtacgtggagttccgcgaggaggagcaggcggcccgcgccctgcaggcgctgcagggccgctactactcgggccgacccatcatcgccgagttctcgccggtgactgacttccgggaggccacctgccggcagttcgaggagcacagctgcaaccgcggcggatactgcaactttatgcacgtcaagcaggtcggccgggacctgcggcggaagctgtttggccacctgcatcgctccctccggagccacagccggggcagccgcagcccgagcccataccgccgccgcggtagctcgtccaggtccagggaccgcgacgattactactaccactactaccgtagtggcagtggcagccgcaggagcagcgagagacaccgcagccacgacagcgacgggagccgccgtcgacgcgggcggtcgaggagccggagccggagcccggtgagggaaggcagcgaggagcggagggcaaagattgagcagtggaaccgcgagcgggaggcagctcaggtgtaagcaagttccccttccctagttgccatgttggttgctgcagtgttattggccttgctagttgccatgttgctgttgctg

SEQ ID NO: 81943 - DNA, 778 bp, Zea mays
  unsure (1)..(778): unsure at all n locations
  Clone ID: MRT4577_174746C.1
ccggccggtnatccaccaaatccagcgggtccgtactcatctgcttcacctccgggttccggctacggcggcactcttctctggcaaccggtcggaagatgttggatcttccgcttcaaatcgacgcataaaggacgcagattagttttattcgcgtcaaatttattttgctcggtgtagttctgttcattaattaataattttgtactggatttaaggtgcttttattttgaaggtttcttctcccggaaattttcacatcccgaaacgactggaaattgaagtagccatttgatgctgttacctgggttcataagttgttagacttgttatttgtttgttaatcctagctattgcatattgtgtgcctgaccaggaccacagaaacatctaggcaacgagtcgagcaggtagaggagtaatcaggcatccatggctgagcatcttgcgtccatctttggcacggagaaggaccgcgtgaactgccccttctacttcaagatcggcgcatgccgccacggcgaccggtgctcccgcctgcacaacaagccgtccatctccccgacgctgctgctctgcaacatgtaccagcggccggacatgatcaccccgggcgtggacgcgcagggcaaccccatcgacccggagcggatccaggaggacttcgaggacttctacgaggacatcttcgtggagctgagcaagcacgccgagatcgagagcctccacgtctgcgacaacctcgcggaccacatgatcgggaacgtgtacgtggagt

SEQ ID NO: 81944 - DNA, 1802 bp, Zea mays
  Clone ID: MRT4577_174747C.1
tttcgaccctccctcgggccggatccccaatcagcgggtccgtactcatctgcttcacctccgggttccggctacggcggcactcttctctggcaaccggaaatccagcgggtccgtactcatctgcttcacctccgggctccggctacggcggcactcttctctggcaaccggtcggaagatgttggatcttccgcttcaaatcgacgcataaaggatgcagattagttttgttcgcgtcaaatttattttgctcggtgtagttctgtccattaattaattatttgtactggatttaaggtgctgctattttgaaggttttttctcccggaaattttcacatcccgaaacgactggaaattgaagtagccatttgatgctgttacctgggttcataagttgttagacttgttgttatttgtttgttaatcctatagctattgcatattgtgtgcctgatcaggaccacagaaacatctaggcgacgagtcgagcaggtagaggagtaatcaggcatccatggctgagcatcttgcgtccatctttggcacggagaaggaccgcgtgaactgccccttctacttcaagatcggcgcatgccgccacggcgaccggtgctcccgcctgcacaacaagccttccatctccccgacgctgctgctctgcaacatgtaccagcggccggacatgatcaccccgggcgtggacgcgcagggcaaccccatcgacccggagcggatccaggaggacttcgaggacttctacgaggacatcttcgtggagctgagcaagcacggcgagatcgagagcctccacgtctgcgacaacctcgcggaccacatgatcgggaacgtgtacgtggagttccgcgaggaggagcaggcggcccgcgccctgcaggcgctgcagggccgctactactcgggccgacccatcatcgccgagttctcgccggtgactgacttccgggaggccacctgccgccagttcgaggagcacagctgcaaccgcggcggatactgcaactttatgcacgtcaagcaggtcggccgggacctgcggcggaagctgtttggccacctgcatcgctccctccggagccacagccggggcagccgcagcccgagcccataccgccgccgcggtagctcgtccaggtccagggaccgcgacgattacccgactactactactactactaccgtagtggcagtggcagccgcaggagcagcgagagacaccgcagccacgacagcgacgggagccgccgtcgacgcgggcggtcgaggagccggagccggagcccggtgagggaaggcagcgaggagcggagggcaaagattgagcagtggaaccgcgagcgggaggcagctcaggtgtaagcagagcaggttccccctcccctgtggccatgatggttgctgcattgttattggccttgctagttgccatgttgctgttgctgaagcctgttatcatgtattgttgtgtggctcaggcagggtaaggccataaattgaacctgaaattggactgtgatctcttttgctgtggacgggttaccattaaacttgatttggatgtgctgatggaatctagttgctgtttgagtaaggcttaccgtggtgagtcggcggccagcgagtacgtccatccattgggcgttgagattgagcagtggaacccagaatgtgtgacggatacgatttcgagagtagtagaaagtattgacttccgtgcagacccgatcaaactgtagatcggaactcatcctctaaggctataacacatttactattttg

SEQ ID NO: 81945 - DNA, 271 bp, Zea mays
  Clone ID: MRT4577_174748C.1
cttcctttcgctcttcccgctgctccgcccctctctgtcttctcagcagtgggagcagctctcctgccacagctcctcacccccttgagatgttcgcctgctccaagtttgtctccactccctccttggtcaagagcacctcacagctgctgagccgtccgctcatctgcagtggtgctgaaacgaccggagatactgacagatgagagcctcagcagcttggcagtctcatgtccccttaactcattgtctctagccgcagcttcaaaac

SEQ ID NO: 81946 - DNA, 416 bp, Zea mays
  Clone ID: MRT4577_174749C.1
tcgtccgccatgacgcgtcttcctctccacctctttgctcaccatctccggtgccgggaggataaccgtcctgaacctacgctgagatggctgctcccacgggatgagctgctcgattcgtaagaatgcgtcttcacccgtcagatcgaccgaggagaataaagtgtagtggcatacgggagatgctgctgacgacgaggagccaccaaatcggagtacatggtttgacgtgtggacgcgcaaaccacacaatactaagtcgcagacaccacaggagctacgaggtgatggacagccagaccgcagaatctccgcaagaattgaagccacatgcaaggaggactggaacaatgaccagtggagggagatgcacacatacggacacccggaattagaactagaggggaacaaatgat

SEQ ID NO: 81947 - DNA, 794 bp, Zea mays
  Clone ID: MRT4577_17474C.1
agccactgaacgtttacagagcgcttcgttctagcagtagcggacaagaggaggaagagatggcaggctgtgatggagccaagtcatcggcgtccatggaggaagaggcatgcgcggagaagaagtacggaggaatcgcacccaagaagaagcctttgatatccaaggaccacgagcgcgcctacttcgactctgcagactgggtgctgggcaagcagccagcaggccgcgaacagtagcacgagggccaccgtcgagtctctgaagcccaagctgaaggtcggttggaccgctataccactcggttcaagttcaactaatggctgcccctgatgggaaacgacacgtgatgaatgaactcgtgtgctgtggttcctccagcactgaacttactgatgttctgttcctctcgctggccaaagaacgcctcaccaccagctgccccctcgcaagcccacctgcgcttccggttgagacgcccggacccatggtaagcttgaagctgcccctgaaacctgcacagctcaacggcatcagcagagctatgtgcaagtgcaaaagaccccgccccgacatgcccgtgtccgtccttgcgtgtaataaacgtgtgcatgctacgcgttgcacctgctcggaggtgagggagggaggaccccgaggccgagctcccataaatgtctagctggtcggaacccgtggtaggggcgaatccgagatcccatctggcttgttggccgttgcattgcagcccctattgtgtctttaccagttcgttatcaattatctggcttttt

SEQ ID NO: 81948 - DNA, 868 bp, Zea mays
  Clone ID: MRT4577_174750C.1
tgggaccctcgaggccggccggggaagcatccaggcatccagcaatccagcgggtccgtactcatctgcttcacctccgggttccggctacggcggcactcttctctggcaaccggtaaacctcctctccctttcttttctgtggtgcggtgcgttcaagatgtccggatgtacgtgcgcatcgggttttgggatcggattgcgcctcctgcgacatagggagtataccgtgctcttttgtttctccatggattgatactttctctgtcgattcttatcaggtcggaagatgttggatcttccgcttcaaatcgacgcataaaggacgcagattagttttattcgcgtcaaatttattttgctcggtgtagttctgttcattaattaataattttgtactggatttaaggtgcttttattttgaaggtttcttctcccggaaattttcacatcccgaaacgactggaaattgaagtagccatttgatgctgttacctgggttcataagttgttagacttgttatttgtttgttaatcctagctattgcatattgtgtgcctgaccaggaccacagaaacatctaggcaacgagtcgagcaggtagaggagtaatcaggcatccatggctgagcatcttgcgtccatctttggcacggagaaggaccgcgtgaactgccccttctacttcaagatcggcgcatgccgccacggcgaccggtgctcccgcctgcacaacaagccgtccatctccccgacgctgctgctctgcaacatgtaccagcggccggacatgatcaccccgggcgtggacgcgcagggcaaccccatcgacccggagcggatccaggaggacttcgaggacttcta

SEQ ID NO: 81949 - DNA, 310 bp, Zea mays
  Clone ID: MRT4577_174751C.1
gtcaccgacaccacaacccattctcaaagctaccaaagcctcccgggcgggccccggacactttcttcggtctcctctcctcttctgccccatgccacaccggctgccgctaccatctatcctctcaagcgccgcatcgctattactacaaccagatgaaggcgaaacacactggactgatcccccaagcgtacgctgcaaacctacttccatggcttccactctctgctgctctacgacgagtgttctaattctataccgacgtctacccagtctaccttctttggtatcatgcgcgccggtatttggg

SEQ ID NO: 81950 - DNA, 534 bp, Zea mays
  Clone ID: MRT4577_174752C.1
gccggccgggttcggagataagggacccccactagaacgtgaaccccctgacgccgctgcgaagggatatcgccgaggagaccggagcccccgcactggccaagctgaacccggcgagagagtacccgacggggctggaacatcctctcagcctcaccatgaaggacatcgccgccggcatgcacaacactggctaggtgtcttcacttcactcacctgtccagggtaccgcaataatcagcttccgaatgcaggtagttttgtcagtgttgaatggaaatgccaaactgacaacgtctgttatccctatgcatatgtaatctccagcctctgtatattcactcttgttgtcaagccccattggcatatcttggcatattatacatatcgtaatagtaagcatcgtactacccgcatgctgagtcgtaataattaacgaatatcccaccaagatacataacatagggccctatgacaaccgtcgctctaaaaatattgtctccctcgggctgaaccaattctatatccaggtta

SEQ ID NO: 81951 - DNA, 738 bp, Zea mays
  Clone ID: MRT4577_174753C.1
cagacggcggtgcaggtcgtcaagggcccagggccggcgcacccggcgatgcccggctaccacttcggcgacaccacggtgatcgacgacgcgctgacggacgggcccagcgcgtcgtcgtcgcggctcgtcgggcgcgcccagggcacctacatgctggcgtcgctcacggagcccgtgctggcggtgtccatgaccgtggcgctcacggccggggcctacaacggcagcgccgtcgtcgtcgtgggcgcgacgacgtctcggcgggcgtcagggagctcgcggtggtcggcggcaccggcgcgttccggagagctacgggccacgtgctgtggcggacggccaggatggagtcccgggaccacatggtgctggagctcgacgtctacgccaccgtgccggccgctagtccggctccgcctccgcgcgccggagtggcgcgtcaggtggcctgagtgcctgacctcaaccgtacctcgacgtgatgtcaccggacttggttttgattttaccatgcacgctgctcgcctgctgtgtgtatggtcaatcgcataaaattgcttcagctccgcgcctccgcacatacgttggaaaattgaacaataaatgattactatactgctgctggtgctaccgctaccgtcagtcataataataagtttgaattctttacgttcaaatcaatgaacctatgatggatgtgagtaaaaaaaaaaaaaaaaaaaaactcgagggggg

SEQ ID NO: 81952 - DNA, 595 bp, Zea mays
  Clone ID: MRT4577_174754C.1
gatcatatctgcctcttattttcctgactttattatcagtactcactcccccgcctttcgtgcacgcgggtgccgctgcggggccttttctctatcccttggacctaggtgttggcttcgtctttgctatcgaaggaccagcccgcgacgataataatgccatcactgatgccgactgagtggacgatatagggcagagcaaccctctgctctccctctctatcgtcaatgtcgccctgattcaggacgaagtcgagaatgtgtaatgaggaatgatgcgccacggatatgaagatgtattgatatctccaggagagccacgtatctgtcatatctcataagggtcgactttatcttgaccatcccttactgtttgctcacagggtttacgaactgtcctctattatgtctgcttctgtctgcatagtgacggactatattcttgcgcttgctctcccttgacttggctgaatctgatgactacgcaggatactcccttcctcttagcttccctgagaacccgcactttgacgaccaaatcttgcattcatctatatctttgctgatgatgaaaccaccactacactatcttcct

SEQ ID NO: 81953 - DNA, 240 bp, Zea mays
  Clone ID: MRT4577_174755C.1
gagctcttagtacggcgggcgccgctctttttttttttttttattcaagcgctctcaaagcccaatacaacaaattccaggaacaatactggatgagctgaaacagcgacgacatgggacatcccctgttagaccagaacccaaaccagtttaccaacacccgagttccaaccgactacaattgaaggacatgcgtacacactgatgccacccgaaccaattaacctccgctggtgctgg

SEQ ID NO: 81954 - DNA, 314 bp, Zea mays
  Clone ID: MRT4577_174756C.1
ctggcgtttttttttttttctttgatgactggaatatattttactacctctgaacctttccctcatacaaagtgctcgaaagcagactccgtgtgaggaaacagcttcaaccccatccaagaacatacacagatttgcaggctttctatttttacatacactgtctaacatacggatgggagatattaacatacccgctcccatatatacttgtaacggagaataaacagcttcagtcacggcttcatgttttcgttatagtgcacaaccaacagactctctatcaaacggccgtctatgtttacatcataccc

SEQ ID NO: 81955 - DNA, 265 bp, Zea mays
  Clone ID: MRT4577_174757C.1
gtaggattccggtcctattgtgttggccttcgggaccgggagggaggcgagtgggcaggagagagaagggggggcgtttaaaattggggatcggagagaacggcggaggaggcggggcctcgagctgagctggcacgtccggggacggggaaggaagacaactggaattgggaggcgggtggtgctcggatgctcgcctgcgctgttgtttgttgcttgacttgcttgtttttcccggggatacaagcatttgctcgtttgttcc

SEQ ID NO: 81956 - DNA, 607 bp, Zea mays
  unsure (1)..(607): unsure at all n locations
  Clone ID: MRT4577_174758C.1
cgcacgccaccgctgtcccactggtgctcgacgacggcgcccctcccggccggcgcagaggcctcgccgccgtctctgtccggccatggttctatgacggcctaccaggccgacgcagcgccggtccagctggccgcagcggcgccgccgcaggggtccaggaagcgggcgcgggcgtcgcgccgcgcacccaccacggtgctcaccaccgacacctccaacttccgcgccatggtgcaggagttcaccggcatacctgcccctcccttcgccggcgccgcgagcgcacgctctctcttcgaccacatcttccccttgcgcaccgccgccgggaccgggagcctcgccacgctcccgcagtacctccgccgccccttcgcgcagaagctgcacgcgtcgaacccctacccgccgagcttcgcctcgtcctccacgtcctcaccagcgccgaccaacgtctncattgcgcccgcttncaccaccaccccgggcacggcagccgtggcgtccagcgacagctaccaccagctcacagcagcctcaacgtccgctcttctctggatgcagcaagatcacggcagcaacaactaccacccgttccatcagt

SEQ ID NO: 81957 - DNA, 975 bp, Zea mays
  unsure (1)..(975): unsure at all n locations
  Clone ID: MRT4577_174759C.1
tctttccccctccgtgttgctcgcgacggcaaggtcaggagagagacgagtgcggcgccagaagaaggcggcggcggcggaggaggacccggcgccgtctccggccatttgagcggggcaccatgtcgatggaggacagcgcgcagccggccggtgccgccagcgccggcgaacgcgcgagctcgccgtcgccgtcgcgtcggctgccggacttcctgcagtcggtgcggctcaagtacgtgaagctggggtaccactacctcatcacccacggcatgtacctcctgctcaccccgctcatcgtgctcatcgccgtccacctctccacgctctctccgggcgacgtcgccgacctgtggacgcacctccgcttcaacctcctctccgtcatcgcctgctccacgctcctcgtcttcctctccaccgtctacttcctcacccgcccgcgctccgtctacctcgtcgacttcggctgctacaagcccggcccggagcgccggtgctcgcgcgaaaccttcatgcgctgctccaagctcaccggcaacttcaccgaagccaacctcgatttccagcgcaagatcctcgagcgctcgggtctgggggaggacacttacatccctcccgccttggtcaccgtgccgcccaacccctccatggaattggcgcgccaggaggcgcaggtctgcatgcttggtgccatcgacaacatgctcgccaagaccggggtgaagcccaaggacattgggattcttgttgtgaattgcagcctgttcaacccaacaccgtcactgtccgccatggtggtgaaccattacaagctgagagggaacatagtcagctacaatctgngaggaatggggtgcagtgccgggctcctgtcaatagatctggccaaggatttgctccaggtgcatcccaactcgtatgcgatggtggtcagcacccgagacattaccctgaanntggtattttggg

SEQ ID NO: 81958 - DNA, 683 bp, Zea mays
  Clone ID: MRT4577_17475C.1
ctcgaggccggccgggactgattcccagagagacgagtggcttcctgagatcagtgtgtactggcagactacgaaccggctatctcggtgggcagcttgctttcgtcttgtcggaggagaatctccactacttgttcaacctgcacaagaaggacgaggagcagcccgccgggcagtatgggtactccgagaccgaggtggtcaccgtcatcggggagggcgagtacgacaggtacaagaagggggataaggagatgaagcacaagtggctactctcggtgaggccggcgccatctacgtcgtcgacttggcactctactggaataacgatgcgaataaggaccccgagtatctggtgcaggtgcaagatcacggaggatggtcgctgcacgcggcgcgcgcgtctacggcgcagggctactgtattccacgtagcaccaacgagaatagagaaggactgccatgcactgcgaggaggatacctgggagaataaacaccaccatctcttcctctgaccgtaataccggccggctcgtgattgatgtagctaggtctggcgatcacaaccacacaggctgtttgattgtggactgtatgcgagcgttagtctgatgcgttcactgtattgagcatgctctcctgaccttgtcagctgcttgcttgtggcgagtgaaagtgcgag

SEQ ID NO: 81959 - DNA, 508 bp, Zea mays
  Clone ID: MRT4577_174760C.1
cattgggtacctcgaggccggccggggcgcgcatagacatcgacgcgagcgaatccctcttatcgcattcgtagccttctgttgcatcacaccagcgtcgaaatcccaccatccgtcatcgatggcgcccaaggcggagaagaagactgctgcgaacaagccagcgcaggacgagtccgctgccgataagggcccatgggtgaagaagacctacggccaaaagcgtctcccggtggcccagtcaatgcggcaaagaaggcgtcgacgagaatggtgagacaaaagctgacatccccgtggatacctacaagatctacctcttcgaggggctgaagcaggatcaccccgacatctgcctctcttccaaaggcatgtccatcctgaactccttcctcgacgacgtcttccacaagttcgcctgggatggtgccaagcttgcgcgctatcgacaagaatcccaccatcccctctctacagattcatacctctgtccgccttgtacttccct

SEQ ID NO: 81960 - DNA, 338 bp, Zea mays
  Clone ID: MRT4577_174761C.1
cttggaaagagggggtaacaaaacacgggtgctcattcttgcactaccacaccatgtaagggcgtggattcatttttggccgcggggagaccctcatcaatgatctatactagctccatacgaatggtgataatccacaaatagcatttgtattatgaagaatgtatgtgaccactgacctgtgagacaaatactgatatgtatttaaacacggttgtgatgcccaaatgcttggagaaacaccctacaaattcaaaagtgcactagaaggaagaaaaaacactgagagctcaagcaacaaccaatgatcactacttgcccccacttgatatatttta

SEQ ID NO: 81961 - DNA, 286 bp, Zea mays
  Clone ID: MRT4577_174762C.1
ggtcgtccgataggattccggtcctattgtgttggccttcgggatcggagaagctgcgacggcgggggcttgtgcagacccgcaaaactatgtcagctgggacgggatacatgccactgaagctgcaaatagtaggatagcgtatgctgtgatcagcggctcctattcgtacccacctttcgatctttcaaagctatgtagcccttaggcatcatcagtcgtgaaagggagtacagcatcaccatacaccgcatttctctgaaacaagcagccacatttctttccc

SEQ ID NO: 81962 - DNA, 690 bp, Zea mays
  Clone ID: MRT4577_174763C.1
gccggccgggctgcgagaacactaatcaaaacgaatttacatcctcttcacgaagcgtaattgcagcaatgtcgagccaacaaggcgcaaccatcacagttcattggctgaacaagtcgcgcggccagcgcatcgtgtggttgctcgaggagctgaatctcgaatacaacatcaaggtctacaagcgcgatgccaacaagcgcgcaggtcctgatctgaaggccgtccaccccttgggaaaatctccagtggttaccattagaccggcaaattctgagaaggatattgtcattgccgagagtgagaccattatggagtacatttgcgaccattttggaaagcagttggttcctgcgaggtaccccgagggccaggagggcgtgcttggcgcagagacggaagagtggatgaggtacaagtttctcatggacttcaccgaaggcagtctgttcacagtccttatcgctgctattatcagcggcagtatcaagcacgctcccgttcccttcttcctcaagcccatcactggtggcgtcgccgctaaagtcgacggctcctttgtagatccagagttgaagacacacttcgacttcttggaagattacctcatcaagtctcccctcgaagggagaatttttgtgtggctccagacttaaccgcatcgaatatcatgacccactttgcgcttgt

SEQ ID NO: 81963 - DNA, 426 bp, Zea mays
  Clone ID: MRT4577_174764C.1
ccaacacattcttatggcattgcaagcatcaccaaagcaacagaaggggggaaaaccaggccttatacaggaccaagggagacgcccataggggcaaaaaacaaatttcacggcaaaaatatgggccgaaacaaaaaaaaagccttggaagaatacagggggggaagacaccaaaccacgcacgggaaaacaaaaaagggggccaaaaacagacccttttaagacgcgcccaaaatttgcactaaaaaaagaaaggcttctccgggtaagcacagcccgggcgcgggaaaaaaacgttggcggaaaaacaacctgccctaacgaaagattaaaggcccttgccaaaaaccaactggggggggaagcccccaacgaaagcattccctgggccgggggggaaaacaagcttttttgggggcaattgga

SEQ ID NO: 81964 - DNA, 197 bp, Zea mays
  Clone ID: MRT4577_174765C.1
cttcgggaccggctgtcctaaattattcacaatcatttgtacaagccagtcattgatatagggcgtcttgccaaactcgtgcagatagcgaacaaatagaccgatttaaccgttctagatacaatatttctcctctgagattcaccacaaacataccctgtaggcgctaaagcgcgggttacttacagctataaggc

SEQ ID NO: 81965 - DNA, 794 bp, Zea mays
  unsure (1)..(794): unsure at all n locations
  Clone ID: MRT4577_174766C.1
aattcggagggggcttgcttgggggtacgcctactcaatttcgatgcttcagtcagcacaagaagcacttgagaatgagctccaaatgtttgtggaaattgggaaagaaagcagtgacaattccacagacaattccgatgaaaatgaatggagcagttcacccaattgcgaagatttttcagaagaaataagtgaaaagttgaagcttctagagtccaagctggaagaagcttcccttctcatcgatgagaaggattcgagaatacttgaacttgatacactcaacaagacaaaaccaggggaaaccgcactatacaatagcaagctactttccctacagtctgaagttgatcaactgctcatggagaagatggaggccgatatccagtgcttcatcctgaaaagagcttcagaagcttggcagccccagaccgagggtcagggcgctcttcaagaagctcagaagactctgtccgaggatcacaaacagctggaggtcaagcttcggcacaccgagaacagagcgaggacgctagaggatttggtggagaagctagagtcacagtgcaaagagctctcaaacgcttcagaggtcctgaagctgcaggccggagcgagtcgagcttcacttttttgttcggttcagttagtgctgctgtgcatcgcagtgtggacattcgtcgcgcgggtcttgccctctccccccgaatttgtacctacttgatgaggttagaanatttctctgcggatgagcctctgtgtagacattattganaagttacttcctgtaatct

SEQ ID NO: 81966 - DNA, 1110 bp, Zea mays
  Clone ID: MRT4577_174767C.1
gggggcccgaggcgtccggcagtttatccgatacatgatctcattaaatattggggaggtggttcgccacgcgtccggggcagtgcttgggatgcctgacacacttatacctgtccagctactctgggtgaaccttgttactgatggattacctgcaactgcaattggtttcaataagcctgatggcaacatcatgtcagtcaagcctcgaaaggttaatgaagctgtggttagtggatggctctttttccgttatttggtcattggagcttatgttggtcttgctactatagcgggttttgtttggtggttcgtttattctgataatggccctaaattaccatattctgaattggtcaactttgattcatgttctacaaggcagacttcatattcttgcagtatatttgaggatcgtcatccatcaactgtttcaatgactgtgcttgttgtcgttgagatgtttaatgccttgaataacctaagtgaaaaccaatctctgcttgtcattcatccatggagtaacctgtggcttgttgggtctattattctgaccatgcttcttcatgtagcagtcctgtacattgaaccactatcagcccttttctctgtctctccattgtcgtgggttgagtggaaaattgttctttatctatccttccctgtaattttgattgatgaggttttgaaattcttctcaaggagaagcccacgaggtcgaagattccctttaaggttgtggagacgtgagatacttccaaaagagtcgagagacaattgattttaggcttcagcatatcagatgcatacaatgcaaagcgaaaagcttgtcttctgttagtattgagactaattttggcaaatgttcatggatgaagatgacattgtacaaatctttatgtggctgatatctagggccgagcatcttcgagaatagagttcgcgactacacaattcattggggggtctcagaatgctagttttgctcagaaaacatagagaagcttcgaaagccttctcactagttatagacggtgctacacttgtatcagaatgtcagatgcttacaaaaggatgagttcatgcaacacccctttctcccaaccaatg

SEQ ID NO: 81967 - DNA, 272 bp, Zea mays
  Clone ID: MRT4577_174768C.1
ccgactgctcggcttggcatcaaggccgatgctagccgtggacgacgcgatcattcattcggcggactcatgagattctaccgtgagccactcaaatcagatggtaccgctgagcattaccgcggattgaacatatgctatgtacccattgttgtaagtcgtggagtcaagttccgaactaaggagtctaggcagccagttgtactcactgggatcgtcgaggaccacttcgtggacatctatgctccgagcaggttgaacaacggcggtgg

SEQ ID NO: 81968 - DNA, 327 bp, Zea mays
  unsure (1)..(327): unsure at all n locations
  Clone ID: MRT4577_174769C.1
tagctgttcgcttttgggacgttttgctggcgtggcaagcccaattcatgcgtgaaatcttgtaatcctagacatggcttatcgtactaaccaaacacaaaattcacacatacaagatacaattgcctaaagaccaaatacgtctaccagatagttctacatatgcaggaatcaaactggtcctggaataaagctatgatgcgcatgtctcttacactatcccttgttctgtcctgaaatttgaaaatatctaggatgcattcttattccagaaccaactgaactgagtatcttatataaccacacgggttgacganacagattcca

SEQ ID NO: 81969 - DNA, 652 bp, Zea mays
  Clone ID: MRT4577_17476C.1
cacgcaaaaccctaacccaatctcgtttcccacgtctctcgctcccagatgggtctcttctcgtggtggaggggagggcgacgcggcggcgccccgccggaccagcaagcctcaacggttgcgggggtcgtgggtaccgaggtggcagcttctgtcccccgtatctgatgagctcgagccgtgccgctgggagctggtcccggccgccgttgatggcgcgccgcagttccgcatcgtgttctgagcgtgagatatctcggatggtaccgaatttcataagtataaagatgtggtgtttggggtgtactggtaaccaagcattcagctaaaataaacttgtgatgtggttgatgagcttctgattagatatggatggccttatatgctccgtgttctgagcgtgagacatctcggatggtaccgaatttcataggtataaagatgtggtgtttgggggtgtactggtaaccaagcattcagctaaaataaaacttgtgatgtggttgatgagcttctgattagatatggatggtcatatatgctcactttgtctggatggattcttttatgattacagatgaactaattcgtcactacagacaaacagtaatgtaagagcgctaaaatttatggatgagttatagcatgatcg

SEQ ID NO: 81970 - DNA, 202 bp, Zea mays
  Clone ID: MRT4577_174770C.1
aaaaggcttagtggcttttgtaatcgggtgggttccgggggcctggaatatggaggtccggaaccggcccggttacctttaaaaacctttgccgggctcaaggattaaccaggggtcctacaataaacctaaaaagggggtattttttaaagggctggccatcctttattttatggggaagtggcggccaccatttaatcca

SEQ ID NO: 81971 - DNA, 381 bp, Zea mays
  Clone ID: MRT4577_174771C.1
gattctgtccaaccgctctcgacatctggagctccaggatactgccctatgtggcctgtccatcccaccctcccctaatacaacgtagatggagaccacgcacagactctgcttcgatagcaggagcagcagcagagagagacgcacgccggtgtatcaggtcagttctgccggacatctctcgactcaaggaggacgacagagagacgacttggctcttcttcctctccggcgcgatacggaacgcgctccacgaacaagtgtcgaccaccatatccaggctctgccctgttcgtgagtcgagacaaggacggcgccatcacatctgatgctggagacgatcctgttcctgagcacctgagcgaacgagctcaccctggt

SEQ ID NO: 81972 - DNA, 313 bp, Zea mays
  Clone ID: MRT4577_174772C.1
aattatgtttactgctggttcgacatagtgtttgccgatgttttctaccgctgagcataagaggagtttggtaattaaacaccgtgcttcatgcaagcatgagaaagttgtgtggttggtaacagttaccgttcttaagattgatcaactatggtggtactagttctgttgaaagctgcctttagaaaactaagcctcatggtgatgcctataaatgctcggactctggttgtggccattgttggactgtctaatccaaggtacaggttgcttattacatcatgcgatgagacaggctattactaatcttata

SEQ ID NO: 81973 - DNA, 1263 bp, Zea mays
  Clone ID: MRT4577_174773C.1
gggaccctcgaggccggcctggccgggggacaacaacaagcaggagagagaatcagtgatctgtgctgtgagtacctgacctcttccagacagcctctgaaatccccttcggcccttcctgctccagcgggagcgcaccagcaatgtcgtcggcggggccaccgccgccgctgccgccgtggagcaggctggaggggcaggtggtgctggtgacgggcgcttcctccggcatcggacgcgacttctgcctcgacctggcgcgcgccggctgccgcgtcgtcgccgccgcccgccgcgccgatcgtctccgctcgctctgcgacgagatcaacccctccgctgcctcccgagccccccgcgcggtggctgtggaggtcgacgtcgccgccggtggttcggccctggaggcggcggtgcagaaggcctgggacgcctttggccgtatcgacgccttggtcaacaacgccggcatacgaggtgcagtgcattctccattagattggcccgaggatgagtgggacagaatcatcaagacgaaccttaccggatcatggctcgtggccaaacatgtctgtcgacgcatgcgtgatgccaagctgaagggttcagtggttaacatcacctctattgctggccttaaccgtgggcatctgcctggctccacgggatacgcatcctcaaaggctgctgtgcattatgccaccaagattatggctttggaattgggcgcggatcgcatcagagtgaactcgattgcacctggactcttcaaatcagagataactgctcctctgtttcaaaagaggtggttgagcaccgttgcttcaaagatagtgccgcttaaggagcatggcgctactgatcctgcattgacgtcgctggtccgttttctgatccatgaagcatcgtcgtatgtgactggcaacatcttcattgtagactcaggtgccaccatacctggtgttccgatattctcatccctgtaatccccccccttaaggtttagttcattgtaccttagtttcatatggttgcataaagcagacagttaaagactccatggaggaagcactgctggctgtatagttcattcccgacaatattccatcatttttgctgtccactattgttttaatgtattttctccagagacgcgtagtttggtacttgtatagaatgacaatctttaagatactcctttattgtctatcttttcaaaacaccaatcaggatgaataaattgcctaaaagtgtcatttaagc

SEQ ID NO: 81974 - DNA, 295 bp, Zea mays
  Clone ID: MRT4577_174774C.1
ttttatcacgtacaaggcgagcaccccgagccgggccttcatcatgaccatcggtggttgcccggacgccgtcttcaaggacggagtcgacgtgctctaccactccatcagcgcaacggactgcgcgcagatcagctacgacctcattcgcatcgccacgtgtaaggccatggagcaccggatgtactacagcgccgcggtggtcaacgaccgccccgccgaggactccatcagcaacggtgcgccatggaaacatacaggtgcacaggtcacaatatgccgagcgatacgcacc

SEQ ID NO: 81975 - DNA, 1297 bp, Zea mays
  Clone ID: MRT4577_174775C.1
gcgagagccctggttttcgcagggaatgactggatgcgtgctggcgaagacggggtccgagagaatgggcgcgttcgcgttgcccattctataagagctgctcagcaaccgcgagggtgagcaggcttttttcgcttacatgctctcgccaacgagggaaggacctgatcgcgctggtgcagacagggtccgggaagacgggcacattcatgctgcccattctgcagaagttgctgagcaaccgccaggccgagcagtctttcttcgcttgcgtgctctcgctaatgagagagctggttattcagatcgtggagcagtttgaggcgctcggatcaactattggtttgtgttactcagtgttgtactttatctatgttattgatgcggcatgggcgacgaggagaacattggggagatcgaaggagcgattgggattgagaatgggaacacaggggaagcgaggaagtggtgcggtgttgtcaccagcagttatggcaggatcgccggtcaccaccgtctaagggaaactcatctacttgggagatttattctcgatgcttgttttcggcaaggtcttgaatcggtgtgcaatacatcaaaaggttgctgagggttcaaaagatgttggtgcttctcgaattattggcattgacatcaacaataaaaagtgttcctgcaatgagtgttgttcaatttctgcataggtggcaaaaggttttggtgtattagatgctgggaaagctatgctgggaaagctatgccatgaaagatatttgtagcagtgttacatgatggcatcaagtgctgggcaaatatttattagtttgtggtttcacttctatggaatataggagtcatgattttatgcatttgatcggagaccacattaactagaggggttgtgatcctgtagatgaattcccgtacatgaacttgcctcaagactaccttcaacattttgagttgtacgattctgttagtgtcgagcaagccaatatctttgatgtgggtctgaagatggtagatcgagtggtgactgttagccgcggctacttgtgggagctgaagacagtggaaagtggtcggggcctccacgacatcattcgttctaacgactggaagattaatggcattgtgaacgacatcaatgcactcgactctaactatttttgtatcagttagcttcctcatagcctgaaatagtagttgcagagattttgagtgtcaatgtttaaccaccacctttatgacctgttgattggattggtgaactgagtgcaaatggtgtcaattcacc

SEQ ID NO: 81976 - DNA, 428 bp, Zea mays
  Clone ID: MRT4577_174776C.1
ggattcattaatccttgatacttctatgcatactcttcgacataattagttaaactaaaacatcttataaaagtaaattcaaatctaatatttagatgatattttgattcttcatttgtttcttttaatccttcttcgccttgtatcaaggatgccagaggatattatgccattttcttgtgggtttgactgcaaaagttaggtccattccttgatctcatcttttatctgtgtttaaatcaaactgaatcagcatttatagcttagtggcatgcatctcattcaaacaaaaattcaaaattgagagtaaaggctctgtagaggggtgagaaattaagaataaagtgagatgcgaattaaaataaacaggtgttggaaggtaaatagctctattgaaagttgatatccaacgcatcaatattcaaatc

SEQ ID NO: 81977 - DNA, 383 bp, Zea mays
  Clone ID: MRT4577_174777C.1
tttagcacaaaatcatgactcctatattccatagaaacaaaaccataaattaataaatattttcccagcacttgatgccatcatgtaacactgctacaaatatctttcatggcatagctttcccagcattgctttccaatacgtccaggtatagtttaggcaaggtcgaccatttacatggcccaagtttgtttaccatctgagtaatggccccgactttcttaaaaaaaagaaataataaaagagtcatgtggcatataatataactcagtaaaataaccaaaatgacatttgtaaaggtatgcagatggtaaacaaaaataaaaaaacacgaccttgccaaaatggtttcaatatatcacatatgcagatcttatttaaat

SEQ ID NO: 81978 - DNA, 277 bp, Zea mays
  unsure (1)..(277): unsure at all n locations
  Clone ID: MRT4577_174778C.1
cctttnttttttttttttttttttttttttttttcaccccgggttcaaacccgatattcttccttgcacatttctcttttaagcactccactttgcaggaggcggattacatggcgtcggcgtggcgcggcaagacaatcgggccgacagtgccggcctcttacattggcgacgaccggctcccgtccgacaccaagtacggacttgacctttacgagccgaccgccgcgccgtgcattgagtgggtggacgcgcacccgccgcgctccgtggtgta

SEQ ID NO: 81979 - DNA, 544 bp, Zea mays
  Clone ID: MRT4577_174779C.1
aatgaattgacaccatttgcactcagttcaccaatccaatcaacaggtcataaaggtggtggttaaacattgacactcaaaatctctgcaactactatttcaggctatgaggaagctaactgatacaaaaatagttagagtcgagtgcattgatgtcgttcacaatgccattaatcttccagtcgttagaacgaatgatgtcgtggaggccccgaccactttccactgtcttcagctcccacaagtagccgcggctaacagtcaccactcgatctaccatcttcagacccacatcaaagatattggcttgctcgacactaacagaatcgtacaactcaaaatgttgaaggtagtcttgaggcaagttcatgtacgggaattcatctacaggatcacaacccaagttcatgagaaggaaacgacctattgagcgatgttatgtatgacgagaacggagcgagtgtactacattaacctatggtctttgtgatatgtcttcagataaacaggtatagcggcacataggtctttgtaatcttgaaaa

SEQ ID NO: 81980 - DNA, 372 bp, Zea mays
  Clone ID: MRT4577_17477C.1
attcggctcgaggggctctgcttgttttgaggcctgctctagatttatccggggttgtgttctatctggtgaccgtccgatgcggcagctacgatgcagttcgattggtagaggggccatgtaaaacccggagccgacgaccaaccccgcctccgccacgccgatgccttctggccagatgccggagctccagcagtcgcgatctcttaagtacgtgatgctgacgtaccattacctcatcacccacggtgtgtacctgctgatcaccccgttgatcgtgctcatggccgtgtacctattcacactctccgcgagcgacgaattcgagctgtgagcccacctgctcctaaaccatatcttcgtgctgtcctg

SEQ ID NO: 81981 - DNA, 1855 bp, Zea mays
  Clone ID: MRT4577_174780C.1
cacatgaaaccgttttggagactaattttgcagtatgtttaggcaattattctatttaaataagatcggcatatgtgatatattgaaaccattttggcaatgtcgtgtttgttaatttttgtttaccatctgcatacctttacaaatgtcattttggttattttactgagttatattataggccgcatgactcttttagttatttcttttttttaagaaagtcggggccattattcagatggtaagcaaacttgggccatgttaatggtcgaccttgcctaaactatacctgcacgggttttgtactgctgtatttgagctggataaaatgattgtcgtttggtgtgtctatatgccatggacaacgaaaaatgaacaatcttaatccagttgtgtattgattgtattttgctatttaatcctcttcaaatatttttcatatctgtgcaatgatgctatgatcaacactcgaagatcaatggcaccgtctacacttaaccaaaataggatggttacaagtactgcttttccttcattaatggatgtttttggttgattcacatttatcttgtactcacgtgtctttgcattagctttctttgtccggcataacctttgggcgccttcaatttgtttccaggttttaagtggtgaagctattgatactgccaaggctcttgctttgaaagaattgaaataacatacacaaaacaatctttgaatcttgtggttgtattatttctgctcatgtcaatgactgtacaatgtccttaggtgcttacaatattgtcactcagtcattttttgtgccactattccatcattttcccttgcttatcaatgagagtctttatatgaaactaatgcttgatgaattgctttcttttccacaactcaatgttttcctggtaggactgatgttcaatttttgcataggtggcaaaaggttttggtgtattagatgctgggaaagctatgctgggaaagctatgccatgaaagatatttgtagcagtgttacatgatggcatcaagtgctgggcaaatatttattagtttgtggtttcacttctatggaatataggagtcatgattttatgcatttgatcggagaccacattaactagagggtactttcttttttcaagattacaaagacctatgtgccgctatacctgtttatctgaagacatatcacaaagaccataggttaatgtagtacactcgctccgttctcgtcatacataacatcgctcaataggtcgtttccttctcatgaacttggtgagacattctttttttctatagtagtaaaaaaagatcaagtctgattgtggcacattaatatcttggtcaattgttttttagattttcggtcaaacattgatgcagaatggactatactgcgtcctaacggcttccctcttgtttgcagggttgtgatcctgtagatgaattcccgtacatgaacttgcctcaagactaccttcaacattttgagttgtacgattctgttagtgtcgagcaagccaatatctttgatgtgggtctgaagatggtagatcgagtggtgactgttagccgcggctacttgtgggagctgaagacagtggaaagtggtcggggcctccacgacatcattcgttctaacgactggaagattaatggcattgtgaacgacatcaatgcactcgactctaactatttttgtatcagttagcttcctcatagcctgaaatagtagttgcagagattttgagtgtcaatgtttaaccaccacctttatgacctgttgattggattggtgaactgagtgcaaatggtgtcaattcattaatgtttgttgttgtgccgtc

SEQ ID NO: 81982 - DNA, 1849 bp, Zea mays
  Clone ID: MRT4577_174781C.1
aattcggcacgaggcgccgccgcagcaacgtcggcaatccgagacgccggaggcctcctcctctcctaataccccccccccctcgggaccgggagggagtccgccgcggtgcggatcgcggccacggccacggaaacaccggggcgcggctcatggaccgcatcgtcggcggcaagttcaagctcggccggaagatcggatgcggctccttcggcgagatctacctcgccacgcacgtggacacctacgagatcgtcgccgtgaagatcgagagcagcaagacgaagcatccacagctgttctatgaggcgaagctgtacaataccctccaaggaggaagtggcattgccaacgtcaagtggtgcggtgtggatggagaagagaatgttctcgtcattgatttgctggggccgagtttggaggacctgttttgttattgtggccggaaattcacgctgaagactgtcctgatgttggctgaccagatgattacaagaatagagttcatgcattccaaagggtacttacacagagacatcaaacctgacaactttctgatgggtcttggtcggaaagcaaaccaggtatatataattgattttggtcttgcaaaaagataccgtgattccactacgaatcgccatattccttacagagaaaataagagcttgactggtacagcgcgctatgcaagttgcaacacccaccttggaatagaacaaagccgcagagatgatttggtatctctaggctatgtgcttttgtattttctccgaggaagccttccttggcagggactaaaagccgcaacaaaggcacagaagtatgacaagatatgtgagaaaaagatatcgactcctatcgaggtcttatgcaaatcctgtccggtccagttttcatcttacttccattattgccattcattggcatttgatcagcgacctgactatgcatttgtgaagcgacttttccgtgacttgtttatcagccaagattatgagtttgattatgtcttcgactggacagttttgaaatacaaacaaggccacaaacaaaagcaaagtcctggggcacctattgctcgacctattcaagcacatggaccgaaacaagcaggtgtaaatggtgttattaatcataacgaagcccaggagcatgtagagacaagtcgtccaacagggcaagctgcatggtcgcaagacaaacaggcaaccaacaatgatcggaatcctgacgtgcggcataccgtgaaccttagacaagacatggctgctggaaaagcacagctgacaacatctgtggctcttcctagttcccagtggaaaaattatagtgattcaagacataaaggacaatttgatgctgttcaccacaatcagggtattgtaaacataactagctcatctaacagttggcttcctacattccagcacaatgccccaggaaaatgacagatcatatctggtggagcaaagaggaagtgctttgagagttagaggaggcccctgttcatctgagttggttcagagttaagcattgcacaatctgtagacttgatgtctcatgtattgttactgaggtggctcctgaagcactgatgcatttgatgatactattagctgataatatggaaggtttgctcgcggttgtgatgactcttgaatgcttgggcagtttgttggaccgctgcttaaatgcttctttgtagtagttctggatgccttgtaaattgcttacatgttaatatatgtatgggttgaacattgcaaataagatgatctgagctttgcaaaaaatagagtcaaaaaaaaaaaaaaaaaaaaaaaaaaaaaaaaaaaaaaaaaaatat

SEQ ID NO: 81983 - DNA, 149 bp, Zea mays
  Clone ID: MRT4577_174782C.1
ctcgagggccgtgccggggatcgcttaactctcgtgtttttttacataacgccgagagcatgactctagcgccgagcccggacagacacttgcaacttctctcatgtcctgttccattcgactcagacgctctcagcgcgcacgtcctg

SEQ ID NO: 81984 - DNA, 1055 bp, Zea mays
  unsure (1)..(1055): unsure at all n locations
  Clone ID: MRT4577_174783C.1
cttttggaagagtgttggagaagccgctctccatcttccttctcggaatcccctctgttccgtcttcctctgcgcgcgcgtctgtgttttgcgccgcgtcctcagctctaggccatggcgcactcccgctccagcttgcctctgctcggagctccttccttcccctcccatggcgtcctggtccctgctcggattggtcaagctcgcgtgcgattcccatgctgcgcgctatgcttcttggtcgccgtggcgctcgcccctgcgcgcgagctccgtggtctccctgctccctcgcgacgtcctgctggccggcgcttggactgcgcccaagctcctccatgtcgcgcccctttctctctctctctctctcgagtctctgtaccgcgccctggcgtctgcgcccgacgaagctcccagctcaagctccttcctgctccgcgccatggcggctcctagtccctggttgctcctccggccgagttctctgttttttcttctcccagttttctgcgctcgccgagcaacctccatggccggatctccctgctcctcgctgctcgccccaagctctcagccatggccgtcgagtcccctgttcccatggccgatctcggttctgtttgtcgcgacagccgactctgctgcttgctcccctgcgcgccgtgctcctctgctctctgtctgtgcgcgtgctgtgctcgacgtcttcccatggcgctcgactgttggccgtgccgtggagccagcgcgctcggtcctgcctatctcgtagtgtttggattcagcgcagctcgtgtcctattttctgcttgccagcatgttctctcggctcgcttggtctgaattcccatcgcgtcgtcgatcttgccaagtatcgtcgttcatcgtcgtgctgtgcgtgcaacagccctgagtctatgtcgccccggccttgttgtcgacatcgttcgccgtagctcagcttgctagttcgtcgtgtcgcgtcgtgtgccgatattctctcccggcaggcctngccgtcgacgatgttcaagagattgtttggctcctcgcat

SEQ ID NO: 81985 - DNA, 142 bp, Zea mays
  Clone ID: MRT4577_174784C.1
cgagtatacactactatcgctgtgatcgctgtcatcacccccgatgactaacaaggcttgtacgagaagctgcagagcttccagctccagctgctagacgactacacgtgactgctcacccagtacgatttggacgaacctg

SEQ ID NO: 81986 - DNA, 459 bp, Zea mays
  Clone ID: MRT4577_174785C.1
attggcaaacaccgggaggacattgcaaatctaaaaggggtccctgggaacaactaccaaaagaaaacctggggggggaccaaaccgggggggagggggcaaatgggagcctatcctggtgacattggaaacaaaatccaaaacccatcataataatcggaggggggggggaaaagcaaggccatgggaccctgggccaccaaaaggaaagaaattggtacagggggaccttgccgcgcaagaaaaaggcaaatctacccctgggatttaaggccctaaagggggaacccaggcatgggaaagggggcggaaaacttttccacctggaccttgggggtttcgagggccttgggggaaaacaggcccttggggaagtcctggggggggttgccggaccccttttgggagttcagggaaaggggcactgcccgggggaggaaccccccaaattggtggaaa

SEQ ID NO: 81987 - DNA, 625 bp, Zea mays
  Clone ID: MRT4577_174786C.1
tcaccagttgcccgctagcaaaaccattgattgcctgttagtagatggaccgcccgcctaccgagaagacattcaatattcccggtttcctgcagtgccttttttccaaccgcaattggcaccccacagcaccatcattttggatgacattaaccgtaggggagaacaggaaattttagcccgttggcaaacattgctcaatgttagttttgatagctccattggcaatgtggcgatcgcccatctgtcggcctagggtaaattttaaaaatcccctgatccaccagtttcagggaaagccgggtaaaaatctgccagtgttgggatattggatattgagggaacgagctagaaccctactatctgtcagcctagcaaaccaaatgctttacatcgtcagactagttcaggaaaattaagtttgacccatagattaatcctaatcttttgctatgaaatccccccaggctcaacaaatcctagaccaggcccgccgtttgctctacgaaaaagccatggtcaaaatcaatgggcaatacgtggggacggtggcggccattccccaatcggatcaccatgatttgaactatacggaagttttcattcgggacaatgtgccggtgat

SEQ ID NO: 81988 - DNA, 287 bp, Zea mays
  Clone ID: MRT4577_174787C.1
ttaaaatttttccgcgcccccaacaaacacaaccagacatcccaacaaaacatcctacactaccaatgccaacaccaacctacaccagctgacactccacaccaaaaaaccaaaaacgaatggcacactactaccttcacaaaaccattatacatagatacaaaagataactaccaaacaaacaccatctgaccctcctcaacaccacactaggcgcgtcgaccagtactgcgaccaatacaatccccccgaacaaactgacgccagaacccaccacatcgacacac

SEQ ID NO: 81989 - DNA, 479 bp, Zea mays
  Clone ID: MRT4577_174788C.1
gccggccgtgccgggactccttcactgatctctcagtctccctccccttccttcactcgccatgggcatggcaaactccatcttctccgcgcgtgctgcaagcctcaggtgcctgcggggagagggtaatcccgtcgaactcgtcgccttcgcgcaacggctcgcctgcgccactgccggcggggaggggccgcacgtggagcacggggaccaggtagaggcgcaccacgccgcgggctccaacggtgccgccgtcaaataagaagtgccaccgccggccgatgcagcgccagacccgggctttcgtgacgccatgtgcgtcaacgtgacctgcgagctcgacgatctcgacaaggatagaggagttgactgagacgtcgtcatcgacgacgacgtcatgagaaggagatgcctacgacactatccaggagcgactacacagacgatgctgacgtcttcgacactgtctcatattccat

SEQ ID NO: 81990 - DNA, 370 bp, Zea mays
  Clone ID: MRT4577_174789C.1
cttgccttggagacctcttccggcagaagaaagaccaggtctacatatattgcattcacgggttcatatatattcttgatgaataccaagtaaatccatttcaggcggtgagggaggtctataaagtcaatcaatggttgagaatgcatgaaacagccactatgatgagcattagagctggcacatgccttaacctgtatattaatgtacttcaagatacttttagaggtcgacgagcctgtcatcatctatctgttgccttaaacaatgatagtcggcccaagttttgtgtggcacctactatgcaagggaggtctgccttgctagagaatcctaggtttgggacatagacaaccggcgctacatatat

SEQ ID NO: 81991 - DNA, 506 bp, Zea mays
  Clone ID: MRT4577_17478C.1
cgtcacaacacgcaaaaccctaacccaatctcgtttcccacgtctctcgctcccagatgggtctcttctcgtggtggaggggagggcgacgcggcggcgccccgccggaccagcaagcctcaacggttgcgggggtcgtgggtaccgaggtggcagcttctgtcccccacggggcggtggaggtgcggcggcagcggcaggctgcggacgcgacggtgttcgaattcgggtcagcagcggagtctggcgccgctgtgacgctcgccggctactgccccgtatctgatgagctcgagccgtgccgctgggagctggtcccggccgccgttgatggcgcgccgcagttccgcatcgtgttctgagcgtgagatatctcggatggtaccgaatttcataagtataaagatgtggtgtttggggtgtactggtaaccaagcattcagctaaaataaacttgtgatgtggttgatgagcttctgattagatatggatggccttatatgctc

SEQ ID NO: 81992 - DNA, 549 bp, Zea mays
  Clone ID: MRT4577_174790C.1
cattgggaccctcgaggccggccgggaactgacgcgccgtcatgtccaagtcaggtaggggaggtccggatgggaaccagctccgtatgtcactgatcccaccgctggcctccactccgaactgagcagacaacacgggcgccaagaacctctacatcatctccgcacacgagcatcaagggacgactacatacgtctcccgaccgcctgtgtcggcgacatgggcatggccaccgcaaacaacgcaaacccgacctccggaagaaagtgatgcctcgcacgtcatacgtccgccatcggcaagccagtgtgcgtcaccacgcgaccctcgactacatgaactatcaaaaataatgctggagtgagtgagactgccaaggaagagatgaaagcgtctgccatcactgcatcataacggaaaagactgcgctgacctttgtactaagatcactactgcaacaaatgccatcgaatgagaacttggtggaatgcgcttaaacttgaacatgatcatctccaatgtggggagcatgtggtgcaaggacgcta

SEQ ID NO: 81993 - DNA, 335 bp, Zea mays
  Clone ID: MRT4577_174791C.1
cacgcgtccgtaaaaaaaaaaaaaaaaaaaaaaaaaaaaaaaaatatctaaaaattttaaaaaaaaaaaaaaaaaaaaaagagggctgggggtataaaaaaatccaacatttctcaccccagagcctgcgactacttatctttccttttattgcccccttattttcattctttggccgtttttatacaacgcccttactggtaaacccctggcgttccccaccttttattcccttgtagcaaatccccctattcccctctggtttaatatctataaggccccccccgttccccctctccaacaattgcccatactgaatggccaatgggacttcc

SEQ ID NO: 81994 - DNA, 448 bp, Zea mays
  unsure (1)..(448): unsure at all n locations
  Clone ID: MRT4577_174792C.1
cgtccgcctctacgcgtccgcggnacgcgtggnggcttgaaagnaaaattagnngacctctacnntgttgaaatannaacgacgaatcaagnagggggcgtccattttccaaaagggccaagnnattgagnatnnaatcttgggnaaagnnagcgacaaatttgnnnatgagctgatnnggccgctgcttgcagtaagtaaagnggggcgaagntggaagtatgggtggaagnnagcaggcntnntgaaaacangtaccccgatgaccaagnnctgctgctnnngttgtgcnntctgnnttagtgggttgtttannatttagtnnttaatacccgtnngtgcattgagnatanntggcacgnncgttcttgcttcaacttaccatcnnaccatggcnnaatgtctgccaannatccatggattggatggnnnatggatgttggtttgt

SEQ ID NO: 81995 - DNA, 253 bp, Zea mays
  Clone ID: MRT4577_174793C.1
aacaaagtgaccgtgcgtacagaggatcgttttacacaacagcatgaacactgtcatcgatgttgaaacatgcctggctctgtgaaatgccagcgcctttgcaatgcagatgccctgcccctgcgccgtgctgcagggctagtacggtgctggcgcccgtctgacaacatgatgggcacctgccatgtgtacccctacgccactacctgaggaacctatgcacccagttctgggtccctactacgcggtgtgg

SEQ ID NO: 81996 - DNA, 286 bp, Zea mays
  Clone ID: MRT4577_174794C.1
ccaactcgacccacgcgtacgatgaatcgatgaacatgatgagatatttatgttacgctgtattcccttttcattatagggagggtacttcatacccttaacgtgactacacttatttctcgagtgcctctccgtaacgacctaattcttagataaccgccctgataaacattccaaccatcatactcaaatcggacccctttacctcaataataataataaccgtctttacattcacttatccttctgacctttaaataatctcataatatgcagctcgctctac

SEQ ID NO: 81997 - DNA, 985 bp, Zea mays
  Clone ID: MRT4577_174795C.1
ctcgaggccggccgggaaaaaaaaaaaaaaaaactttcatttcagccatgcccatgagcatcccccgcgcggcgcacctccttgtgctcctctccgttctagccatctccctctcgtcgtgcggcgccgcggcagcgttgccggtctacgacacggacggccacgagctgagcgccgacgcggactactacgtcctcccggcaccgccccgcgggagcggcggcggcggcgggctcaccatggcccccaagggcctgcacccgtgcccgctcttcgtcgcgcaggagacggacccgctccgcaagggcttccccgtgcgcttcgcgccgctgcagcaggaccagggtggcagcgaccgcgccgtgcgcgtctcctccgacgtcggcgtccacttcgccgccgcgacgacgtgcgtgcagaccaccgagtggcacgtctccggcgacggcgacggcgccgcgccgcggtcgggccgtcggctcgtcctcaccggcccggtcctgtcctcgagcccgaacggacgggagaaggtgttccgcgtcgagaagcacagccgcgggtacaagctggtctggtgcgggggctccagcgcgtcgacgtcgtgccaggacctgggcgtgttcagggacgatggggaccgccgcgcgtggctcggcaccaccgagacccaccgggctcatgccgtcgtgttccagaaggatacgaccatgcatgcttgatgcggtgcttcgtttcgtatgcgtagtgcgtagcagttgctcttgctcaactcgactctggtttgcaaatagttcgccaaaatagcttaaactccgccaagtcgccaacatagcccgtacgtgaagctaaaaaacagctctgccggtaaagtggagctatgacaaacagactaaattggacccagataaaatcaatagaaaacaagaaatcatgcaagcagaagatccgaggaacaacaatttcttctacttgtttctcatgaacc

SEQ ID NO: 81998 - DNA, 280 bp, Zea mays
  Clone ID: MRT4577_174796C.1
attcggctcgaggccccttcgataacttctgtaaggggactcctctttgccaatggctatgggggggagtttaaaacagtattggcgaggtacctcatacttcatggcaccacatgttgtattttgtaaactagaactacatgctgctttttttactctttatagaatttacatacttcctattttcactggtgatgttctcttacacagtactgttagatactttttttattatcaacattcatattctttctattgtataataaccagtatttttttt

SEQ ID NO: 81999 - DNA, 578 bp, Zea mays
  Clone ID: MRT4577_174797C.1
aaaaaaaaggctaattaaatattttttattttcaaatttttagggggacataaacaaacttttacttgggaaaccaccccccccccaaaaccccccaaggcccaccttaaaaaaagaaaaaggggcctttttttaaaactcaggcccaaaaattggaaaaacccaaggttaccggccctaacaacccaatgggaaaaaaaataacccccttttttttttcccgcccttttttttaaaaggcccctttaataaaaaaacccaaccccaggggacaaaaaaccgggaccaaccgattgggggcccggatattttatttggaattttccaaaccttaaaaagttttgaaatttttggaaaaacccaagggtttttaaggggccccgggcccccctttggtttttccggaaaaatttaaacccctttttaaaaaaagggccggaaaaaaggtctggaaccttggggcttgaaaacttttgtttgtcttttttggaaatccccccggattaattcacccttggtaacccttgaaatttgttaaaaggacccccaaaaaccaaaaaaaatttctggttttttgg

SEQ ID NO: 82000 - DNA, 392 bp, Zea mays
  Clone ID: MRT4577_174798C.1
aaacaatggtgaggcggtcactacttggtagggcaccaatggccttaaatttcttacaaatcattggagcttaatcaatgaaaatgtttgatttcccagccattcaatgaaagcaaagaaactaacactgtcaacataattcgcaaacacattagtcaagtactctacttcatccaagagaagctaaggaaaaacatctacaggtcaatgcagacttcaccactgttttaaaggtgtcgcctaggcgtccaggcggtggtccaacgcctaggcgccttgcatcggctaggcgccacctaggcattcaggcagcggtccaatgccttggctcaccataccactttaaaaaccatggatttcactatacatccaggtttcaaaaacatcatact

SEQ ID NO: 82001 - DNA, 170 bp, Zea mays
  Clone ID: MRT4577_174799C.1
aaaacattaactctatatgattcatttttcagaagcaccaggcagatgacaggaggtacttgtgggacgccaacaactcttcatggctcattactgcgagcgatcattttgagcatatacaaggctgtaggatgttaaatgtaataacacccgacgatgtatttattgta

SEQ ID NO: 82002 - DNA, 882 bp, Zea mays
  Clone ID: MRT4577_17479C.1
ttgcggcacgagaagcgctgaaagaactctaagtgtcgttccttgaccttgcaattgctcctccatagcccaccttgttgcccttggaacccttctggaccgctcccttcgtctgtgccttctgggacttggtcacctcagcctttttcgccttcttctcatccttggtcttcttgatgtctcgtggtggaggggaggttcgacgcggcggcgccccgccggaccagcaagcctcggcggttgcgggggtcgtggggaccgacgtggcagcttctggcacccacggggcggtggaggtgcggcggcagcggcaggctgcggacgcgacggtgttcgaattcgggtccgcggcggagtctggcgccgctgtgacgctcgccggctactgccccgtatctgatgagctcgagccgtgccgctgggagcttgtcccggccgctgttgatggcgcgccgcagttccgcatcgtgttctgagcgtgagacatctcggatggtaccgaatttcataggtataaagatgtggtgtttgggggtgtactggtaaccaagcattcagctaaaataaaacttgtgatgtggttgatgagcttctgattaaaaaaaagtcgtcatatgcacgtgaacggatgtacgcgttgtagtccttctcctgttcggttccacgcgcgcacgtatgcgcttgtgctactggttgctgcttgatcgatcgatggatcgatgattccatgtacatatttgttagggggatgctgcggctaggctattagctgcaggctatagagtttgagggtgatatacttatcagtttgctgcctgtaagactggttttggttttgctataatcgcaccataccccgatgtacagtatacagtcccctct

SEQ ID NO: 82003 - DNA, 865 bp, Zea mays
  unsure (1)..(865): unsure at all n locations
  Clone ID: MRT4577_1747C.1
atggcccggcccagaaccggcacggcccagcttctaacgtgcctgggctggcccggcccgttcaccgtgtcgggctgggccccagaattcggcccgtcggtcgttgaggagtcggagacgggtgtcgagagccgagagccgagagtcggagaccgccagaccgaggatgaggaggcggagcgacaacttgaggaccacaatgaggcgatggatgctagacaagccttattgggtgttggtgtcactcatttagatccggtcgacctcgaggatttcgttgcctctagaacaggcactgctacggactccacgagcccaccagcatctaccactgcctctgctggtggcggctcaaggaagagatccaaagtttggaacaatttcgacgagttaaccaatctggtaaatggtaagcgtgtaaggtatgctgctcgatgcaagttctgtcatgagacattaagtgctagatcctcttctggtactggtcacttgcttagacacaattgtagtgctaagaaggcacatgatcgatctggccaaacccaaactgtgcttaagtacaaccccgatggttctttgcagcgttgggagtactgtccttctgttgcaaggaatgaactttgtcgtttgatagctagagatgatctacctctatggcatggcgacagcaacggcgacagcaacgacatcactcgtgcacataaccctagatttgtgcatgtttctaggcaaactactgctagggacatgattaagttatataatgagcgtaaggtaaacttaattggtactttgaaaactgatgttacatctgtttgnctaacctctgatatttgggctggcaaggctaaggaagactatttaa

SEQ ID NO: 82004 - DNA, 659 bp, Zea mays
  Clone ID: MRT4577_174800C.1
ccgtctacatcatcccggcgctggcgcacatggccaccttcttgccgccggccgccagggagaacgccgtggagcggccgccgcgcgggctgggcggctgggcggggatgtacgccgccaacttcttcgtggtggcgtgggtgctcgtcgtcggcttcggcttcggtggctgggccagcaccgtcaacttcgtccgccaggtcaacacctttggtctcttcaccaggtgctaccagtgcccaccgaggcactgactcgatgatcgaccaccaagattaatatatcaacaaattcatatgcatgcttgaatttcttgaggaaacatatgcatatgcctagtcatagagagagagagagacatcacaagatcatgacgaagagggtgttcaatttccatgtcgacgtatgtatgacgacgatccacatggtgtgtccttgtcggtatgtatgcgctacgaacggatgtgtgtatctctcgttaagatatatattgatattgatcgaattaagcgttacgtgtgagagttacgttgtagccatgcaattcagactgatattcgaatctatctttccggagaaaaaaatgtttaatagaggatagaagactaactgccaaatatggtaagatctaaaaaagtttctatccgggttggttgttc

SEQ ID NO: 82005 - DNA, 555 bp, Zea mays
  Clone ID: MRT4577_174801C.1
tcgagcggccgcccgggcaggtaaaaaaaaaaaaaaaaaaaaaaaaaaaaaaaaaaaaaaaaaaaaaaaaaaaaaaaaaaaaaaaaaaaaaaaaaaaaaaaaaaaaaaaaaaaaaaaaaaaaaaaaaaaaaaaaaaaaaaaaaaaaatccttgggccgaaacccctttagggggaatttttaaaattttccaaaaacttggggggggttgaaatttttttttaagggccccatttccccttttaggggggcttttaaaaatttatgggccggtttttaaaaacgtttggagggaaaaaaccttggtttccccaattttaatccctttaaaaaaaatccctttttcccaatttgggttttaaaaaaaaagcccccaccaaaccccctttcaaaaaattgcccaaccttaattggaaaaggaaccccccttttagggccctttaaacccggggggttttggtgtttccccaaaggggaccctttaattttgcaaggcctttaccccccgcttttttagttttttcccttttttttccgcccattttgggggtttttc

SEQ ID NO: 82006 - DNA, 242 bp, Zea mays
  unsure (1)..(242): unsure at all n locations
  Clone ID: MRT4577_174802C.1
ccgattagctcaatcgacctccagaattgggtagaacttcgacaccccatgaagggtgccctgatcgtgtgccgggttgctcttcctgggcgccctcgctgcgagcccgcacgcctctcagtacaaagcggctggcttggtgtgactgccagacccaccaccgttttcaatctaccccgcctnnccgttctaaatatgcnncgcctnnccgttctaattctgcccgcccgcaaaagcagcag

SEQ ID NO: 82007 - DNA, 682 bp, Zea mays
  Clone ID: MRT4577_174803C.1
agttgggtccttgactgggaagccatctgattcacgtctgataaatagttacaattgtgacttggaagacctcccaatgatgcttctgcagcaggtcgccagtcaagtaatccactggctccatgatgaagcgatgattcttgggatgaacgtgactagagattttctgtgcctgtactttgaccttggccaaggcgaaacacttggtctattggcacatgtcgacccggatgacacctatggctgcatctcatggtacctcactgttgatcacccaatggaggaggggaagatgtcagctggcagtccagagtcagagaagcgaaggtttttggggtacctttccctggaagtgctttactctaccctgatggacctgataaaattgtgcagcacaagtgatcaaattcgtgcctcttgatcgacataagtggatgaaatgatgtatgtccgtgcagtgtttaagagtatgtaaattgaggcattatgtgcacctgttgtttgctaataggatgtttggcttgaaaaacggagtccatcctctcactcttcagtatgtttgtttggttcatgaatgaaataagttgatacatcaccatcttatttcactaagttaataattagtattagcatgtggaataaagttgtctcgctactctattaagaaattggttgattctcc

SEQ ID NO: 82008 - DNA, 553 bp, Zea mays
  unsure (1)..(553): unsure at all n locations
  Clone ID: MRT4577_174804C.1
aaactctgaagtttgaatttatttgaatttgaatttggaaatttgagtcaaggagcaatacttatttttaagtggattacattaatataagtaaaccataaggaaaaatagaagaataataaaaatgttagaggagggttaccttatattagaattttactgtacaatttaaaatctgaaattttaaacttatatttgaatttagtttgaattctgaaaatgaaagaaataagaaaataaaatacgaaacaaaagaatgaaaaataaaatggaaaaagaaaaaaaaagaaagcctttcctcgtgactgggccgaatctgaccagcctagttcgccattgcgctcagcccggatatctggcgccgacacctagtccccttgtcagccatagcgtcgtgccttctttcctttcccctcgttggcagctcgggcccgcttgtctagctccacctcgtacgcgcaccaagctctttctctagcgcatgggtccctttggaccagtgatcaatggcgtcacgtttccattgacacatggnggccgtatgcactgctgc

SEQ ID NO: 82009 - DNA, 1024 bp, Zea mays
  unsure (1)..(1024): unsure at all n locations
  Clone ID: MRT4577_174805C.1
attcctcgctgaccccgctctcgacattgctgccgaagagaggcaccggatggtttcctgccttctgaatgtgactgtccaagagagtgacgagccaatcacactggggtatagtgtaaggctgtcatccggagaggttgtggatgtgaagtccagccgaatggtcaggtgggagagggaggattctaagctgtacgtgcagagtggcgacggcgagcccagctacaaagagaagatcgagttcgcgacatacttcgcagaggagatctctcagggcctgctctttgagatggaggaccagatcccttccctcgctgagcttatcaagttcggcagcttgctggatttccaggacgccgctgttgggttcttgctcaagtcaaagaacctgcagatgtttcctgaagatgagcatttcctgaagtcttcaatgctagatggcaacaacaaccgttagttttctgtcgattatgcgctttgggtaacgttcatggtcagcaaatgtttctgctttcttatgatgctggttggctacataaaaatatggtgctgcgcttggaagtggaagcttctgaatgtgactgttctctagcgttcatcttgtgttcgtctatcgctcgttttaagtttggatttctgtgtgctagaatgcaacttgtcagtgcttccagtgcatgtattaagcgcaaaaactcaactgtgataaataatgccgtttgcaatgcattgtgtctgatctatttgttttttttcagcaaatgtttctgctttcttatgttgctggttggctacataacaatatggtgctgcgcttggaagtggaagcttctgaatgtggctgttctctagcgttcatcctgtgttcgtctatcgctcgttttaagttggatttctgtgtgctagaatgcacgtgtcagtgctccgtgcatgtttaggccatgaaccccctgtatgatgagacagtttcaaaaaaaactctagggcggccaaaactatgagctcgtcgnaacgggaattnattccg

SEQ ID NO: 82010 - DNA, 467 bp, Zea mays
  Clone ID: MRT4577_174806C.1
gctcggaattcggctcgagcgcacctgtgccatagggtttttttaccctcactgggactaaagctactggaggggcatgacagcctattcggcgttagcgccaaactaaaggcaacagaaaagcgcacaggtcacgtaaacagagattctttggcgctaatattgtgaccaatcctgatcagtaaggaggtgtgtcagaaagccctccaagcaattcagggggatatttctatggatctactccagaaaacgacagctatcaacgttcaaagctgagttcatcttgtcatgggcattctactggcagcttgcctgttgggtctgtgcccaaatcttcttcacaatgtgatgatgttacttttcatattttacaaaaaaattaactgcaggcgcaaaggtacgttacggtcaaacatcactgccttatgtagcagtagaaattgggcactggccagagtgagcaaatg

SEQ ID NO: 82011 - DNA, 1118 bp, Zea mays
  Clone ID: MRT4577_174807C.1
tcatccccctttggcttcccgcccacccgtcctacgcgccggcgctctccgcaccgcacccacccatcgaaattccacttcgcctaattccaaatcgccaaggccgagcagcagcaagcaaagccgcgccggtgaggctggctgttggagaggcatgccgcctaaatccgatagcgttgaaggaatcgtcctgggtttcgtcaatgagcaaaacaggccattgaattcacagaatgcagctgatgcactgcagaagtttaatcttaagaagactgcggtgcaaaaggcactggatgcattggctgacagtggacagatttccttcaaggagtatggcaagcagaaaatttacattgctcggcaagatcaatttgacattccaaatggtgaagaacttgaggagatgaagaaaacaaatgccaagttacaggaagaacttgcggatcaaaagaaagcaattagtgaggttgaatctgaggtacgaggtctgcagtcaaacttgacactcacagagatcacgtcaaagaagagtgaattgcaaagcgaagtccaagaaatggaagagaaactaaataagttgcggagtggtgttaccttggtgaaacctgaggacaagaagatcattgagaattcctttgctgaaaaagtgagccaatggaaaaggcggaagaggatgttcaaggagctctgggataatattactgagcacagcccaaaagatcagaaggaatttaaggaagaacttggtatcgagtacgacgaagatgttgatgtgaacgtgcagtcttactctgacatgctagcaagtctcaacaaaaggcgaaaattttcccgctgatgatgtagcataagagcgtcttaagttgaaagtaggctacaaccgttacatgccagcagctatgcattcatggttctaccggttcttaaggttctgtagcgattagtttaccctgacagcattgaggccccgtttgtttcaactttttttcagcttctgaccacccagcagactaccaaacgctcacggctcatctcttcagcttgcttttgttataatctctttagtgaaaaccgttaaaaagtcaacatgaacatataatcggtcgagttgttgtggt

SEQ ID NO: 82012 - DNA, 938 bp, Zea mays
  unsure (1)..(938): unsure at all n locations
  Clone ID: MRT4577_174808C.1
acctcgagccggcgggccggtatgcacgaggcctggcggcagtgcctatgcatgtgcacgcacggcaaacgtactacttgtccgacatcgatccaaccgtcataaatcgagcgggactccatgggccaaggagctgccaaggcgaagcaagcggcggcggcggttgaggaggcagtgcagaaaagccccgagaagaagaatgacgggaagaaggcgctcaaatccagcgacgcagacgcgctcattgagttcatgaggaagaactacgacagcaaggtgaaggatgtgaaggagttcgatgacttctaccacgccatttacgagctcatcgagaaattttgcgaggaacgtgggcagctgcagtacaggataccacccaaggacgagctcaaggaaaagtacgagaggttccacacggggaaggggcggaacgtgacggcgcaggagttcgagagcatcgccagggccatcctcaagatagacagcttcacgttcggcaaggcggccattgacatcctcgtcgtcctcttcggcgtgcccgtgtgcgcgctcctcaccaagaggatcgtcccgggcctcaacgccatatccgacgacatcgtcatcccggcagccacctccggcgccgtcgtctacctcgccaagtccaacaagctctaaataataataataatgtaacccccaccaaaacaaattaagttgtgtatattattacatatatatatcgtccacttgctttccagaaagtaatttcatctattttaccggaataaatgccagtgagctgtgagtctgtgccctgcttggcttgatcgcgtccagaattgtaaaaacgacttaaaaagagttaattcgatcatgacatattataattgttcggtttgtagaaaaaaaaaaaaaaaannactttggggtgntaccactggttaagggcgaat

SEQ ID NO: 82013 - DNA, 310 bp, Zea mays
  Clone ID: MRT4577_174809C.1
ggtcggatcgagccttgttgagacgcgcgtacgccgctcaactttcgcgtgctgcgatgaaggctggtactcttctgcccagatgagtacgcaatgtaaaaaataccttcgtctccatagcagcatcttcaagtgaaaaagattatgtcgcagtgaccactctacgtgcggtgaagtgtataggagacggggagcctacgatgagctatatccacccgggtgattattgtgcgcgtataggggccaccttgcaacttctgctcacaagctagatgcgagctttaaagttgccactaccgagttaatttat

SEQ ID NO: 82014 - DNA, 410 bp, Zea mays
  unsure (1)..(410): unsure at all n locations
  Clone ID: MRT4577_17480C.1
gaacatctattggattccagacggggagttggtcctttcaggagcccctcgggccatgaaccttgcttatgaacggactcccgaggctggcagnggagcggctaaggacaaagagaatcagagtagtatagcttaagtaatgtccttatgtaaaataaataaggaagtcgagttgtactactgagtatctataattattacggtacagcacaatgtaataaagatggagtatgtccggcatgtaataacttaggatgttttcttcctcagatgccatcacaaactcgtgctcatgacatggcaggaacttcccacggcggggaggaaactccctacccgccacctgtaccaactacactggctgaggctatcgctcccttagtcaacgctaccaccgacaacacgtgttt

SEQ ID NO: 82015 - DNA, 414 bp, Zea mays
  Clone ID: MRT4577_174810C.1
atggcgtggacgtggcggccggaggacctgttcctagagacgctgaaggacagcctggcgcggcagcgagcttggcggcatcggggaattgcctggagatggcctggcatgcgcggccaaagtgggcgtggtgtagcgacggggcgaggaggcacgacatggcggttagatgatgatattgctagagattatgcggttggcgacgtgggcttggagggtgtggaggacatgcagctcgtcgtcctgcgcgtggccaaaggaggcgacggcggtggcgctgcagcggaagctgaggaggccgaggaagcccatccagccgactacaccgccggtacacaacactgcttgggtgcttttgaaggtataggttcagaaatcttcactcccggcaaatatagcaacatggtgaattag

SEQ ID NO: 82016 - DNA, 1785 bp, Zea mays
  Clone ID: MRT4577_174811C.1
atggctgtagaagaactaaaggagcttaagaagcagttaactgaattacaggaagtaggtgatagtgagcatgaggaacatctgagattggtgctacagaagctacgagataatcaactctacaccaagtatagcaaatgcgagttttggattggggaggtaccattcctaggacatgtcatttctaatggaggaatagtagtgaatcctgctaaagtgaaggagataatggaatggagcgtgcccactaccgttactgagattcagagtttcttggggcttgtaggatactatcggagatttattgaaggattttctaagattgctaagcccatgacctcacttatggagaagggaagagagtttaagtggaatgagaaatgccaagaaagctttgatcaattaaagaagaggttgatgtcgccaccagtgttgattatgtcagatctacagaaaggatttgacatttattgtgatgcctacggccaaggcttgggatgtgtacttatgcgagaaggacacgtgattgcctacgcgtctcgtcagttgtggaaacaagagttgaactaccccactcatgacttagaactggcagccgttgtgcatgtgcttaagatttggagacattatattatgggaaccaagtgtcaagtatgcatggatcataaggatttgaagtatatattcacacagcaggatctcaaccttaggcaacgccgttggatggagcttattaaggattatgatttggaggttcactatcccccgggcaaggcaattttggttgcggatgccttgagtcgaaaggagcaggttcattcagctattgttgcccagctacccgatgagatcgttgaggatttcaggagacttaacctggggatagttgctcgcactgaagaagttattattgatatggaacctactttggagcaagaaatccgcaaaggaaaatttggtgatactaagacacaagagattaaggatctgattactgaaaggtcgaggtccggaaattcatggaagatgaacaaggcactagttaaggctgaacaccaaagaccaactggactattatacccattaaagatacctgaatggaagtgggaagagaatggtatggatttcatcactggattgcctcgcacctcgaaaggatatgattctatatgggttattaggaatggactgaccaaagttgctcatttcattctgactggaggaagacagttctttggacatgaacttattcaagaggcagaagaacaagtatgtataatcagggagaatttgagaactgcacagtcaaggcagaaaagctatgctgacacccggagaagactgcttgagtttaaggagggaaattatgtctatttgaaggtgtcaccactccggggtacgagaagatttaaagtcaaaggaaagttgtcccctcgctttattggacccttcttaatcttaaagcgagtgggagaggtggcatatcaattggagttaccggagcatcttgcagatgttcatgatgtctttcatgtatctcagctgaagaaatgtctcacggtacctgaagagcagctaccaatggaagaccttagtgttcaagatgacctgacttatgctgagtaccatatcaagattcttgatacactgactcgtgtcacgagaaataaggttataaagatgtgcaaagtgcaatggagccatcatggagaagatgaagctacttgggaaagagaaaaagagcttcgcatagattttccccaccttttccctagatcttcttaa

SEQ ID NO: 82017 - DNA, 175 bp, Zea mays
  Clone ID: MRT4577_174812C.1
tcccctcgtcacttcccatgacgacgcccttctccacgccttccccacctaaccctaaaggagttttcttaaatgcgacggctcttctgctacagcccctatttaactccaacataccacctccaatatcatatactgctcctacactcctgactacctatatctaccccaccct

SEQ ID NO: 82018 - DNA, 380 bp, Zea mays
  Clone ID: MRT4577_174813C.1
gttactgaaaagaaaaagcctaacctccgtttcttgtcgctggcaacgcctaataatacatttggaaggcaagttgcactaaaggtcaacagcaaacgggggggcatctgcaccttggtgttcgcaaggcctaatgatgcaagggcatcaaactgaaaaacattcatttcgggtaatgcctttccggctattcactgccattgtggccctactggctgactttcaacaaaaaaaaaaattccttgaaggataatgcaccttatggagcggccaagccataacaggctactttaccatctcgaaaagcccctgtggcttgtaaagaaggccattttggactaaatattttaacctcggttaggttctgagagcaggttaca

SEQ ID NO: 82019 - DNA, 1156 bp, Zea mays
  Clone ID: MRT4577_174814C.1
ggaatcacaaagcaataaatggaagatacatatacagagcattgtccagggttgtcgacatgaacaacaattctacacatctacgaattaaccaaatcattcagctatacacatatttttagaagaaaccgcgacgtggtggtgactattgattgcttgagattgtgttgcaaccttgcaggtttcagcatctagttatacgtaaacatcagaaccgtgaagatcatgcagctaaactacaatttagctacaagtattgaacctgcaaaccgactagtctgattccctaactacctaatcagtttgctacaacatagcaactgaacccttcaacagtgaaaatgattaggacttcctgataaccttcactgcttcattgccgcttctgatgtcactcattaaagcaatttgatgcaggagttgtgctatcctcttatccttctctttggagagaagcacgagcaggtcccgttccctcctatcccgccgacgggcgtacagaagtgtccccaccacagcagccgccaccgcaaccgaccacacggcgggcctcaccgccgggcacccacacgcgccatgcacgagcacccgctcctgaacgatcccgacaccggccgcccaagcgcgcctcgccgccaagctgcacctctcccatccccacagccactcatcgtcctccccctcgtattcaccatcctcctcgttctcctccttcgccactgctggcatcggcgggacctcctcgggctcgccgtccaggcccagcccctcatgcagccgcggcgggaagatggcgcagtcatcaagcccgccgtccacgtggtcaacagatggggcagtgggggtgacgacctcccagacatcggtgacgggggcgggcagcgaggaggaggacatggaggtgagggaggaggacgagagggagagagttagcgtcttgggcttcaggaagaggtgcgggttcggggagggcaagaggagcgggtgtagcgcggagtacggcgaggccgtggtcgacgccgacgcggcggatgccggcggggactgcggcgccggcgacgggagtactagcctcttgtggtcctggtccatggctgcgggcctcgccctgtggccccgggggctgctgttgttactttttcatggattttcggaa

SEQ ID NO: 82020 - DNA, 522 bp, Zea mays
  Clone ID: MRT4577_174815C.1
ggccgcttttttttttttttttttcttttttttttttttttttttttttttttttttttttttttttttttttttttttttttttttgcgaaatggaaaacttttgaaataaaaaggccggtaaaagtttaacgataacccctaaacccggcaaaaaatgggtcactcaatggtcaacccacccctacgatacccttacccccattttagggtttaaacaatccaaaaaaaaaaattttttttcggaagcacttccggggaaaaaaaacaactctctttggatggtttcatcaccctttggatggtttcatcaggttggtcatttacttggggggggtcatgggggggatcagggcgacccctcggggggtggatcccccctcgttggcggaccaggaaacaaagtttacaaaattgccgttcaagggaaaggcagccttcccatcaaaaaaggtaaaactggtggcaccctggaaaacgggggaaacaagggcctcctccaaataacccaaaaaggccctg

SEQ ID NO: 82021 - DNA, 553 bp, Zea mays
  unsure (1)..(553): unsure at all n locations
  Clone ID: MRT4577_174816C.1
cctnttttttttttttntttttttttttttttttttttttttttttttttttttttttatttttttttttttttttttttttttttttttttttttggaatcacaaagcaataaatggaagatacatatacagagcattgtccaggttgtcgacatcaacaacaattctacacatctacatcatcaacatagacttttagttccaaacaagttagggtatgttagagttgaaacccaacaagatgtcaaaaaaaaagagagaaaggagatggaaaaatcttttgagagcactaaaaggaaaaaagacctaatcacggttcgggcacgtggatagcttctttacaagcacttctatccaagcataactccgttggtatattccattcctttaagtcccttttgattgcttgagttgagattgtgttgcaaccttgcaggtttcagcatctagttatacgcaaacatcagaaccgtgaagatcatgcagctaaactacaatttagctacaagtattgaacctgcaaacccactaggccgattccctaactaccta

SEQ ID NO: 82022 - DNA, 387 bp, Zea mays
  Clone ID: MRT4577_174817C.1
attgtcagatataagaaatcattatgcatacatcaaaatgaatacatttgttcaaaaaaaaaaaaaaataaaaaaaaggaaaaaagtcaaaaaaaaaaaagaaatcaacgaatataaagaaaagaaaatagaaactaagagaaggcaaccaacctagatgtatgcccttcttaggttcgtgacgttactaggggggtctcgtttttgggggcccgatttctctcccgcggacctcccgcgctgtactttctctttggggccgccatagtccatctcatgggcccggtttttccgcccttctgaccggggaaaccctcgggttcccccctgttggttggctgggagcatgttccccgtttagcccctgggctactcatccagggggcc

SEQ ID NO: 82023 - DNA, 812 bp, Zea mays
  unsure (1)..(812): unsure at all n locations
  Clone ID: MRT4577_174818C.1
tccgcatttcagtancaacactcatggcatgaaccacgctattcttgtgcacatactctagataatcaggcacatggttgcggttgctcaacctcctcaactcatcggtagatacttgcatctgtctaatggcgtctaaaagaccatcccaaactcgatttaatctctgcgccggatcatgtgtgtggatgattgatggcgtggacgtaatatgctagtgccataaacaatattgcttctgtcgagcgaggcgcccacggtggtcgtgcccctactgccattagaagcggagctgttatccataccgcgcgggccactcagctccgcaccatcggcgaagtacagagtgacagggagcttcaggatagagcgaggctccagggttggttggtcgacgtcgcatgcacgagacgccatcgatgacgagggcggacgaccgaacgtcagtgtgcctcgagaacgagcacgacagatccgttgatgcagggtacctagctgaggtcgtagagaggcgtgcacgtcgcttctcggcttgcacgatgacgacgcttctcggcttgcatgatgacggggcttctagccttgcacgacgacgggggcttctcggcttgcacgccgacagccggtcgcagagatgcgggcgacggaccgagtctagcgtctcgcggtgcagcagctagggtggcagaggcagctgtcgagcgcgcgccgcaaccggggatatcgtcggcgacgaacaacacacgacggcggcggatccaactagatgcggcggcggtggaagtggggcccggccggacccgagggtaccc

SEQ ID NO: 82024 - DNA, 301 bp, Zea mays
  Clone ID: MRT4577_174819C.1
tgaattcggcacgaaggggcgtatgtccagtcgatctagcacgcacctatgtgtcctgcacgagatgtggctgcccctgacggcggtaagagctcaggaaacgggaccgctagagtgagcgatgccacgacgagagcccaggtgtgggccacgatgggaggcaaggactacgactgggctctagatttggagaggaagggaaggcgaaagcagaagatgaccgcccctgggagacgctcggaacccaaccggagcggcgccgctgcactgatggcgagtggggcaccatcagacgatcgat

SEQ ID NO: 82025 - DNA, 484 bp, Zea mays
  unsure (1)..(484): unsure at all n locations
  Clone ID: MRT4577_17481C.1
cggacgcgtggngtggatgaggggcatcggttgttaaacaaagattccaagttgtttggtcagcgtaaagattataataccaaacatcgtgttctattaacggggaccccagtccagaataatcttgatgagcttttcatgcttatgcacttccttgagggtgaaagttttgggagtataactgatctccaagaagagttcaaggatataaaccaagacaagcaaattgagaagcttcatggaatgctgaagccacatcttcttcgaagattcaagaaggatgttatgaaagaacttcctccaaaaaaggaattgattctacgagttgaattgacaagaaaacagaaggagtactataagccatctcacgagaattatgatgtacccgcgagtcgggattaatcacataacgtgaaagtaaccaactcgtgcatgatcagatgatgactgtctgactgcatcagagagttagagctcaatacag

SEQ ID NO: 82026 - DNA, 378 bp, Zea mays
  Clone ID: MRT4577_174820C.1
atgggttattattttttttttttataaacccgggcacaagatgagggaagcttatgaatattgaaccgtccaccgcaatgttttatgtttttgagggggccctcgctacaaaacctaaatgacccaacccttcttggggccaccgttaaagggacccatgaaaaaagcctaatgggggccccaaccgggaccaaaaagatccatcatgaacccccggcgggtctcaaaaaagacccgggtatttaaaatgccttccgagacgggggatataaaaagcaccaccattttgaacaccgggatggctgcggcggggactgatatttgaaaaagatgagcccccttgcagcaccggagcaagaaccccggcataggagaagt

SEQ ID NO: 82027 - DNA, 387 bp, Zea mays
  Clone ID: MRT4577_174821C.1
catctataaagtcaacatctaaaccacctactatgatactgcaggtctacctggtcacgagccttactcttccgattgatggcccacgcgagtgctgttaaattcctcatctacctggagtacctgatcctcaaatcgcatctcaaaacttaacaggacttcctgaccacaacggatatgcacttacttgagccacctgaaaagcttctgcacagcatggatagcttggccggatgctcactggttctcgccttatttcagcggagcgctttccgatgcgctttactccgaccctactctccgactgtcatgctcttcaacactaacttgaaccaggtcatttacattcatgccttgacaacacgaagatgccctgttcccatcaca

SEQ ID NO: 82028 - DNA, 638 bp, Zea mays
  unsure (1)..(638): unsure at all n locations
  Clone ID: MRT4577_174822C.1
gccggccgggtcgggacgattcagtgccctgagatcaatcttcatntatgatcatcattattgcgatacacattctaccaaactcgatcgcaaaaaagactaacggtgctctcgtacggtatcaaatttcgtccgcaatacataccgcctccatgcgggaagtcaagggagccccgcatcgatggagctcaaggaccaacaagaaccccgccctcaaagaaaccggcagagaaaaagcccgctgcggaaaaggggtgggccggaaaaaaacccaaggcgccaaggagtgtcccagcagcgaactacgccgacaagctcgtcgtcgagggaaacagggaccggaagaaggacaacaaaagccatgagccctacaacatctactttttcagagggatagaagatgtgcaccaacacatccatatccccctaaaggccatgaccatacatgaactccttcatacatcgacgttttccagaagctcgtggcccaggcaccaaacctcggtggacacaacaagaaggccaccatcacctcccgatgagatcactaacctcagggcgcctacgcctcccaggtgaaatcactactgacttggtatcacagggaactataggcgtggataagttcaccgcgacct

SEQ ID NO: 82029 - DNA, 331 bp, Zea mays
  Clone ID: MRT4577_174823C.1
tttgagcgcaattctgtttctaataaaatggatggctctagctcttcagtaaatcctcaaagtaccttgatccatcctcagaatggatgttgtgagagtagagagcatctgattcatgaaagctcaaaacaaaaataccttgacagtcccgaggcaaatggagcatttaaaagatcattaggcgaacgaactgctgttgatagtggtggcccatcacaattctctactccctcatctcggtccctttctccaaatagacatagaaaagatggagattatgattctagattattaccagtttcagagatgaactcgaacatatcctggagca

SEQ ID NO: 82030 - DNA, 556 bp, Zea mays
  unsure (1)..(556): unsure at all n locations
  Clone ID: MRT4577_174824C.1
ggcttgcatttctttagtatggtttgactgcctatatgnntgcctaaaacaacacaccacatttctttcatgcaccacctctttcagattatgttanactgaaaataagttgcaaacttcctcaacagtgaggaggctggcaactggctggacatcaagtgatcgagccactggaaatgtttctctgtcaataagtttctctctttttttatataaaaaagtgtccagaaccactggtctgtggcttgcatttctttagtcatggtttgactgcctatatgtgcctaaaacaacacaccaatttcggcatccatccattcatgtgactgctcgcagaactaacgagctaagattcctcccctcaccggcgcttgttcccatggtctcccaacaccgagccgccaattattcccactgtcccctcaccacgagatgctgcccttgtgctctgcatgcagatgcaggtgctgccgaggaagaggaggcgctctcggtcctggcttctagacgttgtgaaccagatcttggtgcggttgcccgagtagtttactcgtct

SEQ ID NO: 82031 - DNA, 652 bp, Zea mays
  Clone ID: MRT4577_174825C.1
ggcgggatcctttccataaatggtcctcattccgtttccctgtcacggcctgctttggcctgctcctgacgatctctgcgccctcgctgcagacggcggctcctccttctcctgtcgtcggtgctgcgtctcctcctctgatgcgtgctgtcgtccgactatacgagtcgacctgcgtaggaaatacgctcgcggttgagagactcaagccggatgccgtaggctgccttggcgatggaaagatacgttgcactctagcgggtgctggtgcgatcacgcatggtacgaatcaggcggaactgaggcttaccacaataatgccatgtcatagcacgccgagctacaggcgttgctgggaagaatctctcactgccttctaagggaaggtcacgctcttgatgggatacaagctgactgaagtacccagggaagactcgctaaactcctttcattcataagagcacatttacaatccctgtctacaatcccctccaggtttgctacttggacgaaaacaatgattttcaagatcttgtgatcatttagagaccaccggctaacatattgttatatggtgagtggagcgtgcctcatatctccgcgtgactgaagttccccttcgtgtgtgaacaagactgggttcctagccgcc

SEQ ID NO: 82032 - DNA, 586 bp, Zea mays
  unsure (1)..(586): unsure at all n locations
  Clone ID: MRT4577_174826C.1
ccggccggctctttctgttcagcaatgcaacttttcgtcaagtcccttgccggtaacaccctcgctttcgaggttgctccttccgcttccgttgaaaatgttaaggctatgattgccgctcgtgaaggtattgacacctctttccaatgtctctccttcgccggtaagtctctccaaaactctcaagccatttctatgtatggtgttcaagataactctacccttcaccttaacgccgaactccttggtggtggtaagaagagaaagaagaagacttacactacccccaagaagatcaagcacaagcgtaagaaggtcaagatggccatcttgaagtactacaaggttgatgaatccggcaagatcactcgtctccgtcgtgaatgtcctaacgccancttgtggtgctggtgtcttcatggccaagcacaaggaccgtcaatactgtggtaaatgtcacttgacctacgttttccaaaaggatcaacaagcttaaattacttcattgttttttaactgttttaattctccttaataaaacaaaatcaaaagtactagcaaaaaaaaaaaaaaaaaacccgcggcc

SEQ ID NO: 82033 - DNA, 531 bp, Zea mays
  unsure (1)..(531): unsure at all n locations
  Clone ID: MRT4577_174827C.1
catctgctatactttttttgtatattaagtaaagcaaacaaatggccttattggacctattggtgcagtacccttccacaatatgaagagaacattgaggtggaatggaagcaaatttatacggctgcccctttcacttgtcggccaggaaatgttcagctattatctggtggcctagaagaccagcaattgatacatagagccacacttagtgaagtctataaatacgagtattacttctgttttgatattcaagcacaattgttgtcagacttgtttccgtcgccctcaggtcaacagtgctctgaaaaggtaatcccagcatctacaggaccattggagatcttcaaactttcactaaatggagacaaagctgtactttccgaagatgcctcaagctaaactgatcttcagaatattgtaaataattggtggataacgatatcccagaatgcatttgatatcaatacagctgctggtccctaaagatccatcctaccaaggnaagtctgataacctgatactttttgc

SEQ ID NO: 82034 - DNA, 336 bp, Zea mays
  Clone ID: MRT4577_174828C.1
acccccaagcatgcccttttttcattggatcaacggggcaaaaaatttccgcaaatgcttatttgggggacgttacattaatggggctggtatttatgggtatgaagcaggcgacgaaacttttcatcggggggcattaaattgggggggttacccatgcatgcatgcataaaattggaatcgcatcccaagcctgcatgtttttttgatggatcagggattcaggggcacccaagcaggcaaaagaccaccaccggggggcgtgcccttcgttcaagaaggagggggggggcaagaccccccgcagttctcgcttagcaaagggtggttctcctt

SEQ ID NO: 82035 - DNA, 456 bp, Zea mays
  Clone ID: MRT4577_174829C.1
ggatgaagaaaagaagctggatttcttgactagagagctgaaagggaagcgccctctagtgccccaaaacatagaggttgctgctgatgtgaaagaagttctggacaccttcaaagttgctgcagaactagggagtgactcacttggagcatatgtcatttcaatggcctcaaatgcaagtgatgtccttgccgtggagctgttgcagaaggatgcaagacttgcagttagcggggacctaggaaggccatgccctggtggcacgtaagctgattttgttggttgatttctctgaatttgcacagcgtagtgagtaaatattgacttgctaatgataaacgaaatcattgaacttcaaaggcgagatcaacttcctgttaatttgggtagattgcgaggcaatttgtgggaaaaaactgtatttagtaaactggactgaatccaatccatgaacag

SEQ ID NO: 82036 - DNA, 290 bp, Zea mays
  Clone ID: MRT4577_17482C.1
ataggttgttcaacttcaagaaggatagggatggctattggaagtgtgttgctggcaacctggcctctggtggtgctgctggtgcttcctctttgtttgttgtgtactcactggactacgcgagaacaaggttggctaatgacgcgaaggctgcaacggacgacgtgaaggcagttcatgagcaatcgattctacgcagacatcagtctatgtatgctggcttacgtgattacactctgtgtgcatcatgtacgtgtctgactaggtcatgatcatcagcagtgtctact

SEQ ID NO: 82037 - DNA, 2091 bp, Zea mays
  Clone ID: MRT4577_174830C.1
ccattccaggatcggttcccccgcgggtcctcgagggggaaagggaaagcctcaaaaggcgacgcgcaagggccgaggagagaaaggaacctgaggaaggcacaccagtttcaagcaatccctaggccgtggcgacgtgctgggaaggattcaaatcaggggcgaagcctaggtgacggcgctgttagtcgcctctagtagctgcgcgacgcgggctggcttgtccgatcggtttgcctcggccatgtcgactaagaaagttctttgcaagttcttcatgcatggagcttgcttgaaaggagagtactgtgaattctcccacgactggagtgatcaagcaaataatgtttgcacattctaccaaaaaggtgcatgctcgtatggtagccgttgcagatatgaccatgtcaaagtttctcgtaaccccacagtgccaccaccacgcccaacgtcaagtacttcaagacgtgcatctacttctcttcaactttcaagttacaatcatccacctcatatggtgcaccaaacagattcaagcaaccaaagacatcagatatctgtggatgtgttggcacattctgccagtaagcctgcatggagaaatgattttcagcatgatattgtttcagatgatggaattgactggtcttctaatcaaaatttgataaaccagacatcattgaaacctgtggatctccctatttgttcttttgctgctgctggtaattgtccttatggggaagggtgccctcaaatgcatggagatctgtgtgcaacctgtggaaaactgtgcttgcatccttatcgtcctgatgagagggaggagcatatcaagttatgtgagaaaaatcacaaacgccttgtagctctgaaacgcagccaagaaatagaatgcagtgtatgtttggatcgtgtgctttcaaagcctactgctgctgaaaggaagtttggactcttatccgaatgtgatcatcctttctgtattgaatgcattagaaattggcgtagcaattctcctgcatctggtatggatgtgaactcagcattgagggcttgtccaatatgtcggaaactttcatactatgtcattccaagtgttctttggtacttctcaaaggaagagaaagaggagatcactgaaagctacaaatccaagctcaagtctattgattgcaagtacttcgactttgggactggctcatgccccttcggaacaagttgtttctataagcatgcctacagagatggccgcttggaagaggtaatactgcggcatcttgatgctgatgatggaagtacagtaattgcaaaaagtatcaggttatcagacttccttggtaggatggatctttagggaccagcagctgtattgatatcaaatgcattctgggatatcgttatccaccaattatttacaatattctgaagatcagtttagcttgaggcatcttcggaaagtacagctttgtctccattatctttagggaccagcagctgtattgatatcaaataaagtttgaagatctccatggtcctgtagatgctgggattaccttttcagagcactgttgacctgagggcgacggaaacaagtctgacaacaattgtgcttgaatatcaaaacagaagtaatactcgtatttatagacttcactaagtgtggctctatgtatcaattgctggtcttctaggccaccagataatagctgaacatttcctggccgacaagtgaaaggggcagccgtataaatttgcttccattccacctgaatgttctcttcatattgtggaagggtactgcaccaataggtccaataaggccatttgtttgctttacttaatatacaaaaaaagtatagcagatgaaatgcaatgacaactgtaatgcagcattgttgaatgtgagcgtgagcggtggttttttatcgatgacctgctgaggaaggtcctcttagtaggcaggtaaactgagaacatttttttgttatatatatacagcataattgtacgagaaaaatagcaaatgaaccgagaatgatcattaaatgcagtcgtcggttgtatggttgtaccatctcaaaaccatcagtt

SEQ ID NO: 82038 - DNA, 779 bp, Zea mays
  unsure (1)..(779): unsure at all n locations
  Clone ID: MRT4577_174831C.1
cctcgaggccggccgggacagttcttcagccatctacgatctgctagtctcgctacgaaacagcgcaataaaaataagtaggcgcaatgagcgaggagcaccatggacctctcctccactgacttcgtcggcaagtccgtgaacgtgccgtcagggtccgccttccctgaggcccgggtgatcatgcttaagacgggggtgatcgacaagacagatggagacggacgagagccattggaacggccccgaccgggaggtgtacctgggcccactgtccggagaggcgacgagctacctgacggacgagttcccggacgactacggctggaacaccgaggggttgtcggcagtatacggagacgatcgccgagaaccgacagctggaggtgatccactcccgcatgagtgatgctgtgagcggtcggctgcgtcttcccggagcttctcgcccgcaacggcgtcaagttctacgaggccgtgtggctctaggccgactcccagatcttgcatgaggttcgttgctggactacctcgtagaacccgagcctcatccacgcgcatagcatccttgccatctgggcctgccaggtcgtgctcatgtgagccgtacaggtctacagcatcgtcggatgccgnctcggcgaggtcgtcgacccgatctaccccggaggtagcttctatccgctcgttctcgacgacgaccccgaggccttcggcgagctcgaggtctaggagctcaagaaggacgtctcgtcatgtctccatgttcggattcttcg

SEQ ID NO: 82039 - DNA, 853 bp, Zea mays
  Clone ID: MRT4577_174832C.1
gccggccgggccgggagaacatagaccggatgtcacagtgaccaccgccctctagctcgtcgcctcgtcggcgtgcccagcttctggtccagcgcgtcgcctccgctgctgctgggcccgacgcccaactaccgtgccgaggtcccaggcaggaagcatcttggcgtacgtgccgccggcgacaagcacccaccacaccagtcaaatgaatagttgatttcatttcaagcaattcctgaacaactatattacagtcatgaagtcgttagccaagcaagagacacagccaaaaccgcggctcattgtgcgccttggtgtattccttgcatctcaccacattctgttcagtgttatatgctgctatgcaggcattatcgcgctactactccttccttcacttgcaaaaaacacatacctctcggagaatgctcttatacctggctctgcaaatccattattttctactgaagatgccattgaagcaaacagatttatgaaagcaattgaagctgtggctagagactcaagcagtgtaataggcatggcaaatttcatagcacaacaaatagaagatctaggtgcagaagtgtgttaccaaaagtttctccctcatggcaagaattttcaccctctgaagttcttcacctccatgacaaatgatattgcaattcaacctaatggcactgccaccaattttgggataaatactatcggcattttacgagctcctcgtggcgatggaaaagaagcaatagtgctggttactccttataattctcaaagagttcagtcgaatgaattattatcgctggctcttgggttctctggcttctctctcttagtcgagcagcat

SEQ ID NO: 82040 - DNA, 2626 bp, Zea mays
  Clone ID: MRT4577_174834C.1
atttggagaaacaccataattagttggtcttgttccacgcgtccgtgaccaccgccctctagctcgtcgcctcgtcggcgtgcccagcttctggtccagcgcgtcgcctccgctgctgctgggcccgacgcccaactaccgtgccgaggtcccaggcaggaagcacccaccacaccagtcaaatgaatagttgatttcatttcaagcaattcctgaacaactatattacagtcatgaagtcgttagccaagcaagagacacagccaaaaccgcggctcattgtgcgccttggtgtattccttgcatctcaccacattctgttcagtgttatatgctgctatgcaggcattatcgcgctactactccttccttcacttgcaaaaaacacatacctctcggagaatgctcttatacctggctctgcaaatccattattttctactgaagatgccattgaagcaaacagatttatgaaagcaattgaagctgtggctagagactcaagcagtgtaataggcatggcaaatttcatagcacaacaaatagaagatctaggtgcagaagtgtgttaccaaaagtttctccctcatggcaagaattttcaccctctgaagttcttcacctccatgacaaatgatattgcaattcaacctaatggcactgccaccaattttgggataaatactatcggcattttacgagctcctcgtggcgatggaaaagaagcaatagtgctggttactccttataattctcaaagagttcagtcgaatgaattattatcgctggctcttggtttctctgtcttctctctcttaagtcgagcagcatggctgtccaaggatgttgtgtggttatctgcagactcacagtttggagagtatgctgcagtctctgcatggctaaaccagtatcataatcccgtgtttttgagtcactcagtggtgtcacataccaagatgtacggtgcaaacaatatatatgatggtaattcagaaaaaacagaagccacggctttcaaacgtgctggaacaatggctgctgctctcatatttaaagttggggaaaccagaagatacagtgacagggatagtgttacgatttatgcagaggcatctaatggacaaatgccaaacttggaccttctgaatgtggtgcactatttggctgttcacagacaaggttttcgtgtgaacatcgctgcatttagttctttgttgagctctgcatggctcagggttattgctgaaattttgcatactattggtagtgtgttaagaaaaataaatcctgactggaagcttgatattgcagtccctgattatgtggaagggactgcaaatctagctaactctatgtacaaccaggctcttggagtgcccacagggtcccatggtgctttccgtgattatcaagttgatgcggtttctttagaattttcaccaacatttcatgtcaaaaatgagaatgctaaatctttgtttcttctgaagggtggaaggttaattgaaggagtggcacgttctgtgaacaatctgcttgagaagttccatcagtcctttttcctgtacttccttacaggtccaagcaagttcatttcggttggtgtgtatatgattccgtttgcattgcttttggcacctctcccaatagttgctgctgcccttgctgatggcagtagaagcatggaaaaaacagcggataagttgataggcgacggtaaaacagatggcattgctgatatttcgcagaacaagggtggatcatggaaatggcttcgagctgcaaaagtattgcttgttgtccaattatgggcagtacttgtttcactacttccatattacattactcagatacctgatgccacacctacgcaaagcacactcatttgggttgtgctctccatcgtcgtactgatctccctatctgtcttgtttggctcaccatactcaactggtgttgaatggaaacttctgaaggctaccatgatcacttccatctccatcggattggggcttatgtcgataataaatttcgccactgctcagcttggtgctctgatagtgatcccaatgtgtttgttttctcggcctctgaaggcatcagggatgaatttccttcctcgggcagttttgttggcttcaaatgtagcttttgctgtgttgggttttcctccagttgcgttgctgattatgaaaggagtgtccaagggatcgaggtcgtggacaatagatgttggagatttctgggtatggatggagttcctgtgggaaaggagcagcgcgacgtatctttacctatttcttgtacatcttccctgctggcttttgtgcgtccttgtgttcctgcacccatgtcaccaatcagaatataagctgaagcaggaatagctgtttggcatccatagtcttgtctttttggatggtaaatcttgtagactagtgtagaaatttctcactttcacaaacttttggttacccataattcggaaattattcacccagttggagacgacttgtagacgatgtatcctgcctaatgtactgtctgcaacattttcgaaggcatgtttttaaagctgcttgttgcagtaattgatttctaaaaaaaaaaaaaaaaaaaaaag

SEQ ID NO: 82041 - DNA, 752 bp, Zea mays
  Clone ID: MRT4577_174835C.1
attgggtccctcgaggccggccgggacagctatagaccggatgtcacagtgaccaccgccctctagctcgtcgcctcgtcggcgtgcccagcttctggtccagcgcgtcgcctccgctgctgctgggcccgacgcccaactaccgtgccgaggtcccaggcaggaagcatcttggcgtacgtgccgccggcgacaagcacccaccacaccagtcatgaagtcgttagccaagcaagagacacagccaaaatcgcggctcattgtgcgccttggtgtattccttgcatctcaccacattctgttcagtgttatatgctgctatgcaggcattatcgcgctactactccttccttcacttgcaaaaaacacatacctctcggagaatgctcttatacctggctctgcaaatccattattttctactgaagatgccattgaagcaaacagatttatgaaagcaattgaagctgtggctagagactcaagcagtgtaataggcatggcaaatttcatagcacaacaaatagaagatctaggtgcagaagtgtgttaccaaaagtttctccctcatggcaagaattttcaccctctgaagttcttcacctccatgacaaatgatattgcaattcaacctaatggcactgccaccaattttgggataaatactatcggcattttacgagctcctcgtggcgatggaaaagaagcaatagtgctggttactccttataattctcaaagagttcagtcga

SEQ ID NO: 82042 - DNA, 327 bp, Zea mays
  Clone ID: MRT4577_174836C.1
taaatgactgatgagacacatgtgccttctctatcacataggagaacctcagatctccaatataacgcacgttgcgaacataataaaactttaatgcaagcccaatctgctttcaatattgatgatactaatgaccaaactgtcgaagcaagcttagttcaggagaaaattctacaatgacatccataaaaatggtgggcgagggattgaccactaaataatacataacatctaaaaacaactcataatgctaaggaagtatccaacgtctctgaaaaacatcttgaactccataagctgatagagcccttagagtcattagtctac

SEQ ID NO: 82043 - DNA, 668 bp, Zea mays
  unsure (1)..(668): unsure at all n locations
  Clone ID: MRT4577_174837C.1
tttttttttttttttggaggaactggaaggtcgttcatgcctctgctttgccaaagtttgacggctgatccatgaagcggtcaatatcctggacatacaaatgcccatgcaacgacaggagaatccagaccgtctaacagcattcgtatactacaacaaaagaaaccaggccgaacctccggcaacttaacgttaatattagccagccactgttacccactcatcattaggagttaattaaaagctacgacctaatgctacccagtatcgactatcgagttaatatggaaaactcaggagagggcaggcagaagaacccaccaaccaatttgctcagcgctttctcttgtgagacttccactgcctcatgacgtgctggacggcttccttcagtgttgctttacggccctccttgtagttccacagctctggtacaggatagcggccactagggttgtactcattgatctcaagcagggcctttgttaccaacccataaatttcttcaccgtgctcttctttcagctcctgcagcatctcatcgtcctctttgagaatttccatttctttcccatccaccaccttaaccttaaaagggtgccagcttgggtttctaatttcttcttgccacttgaacaaagggtagcagaaatgattnctgcatctnc

SEQ ID NO: 82044 - DNA, 847 bp, Zea mays
  Clone ID: MRT4577_174838C.1
gattaccccaactgcaccttcggtttcttttggtcgtttatttcaaaaaatactgccatatccccctatwtctctggtaaacatagattgargactagatagatcaggataaacaaggcgtgttaattgttgacaaatwtaatataagtaaattmacagtaatgacgagtgaacaaacatgcctttgttgcttcatctgtttgaaactagagwtatcaacctttaagtgcagcttaaggttttttgggatgattctttgtttatcatcgcaggatataatgaacatgggttagttcatctctttttcttttgmacccaagtatgccattttggggatttctccactatgtatgtttaaatgagcacattatttagaagccttttattatcatgttgttatgttctatgttgtttactgcttgcttggtgtaatctctagacccgtggatccaattgcttttgcaagggaaagagatatgccttctgattmagataggaccttaaatgaaracaagcgtttcatatcttgtagtatgccacgggagcatcaaaagatctttgaattgggatgaagaaaacgtagaatatagtgtaattttatagtataaaatttagagtctattgtcacccatacatataagtgtcttgtgaacgtttatggaaccagggaagaagacattgttctgthtggccagtctgttggtagcagaccaacccttgatctagctattcgtwtcaatcgtgaagagmtgtggtattamtcatagataagggatgtttrgttccagagactaaagtttagtacgtgtvacatagaatatttgamtctcattgtactatggattta

SEQ ID NO: 82045 - DNA, 1530 bp, Zea mays
  Clone ID: MRT4577_174839C.1
tgggcccccacgcgtccgcccacgcgtccgccgcaaagcaagcacacgagaaaaaaaaaatcacaatgagctcatgggttaccaagtcgctgccttttctcgtggctccggcagtggcctcgcccactgccgccctccagctcacctccatggacagagctctggtttccctgcccgtgtcagcgatgttcgtctacgagaaccccatcgatcgtccggccgagaccattagaagagctctgtcccgtgcgcttgttccctactacccaatggccggccgcctcgccgtcactggggaccagctgaagctcgcgtgcaccggcgagggcgtagcgttcgtcggtgcgtcggcgagctgcaccctgcaggacgccaggctctgcgaccggcgtcccgtggtcagtgtcgaggacctcagtatcagctatgccggccagtacagcgaggaccctccacttctgctggtgcaggtgaccgagttttcctgtggcggcttcgttgtcggggtgacgtggaaccacgtcctcacggacggcgccggcatggcgcagttcttgaaggccgtcggcgagtttgcccgaggttccccttccccttccgtcttgccgatgagggtggacgacaccctctctgaactccccccgccaataaccaccatgactaaggcactcgtcagcagcaagcccagagacatgccgtcctcctacatcacagttcccctgagcttcgtcgaccgcatcaagggcgagttccgtcgtcgcagctacggcagcggcagcggccaggtgtcgacgtgcactgcgttcgacgtgttcaccgccgccatatggaagtgccgtgcccgcgcgacgatcggcagcgccgccagcccggacgcccccacggcgctcgccttcacggtgaacgtgaggaagccggccaaggccaaggacggctactacggcaacgtcttcgccttcggcctcgctgcctcgacgctgcgcgaggtcgcggacggcgacatcctggaccttgtgacgctggtcagggacgccaaggcacgggtcccgttcacgttcgctgacggagccgcgcacatcgccgacgagatgggcggtcggctcaagggcctcgacggctacgacaccctgtacgtcacgagctggtggaacctcggcttggacgacgttgacttcggcagcggcggcgctgagcgcgtcatcgggtgcatggagcgcaaggtggtgccgggctgcttcctgtgcgggaaaaaggacaaggccgagggcgtcgccgccatggcgctctgcgtcaagcaggagcacgctgaggctttccatgcggagctacgaagcctcaagtgacgcggagaccttacatgtttgtccgtgtttcaattttaataagagcactttaaactcgtgcgttacaataaaaatatataatactacgataatttatatgtcacaaaaaaaaaacttcagcttcgccgccgagcgatcagatcggcacaatatacaatcaaaccaaaccaaaacattgatgacaaaa

SEQ ID NO: 82046 - DNA, 303 bp, Zea mays
  Clone ID: MRT4577_17483C.1
tttctcgcgtgggttcaactcgatccacctcgagctggagtacgaccaacatattttgcgccgctgaatgatacaggacttgcagaaggggactgcactgaccgaggagaaacagatgatgtgattgtacgcgatggacaggttgccctagggggccatgcacagtatgtacaggggattgcacacgagcaggatactattgatggaggcgtgagactaagacaagtacttctgtcaattgagcttgccgggtatggagatggaccatgggacatgatgcaccgaggggatgacggactacta

SEQ ID NO: 82047 - DNA, 858 bp, Zea mays
  Clone ID: MRT4577_174840C.1
cgctggtcggctatgtgcatcgcggcatgggcgtggcactgccacccgacgcaccgcctgcttctgctgttcaatcgcgacgagtatcactccaggccgacgcagccggcgcagtggtgggcggcgggggaggaagccaaggaaatccttggaggcagggacgagctcggcgggggaacgtggatggggtgcacgagggatgcctttgtccattggagtatgccacagaaattgcaaaggaagcagatcagtacaacggctttaaccttatattggctgatgtgaactcaggaaccatggtttacatctctaatagacccggaggcgatcctgtgattcaaacagttgctcctgggcttcatgtgctttcgaatgctgcaattaattccccttggccaaaggcaatgcgcttaggacagagtttcaaaaggtatttgacaatacacgatgatgcagaagcctctttaaaacaaatggtagaagagttgatgatggatactgccagacctgatagatctatggtgcctgacaccggcgacgaccctgagtgggagtacaagctaagctcaatattcattgacactgcaaaggaacaggcacgatatggaacacgaagcatggtggcactagcagcgaaattggaaggtgaggtaacattctatgaaaggtacttggagaacagtttgtggaaggagaatctcatacagttccagatggagaaggcacaataggacttgagagaaacttaagaacactcgcaaagactggtcgattgcttattattttgctatcactttatctttaaagtgtatagcaaggcatatacaagagcagtgtataatatggctactattaatt

SEQ ID NO: 82048 - DNA, 568 bp, Zea mays
  Clone ID: MRT4577_174841C.1
ccggccggggctccatcatctccatccatccacagctagtctcgcgtacagacgacataatctcttctatacctaactagctaacaccagctagcagctcgatcgctctgtcctgcaataagtggccgctcgctcctcctcccagcagctggtcgcggaggcggacctggcagcggcgctgctgatgctgtcgacggaggccgcgacggcgacggcggcgcggagctgcggcgaggcgaccaccacgcaggcgccctgcctagggtactcgatgggcagagcggcctaatcctccgcgtcgtgctgcagcgacggagcgctcgttcaagagtcggccctcgcctgtggaggaccgaccggccacccgcatctgtctcaagatcatgacgggccgactcggcctaggggtccgcatggtcagctccgccgcatcccgggcaagtggagagctctccgtcggtgtgaccctgagccctaccgtctactgccccatgcttgactggtcactggtaccatattccaggtgtgctcgctactggggtggcgcctcacttgttcactagcacct

SEQ ID NO: 82049 - DNA, 1113 bp, Zea mays
  Clone ID: MRT4577_174842C.1
cattgggaccctcgaggccggccggaaaaaaaatatacaaaaaaaaaaaaaaaaaaacggcagggaggacgtttccacctccatcaccgctggtcggctatgtgcatcgcggcatgggcgtggcactgccacccgacgcaccgcctgcttctgctgttcaatcgcgacgagtatcactccaggccgacgcagccggcgcagtggtgggcggcgggggaggaagccaaggaaatccttggaggcagggacgagctcggcgggggaacgtggatggggtgcacgagggatggtaagctcgccttcctgaccaacgtgcgggaacccagctctctgatcggggccaagaccagaggacagctcccggtcaggtttctacagggcagcctttgtccattggagtatgccacagaaattgcaaaggaagcagatcagtacaatggctttaaccttatattggctgatgtgaactcaggaaccatggtttacatctctaatagacccggaggcgatcctgtgattcaaacagttgctcctgggcttcatgtgctttcgaatgctgcaattaattccccttggccaaaggcaatgcgcttaggacagggtttcaaaagatatttggcaatacacgatgatgcagaagcctctttaaaacaaatggtagaagagttgatgatggatactgccagacctgatagatctatggtgcctgacaccggcgacgaccctgagtgggagtacaagctaagctcaatattcattgacactgcaaaggaacaggcacgatatggaacacgaagcatggtggcgctagcagcgaaattggaaggtgaggtaacattctatgaaaggtacttggagaacagtttgtggaaggagaatctcatacagttccagatggagaaggcacaataagacttgagagaaacttaagaacagtcgcaaagactggtcgattgcttattattttgctatcactttatctttaaagtgtatagcaaggcatatacaagagcagtgtataatatggctactattaattacccttttgtgcagatgtacagtaatgtttatccaaataccacaacaagaattggttgcatgtgctattccccc

SEQ ID NO: 82050 - DNA, 128 bp, Zea mays
  Clone ID: MRT4577_174843C.1
cacgtaggcaggagttagcgtgccggaattctcgtgatcgaccgactcgtccggccacgcgtccggtgacacgtcggcccactgcgtccgactatagagactcctcgtgccacatatgtttttctgag

SEQ ID NO: 82051 - DNA, 331 bp, Zea mays
  unsure (1)..(331): unsure at all n locations
  Clone ID: MRT4577_174844C.1
gggaagaancgccgggaccgacgcctcctgcccaactactcacctagagaactccactgtctacaaccaatcagcactgactaccaagagtgtagctactccttgctcttcttgctgttttagtgagcgcagcaaatgttttcacatatagacagcgctcacttgttgctagcaccattattccataatttctaccaccagttacttcaatgagctacgaacatcctgccgtgccagcctacatgctacaactagtgcttgcggcgagcgtattacaacaaccaattgcccaacatcaacaaccatccttgtcacatctaaacccacaaac

SEQ ID NO: 82052 - DNA, 630 bp, Zea mays
  Clone ID: MRT4577_174845C.1
tttttttttttttttttgcgtttattttatttctattatgagaagctaatatgtcgttgcagacatgtctagaataatgacgccttctttttcgcactaaaatgttgggtcctcttccttgataggcttcaaatcgccctggcccttgaacacctccagaatctttgcctgctccgtcaaaataaatctatcagtctgttttccaatgttcgccaactccttccacctgttgaaatcggctgggtttctcttgtcaccatgagcatcttctgcgtgctcccagtggccctttgagaagccaagcatgccactaattgtcttgttggtgatatcgtaaacaagagacacaattgttccggtttcttcgagccagttgatctgccatagctctcctggccgaacgcattggtatgctacggtttggtaattgatgcggccagccattgggccaccgtgaatagcgtagacgactcggtcgtcggagaagaaccagatctcataacgccatttctctgggtttccttctgcgtctgtggcgtcgtagtcgtagataagatgagtgttgagaatatccttctcaaaggttggatgaaggggggtgtttgtctgatatcgtggcagagacataat

SEQ ID NO: 82053 - DNA, 150 bp, Zea mays
  Clone ID: MRT4577_174846C.1
tcgcgctggcgtccggggttgctggtccaccatgaccggcgggcctcggtacccgattccgctggggcgcaaggactcgctgtcgccgtctcccacagggtccgaagtcgagctgacgcacgtcaacttcatcgtcggccggctcatcca

SEQ ID NO: 82054 - DNA, 575 bp, Zea mays
  unsure (1)..(575): unsure at all n locations
  Clone ID: MRT4577_174847C.1
aaccggtaaaaattattttacaatgtagactgtttacatagtgcagtttgttagatatagcctcggttgggtcgcacgctcagnaaagctgccgtcatcggcgaccccctcaaggacacctccggaccgtccctgaacatactgatcaagctcattgctgtcgagtctcaataatttgcgccattctttgctgcccgtggaggcttgatattcaagtagacggcggaggttcgtagtacaatgagcacggataaagcaaactgctgaacagattattctgttgaattgacactggttgaacacatgattcttctttattctgttgaattgacactggttgaacacatgattcttctttgcggatggagtgaccatgtttacctgttctggagcagtaggataccattgcaattctcgcaagtacacctgtcatccataacccagatctcaatacatcgaacattattcacttctgaaattctaccttagtagtttgtgtcaaatgtgcacaacatatttggcttaacaaagaaaaaattatccataaattattctatcacaagaccagattaatt

SEQ ID NO: 82055 - DNA, 378 bp, Zea mays
  unsure (1)..(378): unsure at all n locations
  Clone ID: MRT4577_174848C.1
cgggnngggaatccccgggtggaccacacccttccggaagcaggcggaggaggagttgtcccattgtttcattgggtttttggcgtgcctcgatggggaggcccctagccaccgttggaaggcaaaaggcctggaggaagaagcgaaagtttgagcttggtcgccagccagccaacaccaagttgtaaagcattaaaacagtggggagggtccgggtccttggaggtattgtgaaatggagggttttcggccttgttcctggtacctcctaatggggaagggaagttgtttcccgtatgacctgttatccttacttggtttacaatgctttatactttgggctggtggggcctcaatccttttttaatagtgcctttt

SEQ ID NO: 82056 - DNA, 1824 bp, Zea mays
  Clone ID: MRT4577_174849C.1
gctggctcgagtgcctgcacggctgcgccgagctggagaggaagcacctattcggcgctgccgacgccgacgccgaggacgagcccaccgtcgccgccgccgcgttcatggcgtacaaggagaggctcgccaacctcaccggagtcacgcgcaggttcatcgggaacctcgtcagagcgttcaagaccaacctgccggaagtggtggtgacgctgacgccgccggcatccgacttgcaacacatagtgaagagtggaccaacgacggaaagacaaacggttggcattggaggcatcctttctacagcaactgtgacaccacctgtttccaacgtgtcttctttacaagggacatcagcactgcgaccttcatcgtcgtctctactagtctcacaggaaacggacattgcaaatgatagcgtgcaagaacgacacagccctacaagaaaccttgcccaggcccagcatccagttcgtcctggcggtcatggcggcttcctcagcaatccatacccgagtttctttggagaggctacctcaaccgcgggaccattgcaactctacatgccaaacatggtggtgtcaggtggcacgacatcgacgccctctctcgccttctctctgtctgcgcctggacagcctattacgagcacagctcttggcggctcctttggctcaaacactcgcactgcatggggcaattcagatatggctgctgcgtcgtcctctcagcctgaccgcatgggcatggatcaacaagcaggaaccggttctgccatgaatctgacaattgggctgcatcccaatgcccagcagccaccaccaaaatatgtcaaaatctgggagggtgacttatacgggcaaaggcaagggcagcctgtgtttattagtaaactcgaaagttggggtggaacagtgtccagaaaagttgcagaggattggccagaaactatgcagattgttcgcctcatagcccaggagcatatgaacaagaaatattctgaaagtcaatacgttggaaacacagactttctaatatttcgggctttaaatcagcatgggtttcttggacaactacaagagaggaaactgtgtggtgtgatacagttaccgtcgcaaactctactactttcaatgtatgacaaaacaagccgtatggttggcatgctcttccctaagaacatgctgatgttcaggccagaggccttaactcagccatcaccagtgcagcaggaagaacttatacaccaccaacaacaacaactacagcagcaacagagaaacatacatcgtcttcaacgacaactcatacagaagcagcagcagcaacatatgcagaagctactaccacaacgacttcaataccaagagcagctacatttacagcaacagatgacgcaacaaatacaacagcaacaacaatctctataccagcaacatcaacaaatgcagcatcaacagcaactgtggcaacaaatacaacaacagaagcatcagttgcaacacatggatccccaacaacaacagctgttgtctcagatggtgggtacagaattaggcagtgatgatgacacaagggaagattgggtcacaggggctgggccgcatgcctagggaatcagggagggttaatgagggcttacactcactcacttgagggttaagatgtttcctagtgtttgtcgttaaatcattaactgataacttcaaaaaaataaaccagtcatttgtatagttatacggatggggtaagagtttaaataacaccgttatgttatcgaatagctaccaaaatgaaaaaaatgggaaaaaaaaaaaaaagtac

SEQ ID NO: 82057 - DNA, 473 bp, Zea mays
  Clone ID: MRT4577_17484C.1
ctcacgcgaccgcccactcagcccagaccgtgttagtggtcatatgaaggacgcatgggagtgacgcaaagcgccaggacttcgatcacagacaatggggaactataacaggcctcccacgtcattagtgctggcatctgatgcatgaggactgaactcaagcttgatcgattctcctaaggcggagagatcgatcttcttacgggactaaaaacaatgaaatcaatctgttctaggacaatttcctctcctgaccattcaaattcacaggccaatgcaggggcgactggaccatccaggtcaatgacaatctcgtgtcgaggacgggcctattccagtacaaggatcagggtactgggatcgagatcctactcatcgtcatacttgtcatacacggctaagtgaatctgccccgacaggtgccagccgtgtggagaaagatctcgtgcataaagaagtacgactgcgtgatc

SEQ ID NO: 82058 - DNA, 699 bp, Zea mays
  Clone ID: MRT4577_174850C.1
cctcgaggccggccgggagaatgttcttgtagtttgatggtgttcggttctgtatgtgatcgggtggtgctgggttcgattccttgcccaaccattgtattgtgcttttaaaaaaaaaaaaaaaaaaaaaaaaaaaaaaaaaaaaaaaaaaaaaaaaaaaaaaaaaaaaaaaaaaaaaaaaaaaaaaaaaaaaaaaaaaaaaaaaaaaaaaaaaaaaaccttggcccgggtccccaacccccccgcgcccgccgcggcccccccccccaatccgaaaggccccacccccggaaaaaaggggggggcccggcccccccccccgggggcggggcccccccaaaaacgggaaaaaaaccccccgggggggggacgaaaaaaaataacccccgagggccccccaattcccacccaaaaaaaaggggggggaaaaaggccccaacccccccccaaaaggccccccgaaaaaggggggcgggttccccccccccctggggggcccgaacccggggggcccccgccgggggaacccccccaaacttgaagaagaagaaggggaaccccccaaggaactcccccccgaaaaaccaccccccaaggccaaaaaaacccgcgccaaaagggaaacctgggaaaggcccgggaaattgggaaggcccaatccccggggggaaaaggcccaggtggaggtcccaggggccc

SEQ ID NO: 82059 - DNA, 792 bp, Zea mays
  Clone ID: MRT4577_174851C.1
ccggccggggggctttaaatcagcatgggtttcttggacaactacaagagaggaaactggttagtgcctgattctctaatcttttagtaacttggatattcgggtgtggttcatccatagtcttctcatacacttaaatttttggaaaccatctcatatggttctaatcgttaaaagttccatcgattcagtgtggtgtgatacagttaccgtcgcaaaccctactactttcaatgtatgacaaaacaagtcgtatggttggcatgctcttccctaaggtaatcctaactgtagtcaaatgtacacatacctatatcatgcatttactgaaatgttgctcttttccatagaacatgctgatgttcaggccagaggccttaactcagccatcaccagtgcagcaggaagaacttatacaccaccaacaacaacaactacagcagcaacagagaaacatacatcgtcttcaacgacaactcatacagaagcagcagcagcaacatatgcagcagaagctactaccacaacgacttcaataccaagagcagctacatttacagcaacagatgacgcaacaaatacaactgcaacaacaatctctataccagcaacatcaacaaatgcagcagcaacagcaactgtggcaacaaatacaacaacagaagcatcagttgcaacacatggatccccaacaacaacagctgttgtctcagatggtgggtacagaattaggcagtgatgatgacacaagggaagattgggtcacaggggctgggccgcatgcctagggaa

SEQ ID NO: 82060 - DNA, 269 bp, Zea mays
  Clone ID: MRT4577_174852C.1
cgcgtggacgatgattgagatatccttgcggctctagagactcacgggatggctgggcatgctgaattggggtcctttaaaactaacgacctctcgcagattatcttgggctacagcagggatgatgtgaggaacttgatgctcatatatctggctcatggcatcctgcagcatgacctcttcgaggttgtcgaccacagaggactgggcgaactggtttagctggctacaaatatgggccggacagctaggcctaacttgaaggcggg

SEQ ID NO: 82061 - DNA, 395 bp, Zea mays
  Clone ID: MRT4577_174853C.1
ttttttttttttttttttttttttttttttttttttttttttttttttttttttttttttttttttttttttttttttttttttttttttttggggaacccaaaccttttaacgggggaaaaaataatttattttttaattcccggaaattttggttttcccgggggcaacaccaaaatttttgggtaatgccctccgaaaaatttgccaaaaactggggtaattttgaaattttgaccgcaaaacttttggcgggggaaaacataatttattttttaattcccggaaattttggttttaaaaaaattttggggggggaaaaaagggatttttaatttttaaatggggccccttaagcatgaaaaaagggggcccatttgaaaaaattccggcag

SEQ ID NO: 82062 - DNA, 263 bp, Zea mays
  Clone ID: MRT4577_174854C.1
cggggtgtagagggcggtcggggcggtcgcctgggcagcaggggcagaatgttggctaccagggcacttagcgtaattggcaagagagccatttctacttcggtgtgccttcgggcacatgggagtgttgtgaagagtgaagactatgctctcccatcttatgttgatcggcgtgactaccccttgcctgatgtggcccacgtcaagctgctgtctgccagccagaaggccctgaaggagaaggagaaggccgactggagcag

SEQ ID NO: 82063 - DNA, 1898 bp, Zea mays
  Clone ID: MRT4577_174855C.1
gggatgttaaaaagatccatccttcatgtcgcacacattaattaagaacgatgtcataaatataacaaagatggtagatgccatgccataaatcatgtcaatatatgtgcatgctgaaccaataacagaaaacacaattgaaaaaacaaaatcatcagaacatttggcttctgctataaaaatggttcttatgcttctttgtagcctatacatagttcctccatatgcttttatgattccccatgaaaagtaagaacacgatgccgaataagcgcgcacacacacaatggatagaaacttgactgagttcagctacatgcatctccatggataccctcaattccatttctgctataaatggcaaagtaagtaccaaatgccccgccagggaatacatagaggaaatgaaagtgcatagtagctgcacaagtatataataaaccattatgttgctagcatttcagacagaagataaaagaaaatatctaataccatgataatgcaaaccattacaatatgttatataatgcatgatgagcaacgaagaagactgttctagctagaacacaagcttcaattgcttgtggatagatgatgccagcaacataaatcatatataacaagtgtttgttaaccaacaaagttgcatatcacccattcgcaggtatcggttctcaatcaaaatcaaatcaaatttcttacacagcataatctaaaggatctcatcccacaacaccatccagcacccacaaaacccccatacccattcaacaaagaattaggattaacaaatttaccacttcagatagcaagaaaaatcttagcgcacattcttagttagttcttactgttgttaataagggccatcaggcggaggtaatgaatggtcaattgatcataaaacaacacactatataaaccggaaggatccaagaatatggagaaaaaacatatataacaaccaaaaaaattgatggactatcattgtcagccatataaaaaagataatcacctattcctacagctggcagaactgaatttgaagcagaagaacttattatctggaggcaatcatttttatgaccagtacgccaatgcaacgggtaagaaacagcaatcaagagctatctatgaaaatcccgtggtttcgaggacccaataggagtctgggaagcacatggagacgtacggacctgcagcttgtcagcgagcctggagacggggagcggcgcctcgtagacgaaggagtggttgatgcactcgttgcagaggaagcgcgagaggacgcgaccgtcggtaggctggcgagcgtgaccccagcgtgctcagtgacgcggaacacctttcactgatagaaggagagctcggaggcgagcttgttgacggcggcgaggatggcctgggtcctagaacggagcccgatgtaggtgtatgagcttctcgccgccatggccctcctcgcggccataggggtcggccttcttgcgctctcatggcgttgatggcgccgatagagggtcgcggggggctctccatcgacggggtctccggcggctgctgcagcaccacgaagcacaacactattgctcgggtctaccatgcgagcgtcgtcgaaggaccgccctagaagcggatctcgacgtggagtggcgcagcgtgctccaccccgcatctcctagatgtgatcctccaccggcgacgagcccgggtggaggtggggctcctgcgtctggaaggcggaggagagtagcgggccggcggatgagagggagttgtggccgaatcggatgaactcaaggaaggtcttgccgtcggggaggaatacgggcggatggcaatccgggaggggctgacggcgatctgctagggtttggtttgggcgtgcctcgtgccgaatt

SEQ ID NO: 82064 - DNA, 103 bp, Zea mays
  Clone ID: MRT4577_174856C.1
attttaaccaacctccgtctccagaagagagcttaatcctaaagttcccgaatccctcaaaggaagagaggattcattccgcgtgctcgctgtgaccggcccc

SEQ ID NO: 82065 - DNA, 878 bp, Zea mays
  Clone ID: MRT4577_174857C.1
tgggtgatatgcaactttgttggttaacaaacacctggttatatatgatttatgttgctggcatcatttatccacaagcaattgaagcttgtgttctagctggaatagccttcgttgctcatcatgcattatataacatattgtaatggtttgcattatcatgatattagatattttattttatcttctgtctaaaatgctagcaacataatggtttattatatacttgagcaactactatgcactttcatttcctctatgtatttcctggtgtggcatttggtacttactttgcaatttatagcagaaatggaattgagggtatccatggagatgcatgtagctgaactcagtcaagtttctatccattatgtgtgtgtgcacgcttatttggcatcgtgttcttccttttcatggggtaaacaggaaaacattgggctttaaaatttttgtatggctcgattgtggtactagaaatgtataataattgttctaaagaaatgttagaggataaagaagtaagttactaaagttttggactgtattctttcattttcatctcacttatcatatttctttcaggaatcataaaagcatatggaggaactatgtataggctacaaagaagcataagaagcatttttatagcagaagccaagtgttctgatgattttgttttttcaattgtgttttctgttattggttcagcatgcacatatattgacatgatttatggcatggcatctgtgctctttgttatatttatgacatccttcttgattgatgtgtgcgacatgaatgatggagggttttaacatctactcccatgcccctgcgacgtcttagtttttttattgcgtcacctaaatcaaattcat

SEQ ID NO: 82066 - DNA, 136 bp, Zea mays
  Clone ID: MRT4577_174858C.1
tactctaattaggcagcaaaaaatgggctacggggggcatttaacagggagggaactaaaatatactacctcattcctcatacaaaatatgcgcggatataaccaggctactaagggacaggggtgtggaactaca

SEQ ID NO: 82067 - DNA, 1023 bp, Zea mays
  unsure (1)..(1023): unsure at all n locations
  Clone ID: MRT4577_174859C.1
gaaacgaaacaaaatgattcaactgatgtccagttaaacttactgcccaatggcaagccagccaagcctgatgtcaagttcatcacactacagcgtacgctactgctaagtgcactacgagaggctgactgctgccctaattaacttgctgaccaatggcaagcctgatctgaaggtcaacacactatggctaacatttactgctaattacactgaaagactgacgcgttgccatcagacaaaattcctatgtgatcaggggactcagactcagacctgcacctgcacaaaatccagggaccataccagcacgcagaaggcatccttcaccaggcgccatggcctatgagtcgcttcctcctgaagctctccttgaagcacgcctgcctgggatccttggtcctctgatccagaatcgcatcgggcctctcctcgatcatcttctttgtcagctgcaggaattccaccacgctcctggtcagattctcgtcctcttgtacgttttccttgaagcacaccagcctgagcccctccatcctctgatcaagcatcgcatcgggcctctcctcgatcggcttcatggtctgatccaggaattccaccaggctcctggtcagatgcccgttctcctgtgcattctgcttccctatcccctggacgttgtcgatgagtttctccagactcttcagcttccggtatggccagcgcgtgatgccaagcttcctgcattgcctcttcaggacggtgacccccacgttgagctcccgcgccgcctgcttgatcggcacggagaagtgccgagacaactgctcaaaagttagttccttcttcttcgtccctgacgacgacccaccgccccgacgtcctggtatctctgcgaccgtctgcacattgccatacacgatcagggccttctcgcagtcgccttcttcgctcttgcgacgcgcctcgtcctcctccatctgagcccagaaacttggaaagtcaacatcaaacaggccgccaagctcatnttgagagaag

SEQ ID NO: 82068 - DNA, 207 bp, Zea mays
  Clone ID: MRT4577_17485C.1
gctcggccggggatgcctttctcagaggtgggtatggtcttctacctaccccctaccggttcgggtatcgggctttgtgaggtatctccggtggttcgtgttatcctgggctgggcgggcatggagtatgcgaaggcagtatggagtgttcgatgtaacctggctgtctatctgtccagtcaggcccgtctgctctggcgtctcacg

SEQ ID NO: 82069 - DNA, 352 bp, Zea mays
  Clone ID: MRT4577_174860C.1
gggggggctctacgaagctcgaattcgctttagattttgtttggactacgccaccacctgggggggccctattaatcttgggcggggctatccacagcgccttcacctccatgacgcctatgctcatcgcctccgtcgtgctggactccacgcagggggtactctccggcgtctccaggggctacacgtggcagcacctggcgtcgtagaccaacctccttgccctatataacatcgccttgccgatcgccatccttttctgattcacgctcgtcttccaaacacaaggttctgtgcatgggtcagatattcaaacttctttctcataactacgtccttttttttatcaccc

SEQ ID NO: 82070 - DNA, 444 bp, Zea mays
  Clone ID: MRT4577_174861C.1
ggacccaaatgggggttataccggagcattccagacattcaagtccccctattttttgaaaccattactcttgcaaatcccacaaacagaagttaaaagggacccagctttgcctggggagcattttttatgttgcagcaaaaaagggtacattccccgcttgggagggcgattcagcttcctatttcccagctcggggacaggaaaaccagagatcactcccatgctttaagggcaccacccctcccaattgccttgatgatagtctggttactggtgggcgcactggactttttggggtccgcccgggattttgtcgtcctcctcgtacgccttctgggcagggggagcttggtttctgcgcatctttttcttgatgttggtcacatcatgcataggcggctcctcgcattcatctatctccatgtctgtcaacttggatga

SEQ ID NO: 82071 - DNA, 284 bp, Zea mays
  Clone ID: MRT4577_174862C.1
aaaaaaaaaaaaaaaaaaaaggacaatataaatcaagcatacgtgaaatacagagacagggggcaacataccttatattttctaccaactacaatatactagccggtcttcgtcatacaactaactgggtgggggcagccctgtgccaccaaactcgttttggggggcgcacatcttcctcctttttggcaggtggaataatagcgatgcccgggccgcccgtcattcaaaacataccggggagcatacatattggttcgcgcgctttttgctgggactgatca

SEQ ID NO: 82072 - DNA, 515 bp, Zea mays
  Clone ID: MRT4577_174863C.1
ggaacaaacctgacttgttttattttggcatatacaacttgcttgacacaacaccggaatttgaatcttttttttgtggtctggccccttaatgtgcgcggcttaaaatcactccccagcaagtaaaaccagatgtgtgctgaatcctgggctcaatttatgcttcagccttgagatattgggggggcagatgcctgtgggggcatcttgctttttagcttttaaaaagctttcatgctttttggataaaagcccccaggaaactgatgaacccggaaagcgaacctcacaccctggggaaagcaaaaacttttttttgggctttttttaagggccttttaatgcattaagttgtgaggcgacccttttaatattactggtgtggcagctggacaaatggccctttggttttttggcaactactcccaaaattttggacgcccagtacaatgggggaacccggcatcttctttgaagcgcggggaacgggcacttgtttttttgttccggggggc

SEQ ID NO: 82073 - DNA, 281 bp, Zea mays
  Clone ID: MRT4577_174864C.1
accctgggaactctggcaccttgggctgtggaacgctcttgaaagtccttcaaatctggagtctgtcatcctaagaaatctggccagtgccttagatactagaaaccttagtgccagagtgactggcagtgtccagggaagaagatatgttgtcctgacacttgtagcatcagatgcctcgatcctgttgacatcccagacccatcaaggaagaagcctgggaagtgtccagtgacttatggccaatggttgatgcttaagccccccaatttctgtgagat

SEQ ID NO: 82074 - DNA, 267 bp, Zea mays
  Clone ID: MRT4577_174865C.1
ctctgtatttcaggctttggttgagggcaccggatatcatggctgtgagtccaggaccggtggctgcatcaccccactctgttaagcggcgtggaattttgcatacgcaaggaccagctgtctcgtctacattctagccaacgacgttccacctgttccaacacaccacacggaaatccactacattacacaagctctgttgcttggagcccgcctggtgcgtctcaggggccggcatagcgggactatgtcgataaaaccctcacc

SEQ ID NO: 82075 - DNA, 274 bp, Zea mays
  Clone ID: MRT4577_174866C.1
gacccacgcgaccataatcaccacgaacccagcccggcaacgggggggcccaaaaaaaagagggggacaaaccaacccagagccaacagccggcaccaaggcacccgggagcaccagcccggaacacgacccaaccgacagcagcggaaggggagacaaaacagcgcgcgaaaaccgagcccgaggaggacgagcgccccaaggagcccaacaaccgccacaacgacaaggagcccgaggcgacgcccgagggcaccgacagcgcgcggcggac

SEQ ID NO: 82076 - DNA, 400 bp, Zea mays
  Clone ID: MRT4577_174867C.1
gacatctatgggagatgggcggaatagctacccgaaaccaagaactctgccttggggaacaaaggcacccaaaaaaagtccagctacaagctggggcggcggaagaacaccgaggctggaggcagtctcaggaacagcaagggacgggggctcaaaagccgccgccaccgaggaaccggagccgaaccctcgaagcagcactaaaataacattattacactagaatcacggagcgacaggagtaaaaccgcaagagtaggcttatgcataacgaaaggcgggaggtagcagcagatatacaatctcgagccggaggcctccgcaggacccaaaggaggggatacagggatgagggggtcgccagacatcccggagctcaaaaactcacgggaaggggcca

SEQ ID NO: 82077 - DNA, 396 bp, Zea mays
  Clone ID: MRT4577_174868C.1
aatgtactaccctcctggatggtcttactccatcgcgaaacgctagtcttcctctaaagaaatctttagcaactaccgacaactccgaactaatcttaaaaaccatggcttcaaaaaagcttcttcttgccgctctttgccttgtggccgctgcgcttctctcccttccgtctgaatcccacagccttgaagacttctcaagcaacgaccccactccagagattcaaaccttcttcaatccccaagcccctgctctccctgaagcccttgacccgttcttcattcccgtctacaccattgccgctaaacctgatgccacgtcaatccccaccaccaacacctgcaccacacctgctgctgccgctggcaccttaccctctgcaagcactacttctt

SEQ ID NO: 82078 - DNA, 1330 bp, Zea mays
  Clone ID: MRT4577_174869C.1
cgtccacacgccaccgtaccagtcgagatcaagacggcaataatagacaagaacaaggtgcgtggcagtgcactcgacgatattaatggagctgctgggcacctcgggccgggaccggtagacagagcagtgacggtcgtcgtacacagatcacgatgctgctcccacactcttcgtcagcctctgcaactgctaccactcgtgggctagcactagcagcagcagcaccgccgccgcgtccgaccgctcgcccccggcgcgcgcgcctcctgcctccacgcgcgcgggccgagacgcatgcgacgggcgttggcgccgaccgcgcggccgaggcgcttctccagagcgggctgcgccgtgagtcgctgccgcggcacgtcgcggtggtgatggacgggaactcgcggtgggcgcgcgagcgggggctgacgcccgcggacggccacaaggccgggggccgcaacctggagcgggtcgttgcgctgtcgcgcgcctggggcatccgcgcgctcaccgccttcgtctgctcccgcgagaacttgagccgccccaaggccgaggtcgactacatgatgggcttgtccgagtggctgataggcgacaacatcgacaagctctcgaggcaggggatccgactgcaggtgatcggcgacgccgcgaagatgccagcctctctgcggagcgcagcggcgcaggccgacgaggccacgaggcaaaactcgcagctgcacgtgatgctggccatctgctacagcgggcgatgggacatggtccaggcgtgccgggagctggcccgggaggcgcaggcgaaccggctcagtccggacgacatcgacgagtcgatcatcgccggcaagctcgcgacgagcgccgccggcgagttttcctgtcccgacctggtcatcagaaccagcggcgagatgaggctcagcaacttcttgctgtggcagtcggcgtactcggagttgttcttcaccggcaagatgtggcctgactttggggaggctgagtacctggaagcgttgcgctccttccagggcagagaccgccgcttcggccaatcaaaattactctaactcgatggagccacgaagaagtggagcgccagtatatgttaagagttatggattgttcggttactctcatttcatttggattaagtagattgaatgaatttaaattaaaagtaagtcaaatttctttttaattttttaatcccatcaaataaatgagtaacaggattaatggaacaaagtcttaattggacatttgccctgtttttaaaaaaattggggtaatagcgggaaaaaattaacacatatttctgttt

SEQ ID NO: 82079 - DNA, 219 bp, Zea mays
  Clone ID: MRT4577_17486C.1
acggcgacaccaactggcctgtccgttggccgctgggcggctaccctggccctcacggacctaactagtgcggggacagagcgcacaagtactactggccggacatcgcagacgcgcactacacaggctgtctctacggcggcatctacatcagtggcatcatacgggaaggtcatgccgtggcaatcggagttccaggtcggacctgccgtgctcgtc

SEQ ID NO: 82080 - DNA, 236 bp, Zea mays
  Clone ID: MRT4577_174870C.1
tttttggtttgttttttattttttatattttgtcaaccatgtatttctaatggatcactatgtgccatttttgcatcaagaatttagacagaacggatttctggcagacatatgaagccactttccaacatattaacaacctaaatttaacatgggataaaccggagcatctggtgacgaccgtaaaaattacaagcaaagagaaacccttccatgaaacttgcgggaaggggaac

SEQ ID NO: 82081 - DNA, 877 bp, Zea mays
  Clone ID: MRT4577_174871C.1
agactaaaatagcctttaatattctcctgctattagtacaattgaactaaatgaagggcaaatgtagaattaatatgatttagtctttttaaccatatcttgagagactagagactaaatcagtttagtctctgttttaatcctactgtttgacaatttaggaactaaataaaactaaaatagagggactcttaaaccaaacgaggccttagagtaattttgattggccgaagcggcggtctctgccctggaaggagcgcaacgcttccaggtactcagcctccccaaagtcaggccacatcttggcggtgaagaacaactccgagtacgccgactgccatagcaagaagttgctgagcctcatctcgccgctggttctgatgaccaggtcgggacaggagaactcgccggcggcgctcgtcgcgagcttgccggcgatgatcgactcgtcgatgtcgtccggactgagccggttcgcctgcgcctcccgggccagctcccggcacgcctggaccatgtcccatcgcccgctgtagcagatggccagcatcacgtgcagctgcgagttttgcctcgtggcctcgtcggcctgcgccgctgcgctccgcagagaggctggcatcttcgcggcgtcgccgatcacctgcagtcggatcccctgcctgaacgcggaagcagaacatgtaaaaaaaaattcaagcggtatactgtggcactgtgctatgcaagatcactgcaggtttttattagccgacgacgacgacctcgagagcttgtcgatgttgtcgcctatcagcccctcggccaagcccatcatgtagtcgacctcggccttagggcggctcaagttctcgcgcccacgcgtccgcggacgcgt

SEQ ID NO: 82082 - DNA, 357 bp, Zea mays
  Clone ID: MRT4577_174872C.1
cgacatgacaaccgactccaatgatttttaatctaaaattcaattacagtgaccctaccgtggtacacgtgacgcgctcgacttatcggtctacccctagctggattgaaattacatatcacagtgtcagaatcaggtcaaaagcctattaacacggaccactctaaagaagtattctatattctagaatgtaacctgattgggctctatttggagaactactaatgcgggtagaccgacagtgcatgtgcacaaatcacccaacctgcagagaggactcatcaagagactaggcgagcttggacgccctgagcttggtgtgactactatggcgagcccaccgttacaggaggaacc

SEQ ID NO: 82083 - DNA, 188 bp, Zea mays
  Clone ID: MRT4577_174873C.1
cttggaacctttgggctgatttatgtgcatgtgtatgtacaggtctcgactattagtaagtcactggcggtcgtcgagtcacggaatcatattagggcaggtagtgcacctcttggtgcgtcgtcctaagttaatggcatcatttaatagtattcggacggttcgtaatactatgggtagctcattac

SEQ ID NO: 82084 - DNA, 290 bp, Zea mays
  unsure (1)..(290): unsure at all n locations
  Clone ID: MRT4577_174874C.1
tcggcggccgcccgttttttttttttttttttttttttgttatttttttagcacccaacaaccttgngggagcttttaaaaaatactgacaggatttaccccacccaacaatacacagtccattctgatagatacttgggactgctgaacccgaagaaaaacacatcactaacaattgacacaaagctacccttcaaactaaaacacagatcgggaacatcaaactaaaccatccaatataaaccctattgactaagcataacatcactgtagcaaacaagaataaattg

SEQ ID NO: 82085 - DNA, 193 bp, Zea mays
  unsure (1)..(193): unsure at all n locations
  Clone ID: MRT4577_174875C.1
ggnngagcggaaggggggttnnntcgttgttgagaaatgggcttagnnttcttgtcattttcaatttcgnngtcgttcgaatgaagatnncatggcgatatganngttgtggcgagataatggctgnngcaatatnnngttttgcanannttcaaaccctgcaaanntgtgaccanngcaatgntnncaaaaa

SEQ ID NO: 82086 - DNA, 1399 bp, Zea mays
  Clone ID: MRT4577_174876C.1
ctcccttaggactcatccctcttagtgccgcatagaattaggccaaaaaaaaattcggtgctatagatacacctctagcttggtggctctctgcttcctcttccaattgcttacacgtcaacgcaattttggttttgaacttttggtatcgaacttgggggggaccctctatatagttacttctgggcctatgcttctcccacgcaaggcttcatcgattagaccattttcgtatgaggccttttgcataagatgaaccaacgtccgtctttaggttagcttggcatgacaaaccggcgaatgcatgtgctaggcgtttcaccacacaactgatgactacaggattttgggctgatataacgggaataacggaacttcatctcagggtcttcacccaacgagatagaaggttatgcgtgcttgtttactgtcctgtagcaactcagacctctactggataacgttgcacaccatgcgactagacagacactaaatttgggtacctctacaaagcacttaatttattgtgcctctttcgaaaaaggttcttttctttcgtaattacctaaccactgctatactatactaacattttgaattcacatatacaaactcggcttcattactactgacggaacatccgaagcagaattttttgtgtcatggagatacaaattaaaagttagtttattgtaatttccaaaaaaacagcagagagcacttaacaaggcaagggagtatcaatttaaattatgctaccaaaattgtgttgaaaacttacttttacacaaatccttgaaattaacaaaaaaaattgtcttccttgttcactcactgagaacttgtggtgataacggtcccaggccagttgcgagcaacatatgggttgttctcgtgaaggaagttgaacacctcgtccaacagctgcaacagaaaagctcaaggtcaaatttcaaaaaaagaacgtgggcatgagcgtgcgcaatacactagtgttgggaccatgcttcgtcgccgaaggtcctgcaaaaagaaacagcttcggctgaagctgcttgaacatgatgccgaagacaccgttcacgaagcttcggagctacaacatatccgaagacgaagggtcgaaccgacttaaagatagaatgaccatttagcccataagggtctgagtcattgttgtaaacttttatgaggggcataattgtaattcctcatgagttgtgtcctgtgcctataaatagtgaacagtattcctttactgttcacggattcctgtaattgccaacgcatcactcgggaattattgtttgtcaaggcaaaggtataaatgtacctaaacattgtgttcagatattcaaaattcatttaacaagatatgtgaatgatgtcgtttattttc

SEQ ID NO: 82087 - DNA, 785 bp, Zea mays
  Clone ID: MRT4577_174877C.1
gacgcctgcaggttccggtccggaattcccgggtcgacccacgcgtccgggcagatacagcggctggcggtaacagagtactgtttggcagcacaccatttgtggagagagacgagtaggctggactgaatactcaggtccgaggccgccctcgctgcagctcagttcttggtgaaagcagccctcctggctatgggaggggctgtggtggacgagggtcccaccggcatcaaggcccccgatgggggctggggctgggccgtcctctttggctgttttatcatcacgggtttctcctacgccttccccaaggcggtcagcgtctttttcaaggagcttatgcatgagtttgggattggctacagcgacacggcttggatctcctccatcctgctggctatgctctatggcacaggaccgctctgcagtgtgtgtgtgaaccgctttggctgccggcctgtcatgcttgtgggtggcctctttgcgtccctgggaatggtggctgcgtccttctgcagaagcattatccagatctacctcaccacggggggtcatcactggcttgggtctggctctcaacttccagccttccctcatcatgctcaatcgatacttcaacaagcgtcgccctattgccaatgggttggcagcggcaggcagcccagtgttcctttgtgcactgtctccactggggcagctgctgcaggatcactatggttgggcgggggtggcttcctcatcctggggggcctactgctcactgctgggggtgggctgcgctcatg

SEQ ID NO: 82088 - DNA, 669 bp, Zea mays
  unsure (1)..(669): unsure at all n locations
  Clone ID: MRT4577_174878C.1
tatatacctcatgcagtagcacagagctaggaatttccttgagatgttcggtgattagataatatagtgttcgaaacctaaatcgtaagatgatgtcttacacgaatatggacatacaaataggaaagcaaatcggtgccccgtgggnaaattctcaaactccacatttgcatcagtattcaatccctttttgtacaatgtaagacctgcaaacttagggaaacaaatatttccaagggatttaacatgccttcttaactcctcggtgtgtagataaacttccagaagagtgacctctgaagtgggatcacaactcattccatttgaaatcttggaagctataccagattggcccactgaacgcctaagcctaattgatgctagtaaagtattcaatgaacagaaatagccttcgaggaccttattaactgctgctgcaaatgcttggtttactagagtgtaaggctgatgctgcttagtgtctttatctccagaatcttcatgttcgtgaacttctctacttgcacagttcatttctcgactttggaaaagataaaagtgcacaaacttgcaaaggaagaagaccgcaagacctgtcgagcggaaagatttgagaatactccccatggatgtggtgctcgaggaacgtaaccacacatttgggacacg

SEQ ID NO: 82089 - DNA, 564 bp, Zea mays
  Clone ID: MRT4577_174879C.1
cattgggtacctcgaggccggccgccagatcgtgatggttatctagctagcgcgaccccgagcgcggcgacacgattatgacatgctgctccgccgccctggaccatgccgctgggtctctctcaatacccatcagcgctccgcctcactaatatgcaccgatcataccatgtcgcgagcccagtggaaactcactccctggactccgaccgtgctctttacctcacctgattgcaccgcgatgcacccagtccgaggtggaacagaggtgccacctgccctctgtatcaactacccgcgaagcggctcctaccgtgcgttgacatgctctgcgctgaacttcagaccgcctgctactataatatcgagggacctctccccaagcgatgcgactatcagatctgctacacgagcggtgttactctttctctgccgcgctgattgaataaccatacgcagtgctcatgacatactccgacatgattgatgagctcacattgatctgtgaatatgaccacatcgctgtgaacaatgatgctgataatgcatacatagactgcatga

SEQ ID NO: 82090 - DNA, 408 bp, Zea mays
  Clone ID: MRT4577_17487C.1
gtgacatgttttttttttttttctgtttacatacatttttttttttgttttttttaccaaactggccctgaaatttagaccaatctttatttccaccaaacagaagcccattccatggcattggggggggggtttccttcagtaacatacaatcccaacctttgttttagaggacgaatttttcatttaaaacccggtgtggccccactggcacatgggggaactggaaaggtaacacagttaatttcttattgattggatgggttccagaatgccaagaaaaatcaagaaaattgagactggcggaccccccgaagcttaaatgaacagaacttttttgtggaaacaaacctgaaaacggggatgcaagaatatttgtgggaccaaccctacaacaatacaaacctt

SEQ ID NO: 82091 - DNA, 716 bp, Zea mays
  Clone ID: MRT4577_174880C.1
ctttaatgggtgcgattgcatttttggttacaagcggccaaaacatatttggtggccacggttcaaaccggtgcaagacaaaatcaactatttcccatgctgaatacaacaccttcctagaacaaaccacactgaaaaaatagtggggggctgggcagtattcatttggtagttgccgtagcctacatggttgcatccaaaatgtagggccacatgtctgcgtgtttgttaggctgctgaatgagcttcagctgtagctggagcagcttccttttctttttttagtgatacagctgctgagagccaatctgaagctggggcttggatttcaggctccacttgcccatgaacattcagaggggtgaccgatacaaatccattctccaaagctctcaaatcggtatcctcatctaaaccttgatgttgcctctcgacaaactcagcacggaataacttcttcactacttctcgagtctcttgtttaccagcagttgcaacagactcaacctcgaccgcctttcgttgaccactaactctacgtgcagctgctgctgcagatgcatccttcccaagctgcgccagctgaataccaaggctttggtgcatgcccatgaagtgagtagcagatgagggcctgcttgctgacacagcttccccggacgcgtgggcggacgcgtgggcggacgcgtgggcggacgcgtgggcggacgcgtggg

SEQ ID NO: 82092 - DNA, 795 bp, Zea mays
  Clone ID: MRT4577_174882C.1
ctctagtgatacagctgctgagagccaatctgaagctgaggcttggatttcaggctccacttgcccatgaacattcagaggggtgaccgatacctgtaggttgtagagtggggtgaatacttagccatttgaaaggagggacagagagagagagagaaatgagagctcacaaatccattctccaaagctctcaaatcggtatcctcatctaaaccttgatgttgcctctcgacaaactgcattttgagaagaaaacagttccaagaattctttctagattcataaatataaacagcagtaaaacagttcgagtcaaagaagcgatttgcacaaccaacaatgtgattaattgctgtgtcaaattggctagaaagtgtatcacctcagcacggaataacttcttcactacttctcgagtctcttgtttaccagcagttgcaacagactcaacctcgaccgcctttcgttgaccactaactctacgtgcagctgctgctgcagatgcatccttcccaagctgcgccagctgaataccaaggctttggtgcatgcccatgaagtgagtagcagatgagggcctgcttgttgacacagcttgccaactttgagcatgactgtatccactctgtttggtcaacttgaaaccattgtcaaataacattccccagctgtaggtcttgagatccttattggaattattgaactgatgcttgctgtcaacgggaatggcctagcgcaggggtcgacggatactcgagcacctgaccttgggcagcggtagttgcccagtcgtcg

SEQ ID NO: 82093 - DNA, 2089 bp, Zea mays
  Clone ID: MRT4577_174883C.1
gtatggcgagcctcaacgtgctgctcctccctgagccgggctccggccacctcatgtcgctcatcgaagccgggaagcgcctgctgggccacggcgcgggcggcggggacggcctgggccgggagttcacggtgaccgtcctcgtcgtgcagccgccgacgccggagtcggccgccgaggtgggcgcgcacgtccggcgcgtcgcggagtccggcattgctggcgtccggttccaccacctcccggccgtggagcccccggcggactgcgccggcaacctgcaggagttcaagtcgcggtacctggagctccacaggccgcacgtggaggccgcggcgcgggagctcggcgccgcggcgctcgtggtcgacttcttcgccaccgccgtgctggacgtggcgcgcggcctcgccgtgccggcgtacgtctacttcacctccacggccgcgctgctcgcgctcacgctgaggctgccggcccttgccgagactctcgccgccgacttcgagacgttcgagggcacggtggacgtgccgggcctgccgcccgtgcccgcggcaagcgtcccggggttcctgggacgcaaggacagccccaacttcacgtggttcgtgtaccacggccggcgtttcatggacgccgacggcatcgtcgtcaacacggtggccgagctcgagccggggctgctcgccgccatcgccggaggccggtgcgtgcctggacggccggcgccgccgctgtacccgatcggtccggtgctcaacctcggtgcggggggaggtgcgtccggtgacgaggcgtgcgtccggtggctcgacgcgcagccgcgtgcgtcggtggtgttcctctgcttcgggagcctgggctggttcgacgcggcgagggcgcgcgaggccgcggcggggctggagcggagcgggcaccggttcctgtgggcgctgcgcgggcctcccgctgccggatcgcggcacccgtcggacgccgacctggacgagctcctccctgcggggttcctggagcggaccagggacaggggcctcgtgtggccgcggtgggcgccgcagaaggcggtgctcgcccacccggccgtgggcggcttcgtgacccactgcgggtggaactcgacgatggagagcctgtggcacggcgtgccgctggcgtgccgtggccgctgtacgcgcctttgagcagcacctgaacgcgttcgaactcgtggccgtcgtgggcgtggccgtggccatggaggtggacaggaggcgcgacaacttcgtcgaggccgcggagctggagcgggcggtgagggccctcatgggcggcggcgaggaggggcgcaaggcgcgggagaaggcccacgagatgaaggccgcgtgccgcaaggccgttgaggagcgcgggtcgtcgtacgcggcgctggagaggctgcgtcatgcgattcgcaagggtgcaaatacagctactgctcatttcaaggcgccgcagccgctcatttgagaattgaatgagtccaagattccagacgttcgcgacggtgtccggctgtccgcttcgtcatggaaggagtggacttccgtgtttgagcttcccggagtcgacagtcagtcagtcacacacacagagagagagagagaaaacgagagagagcagtttgcagctagtgcttatcggtatcgccgtgggacttcaggttttatgtcttgtgtaatgatcgatctccatgtctactcgctcggaggtatcatatgtttatgataccgtacacaatgtaaaaaaaaaaaaaaaaaaaaaaaaaaaaaaaaaaaaaaaaaaaaaaaaaaaaaaaaaaaaaaaaaaaaaaaaaaaaaaaaaaaaaaaaaaaaaaaaaaaaggggggggccgttttaggggacccaagtttccttccccgggcttgcaacgtaatagtttttttttggggccccctaaattaaattcacgggccgccgttttaaaacgtcgggattggaaaaaccctggggttccccaatttaatggctttgaaaaaaatccccttttccccagttggcgtaataccaaaagggcccgcaccgttcgcctttccaaacatttgccc

SEQ ID NO: 82094 - DNA, 1018 bp, Zea mays
  Clone ID: MRT4577_174884C.1
gattgctatagatttaaactccttcaattctctccgatcaatgtgaattaagataaaacaaacaggcccttgaatggttgcgattgcatttctggttacaagcggccaaaacatatttggtggccacggttcagaccggtgcaagacaaaatcaactatatcccatgctgaatacaacaccttcctagaacaaaccacactgaaaaaatagtggggggctgggcagtattcatctggtagttgccgtagcctacatggttgcatccaaaatgtagggccacctgcatcaaatcatttttgcacggccaaggaagccgatagtcggcagaaaagatgaacaaaaaaatagacactgcgccaaacaaatattgcgggagaaatactaaacaaactgaactgataaacggaagagagaaaagagcgccatcaccacaggaactaaggcacctacggagtgtgtacatgtctgcgtgtttgttaggctgctgaatgagcttcagctgtagctggagcagcttccttttctttctctagtgatacagctgctgagagccaatctgaagctggggcttggattccaggctccacttgcccatgaacattcagaggggtgaccgatacaaatccattctccaaagctctcaaatcggtatcctcatctaaaccttgatgttgcctctcgacaaactcagcacggaataacttcttcactacttctcgagtctcttgtttaccagcagttgcaacagactcaacctcgaccgcctttcgttgaccactaactctacgtgcagctgctgctgcagatgcatccttcccaagctgcgccagctgaataccaaggctttggtgcatgcccatgaagtgagtagcagatgagggcctgcttgctgacacagcttgccaactttgagcaggactgtatccactctgtttggtcaacttgaaacccttaattgcagatggtgcaccccacaccccgcccacgcccacgcgccacggacgcggggcgaccggg

SEQ ID NO: 82095 - DNA, 3144 bp, Zea mays
  Clone ID: MRT4577_174885C.1
aacggtaaggggtttacccgtggcctcaatggcaaaaaaggttagaaaaaccacaagggtgggggataaggggggcattgtttttttcaaattgaagtgagtttctttcttgattttataagggaacggcctccccttttttttttttttttttttttttttttttttttttttttttttttttttttttttttttttttttttttttttttttttttttttttttttttttttttttttttttttttttttttttttttttcttgtaaagtgaagggattgctatagatttaaactcttttttttttctccgatcaatgtgaattaagataaaacaaacaggcccttgaatggttgcgattgcatttctggttacaagcggccaaaacatatttggtggccacggttcagaccggtgcaagacaaaatcaaccacataccccatgctgaatacaacaccttcctataacaaaccacactgaaaaaatagtgggggttttttttaagttcccatgttctatggggccgtaaatttcaattcttgtaaagtgaagggatccatacggccacatttggttgccatggttcatacgggagcaagacaaaatcaatcacataccccatgctgaatacaacaccttcctataacaaaccacactgaaaaaaatagtgggggctgggcagtattcatctggtagttgccgtagcctacatcgttacatccaaaatgcagggctgcctgcaccaaatcatttgtagggccaaggaagccggtaatcggcagagaaggtgaacaaaaaaaatagacattgcaacaaacaaatattgagggcaaaacactagacaaaccaaactgacaagaggtaataaaagatcgacatcaccacaggaactaaagacacctacggagtgtggacatgtctgcgtgtttgttaggctgctgagggagcttccttttcctcagctgcaacatcttgttggtcagctgtagctgaagcagctaccttttctttgtctagtgatacagctgctgagagccaatcagaagctgtggctccgatttcaagctccacttgtccatgaacattcagaggggtgacagatataaatccattctccaaagctctcaaatcgatatcctcatctaaaccttcatatcgcttctcgacaaactcagcacggaataacttcttcactacttctcgaatctcttgtttaccagcagctgcaacagactcaacctcgactgcctttcgttgggcactaactctacgtgcagctgctgctgcagatgcatccttcccaagctgtgccaactgaataccgaggctttgatgcatgcccatgaagtgagtagcagataagggcctgcttgttgacacagcttcccaactttgagcaggactgtatccactctgtttggtcaacttgaaacccttatttgcagatggtgcacttggaactccaatattcaataggcaacctctgaggaaagttcctttctcaatgtcatccaaagcagcatttatcaatggtaagcatgcctgagctgcatccttgaagtcgctgtctttggtttcatccttcttccaattcaatgagattgcaattgaaggcaccccatacactaaggcctcccttgcagcagcaatggcagaagagtgaaacatctcatacccacagtttggtcctgtgttgataccgctgatcaccaaagcaggagacgaccaaggaaacaacctcccagataaggccaacgagacacagtcaaccggcgtgcctgatatctcaaaagctttagcacctgtgaaatccaccgatgtcgcagtgatggtttcacggatggtaattgagtagccacaggctggcttgtccgattcgggagcacacacgtggacgtcgcagcgggcgccggtaacgagggcgtcgacgagcgccgcgagacccgcggaccggatccccccggcacaggtcagcagcacgatgggcctcgccggcgccccatctccagagggggcatcctcgggagccgaggcttcagcctcgccggctgcggcggcggtgctgacctcggccgcggccgggcggcgggcagcaagcacggactcgaggttggagacgagggcggacgggagcgggttgcgcttgggagcgtcttcgccggaggtcgactccatcggcctcgtccccggagaggttatttgccgcctcgcgtcgtcagggatggctgggcagaagaggcgaagagggcaggagagagggagagagagggatgtacggagggaggaaggaaggaagcgccggtgttgacggggacgattggacgaagttgggaatggactcaaatggttttttttttttccccggctgtaggtcttgagatccttattggaattattgaactgatgcttgctgtcaacgggaatggcctagcgaaggggtcgacggatactcgagcacctgaccttgggcagcggtagttgcccagtcgtcgactcgtcgccaaaagtaaagcagtgggctggaggccgattatcagtggtagcggcgacctgagcggagctcaggtcgatagcggacctcaggcactcttgtaccaggagttggagcatgtggagggaggatctagagaccaggtcggtggtgaagcggcagaggaggaatgcacggcggaggcgcgagatcaggccggagggaaaggggagcgtgacgaggaggttgtagatgattgttccccgctccaacggcgattctgtcctaggctcatctgactccacagccaccaccgtcatcgtagcttcctcgttggccgcctttgcccatttattccctccattggaactggcagcgagacctgatgcacccatagagcggcggatttggggagcatgcggcggagtggtggcgaagaggggacctaagggagccaggaaacgacagatcgagtctgatggggtcgaggggtgcaccacctggaactgcgggcgggagggggaggagggatgagccgacgacggcggcgtagccgtggaactgtggaagggatgaggcctgctggcgatccgggaggggtgacggcggattagttagggttgggggatttgggatgtgtagtgggctggtcccggccggcctcgagggtcc

SEQ ID NO: 82096 - DNA, 333 bp, Zea mays
  Clone ID: MRT4577_174886C.1
gaaagggggattataggggttcttgttcacaggttagaaaaaattacaacattcattttttttttatgagggagggcattcccacctggggccatttaaaaaattgcaactaattcttttacacattaccaaccttgaaagcgggttctctatattcgggggtaccctcccccccctctcgtggttataagtgaatccgctgcaccaatttttaccgggctgtgtaccaggcatgcatttgcgtttctttgcatgtgagttccaccaaatctgggggaggggacccccttaaattctggttgcccacttgctttcaaacctccctacccttgg

SEQ ID NO: 82097 - DNA, 416 bp, Zea mays
  Clone ID: MRT4577_174887C.1
aaaaggaaaagaaaaggcaggagaataacgaagcaagatctgccgcggctccattttaactggtcggcgcctccgccgctgccgtcttccccctctcccctccgtaccactcgtcttcgtctagcctcccgcccgcagccaccatggcacccggcctctacaccgacatcggcaagaaaaccagagatttgctgtacaaggactacaacacgcaccagaagttctccctcaccacctgctcgccccatggcatcgcaatcacagctgcaggaacaaggaaaaatgagtccacctttggcgaatcttcacactcaaattaagaacaataaattgacggtcgatgtccaagcgaactcagaatcagatcttttgacaacaatcactgttgatgagattggtacctcagggctcaaatc

SEQ ID NO: 82098 - DNA, 255 bp, Zea mays
  unsure (1)..(255): unsure at all n locations
  Clone ID: MRT4577_174888C.1
cccgcgtccggcggccgtcccggagcgtggggggcaagcgcaagagcaacccaggggcgggaagataagaagaacaaactcgcgcgctccgaccaggatgactccgtccgccgccgccgcaacaagccgagcgccaagttcctcatatctgttccgcaagcggncccncnactacgttttgtcnggggagnatnaanctgntgacnaccggcagcaggagcacctggcgaatcctcaacgccgtgttgacgagga

SEQ ID NO: 82099 - DNA, 329 bp, Zea mays
  Clone ID: MRT4577_174889C.1
ccgacgcctcgtccgacgcctcggggccgtgttttcggaagcatatgggtactgatacttgccgtggaagctgaatctacggcggagggggacaccgatatagccgtggcggctacagccgaggcagcggctacagtggcgacgaccgctactgtggtggtggctgactctactgctgtagcaaccgtggcggccgctaccgcaactccgacgggaactggaggaactgaacggtggggcccgcgcggacaaattattctgttcgctaccgtgatgtttaccctattccaaagggtttatcttccttcgtgtcgtgttttggtgttgcc

SEQ ID NO: 82100 - DNA, 343 bp, Zea mays
  unsure (1)..(343): unsure at all n locations
  Clone ID: MRT4577_17488C.1
gcctcctctctgttgatccgtggagcaccaggcaagctcctgccctgcggggggcctccctgacagcgcctcctgctctccattgctgacctccactccagcacctgagcaagcgctcctgaggtcatcttccccatctttctatagtgccggccgccaggtcgtcttccccatccctgccatggcgccctctcctatgctcctcccaacaccctggctctgctcgaccttcacagtgagctcgccctcagccatggcgggtgccgactacacctnccctgggtgctcgacgagctcgccctgagccctgccgtgcccctgcttcctgttaccagtgcgccct

SEQ ID NO: 82101 - DNA, 1086 bp, Zea mays
  Clone ID: MRT4577_174890C.1
taccacaaccaccgcacgttaggtactaccgagaggcacaggccggcaagaaccgagctagctaataatcagggaagctgcctggaaaaagtctcggccttcgtcttcgcagcgctgtgtagacgagtactcgatcggcgcgatggaggggtcgacgacgacgaccgaaggccacgtggttgggatcccggtgagcaccagggcttatggcatcgaggagcccgacttcccggcggaggagacgcagacgcccgaccacgagaattcccgagctccttccagtacaacagccatgatgctgccagttcgacgacgaccgccgccgatcggccgacgagcgatcaacaagccactaggaagggagacaagatcgtccggggcatcaaagaacatgtgaccctgggaccgaagctctccgacacggtgaaggggaagctctcgctgggcgcgaagatcctccgggccggcggcagcgtggagaagctgttccggcagtggttctccgcggacaaggacgagaagctgctgcgggcgtcgcagtgccacctgtggacgacggcggggcccatcgccggcgtgctgttcgtgtcgacggcgcgggtggccttccgcagcgaccggtcgctgtcgctggcggtgtccaccccgcgcggcgactgcagcttccgcgcgccgtacaaggtggccgtcccgctgcggaaggtcggggcggtgcggcccagcgagaacaggcaccggccggagcagaggtacgtgcggctcgccaccaccgacggcttcgagttctggttcatgggcttcgtcagctacaacaagtcgctgcagcacctggagcgggccgttgcgtgcgcgcggcaggcgcgatgacggtgtgctagttctgggcccgctctgtatgtgtaggctgcagctgcaacatgtcgttgtacatctgggcgatcggttgccctggtaagcaggttggtcatagactcacaggcgaccggtcaggcatgtggtcttttggggttgggcaagaaattcaccatgaatttgaaatagagagtgctggtgtagtggtgtgacaatggcctttttgggcgattg

SEQ ID NO: 82102 - DNA, 283 bp, Zea mays
  Clone ID: MRT4577_174891C.1
atagcagccgccgtcatgtcgaagcgaggtacgggaggttcggctgggaaccagttccgcatgtcactgcgtctaccggtggctgcgacggtgaactgcgcggataacacgggcgccaagaacctctacatcatctccgtccagggcatcgagggtcgcctcaaccgtgtcccgttcgcctgtctcgtcgacatggtcatggtcaccgtaatcacgggaaagcccgatctcaggtaggaagtggtgcctggcgtcatcgtcctgcagcgcaatcgtagcgtcg

SEQ ID NO: 82103 - DNA, 1644 bp, Zea mays
  unsure (1)..(1644): unsure at all n locations
  Clone ID: MRT4577_174892C.1
ccccggngtgggaccctcgaggccggccgggccgggtaccttcctccatgtctgtgttgcttgagagtagtaaagatgctccaaatgtggccgaaaaagtctgtggagctatttattttcttgcccaaggttatgaagatgcggagtcaatgtcttctgtgctcacaccttatctacctaatatcattgctgcacttctttctgctgcggaccgtgctgattctacccattccaggcttcgtgcttctgcttatgaagcactgaatgagattgtgagggtcagcaacatacctgaaacttcaggcatcataggccaattgttgcaggagatcatgagaagattaaaccttacatttgatctccatatactttcttctggtgataaggagaagcaaagtgatctgcaggctttgctatgtggtgttctgcaggtcatcatccagaaactgagcagcacagatgcaaagtccatagtttctcagactgctgatcagctgatgatgctgtttctgcgtgtctttgcctgccacaattctactgttcatgaagaagcaatgcttgcaattggtgctcttgcatatgctactggtccagattttgtgaaatacatgcctaacttcttcacatacctggaggctggtttgcagaattatgaagaataccaagtgtgttccatctctgttggggtggttggtgatatttgccgtgccttggaagataaaattttgcccttctgtgatcgcattatgactgttcttcttaaggacctatcaagctctatgctcaatcggtctgtgaagcctccgattttctcatgctttggagatattgctcttgctattggtgagaattttgagaaatacctaccatatgccatgccgatgcttcaaggagctgctgaacttcttggtactcttgatcagagtgatgatgatatggttgattatggcaaccagctcagacgtggcatttttgaggcatactctggtatactccagggcatcaagggcccaaaagctcagctgatgatcccatatgcaacacatctactacagttcactgaagctgtcttcaaagataggagcagggatgacagtgtgacaaaggctgcagttgctgtccttggggatcttgcagacacgcttggccagagctcaaaggatctgttcaagacccacctattccatgttgagttcttgagggagtgccaagcacaacagttggatgatgaagttcgggagactgcacaatgggcccaggggatgataaaccaggcggtggtctcctaatgtaggttgattttggtttgtttgttatgggaggtttcttgtggttgtgccaagttcatttgccacagacgaaagaaaggctaccaatatatatgtagcgtcagtcgtaggatcctggtagacatatttgtgcgttgttggtctgtcaagtcggtgcgcgtcacattgtaccgggtggtttctgtccgagtatgtcttgaacagcaaaacttggttcatttatcttggtatttttcaatgctaaaaaaaaaaaaaagaaaaaattcatttcttgtccagctgatcaagtttatatatgatacacacgcagactgatacatttaatcaaaatttgatctgcttgacatggtttgtt

SEQ ID NO: 82104 - DNA, 793 bp, Zea mays
  Clone ID: MRT4577_174893C.1
cccttgcttgctcccctaaaggcgagcgagcgagccaacccctgtcggcccaaaaatggatgggaatgtttaaccgatccatttttcatgggccaagcgtcaaggaaaaggtggtgttaaaatggatccccagttttttgggcccttcccattggccaatgtgaagtattccctgtttgcctgtgtctatctatttaagcatggtgatcctgacccgtccattggaaaaatagtaaagttttggtagcggacgctgggtcaagggcccaaaagctcagctgatgatcccatatgcaacccatctactacagttcactgaagctgtctccaaagataggagcagggatgacagtgtgacaaaggctgcagttgctgtccttggggatctcgcggacacgcttggccaaagctcaaaggatctgttcaagacccacctattccatgttgagttcttgagggaatgtcaagctcaagagttggatgatgaagttcgggagactgcacaatgggcccaggggatgataaaccaggcggtggtctcttaatgcgggatgattttggtttgttagttacgggtggtttcttctgtggtggtgccaagttcatttgccacagatgaacgaaaggataccaatatatatgtagcgtcagtcttaggatcctggttggtctgtcaagccggtgtgggtcacattggaccgggtggtttctgtccatgaatgtcttgaacagcaaaaattggttcatttatcatgatattttttaatgctaaaaaaaaaaaaaaaaataaaaa

SEQ ID NO: 82105 - DNA, 204 bp, Zea mays
  Clone ID: MRT4577_174894C.1
aggatagcaggcggctgtctaagcgttaagcaatgagaagatggaggatatgcggggactaagttccgcggtaggaaggagattgtgtatccggtccgggtggtgtctgggggagaatatgctgagaagtatgatggttctgcgaccttggaggagcgtattaatagttacatggttatactcagcggaggttcataggccaag

SEQ ID NO: 82106 - DNA, 682 bp, Zea mays
  Clone ID: MRT4577_174895C.1
tcggtgaagctctacattcatttcacggtggagttccccgactcgctggcaccagagcagtgcaaggctctcgagtcggtacttccgccaaagccttcgtccaagctgacagacatggagatcgatgaatgcgaggagacaaccatgcatgatgtgaacaacatcgaggaagagatgcgcaggaagcaggctcatgctgctcaggaggcgtacgaggaggacgacgagatgcctggcggcgcccaaagagtgcagtgcgctcaacagtaagcaggctaccataatgggattgaaggcactttggttggtcttcaattatgcgagtgcgcctgtggaccgtacggttctatggttttgctgtcgctgagctacaaagtaggaagctgatgcgcccctggccggccctgcaagcggggaatgtatccttttttgctgcaactgaaaaatgctactcacgcatagctggctaccttataacttttgcttgtgagatttgctagagtgacgattttaatttataggtggacttaatgtttgtgtaaggctaggcataataacctcatgtctcaatggacgttgccgttgcacattggtgcattttattttaatgtaacgcctgtgcttgtgctgttgacccaaaaaaaaaaaaccaaaaaaaaaaaaaaaaaaaaaaaaataatgt

SEQ ID NO: 82107 - DNA, 378 bp, Zea mays
  Clone ID: MRT4577_174896C.1
gcagcagataagttaaacacaaaaagacaaccgtgtccaaaaccagcatggatccagcgtccagggtcaattttctagagtcttgttgtcttcatggaagggtcttaagggacttctctgaaacaaggcggcttcaggagtcaattccttataaatttttattatccctcggtggaaaaggtcgaaacattatagaatagcattttgatgagatatatgagagagactagaagaaaactaatgctttccggattcatgaaacagttgctggcgcgcacattatttcctctcagttcacctttatattgtaattaagattctatttaaattcattggttctcaggttagctagctaaaaaaaaaaaaaaaaaaaaaaaa

SEQ ID NO: 82108 - DNA, 2098 bp, Zea mays
  Clone ID: MRT4577_174897C.1
ttgggtacctcgaggccggccgggctctaacttcccactccgctcggccaccagctttgaccgcctcccctcccctccgctcctgttcctccataccccacccccccgcaggagcggcgcggcggcggcggcaaaggcggctaaggcaagatgttcgggcgcgcgccgaagaagagcgacaacaccaagtactacgagatcctcggggtgcccaagtcggcgtcccaggacgacctcaagaaggcctaccgcaaggccgctatcaagaaccaccccgacaagggcggtgaccccgagaagttcaaggagctcgcacaagcctatgaggttttgagtgatccagagaaacgtgagatttatgatcagtatggtgaagatgcccttaaggaaggaatgggtggtggtgggtcccatgctgatccattcgacattttctcatcattctttggaccctcttttggaggaggtggtggaagcagcaggggaagaaggcaaaggaggggagaagatgtagtccactcacttaaagtttctctggaagatctttacaatggaatctcaaagaagctctctctttcacgcaatgtcatctgctccaagtgcaagggcaagggctcgaagtctggtgcttcaatgaggtgccctgggtgccagggctcaggtatgaaagtcaccattcgccagcttgggccttccatgatacagcagatgcagcagccttgcaacgagtgcaaggggactggggagagcatcaacgagaaggaccgctgcccagggtgcaagggtgagaaggtcgttcaggagaagaaggttcttgaggttcatgttgagaagggaatgcaacacagccagaagatcaccttccctggtgaagctgatgaagcgcctgataccgtcactggagacattgtattcgtcctccagcagaaggaccactccaagttcaaaagaaagggtgaagatctcttttatgagcacaccctgtctctgaccgaagctctatgtgggttccaatttgttcttacacatctggacaacaggcagcttctgatcaaatcaaaccccggcgaagttgttaaacctgaccaattcaaggcgataaacgacgaggggatgcctatttaccagaggcccttcatgaaggggaagctctacattcatttcacggtggagttccccgactcgctggcaccagagcagtgcaaggctctcgagtcggtacttccgccaaagccttcgtccaagctgacagacatggagattgatgaatgcgaggagacaaccatgcatgatgtgaataacatcgaggaagagatgcgcaggaagcaggctcatgctgctcaggaggcctacgaggaggatgacgagatgcctggcggagcccaaagagtgcagtgcgctcaacagtaagcaggctaccgtaattggattcaaggcactttggttgctcttcaattatgcgagtgcgcctgtggactgtatggttctatggttttgctgtcgctgagctacgaagtaggaagctgatgcgccccctggccatgcaagcggggaatgtatccttttttgctgcaactgaaaaatgctacccaggcatagctggctaccttataacttttgcttgtgagatttgctagagtgacgattttaatttataggtggacttaatgtttgtgtaaggctaggcataacatcatgtccacctacaaattaaaatcgtcactctagcaaatctcacaagcaaaagttataaggtagccagctattgcctgggtagcatttttcagttgcagcaaaaaaggatacattcccccgcttgcagagccaggggcgcatcagcttcctactttgtagctcagcgacagcaaaaccatagaaccatacagtccacaggcgcactcgcataattgaagagcaaccaaagtgccttgaatcccattttggtagtctgcttactgttgagcgcactgcactctttgggctccgccaggcatctcgtcgtcctcctcgtacgcctcctgagcagcatgagcctgcttcctgcgcatctcttcctcgatgttgttcacatcatgcatggttgtctcctcgcattcat

SEQ ID NO: 82109 - DNA, 261 bp, Zea mays
  Clone ID: MRT4577_174898C.1
gtaaaaacaacgcatactggggcatccattaaccggtttcattcctacattgggagaaatcatttgaaaccggaaaccttcatgccgggaaccctctaaaagacttttaaactttgatttgaaatacttgggttcctctgtgacacaagtttttattgggaattgaaaatatcctgttcactggaagccttttaaaatgaaaaggttcccatatttagcgccactgatgggtacctcaacctcgacacctggttaaatggt

SEQ ID NO: 82110 - DNA, 1831 bp, Zea mays
  Clone ID: MRT4577_174899C.1
ggtccctcgaggccggccggggtggcaaaccctctagctccccactccgctcggccaccagctttgaccgcctcccctcccctccgctccgctcctgttcctccataccccactcccccgcaggagcggcgcggcggcggcaaaggcaaaggcaagatgttcgggcgcgcgccgaagaagagcgacaacaccaagtactacgagatcctcggggtgcccaagtcggcgtcccaggacgacctcaagaaggcctaccgcaaggccgctatcaagaaccaccccgacaagggcggtgaccccgagaagttcaaggagctcgcacaagcctatgaggttttgagtgatccagagaaacgtgagatttatgatcagtatggtgaagatgcccttaaggaaggaatgggtggtggtgggtcccatgctgatccatttgacattttctcatcattctttggaccctcttttggaggaggtggtggaagcagcaggggaagaaggcaaaggaggggagaagatgtagtccactcacttaaagtttctctggaagatctttacaatggaatctcaaagaagctctctctttcgcgcaatgtcatctgctccaagtgcaagggcaagggctcgaagtctggtgcttcaatgaggtgccctgggtgccagggctcaggtatgaaagtcaccattcgtcagctggggccttccatgatacagcagatgcagcagccttgcaacgagtgcaaggggactggggagagcatcaacgagaaggaccgctgcccagggtgcaagggtgagaaggtcgttcaggagaagaaggttcttgaggttcatgttgagaagggaatgcaacacagccagaagatcaccttccctggtgaagctgatgaagcgcctgataccgtcactggagacattgtattcgtcctccagcagaaggaccactccaagttcaaaagaaagggtgaagatctcttttatgagcacaccctgtctctgaccgaagctctatgtgggttccaatttgttcttacacatctggacaacaggcagcttctgatcaaatcaaaccccggcgaagttgttaaacctgaccaattcaaggcgataaacgacgaggggatgcctatttaccagaggcccttcatgaaggggaagctctacattcatttcacagtggagttccccgactcgctggcgccagagcagtgcaaggctctcgagtcggtacttccgccaaagccttcgtccaagctgacagacatggagatcgatgaatgcgaggagacgaccatgcatgatgtgaacaacatcgaggaagagatgcgcaggaagcaggctcatgctgctcaggaggcctacgaggaggatgacgagatgcctggcggagcccaaagagtgcagtgcgctcaacagtaagcagactaccataatgggattcaaggcactttggttgctcttcaattatgcgagtgcgcctgtggactgtgtggttctatggttttgctgtcgctgagctacgaagtaggaagctgatgcgcccctggccatgcaagcggggaatgtatccttttttgctgctaccgaaaaatgctacccacgcatagctggctaccttataacttttgcttgtgagatttgctagagtgacgattttaatttataggtggacttaatgtttgtgtaaggctaggcataacatcatgtctcaatggacgttgccgttgcacattggtgcattttattttaatgtaacgcatgtgcttgtgctgtcgaaaaaaaaaaaaaaaaaaaaaaaaaaaaaaaaaaaaagggcggccgccaccgcggtgga

SEQ ID NO: 82111 - DNA, 356 bp, Zea mays
  Clone ID: MRT4577_17489C.1
agaaacaaaacgggcacgggtaaatttaattaccgcgcaacaaaaggcgtggactacctaaaacgctggctcttgcaaaacaaaaccaaaaactcactcactaaaagaccacacccgacttactgcacctctacctttgtaccactacctgaagcaacgatcaactatgcccgactcaaataaattgtctcctaaggtaaatgtcgctgacccagctattgcggggcacacgccggctataggagagcaaaatggcttacgggccctgacggtccgcgccggaaactccatcaggtagagacatctggaaccttgtggtaaccaaaaaaaccctggacaggaccattagcagcctt

SEQ ID NO: 82112 - DNA, 224 bp, Zea mays
  Clone ID: MRT4577_1748C.1
taacagatcaagacagcggcacacccatcaaatggcatttttctattccaactaaagagcagcactccacacctgtgagtaaaacgcaccctaagagttgtagcggctccacctaacatcttacaatctgatggaaaacataacccacacatgttctcagaagcttctacaacaacaagaactgccgctcatcacagggcagcaaccaccattatttctggtgg

SEQ ID NO: 82113 - DNA, 1818 bp, Zea mays
  Clone ID: MRT4577_174900C.1
cattgggtacctcgaggccggccgggcctctagcttcccactccgctcggccaccagctttgaccgcctcccctcccctccgctcctgttcctccataccccacccccccgcaggagcggcgcggcggcggcggcggcaaagccaaaggcaagatgttcgggcgcgcgccgaagaagagcgacaacaccaagtactacgagatcctcggggtgcccaagtcggcgtcccaggacgacctcaagaaggcctaccgcaaggcagctatcaagaaccaccccgacaagggcggtgaccccgagaagttcaaggagctcgcacaagcctatgaggttttgagtgatccagagaaacgtgagatttatgatcagtatggtgaagatgcccttaaggaaggaatgggtggtggtgggtcccatgctgatccatttgacattttctcatcattctttggaccctcttttggaggaggtggtggaagcagcaggggaagaaggcaaaggaggggagaagatgtagtccactcacttaaagtttctctggaagatctttacaatggaatctcaaagaagctctctctttcgcgcaatgtcatctgctccaagtgcaagggcaagggctcgaagtctggtgcttcaatgaggtgccctgggtgccagggctcaggtatgaaagtcaccattcgtcagctggggccttccatgatacagcagatgcagcagccttgcaacgagtgcaaggggactggggagagcatcaacgagaaggaccgctgcccagggtgcaagggtgagaaggtcgttcaggagaagaaggttcttgaggttcatgttgagaagggcaatgcaacacagccagaagatcaccttccctggtgaagctgatgaagcgcctgataccgtcactggagacattgtattcgtcctccagcagaaggaccactccaagttcaaaagaaagggtgaagatctcttttatgagcacaccctgtctctgaccgaagctctatgtgggttccaatttgttcttacacacctggacaacaggcagcttctgatcaaatcaaaccccggcgaagttgttaaacctgaccaattcaaggcgataaatgacgaggggatgcctatttaccagaggcccttcatgaaggggaagctctacattcatttcacggtggagttccccgactcgctggcaccagagcagtgcaaggctctcgagtcggtacttccgccaaagccttcgtccaagctgacagacatggagatagatgaatgcgaggagacaaccatgcatgatgtgaacaacatcgaggaagagatgcgcaggaagcaggctcatgctgctcaggaggcgtacgaggaggacgacgagatgcctggcggagcccaaagagtgcagtgcgctcaacagtaagcagactaccaaaatgggattcaaggcactttggttgctcttcaattatgcgagtgcgcctgtggactgtatggttctatggttttgctgtcgctgagctacaaagtaggaagctgatgcgcccctggctctgcaagcgggggaatgtatccttttttgctgcaactgaaaaatgctacccaggcaatagctggctaccttataacttttgcttgtgagatttgctagagtgacgattttaatttgtaggtggacttaatgtttgtgtaaggctaggcataacatcatgtctcaatggacgttgccgttgcacattggtgcattttattttaatgtaacgcatgtgcttgtgctgtcgaacaatcttggaaaaaaaaaaaaaaaaaaaaaaaaaaaaaaaaaaa

SEQ ID NO: 82114 - DNA, 2114 bp, Zea mays
  Clone ID: MRT4577_174901C.1
accgcgctattgacttgacagtcctcgtccttggaacgccggactgcatgttagctaccctatgcagtttaaccaagccgcgcgccatcgatcgcctgcctcactgcttcacaacctcatttagccaaggagctcacagaaaaaacagcccgtgacacgggcaccgatcgagagcgaaatggaactccgccatttccgctgctgcgcttcgcggcttctcctcctcgttaccctcctcctcggcttccggcgggccggtgcccaggacagcacaagctacaccgtccccgcgcagttcgcctgtgacgtgtcgtcgccgtgcgacacgtacgtcgtgtaccggacgcagtcccctggctacctagacctcggcagcatctcggacctcttcggcacgagccaggcccggatcgccagcgccaacggtctcagctccgaggacggcgtgctgcagcctggccagccgctgctcgtgcccgtcaggtgcggctgcgcgggcgcctggtccttcgccaacgtcacgtaccccatccggcagggcgacaccttctacaacctcgccaaggcctcctacgagaacctcaccgagtaccacctcatccagaatctgaacccggggtcggaacccaccagtctacagatcggccaggaggtcacggtgccgctcctctgccggtgcccggctcgcgctgagcggagccgcggggtgcagagcctcatcacctacatgtggcaagcaggggacaccatgtcccaggtgagcaagctcatgaacgccaccgtggacgagatcgccgaggcgaacaacgtaaccgccaacacctccgcctccgcgtccttcgtggggcagccgatgctgatcccagttcgacagcggccgcggcttccggctccgctctacgctgctgctgcagccgacggcaagtcccggtcgcgacgtcgggctgccgtcataggcgccagcgtctcggggtccctcgtcgcgctcgccgccttgttcgtcgcgatcctggcgcgccggaggtaccgaaagaagccgtcgatgcgcctgggttcacggttcgccgtgaacaccaagctttcttggtccaggaaccaattcggtcatgacggcagcaattccttcgcccacgtgatgaaaggaggcaagctgctcaccggcgtttcgcagttcatcgacaagcccatcatcttcgtggaagaggaaatcatggaggccacgatgaaccttgacgagcggtgcaagatcggcagcacgtactacagggcgaagctcgacggggaggtgtttgcggtgaagccagcgaaaggtgacgtgtcggcggagctgaagatgatgcagatggtcaaccacgccaacctgatcaagctggcgggcatatccatcggcgctgacggggactacgcattcttggtgtacgagttcgccgagaagggctcgctcgacaagtggctgtacgagaagccaccgtccgcgctgccatcgtcgtcgtgcaccgtggcaactctctcgtggggtcagaggctgagcatcgcgctggacgtcgcgaacggcctactctacatgcacgagcacacgcagccgagcatggtgcacgacgacatccgcgcgcggaacatcctcctgacggcggatttcagggccaagatatctggcttctccctggccaagccagccatggtcgacgccgccgcgacgagctccgacgtgttcgccttcgggctgctgctcctggagctcctatccggcaggagggcgatggaggcgcgcatcggctcggagatcggcatgctgtggagggagatccgtggcgtgctggaaaccggcgacaagagggaggcgaagctgaggaagtggatggaccccgctctgggaagcgaataccacatggacgtggctcttagcctggccagcatggcgagggcctgcaccgaggaggacgcagcgcggcggccgaacatgaccgaggtcgtgttcagcctctccgtgctggcgcagccgttgtcagtggccgacgggttcgagaagctgtggcaacccagttcggaggacaacatccggattgccggctcggtggcagctcgataaaatgaaaatacaacttcgtttagca

SEQ ID NO: 82115 - DNA, 272 bp, Zea mays
  unsure (1)..(272): unsure at all n locations
  Clone ID: MRT4577_174902C.1
ctccgttcttgtcgaggccaccccggaaggcgactggcgccgtcgtcgctctgaagcggnacgacctgcacaacaccctccggctcacgcgcgaaacatcaaggccatcatcatagacctgatgttcggcgggacagaaaccgcggcgtcagcgatcgagtgggccatggcggagatgatgcacagccccgactacctgcgcccggtgcagcaagagctcgccgacttcgtgggccccgaccgcaacgtgagcgaatctgacctggacaggc

SEQ ID NO: 82116 - DNA, 317 bp, Zea mays
  unsure (1)..(317): unsure at all n locations
  Clone ID: MRT4577_174903C.1
atggtcgtcggnactcctcatcacgcgtcgaagctcgaattcggtcgagcttcttgcttgctgctgcagtgctgcccagacctcgccatacccctctcccagcagcaggcagcagccatgccaggggaccacgggtccaaggccgacattttcttcgacggacgctactaggacagcgccatcggagcatgcttcgcagacatatggaccatcccgctcgacacgtccaaggtcaggctccagctgcagaagaacgacgtcgccgacgccagctccggagacgctgcgccagcgctccccaagtactcgcgggctgc

SEQ ID NO: 82117 - DNA, 492 bp, Zea mays
  Clone ID: MRT4577_174904C.1
ggcatttctgagtgatgaaacatctgtttatttgatttgttctggattaaggtcgcttgtgagagaatgccaattgttatctgtgtgcaattaggtcgcgtgtttatagttgcctgatcgcattttgtccttgtcccttctggattgcggtcctgtcacccaccctgaggaagaatacacctggttgtggtctccatttttctcagctactactgtccctatgccacagttttttagatgtgatgatgcggcattgcttgccttttatatatatgggcttgtctatgcagatgagtgactattttgttagtacatggcgatactttgaaaatattgttctcatttttcatctcttccagatttatcatgacatgctttcccttgataaccacatgcatgtaatcatatttatttggttcgcagcagtcaaatactctgtctataggttgttttatttttagtgaagcagagtgtcacatttggtacagcaaa

SEQ ID NO: 82118 - DNA, 1848 bp, Zea mays
  Clone ID: MRT4577_174905C.1
cattgggtacctcgaggccgggccgggctctagcttcccactccgctcggccaccagctttgaccgcctcccctcccctcctctcctgtgttcctccataccccactccccccgcaggagcggcgcggcggcggcaaaggcaaaggcaaaggcaagatgttcgggcgcgcgccgaagaagagcgacaacaccaagtactatgagatcctcggggtgcccaagtcggcgtcccaggacgacctcaagaaggcctaccgcaaggccgctatcaagaaccaccccgacaagggcggtgaccccgagaagttcaaggagctcgcacaagcctatgaggttttgagtgatccagagaaacgtgagatttatgatcagtatggtgaagatgcccttaaggaaggaatgggtggtggtggatcccatgctgatccatttgacattttctcatcattctttggaccctcttttggaggaggtggtggaagcagcaggggaagaaggcaaaggaggggagaagatgtagtccactcacttaaagtttctctggaagatctttacaatggaatctcaaagaagctctctctttcgcgcaatgtcatctgctccaagtgcaagggcaagggctcgaagtctggtgcttcaatgaggtgccctgggtgccagggctcaggtatgaaagtcaccattcgtcagctggggccttccatgatacagcagatgcagcagccttgcaacgagtgcaaggggactggggagagcatcaacgagaaggaccgctgcccagggtgtaagggtgagaaggtcgttcaggagaagaaggttcttgaggttcatgttgagaagggaatgcaacacagccagaagatcaccttccctggtgaagctgatgaagcgcctgataccgttactggagacattgtattcgtcctccagcagaaggaccactccaagttcaaaagaaagggtgaagatctcttttatgagcacaccctgtctctgaccgaagctctatgtgggttccaatttgttcttacacatctggacaacaggcagcttctgatcaaatcaaaccccggcgaagttgttaaacctgaccaattcaaggcaataaacgacgaggggatgccgatttaccagaggcccttcatgaaggggaagctctacattcatttcacggtggagttccccgactcgctggcaccagagcagtgcaaggctctcgagtcggtacttccgccaaagccttcgtccaagctgacagacatggagatcgatgaatgcgaggagacaaccatgcatgatgtgaacaacatcgaggaagagatgcgcaggaagcaggctcatgctgctcaggaggcgtacgaggaggacgatgagatgcctggtggagcccaaagagtgcagtgcgctcaacagtaagcagactaccataatgggattcaaggcactttggttgctcttcaattatgcgagtgcgcctgtggactgtatggttctatggttttgctgtcgctgagctacgaagtaggaagctgatgcgcccctggctctgcaagcgggggaatgtatcctttttttgctgcaactggaaaatgctacccaggcatagctggctaccttataacttttgcttgtgagatttgctagagtgacgattttaatttataggtggacttaatgtttgtgtaaggctaggcataacatcatgtctcaatggacgttgccgttgcacattggtgcattttattttaatgtgacgcctgtgcttgtgctgttgaccaaaaaaaaaaaaaaaaaaaaaaaaaaaaaaaaaaaaaaaaaaaaaaaaactcgagagagggccgcggtacc

SEQ ID NO: 82119 - DNA, 1988 bp, Zea mays
  Clone ID: MRT4577_174906C.1
tgattccgcctcccgctccacaccacatattcaaggagctcacagaaaagtagcccgtgacaccgagcgaaatggaaccccgccatttctgccgcgctttgctgctgctcctcgtcgtcctcctcctcggcttccggcgggccggtgcccaggacagcacgaactacaccgtccccgcgcgattcgcctgtaacgtgtcgtcgccgtgcgacacgtacgtcgtgtaccggacgcagtcccccggctacctggacctcggcagcatctcggacctcttcggcacgagccaggcccggatcgccagcgccaacggtctcagctccgaggacggtgtgctgcagccaggccagccgctgctcgtgcccgtcaggtgcggctgcacgggcgcctggtccttcgccaacgccacgtaccccatccggcagggcgacaccttctacaacctcgccaggctctcctacgagaacctcaccgagtaccacctcatccacgacctcaacccgaggtcggagcccaccagcctacagatcgggcaggaggtcacggtgccgctcctctgccggtgcccgccggctcgcgctgtgcagagcttcatcacctacgtgtggcagccaggggacaccttgtcccaggtgagcaagctgatgaacgccaccgcggacgagatcgccgaggcgaacaacgtcacgagcagctccgtctcctccgcgtccgctgcggggctgccgatgctgatcccagttcagcagcggccgcgccttccgccgctgctctacgccgctagtgcgggcgagggcaggtcgtcccggtcgcgacgtcgggctctcatcatcataggcgccagcgtctcggggtctctcgtcgcgctcgctgccttgctcgtggcgatcatggcgcaacgaaggtaccgaagaaagaagccgtcgatgcgcctgggctcaccgttcgccgtgaacaccaagctttcttggtccgtgaaccagtacggccatggcagcagcaattccttcgctcacgtgatgaaaggtgggaagctgctcacgggcgtgtcgcagttcatcgacaagcctatcatcttcgtggaagaggagatcgtggaggccacgatgaaccttgacgagcggtgcaagatcggcagcacgtactaccgggcgaagctcgacggggaggtgtttgcggtgaagccagcgaaaggtgacgtgtcggcggagctgaggatgatgcagatggtcaaccacgccaacctgatcaagctggccggcatatccataggcgctgacggggactacgccttcctggtgtacgagttcgccgaaaaggcctcgctcgacaagtggctgtaccacaaccaccagaagccaccgtccgccctgctgccatcgtcgtcgtgcaccgtgccaaccaccctctcgtggggccagaggctcagcatcgcactggacgtcgcgaacggcctgctctacatgcacgagcacacgcagccgagcatggtgcacggcgacatccgcgcgcggaacatcctcctgacggcggatttcagggcgaagatatcgagcttctccctggccaagccagccacggccgacgccgccgcgacgagctccgacgtcttcgccttcgggctgctgctcctggagcttatgtccggcaggagggcgatggaggcgcgcatcggctccgagatcggcatgctgtggagggagatccgtgccgtgctggaagccggcgacaagagggaggcgaagctgaggaagtggatggaccccgctctgggaagcgagtaccagatggacgcggctcttagcctggccggcatggcgagggcctgcaccgacgaggacgcggcgcggcggccgaacatgaccgaggtcgtgttcagcctctccatgctggcgcagccgttgtcagtggctgacgggttcgagaagctgtggcaacccagttcggaggacaacatccggattgccggctcggtggcagctcgataa

SEQ ID NO: 82120 - DNA, 146 bp, Zea mays
  unsure (1)..(146): unsure at all n locations
  Clone ID: MRT4577_174907C.1
gcgcgggttttttttttttaacaaaaaaggtactgggggatggctgggatgccacanacaattacccgatatctagcttagcgatagctacctcatatacaaaccatcacatgagatatagaaacacactctcttgcatcatgcat

SEQ ID NO: 82121 - DNA, 478 bp, Zea mays
  Clone ID: MRT4577_174908C.1
cagaccccaggaccgatcgcaccccaagccgccagactgcgcggctcgtactcactcaggtccagtagcacgagtcactttacaacatgacttcagatcccggcactaagaaggaagaggagcaacaaagggagtatgtgtagtgagtgttttcagttctgccacgaagaccgcattaagcgaggacgtaactcgatctacctctagagcctctactcagtctacaactttaacttttggggttgaggtgggaacaactgctacattctaggccgtgtaccgtactgccggaacctagaaggtacgagggtatatcacgaagtgtcttacctacgctactacgccttatcttcagacgacatcgactagggccaaggacgtaacaactgtcgtattcatctatgagaaaggaactcactcgaatgacacgttcgtccctgtgatggtccttcttatcctcgtgtataccataaccctc

SEQ ID NO: 82122 - DNA, 361 bp, Zea mays
  Clone ID: MRT4577_174909C.1
gggaaaccaaatttgggtacagaaaatggccccgcccagaacaccccaaaaagattccgagggggccaaaattggaccaacctttaaaaaccccccccgccaaatcagggggggcccagttccagacaaagggcaaagcaaaccggccctgggggctttaaaaaataatttcactaccccgggacgggcacaaccttgaccgggtccaaaagggggccgaaaaaggaaaccccgccggggaccctgggggggaaaaaggagccgaaaaagggggggggggggcggacccccccgaccaaaaacctgaacgccgcgggattgaacccgcctttccccggggaaacaaacggccccttttggg

SEQ ID NO: 82123 - DNA, 382 bp, Zea mays
  Clone ID: MRT4577_17490C.1
gggaaaaccaagggggcgtttcattcttccaaacaaaaacccaaaaatatgggggggaagcgggaaaaaaaacaaaaacgattcacccccgggcaaaacacagttaaacccccaaaaaaaaagggaaccggggggggggtagggaaatgccaaaagggaaaacccccattggggcatgggtttaaaacaactaaaaaaccccccccccgtatcagggggacaagggcaaaaaaggaaaaaccaggggcgggcctttttttgacaaaaaccatgttcacccccaaaggcccccccggggctggttaaaaagcacaaggggggcccccgtaaaacaaccccattggcccttttagggcccttttgaacccccgggacccccggg

SEQ ID NO: 82124 - DNA, 1029 bp, Zea mays
  Clone ID: MRT4577_174910C.1
ggtacccccgggtctgccggggtaccttgtcctgatcatcccgatgatggatatgatacagatagatatcctatgccagaatggaccttgccatcttcatttgattctgatgatcctgtgtaccgctatcggtgccttgtgtctacaccaaacctcatggtgcgtgctgttaacaatcctgatggatgggatcatgattgtggatttgacggtgtgagtgtccaacacaaccataatgttgctaacaaatatccagcttctctgtgggttcaagttaacaaggacaagaggcagttcaccattcatttggattcctcaatgtcagttaagcatggtgactatgcctcgagcctggctggctttgacatccaaacaatgatgaatcagcttgcttacaccctcagaggtgagaccaaattcaaaggcttcaagaaaaacatcactactggtggtttatccatgacttttttgggaaataacatggtagctggagcaaagcttgaagacaagcttttaattggtaacaggctaacactgtcaggcaacactggtgctgtatccatgagaagtgatgctgcatatggagtgaatgtggaagcaactcttcatgaaaaaagctatcctgtaggtcaaggccttgccactttgggtgcatccttagtgaaatggcataaagagtggaccatgactgcaaatttggattcccatgtctctgttggaaggtcttcaaacatgtcagttcatgttgatgtaaacaacaaactaactggacgggtcagcatcaaggccaacacttcagaacagttgaacattgcccttttaggtacatgttcagtgataatgtatgtgtggaacaagatgcaccctagtgcagatcctaatgctgagtagcactggttagtatgacaattttgaattcttaacattttgtatcttttccttgttccttctgtttttctacttgttataacaactccacaataataaaaaaaaaaaaatgaaaattaaaaaagattataaacatatttg

SEQ ID NO: 82125 - DNA, 150 bp, Zea mays
  Clone ID: MRT4577_174911C.1
tttggtgatctgcgtgagcctgtgatctacagctggctgcataacctcaatagtctatccgggggcgtatgacagcgaggaggcagctgcccgagcctataacctgcatatctcaagtcactggggttctgagactctggtcaacttccc

SEQ ID NO: 82126 - DNA, 517 bp, Zea mays
  Clone ID: MRT4577_174912C.1
ggagcctcctagcgtcgcatcacttcacctagggggtgcgtaccgcagacactacaccattcttacgggggcaaactgcgttagcagtgtgtgagttgcatcacacctaaaggacgccactggcgacgattcggcttccgttaacctaaaacgggacccttgagagcttgccgtgacatggctttgggtggagaggcgcacaaccttcattgcaccactcactgtggggctcgtgccaaaccataaaaaagagaacgagaacctggtcgaaactgccaccgtacatgcgactgaacatgctcagtgtgataaagacattgctgctttgaactcatacatatggttgcacaagttgctggctgctgacgggaaaaaaacatgagaacacatgtgaatctagtaccttggcatgctccacctgagagccacatacgaaacctcaaatatggaacagcaacatgatactgaatcagagctgatccaaactactaatgctgacgctgagcaagccactgac

SEQ ID NO: 82127 - DNA, 1235 bp, Zea mays
  Clone ID: MRT4577_174913C.1
ccccgcgtccgatcgattcagtggctgtgacttttgtgagctagtacgatgtgatgtcagtgatccatgtcccatatggccatgcctaacacaagacatcgaagttggggaaatccttaacgcaagaatgctgatggtacgcaggcaagagcatcaaggatttccaggcgctactccaccggggctacagccggacgacgacgacgacgacaccgtcggcgtcgccgcccgtgccattgccgcttcccctggcgccgctgtcccggtcccggtcccgggcgtgcccgcgcccggccgccaagccgaagctgctcatcttcatccgcaagcagaaccgcgtgctgctcaacctcccgcacgtggtgacggcctgccggcgggccgggttcgcgccgcacgggatgaacctgcggcggcagaccccgctggccgcgatccacgccgcgctggcgtcggcggacgccatggtggccgtgcacggcgcggccgtcacccacttcctcttcatgcgcccgggctccgtgctcctgcagatcgtgcccgtgggcctggactgggcggccgacgccttctacggcaagcccgcgcagcagctcggcctcgactacctcgagtacaaggtggcgcccgaggagagctcgctggccgccgagtacggcctcgacagcaccgttctgaggaacccctgggtgatcagcagccgcggctggtgggagatgaagaaagtgtacatggaccgccagaacgtcaccgttaacatcaagcggttcggcgagctactcaggacggcgcggacgcacctcaagaacaccacggcgtgcgccgccgccgcggcgctgaggtagaagatgctagttgagcttggtcaggtgctaatgacttagtcatacttgtcaatttctttgtgttttcgtcgagatcctgtaaatatgattgggttggttcttttggtcgagagattggtggggatcgatcgccttcttctacagtgcattcgtttggttcatggtgttgctagagcagaagcagatgaagaatagtttatggcaggggcagctgtcctcaaacaccttgttcacactagttcataggggtagcagctctttttatttctcttcaaattttctttttgttcttctcattctttgggtgtcatgatgatgtataagaaactacatgtctttctctgtaacaaagatcaatagtccagactcttttacaaaaacaaacagaaa

SEQ ID NO: 82128 - DNA, 606 bp, Zea mays
  unsure (1)..(606): unsure at all n locations
  Clone ID: MRT4577_174914C.1
cgggctttcctctgcagttcaccatacctcaccatggnacatctgaaattcgcatcgagtgtaaggcttacggggagaacattggttacagtgagaaagaccgttttcagggacgctttgatgtaaaaattgaagttaagagctgatcacaagcacaaatctttcccactagccatttaaaaaaagttaaaaaaaagatacaaaaaacaaaaacctactagtcttgaataaactgtcatacgtatgggacctacacttaatctatatgctttacactagctttctgcatttaataggttagaatgtaaatttaaagtgtagcaatagcaacaaaatatttattctactgtaaatgacaaaagaaaataaaaattgagccttgggacgtgcccatttttactgtaaattatgattccataactgacccgtagtaagcagtgtttctggcccctaagtattgctgccttgtgtatttgatttagtgtacagtactataggtgcacaactctggtcatttttcaagccatgttttattgtatctgttttctactttatgtgagcaaggtttgctgtccaaggtgtaaatattcaatgggaataaaactg

SEQ ID NO: 82129 - DNA, 164 bp, Zea mays
  Clone ID: MRT4577_174915C.1
gacatgtgccacaggaacccaaggacaatcacctgcggacgcagtcggcagtccgaagccatgggagaacatggacggcaccacacttcacgccgtgaatactcttgcctgtccgtgaacgcacaacaatcgaccgcgtagtggaatcactcacatatgcgatg

SEQ ID NO: 82130 - DNA, 731 bp, Zea mays
  Clone ID: MRT4577_174916C.1
ccggccggacacagcgcagtccgaggttcccatcactcccacaccgcaccgctcttctcctccaccaccgccgcctcgcctcaccccctcccacgcctgcagccctccctaacggcgagggaggcaggacccagtgccgttgccagctcccgcagcttcgccacttcgcttctctccgcctccacagattgccgacgccctcttggccctctccaccgcgcggcgatggccgccgtggatgcaccaccgagcgggaaggctgcgcccgcgctgaagcggagtgcctggatcctagaagacgcgcgcgcatcctgcaccgcctcgtcggcgacctctgaggcggcgacgtggaccccaacgccctcgtgtctcccagctcaaggccgccatgactaagaggctcctctgaatctctgatctgttgcaacggcgcgcctagggtttctcgccttgcctatactgtttgtggcggataagtcgtcctatcctagagggagacgccctggagcctggaatggctggctttgcagtgctcttccagcttgtgtggatgtcgttgctgcacatctaacagtagtggctgatgcctagagcaaaaatcttgatgactactggcaactacacagattctggtgtttaaataaaacgatttcagtttaaactttacctcaaatattagggatagctctatctattaatccttgagtatctacggccttagcgcataccag

SEQ ID NO: 82131 - DNA, 246 bp, Zea mays
  unsure (1)..(246): unsure at all n locations
  Clone ID: MRT4577_174917C.1
gaacccccgggcgacccacgcgaccggcggcagagcaagcacaggancgtttcaccaaacaccaccaaaatggggagcggcgcaactgcgcccgctccgcaacaccaccacctaaccagcacccgcccgccccggcgacaagaggcatgacccccgacccccaccagcacaacaaggaaccaaacccaaactcaacctacgaaccacagcatatcaccgcatctacctaatacccagctccacaca

SEQ ID NO: 82132 - DNA, 247 bp, Zea mays
  Clone ID: MRT4577_174918C.1
tatcctcgacgcgacggggccctgaaggtgccgatcaacgtgcagcgtcggacagcaaagcatgcggtgtgcatcacaaaagagctgcaaggatgagcggaacctgagcatgatgccacgagatgctaaatttcgcaaggaaaatgaagtccaaatgtgtggccgcctcccaagcgcgcaatgacatcgtagctacgctgatatcacggtcggcgttgacagtatagtcaaacattttttttgtgcc

SEQ ID NO: 82133 - DNA, 383 bp, Zea mays
  Clone ID: MRT4577_174919C.1
agctgacggacacatatatacatgtgctcatgcatgcgggaatttctttctttgttctgcgtcttcttcattgcacccccttttaagaatagttggtaccgaactgtccattctgtaatttattataaattcggtaattattacaaatactgtggttaataaagaatgttccaccagcgtaagactaactacctgcccgaaccctctacgagtacaagacagaagcctcaactgaaggatctgagcctgagcgccctccggacgacaagaacaggttctgctttttatagataccatttatcactagctagaatacatattcacacgcatcatctatcacaccgcaagcttataattgacctcaaagtttacacatgcttgtc

SEQ ID NO: 82134 - DNA, 589 bp, Zea mays
  Clone ID: MRT4577_17491C.1
gccttccgcggacgcgtgggcgccaagccaatcacacggaaaaagaccctaacctaccacaaacttatcttccaaccaatccatgcgctgttgctagacatctcggtgtttttgtagattgaggatgaatcgaagatccgatcgatgaaccggaagcgcggtgacgaagctctcgccgagccagtcacggtgatgttctgggttgcaccagaagatgaacgaaccatgagaaattcctcgttggagttgtcgttagagttgggaagagagtcgtacttcgacgagatggtcatggcggcttatggctacaagcttatctggcaatgggctgttgcgaggctatagagaagataagtctatggttgatggcaggtgcgacactaggtatttacggctctgagaaaggagagtccgatagagatttcctatcttttctttcaactcaggaaaaatacggtcgggcggggctaatttgaatccctcgggcaaaataaaaacattacccacaatcaaccctccctttttaccatcagcaaaaacctggtacagctgcaaatcataaggaaattgaaagactggttccaaatcc

SEQ ID NO: 82135 - DNA, 919 bp, Zea mays
  Clone ID: MRT4577_174920C.1
aaggcccgcaactttgcgaccttccgcctcttcccgcgcgccggcgccgccgaccccaacgaccgcgtgttcgtacgcgtcgacaacaacgactacactgtccccgggttcgccgacgaggactccttcgacccatcccggtccgacccttccgccggcaatggaaacttcggctccgcatccggccccctcccggagcacgtccgccgcgagatcctcgagctcggcctccctgacgacggttacaactacctctcccacctccgcgagctccgtcccgccgccgccgcagcctcatccttcgtccccagctccaccggtcgcccggagcccctcccgctcgatgtcaaggcttatgatgcaagcagggtacgcattggtctcagcgagggtgaactggacgaggggaagacgatgtgtaaggtggctgccaagactgcgccagtgaggcgaattgagaaggctgtcgacccagatatcgccaggttgctcgatgagagcgatgtgtctcatgttgggtccgaggatgaggggctggaggaggattttgtcatcatagctaaccaagctgaggaggaggaggaggatgaggatggagacatggaagaaaagcaagagtggaatggtgtcttcagtgatgttgaagaggaggagttcgattttgaggaggatgagccaaagccaagagtgagacgattgctggatgaacaatttgatttggaatctccagagcgcggttccctagggttttccctggagaaacaactacaacaaatggcatcatcaagcttcatgggaaagagaaactgccagtagaatacctgccacagaggagaagaaatggtgaaaaggagaagaaagtaaagcctgtagaagcttctgtcactgataaatttaaaaaaggagctgagaaggaaac

SEQ ID NO: 82136 - DNA, 2070 bp, Zea mays
  Clone ID: MRT4577_174921C.1
tccggccggtccgcctcgaaattactagctggagatcctaatcgtaacaatctagataatgttcaccagagatcctaattcctagccgtatcaatctgggagctccatcaatctagaccaaagatcctaactattgtcagcatgctctccaaatagattatagagtccagtttcaccacgttttcattcttcctattgtcagcatcgctctccaaatcccaaaaccctaacctatccaccgccgccaccgtttaccgtcgctgccgccaatatgggagcaagaggaggaggaggaggaggcggcggcggccgcaaggcccgcaactttgcgaccttccgcctcttcccgcgcgccggcgccgccgaccccaacgaccgcgtgttcgtacgcgtcgacaacaacgactacactgtccccgggttcgccgacgaggactccttcgacccatcccggtccgacccttccgccggcaatggaaacttcggctccgcatccggccccctcccggagcacgtccgccgcgagatcctcgagctcggcctccctgacgacggttacaactacctctcccacctccgcgagctccgtcccgccgccgccgcagcctcatccttcgtccccagctccaccggtcgcccggagcccctcccgctcgatgtcaaggcttatgatgcaagcagggtacgcattggtctcagcgagggtgaactggacgaggggaagacgatgtgtaaggtggctgccaagactgcgccagtgaggcgaattgagaaggctgtcgacccagatatcgccaggttgctcgatgagagcgatgtgtctcatgttgggtccgaggatgaggggctggaggaggattttgtcatcatagctaaccaagctgaggaggaggaggaggatgaggatgaaggaggatggagacatagaagaaaagcaagagtggaatggtgtcttcagtgatgttgaagaggaggagttcgattttgaggaggatgagccaaagccaagagtgagacgattgctggatgaacaatttgatttgcttgctttggaggaatatggagacagtgatgatgatgacatgggtgttaaaggtggggaatatgaactgccaaatgaggctattgatgaactgaaattgttccaaaatcagaatgtatgtgttgatgaagaatatagaacaccagcagattttgttcgtcaaaaactggattcaagcatggctgatgaggtggatgaatctgctcttgtgataaaaaaatgtgctgaatatgctgaaagatatttaaatgaaactgcagaagaagaggtggttgtgcttgtttcggaaagcagcgatgaatctgaagtttgggactgtgagaccattgtttccacattctctaaccttgataatcatcctgggacaattgaaactccaggaatctccagagcgcggttccctagggttttccctggagaaacaactacaacaaatgacatcatcaagcttcatgggaaagagaaactgccagtagaatacctgccacagaggagaagaaatggtgaaaaggagaagaaagtaaagcctgtagaagcttctgtcactgataaatttaaaaaaggagctgagaaggaaacaaaagaggagaagaaggcaagaaaggcagcagtgaaagaagaaaagagagaagcccggaaagcgaagaaagagctcaaaggcctgtataaatcagaaacgcagaaggctcagaaagttgctgctgttactggaccttcttccattcgactaatgtgatggttgatctgtggcacgtttactgatgagtgacgactatgacagtcttgaatccaaaagaccgcctggagccctggacaaatgcatcaaatctatgaacgatgtatgataccagttcatatttgtgctattctcatggattttgtcgacaggatacccaacgcttgctttactatatattagttagttgaaggagaagataattatacacacttatcgaaagcatgaaagatccttaaaagaaactttacgtcagaaacaggtcatgatggtaaatccttgaggcttaaaa

SEQ ID NO: 82137 - DNA, 505 bp, Zea mays
  Clone ID: MRT4577_174922C.1
aaacaactgggtcgttctttaatccaaaccagcttctttggttttacgggatttttatccctataatttcaacccgaagggaacaccccgaatatcaaaaccgccttcggcccggttttttaaaccatattcgctgcagcaaatcgggtcaaacttttaaaatcatattcgctgcaacaaatctgaaatccccactgctggctgctggatgggccccagcatgactgatctgatcgggctgacccaactggctgctggagtcttccgaaaacgtagctgggcaaatccctcttcgacaaaacatatagctgggctgggcaaatccctataaaggctctaacccagagggggatcccccaaagctgaagggggctgctcaatacgagggatagtccaaggccctagcagaactagtttggaaaaaaaaaagacagactggggctcccacatttctcccatatgagtagcggaaaagagaaaaccggacaaaccttctccccaaaac

SEQ ID NO: 82138 - DNA, 250 bp, Zea mays
  Clone ID: MRT4577_174923C.1
gagcctactagtttgcggccgcccttcatctctttggtttttgggaattttaaacgcgttgggggtgtaccaataaaaacatcaatacaagagctctcaatgtccattgaaaaacccacacacgctatgcgcatcttgctccttctctgaaaaccaacctctcaacatccaacaagactgacacatttttttcacacccgacataggtaatggtgggtctaaaacacactaaccacctttacaaatccct

SEQ ID NO: 82139 - DNA, 315 bp, Zea mays
  Clone ID: MRT4577_174924C.1
aaaaccgcccgcattgagccgaccggggggaggcccccaccggggggggaaaaccgcagggggggagcccctagaaccccagatcgggggggagccccaggggggggggcccccgcggggggggggaccaaaccccccctggcccggaacaagcttgggcgagggggccgggggctcttcaaccggggggaagggtggggcgcgggcccccccaacgctaatatggaagggctccccgagactaaacacaaccccaacggcggccagggaatcggggcccgagcgaaagaattcgcgtccccgggacacctgagg

SEQ ID NO: 82140 - DNA, 280 bp, Zea mays
  Clone ID: MRT4577_174925C.1
caccgctcccgatacaacatccagaaagagtacaccctgcacctggtgctccgtctcagaggtgggatgcaaatactcgtgaagaccctgactggtaagaccatcaccctcgaggtggagcccagtgacaccatcgagaatgtcaaggcaaagatccaagataaggaaggcactcccatgcatcagcagaggttgatctttgctgggaaacagctggaagatggacgcaccctgtctgactacaacatccagaaagagtccactctgaacttggtcctgc

SEQ ID NO: 82141 - DNA, 481 bp, Zea mays
  unsure (1)..(481): unsure at all n locations
  Clone ID: MRT4577_174926C.1
cccagcgtncgnccagcgtccgggggcgggtgggcggccgcgtgttcggtcgcgtgggtggttccgggattttgggtccggtacgagctgtcgtctttgcgttgcttgtcgtgagttgtcttatgagtcttgtttatgttggttctcatttgcctgngacttgtccttttttttgggggggggggactcantcttaacttttttttgtcctanaacatggttcctgtttgttattgtagttttgcggcctccttacttgaacctttggttgatttttatgtggtagttgtcgttccttttttgttggctttctcctttttttgtcttgcatgttgtccttgtgtcattttcttttttgtgtgtgcttttttggtagtgttttttctttttcctttttttgtttctgtctncgctccttattttgcttatttgttgtctttatttttttttttctgttatttgtttttttttttgtgttttt

SEQ ID NO: 82142 - DNA, 686 bp, Zea mays
  Clone ID: MRT4577_174927C.1
agggaagctactccactttactgctattcactgcggtctggactcgtgctagaggcttgaccaagcagcatcagcagcagcagcgatggcgcctctgaagctgaacgggatgccggtaggcccccaacgatggtgcgcgtggccaccgtgctcaacgagaagggcctcgagtgcgagatcgagcccgactacctcaccaccggcgcccacacgcagaccgacttcctcaccctcaaccctttcagccataccccggagtctcgctgaccgagacgaaacccttttagaggcccgagcgatcaaccggtacatcggcaaggtgctcgacgtgtacgaggcgcacctcgaccggaacaagtacctcaccgtcgacgaggtcacgctcgcctgctccaaccacgcgtactacctgctctacctcagcaagacccgcaaggccggtctcgttgacgcccgcccccacgtcaaggcctggtgggaggccatcgatgaccgccccgcgttccagaagaccgtcgatcacattcgctatgtccctgtcgtcctacttgtcggatggacctctacttgagttatgcgttgcctgagtcgaatatgcgtcccagccccgagtcgaataaaagaggcagcatcctgtcttgcatttgctgatgcgccatgtgttaacagcctgtgtaataaacact

SEQ ID NO: 82143 - DNA, 394 bp, Zea mays
  Clone ID: MRT4577_174928C.1
ggccgcttttttttttttttttttacggcagaaataatcttgtatacactcaaaaggtgtgatatgaataaaccaaacactcgaaaggacgtgaaccgagtctacatcgaaactggatctttatgtatgtgcgatcaaactcatacactattatacgtataccaggtcatcaccatgctctcatacggcggcaagaggacatggacgcacccagcagattgatttgccagcaaattgcaaaagccccggaggcaggcggtaggatgggtatgccagtcaacatgcttaacttagggccacggaacacctggtaaacggcgggcatgatttcaggatatttgccgcgcacaaagcttgttaggccatgcgtggcggaacgtctgccctactcatg

SEQ ID NO: 82144 - DNA, 194 bp, Zea mays
  Clone ID: MRT4577_174929C.1
cctccttgtttgggagcgccaaaaccattccattattcctctcacgaagcatattatttcagtattgagaaccctccaaatgcgaattacctcccaaaaaacatttaattatagaccattgttgggccacaattcaacccggggcccaagttgcaggcaactaattttttggcagactttaacacattttaaac

SEQ ID NO: 82145 - DNA, 351 bp, Zea mays
  unsure (1)..(351): unsure at all n locations
  Clone ID: MRT4577_17492C.1
atcgacaccatgagggagttgctagccgctctcgctcttcatgatgttgatgcgggtggcatcttcactcttactatatgatattgccgggaccccccacgtcccgggcgacatctaccacatcaactgcatcggcctggtgaaggggatcatggaggacgaccagatctgggaggcgctggagggctcccaccgtctgatcatctgcgacggggggcccatgaagccccgcatgactagggacgacctntataacatcaacgccgtacataataaggggctgttgactgtcattcccaagcactgtcataacgctcttgataatatgatcaaaaaccctgctaactccac

SEQ ID NO: 82146 - DNA, 401 bp, Zea mays
  Clone ID: MRT4577_174930C.1
tctcttttttttttttttttttttttttttttttttggtgtgttttaatcaaagattaagcggaaaccccgcaaatctcaatggaatgaaccccggaaatccggaacgcgaacgagacagctgacaaacattcccctaaaaaagggaaccaaaacagcttggatgaaaaaagaacataacaggaacctgggagaaaaccgagtcagcctacaatttcagccaacatacgggacagaaacataaaaagtaaaaaatcggggcgcataaagcaggggcaaaaacaaataaaatgcacgggggtccttagcaggggggcaaaacgaaaaacttcactggccactaacttaaagaatatcaaaaaggaacggaaaaaggcggctgcggaattgagaccacgggaa

SEQ ID NO: 82147 - DNA, 251 bp, Zea mays
  Clone ID: MRT4577_174931C.1
agggaaaaacagtagaactccagaggagaaaaaggttcatgggttctacgcatatctcgtactgtgcactatgcagagcaaaatgaaactacaggtactgttcttgccagctaccagacgtcacgtacggggcgcgcaaaacacgcgcacgccttcgttactacgcagcatatacaaagtaataatactaattactcggcggtggtgtcgaatgtttcgacagccacaaccttggcagtcccggaccaggg

SEQ ID NO: 82148 - DNA, 252 bp, Zea mays
  Clone ID: MRT4577_174932C.1
aaaccgacgacgacccccgggcagaggcgaggcgtatgcatgtagcccaaggaagcagtggggctagatttccccgcgcctcgttttctcggcacttgcgtcggcaagcatctccttcttctcagacagacacacggtgttggaccgacgatgatgacggtcggtttctgatccgtttctctcagctccaacgcagagaaggagagagaggaagacagccagacagaaactacaccggaagcacgcgaggac

SEQ ID NO: 82149 - DNA, 553 bp, Zea mays
  Clone ID: MRT4577_174933C.1
cgcccacggccagcacgttgcggatctcccgcgacagcagctgctgctccacgacgtgccgctcggggctgtcctcgccgtagctcgcgtccagcgagtcgaacagcgccgagtagtagtggatgagccagagcgtgttggagtcggagccagtgacgtcgtagagcgagtggtgcagccagtggacggcgacggcctcccgcctcgtgactcctagcttctccgggtcaacattgccagccttctcggcgacggcgcagaactcgaagggcaggccgagcgtgtcggcgaaatcggagaggcgcttccccgtggcctcgagcgcctccatggacgccccgaggccggtgagcctcaccctgggcgggcccccggggcgggaggcaaggatgtggaagagccccggccactgcagcccctgcatgatgtcgaggtcgatgatgtgcacgcgctcctcccgctcgaacgcctcctggatggcctggttggcggtgaagtgcgagaacttgacgaaggggctgatgccgttgaacacctggaacgcggcggcgac

SEQ ID NO: 82150 - DNA, 175 bp, Zea mays
  Clone ID: MRT4577_174934C.1
cctcggacgtcccgtcccggactccgactcccggctcgctctcgcagcaagctcgaatctgcacgccgccgccgccgccgccgccggcccacgcccacgggccctaggggtgggcgcttggcttctgagaacatgtaacgggtgttgatacgaaaatagggtcctggctgaccgg

SEQ ID NO: 82151 - DNA, 743 bp, Zea mays
  Clone ID: MRT4577_174935C.1
cccaaggtggtgacgatggtggagcagaacttgaggcagtcggggtcgttcctggcacgcttcgtggacgccatccattactactgggcgctgttcgactcgctggacgcgagctacggcgaggacagccccgagcggcacgtggtggagcagcagctgctggcgcgggagatccgcaacgtgctggccgtgggcgggccggcccgcgccggcgccggcggcgccaggttcggcagctggcgcgaagagctcgcgcggtctgggttccgcgccgcctcgctcgccggcggcgccgccgcgcaggcgtcgctgctgctcggcatgttcccctccgacgggtacacgctggtggaggagaagggcgcgctcaggctcgggtggaaggacctctgcctgctcaccgcgtcggcgtggcggcccgtccagacgccgccgtgccgttgagagctgaaatcgttgttggttacccagccagtggtagatcttcttcgtactatactcctgcttgagtttcttgtgccacttcttttgcatctgtagctagctagctggctgctcgatttggtcgtcagttccgagatgggaaaacgaaaacatctcttctcgtcactaatcgctagatccattcacagtgatagttactgatgtaagcctactaattagtttaatggcagatcaaccttgtttagcctaattagttacttggtactactgttctttaaaaaaaaaaaaaaaaagcggcc

SEQ ID NO: 82152 - DNA, 461 bp, Zea mays
  Clone ID: MRT4577_174936C.1
ttccacccacgcgttcttctgcttgtgctcagctccagctcactggctggccaccgagacttctggacaggaaactgcaccatcctcttctcccagcaagggggctccagagactgcccacccaggaagtctggtggcctggggatttggacagtgccttggtaatgaccagggctccagaaagagatgtccttgtggctgggggcccctgtgcctgacattcctcctgactctgcggtggagctgtggaagccaggcgcacaggatgcaagcagccaggcccagggaggcagcagctgcatcctcagagaggaagccaggatgccccactctgctgggggtactgcaggggtggggctggaggctgcagagcccacagccctgttcaccagggcagagcccccttcagaacccacagagatccgtccacaaaagcggaaaaagggggccaggcccccaaa

SEQ ID NO: 82153 - DNA, 532 bp, Zea mays
  Clone ID: MRT4577_174937C.1
ggggtagggggggcaaatgatttctttgcttattgataaaaggttttctacccaggacaggggggattacaacggggccctgggcgaacaatttctttacggaagcaaagcaggccagggggtcaggcatcaacggggaaaccccctggtgaaaaaattattttcggggggggctgcctgctccaggcctccagttgaaaaaacccccccccaacaaaaatgggacccgctgacccccctttattttttgtttcagggcttgacccaactggaccttactgccggaaatccttgcctccaaaaccttggacccaaagctctgtttttgcactcctgggggccaagggatgcatccttttatagctcaaacgatggccgggtttaacaggtccggcccccactgccctgggatgggcggactggaacacatttgggtttttttgagggaaggaaattggggggcatttgacacccgggcatttgaagccccaccggggaaggtattggaacccatcttcttttggcccacggg

SEQ ID NO: 82154 - DNA, 440 bp, Zea mays
  unsure (1)..(440): unsure at all n locations
  Clone ID: MRT4577_174938C.1
ccgtcatcgatctncgtttcaaataccatccgtggcttcgtttcctcgcggcgccggaggcgatctcaactccctatggcccaagatctaagattcgggatcctaatgggttcggcacggatccggaagggctggtggccacgggtggcctctgcagagtgaccgatgtcgagctcgtcgcccgtgaaccgacctccttcatctagcaccgactacatgancctacantgttcaagtaccgacactttgtgcacggaccagtggaaagcacccattgaagtcaaggggtgaaggacttccaaaacctctttctcttttggtgaagaaaggagcggttgcttttgtgtttggcttgcaaggaaccccctgaggaagatctccgtgnngggttcggttgggtgcctgaaatatgttgttgaagtctaccctggtgttttcac

SEQ ID NO: 82155 - DNA, 1471 bp, Zea mays
  Clone ID: MRT4577_174939C.1
cgatgcgtcccgtccattcctttaggaggagccggatccggtgccgcagtcgcccaaggtcccgaccgccgaggagaccgccgcggcctcggccgccgccgccaaggagcggaaggaggtgcagcggcggaagcagcgcgacgaggagggcctccacctgctgacgctgctgctgcagtgcgcggaggccgtgaacgcggacaacctcgacgacgcgcaccagacgctgctggagatcgcggagctggccacgccgttcggcacctcgacgcagcgcgtggccgcctacttcgcggaggccatgtcggcgcgcgtcgtcagctcctgcctaggcctgtacgcgccgctgccgccgggctcccccgccgcggcgcgcctccacggccgcgtggccgccgcgttccaggtgttcaacggcatcagccccttcgtcaagttctcgcacttcaccgccaaccaggccatccaggaggcgttcgagcgggaggagcgcgtgcacatcatcgacctcgacatcatgcaggggctgcagtggccgggcctcttccacatcctcgcctcccgccccggcggcccgcccagggtcaggctcaccggcctgggggcgtccatggaggcgctcgaggcgacggggaagcgcctctccgacttcgccgacacgctcggcctgcccttcgagttctgcgccgtcgacgagaaggtcggcaacgttgacccgcagaagctgggcgtcacgcggcgggaggccgtcgccgtccactggctgcaccactcgctttacgacgtgaccggctccgactccaacacgctccggctcatccaaaggctggcccccaaggtggtgacgatggtggagcaggacctgagccagtcggggtcgttcctggcgcgcttcgtggacgccatccactactactcggcgctgttcgactcgctggacgcgagctacggcgaggacagccccgagcggcacgtggtggagcagcagctgctggcgcgggagatccgcaacgtgctggccgtgggcgggccggcccgcaccggcgacggcaagttcggcagctggcgcgagaagctggcgcagtccgggttccgcgccgcctcgctcgccggcagcgccgcggcgcaggcgtccctgctgctcggcatgttcccctccgacgggtacacgctggtggaggagaacggcgcgctgaagctcgggtggaaggacctctgcctgctcaccgcgtcggcctggcgccccatccaggtgccgccgtgccgttgatgagacctctgcctgctcctgcttgcgttgagaggccgccactccacttgttttgcatctgtagctgctcggtttggtcatcagctgggagataagaaaagcggaaacgtactaattgctctggagtagatccatccattcacagtgatagttactgatgtactaagctttaattagttcaatgctagatcgttcttgttc

SEQ ID NO: 82156 - DNA, 1213 bp, Zea mays
  Clone ID: MRT4577_17493C.1
ggaatgctttgatacatgcatatgcagagagtggactttatgaaaaagcaagggcagtctttgataatatgattaaaacaggtcctctgccaactgttgattcagttaatggaatgatgagggcattgattgttgatggcagattggatgagttgtatgtcgttgtagaagagcttcaagatatgaactttaagatcagcaaaagtacagtgctccttttgcttgatgcttttgcaaaagctggggatgtattcgaggtaatgaaaatctataatggaatgaaggctgcaggatacttgccaaatatgcacctctacagaagtatgatttccttgctctgccatcacaaccgattcagggatgtggaattgatgattgcagagatggagggagcagggttcaagccagatcttgccatacttaatgctcttcttaatatgtacactgccgctgggaactttgataggacaacacaagtatatcgaagtcggcaagaagctggcttagagcctgatgaagatacatacaatacattgatagtcatgtactgtagaagctttaggccggaagaaggttttacattattgaatgaaatgggcaaacgaggtctgacaccaaagttgcaatcctacaaaagcttgcttgctgcatctgcaaaagcagagctgagggagcaagctgaccagatttttgaggaaatgcgatctaagagttatcaattgaatagatcaatctatcatatgatgatgaaaatttacaggaatgctggcaaccactccaaagctgagaacttgctagcagtaatgaaagaggatggcatagagccaacaattgccactatgcatattctcatgacttcttacggcactgctggacaacctcgtgaagctgagaatgtactgaacaacttgaaatcttccagtttggaagtcagcacgttaccatacagtactgtctttgatgcttacctgaaaaacggtgactacaatcatggaaccacaaaactgctggaaatgaaaagagatggtgtagaaccggatcatcaagtttggacatgtttcatcagggcagctagtttgtgtgagcaaactgctgatgctattcttcttctaaagtctctacaggattgtggatttgaccttcccattaggcttctgactgaaaggacaccatcactgttaagtgagattgccaattatctggaagagcttga

SEQ ID NO: 82157 - DNA, 474 bp, Zea mays
  Clone ID: MRT4577_174941C.1
cacgctcggcctgcccttcgagttctgcgccgtcgccgagaaggccgacaatgttgacccgcagaagctgggcgtcacgaggcgggaggccgtcgccgtccactggctgcaccactcgctttacgacgtcaccggctccgactccaacacgctctggctcatccaaaggctggcccccaaggtggtgacgatggtggagcaggacctgagccagtcggggtcgttcctggcgcgcttcgtggacgccatccactactactcggcgctgttcgactcgctggacgcgagctacggcgaggacagccccgagcggcacgtggtggagcagcagctgctggcgcgggagatccgcaacgtgctggccgtgggcgggccggcccgcgccgccggcggtcagctacttagccaactttcataattaaataccgtcactgtatgaataactcttattgtgaaaagagttatttactctat

SEQ ID NO: 82158 - DNA, 2211 bp, Zea mays
  Clone ID: MRT4577_174942C.1
tggagacctagttagatgtggtttcacatcatctgaggtgcgggctgccgccccagcccgttcatctggtcaagacgacccggtcgtatttaggctcctcaggagcgactgggagcaacttgtcgatgagctgcaagttaggctttcaaagaatgtggaggagtgtgtggactttgcgccagagggaggtaaggtggtggtgagtgctactccaaaaggccactccgatggaagtcatggtgttgagcttcctgttgctctgcaggcattggagattattgatgccctagactatgggatggcaaaaattgcagattcgatgatgaagcatattctggttccagcaatcagtaacatacatgtgtcagtgcttgtggaatgtggtccagaacacactgtatcagtcttgagtgtagtccattccgaggaaaacaaagacaatagagatggttcaaatctgtactcaagaatagttgatgtcatcaagtttgtgtgcaaattcatctgcatggaaaatagcaagtgggttcaattttttgcgaagttaacctggccaagaatttctgatctagttatcacacactttctctccaaggctgtaccaaatgaggcatccaagctaattgagttccaagatgtcgtgcaaagtacaactgaattcgagaacaaacttaggagcatgatgtttcttttgcctgatagaaaggatggcaagctgacccaatttgttgatgatgttgaagttcattttgctgtacggaagagaagtgaaatcttggtgaaagcaaggaacattcttgtacaatatgattatgatagtcctctggaatctggtgaccaaggtgattctgttgttgatctactttttcagccagagaagtgttttacatctaaatcagcacttctagtaatgaaattggttcatggagccctcaaggatgcatctttgtcatcagcaagagtagctaaggagttctgctttgctgctagggatgttttgctcctttatagggctattgtgccggttcagctagagaagcaatttgatagcttaagtcaagtggctgctattgttcacaatgacttttaccatttgtcccaagaaattctgggccttgcatttcagtaccgtgcagattttcctagtgatctacagaaacaggttgtttttgtggatttagccccaatcttctcccagatggcggatgctatattgagaagacaaatacaactcactgttgatactataagtgaggctatagatggtgctgaaggttttcagaacacacaccaacctcagcattatgaatccgcaaaatttagtattgagcaggtcgtgtttattttggaaaagatacgcatcatgtgggagtcgatactgccaagatcaatttacaggaaaagtatgtgcaatgtccttgggtctgtcttctctagaattacgagggatatgcttctgatagatgacatggcagcagaagagacattgcagctgcaaggccttatacatttggctctggaaaacctctcttcactatttctttccctggttgagaacaacgatgggagcacaaagttcttagaccatgacgcttggattcaattggatggaattctaccatctttgaaaaagttccgcaagctagcagagttgcttgatatgtcattgaagtccatcacatcatgttgggaaagtggagacctagttagatgtggtttcacatcatctgaggtgcaaaatttcatcaaagcaatattcgctgactcgcctcttaggaaggagtgcctaggatggatcgttaggactccagcttagaatacagaaacagcatatttctgtctgtgggtcaatgatttttttttcatattcttttgtccaccataccatatagtgaagtattaattggtatgagctcagtttgcactggagacagacttgcaatctgactccccagttcaatactcaccccactgcctggaccttgactgatcagataaggctagcaattgtgcatgttaatgtgttattattgtctttttggtattgtgacattcccaaatgaccttaaccaagtgcaaggaggtgaaaaaggagggtggtgtgtgttaagaaacctttcttaggccaggaaggctcatgtggcccatatgcctgaaactttagtttttgtttataaatagagaggagatccccatatcatgtaaccttgg

SEQ ID NO: 82159 - DNA, 536 bp, Zea mays
  Clone ID: MRT4577_174944C.1
ggtacccctcgggctcggccggggacagaaaattccgcgctcttgcttgtttaccatgcctacgaataccatcatctagggcatgcccgaagactccgggcggaatctgtagtacctgacctattgcgccaaccacttactgcaggcctgcatgacgactaactacgacgcgctccccgagatgggaatcctcgatgtgtgcgtgtagacacgtgaccattagcaggagactttgcttgattgatataatttatggatacatagaacctgaggcacttttcaccagattgtgttctacagtgctggtatctatcatttcaagcaccacacacttcctgtggcaaacaaacttctacgagacatccatgttgggaaactgtttatgccaaagaaagtagacacctaaagccacatcatggaatcttgtcgtgaaaaacaccatggtcttggtggacatcaggagaggaaccacactctgtctgacagagctgctggtctattgctgagcttaaggctgagatttccaggcctgccat

SEQ ID NO: 82160 - DNA, 689 bp, Zea mays
  Clone ID: MRT4577_174945C.1
ttttttttttttttttgtcccgaaaaaaaatgaagtattttactgaaacgtgaccgaaggtggcggacgggcggtaatatatagcagtagcatgaacaaggaagacgtatcacatgaggccatcatgcatcatgaccctgaactcttcgaacgaaatgacgccgtccccatcgagatcgaacctgcaaatcatggccctgcactcgtccaggcccacgggcagctgctccgcccccacctgcagccggcctagcatccgctgcaggctcgccggcgtgatgcgctgctctcgctcctgctccttcgtccccgccgccccctgctggccctggccgtccgcgaacatcccgaacgcagccctgaggcagcgccgcctgacgtccgcgtcggcctggtccgccgcagcagcctcgcatgccatcctgaggaactcgtcgcggcccagcaggccgtcgccgtcggcgcccgccgccgcgagcacgggcggcggcttcctcctcgtccagcgccaccgccgccgcgctgccgcgcagctccgacgccgacaccttgccgtcgccgtccgtgtccagggcctcgaacaacgccgccgccaacgccgtggcactgctggcagccatttttttggtcactatcgtcgcgtcgcgtgcgtgccacggaataagcagctgcggcctggagatcgcaca

SEQ ID NO: 82161 - DNA, 399 bp, Zea mays
  Clone ID: MRT4577_174946C.1
aattcccgttctagcacgggttcgtccacgcgttcgtccacgcgtccgcagaccagtttctttatctactccagagcgcacgggaacgcgatctacaccaggagggtggtgctcgttgccctctctctcctggctctctctgcgagcgccacctccacgcatacaagctgcggctgcggctgccagccaccgccaactgttcatctaccgccatctgtgcatctgccaccttctgatcacctgccacctgcagtgcatcttccaccgcctgtccacctgccgactccagtccacctgccacctgctgtccatgtgcctcctgctgttcatctgccggcgccaccatgctactaccctactcaaccggccctgcctcagactcatcctcagacacaccca

SEQ ID NO: 82162 - DNA, 542 bp, Zea mays
  Clone ID: MRT4577_174947C.1
ggctggctcgagagccgacgactgcccacaggagccagggccgactaccaccacccaatctccagctatgggcactatcgacttgtggatcgacgaacccttggtacaggctcattgcccctacccttggctgctggacaagctgggcggactttctgctcccaagccatctactaaaacttacaagtctaaggagatcctgtcacagtacctcatcttcagcaacaagctgaagattgctactacatacactgaggtgcttttcatcctgcatgcaacgccttgtacttgctgatagccaggtcgcgacagacaagatctaccctgatgcgctcatgtatgtccttcacatccccgacaccaacgagaactaccactgctgctcacccatacctaggggccccttccgccttatcccaatcagggagtgacgatgctaagtctcaagctacaccaagggtactgtctgctcatcattgggctagaacgcctatgccttactctgaacacgtatagacggcacgcaccatccgtctacccct

SEQ ID NO: 82163 - DNA, 1248 bp, Zea mays
  Clone ID: MRT4577_174948C.1
ctccgcttcctgttgggattgccagatactagagctcaggttggttacagagcacaaaagtcaccttttgagtggtcacagcttgaagatgctaacttgcaaacgaaatcgatgccatctgacaagggaacagccagtgagagtacaactcctaattttgcaatgggaagtatggatggaaatatatctgcgtccagctcacctgaggagctacttgaacaagcattacagtatctgggcacaggctgccgagatcaagccattccactgatcaggacagcagtagagagaaacccagatctgtacacagcgttgattgggatgggacaaaccctgttctcaaatagattgtttcccgaagccgcggtttgttttgaacatgctataccaaagattcaagaagatgaccctcttcttgtgcttgcgtattttggggcaggtctttcgaacaagcgtcagggggataatgagacggcaataaaactcctggagagattagcagagctcaaggaaccagaaaagcccatcaacaaaagccgctacttccaagggatgcttgctttggcaagtatattatatagagaaggccggaattcggaggctgccaaatatctgcggatggctattgcttatgatccttctgtagaaaggcttctcaaggaatgcgaggaaggaatggacgatcagccaaagccagaggagaagtgatgtgctggacctgaaaaagccacagtaacagagatagcacaccgcttttgtttttgaacactaaaaccgcccccagcagtttaccctttacccatatgatcgtgcaaaacagagtgaagtttgaatatatgaatgcagatggataagctgcctaatacatgtggtttgtctgggaattgaaattctggaacgcgagccagccaatccgcaattgcacggtcagaatatctggccgtgctgcccccgttgaagtctgcggcaacctcacacacaccatcaagtgcgcttgagcctcaagtcccaacatagttgtaacttgtaacatgaatacacaacttgtgttctttggaagaatgtggtcattccattttcttttttttaaagaatttaatacgcggcagaaattacagtgattgattttttttattaataaaaaatgtgagcatgacctcacggtactgaccattttctgccgtttgattgataatgaagttcttgccatcataagatcaaaaaaaaaaaaaaaaaaaaaagggcggc

SEQ ID NO: 82164 - DNA, 635 bp, Zea mays
  Clone ID: MRT4577_174949C.1
atgaatagctctctcgccgcatggccttaccttaagaacaatgcgtgcatgcatgtggcccatggcgctacacgagatcctgtgcttccttgttctctttgttttttcattcatccgccaccatcacactcctcagtgatggttagcggctcatgatgagttaccgccaaaggcggctggctgtactacgtgcacaagacattggaataaatgaagagtactggctgtcagatcacgattgcatatgaatacaacgctatttcgaaggcgaacgatggacaccaatttttacacggagagtggttctgactgagacagactatgggatcataataggtattaatgcacccgctcacgtaaacttgtatgagcttttactactcatgaggaaccgaagaactcaagggcttcccgttttatacggagtgttgggttcccccactcttatgaaagactgatgccgtgtcaacctgctggtggaaagcctggacttatttgtgacagctggcaatggtggccgcgatacctactggataaagatgccctagaacatcgaattttgcgggcctttacttgggacacttaacccctctggggaacccaagcaagtattgcttaacatggagaataggcat

SEQ ID NO: 82165 - DNA, 438 bp, Zea mays
  Clone ID: MRT4577_17494C.1
gactcaagaagcggtttattcatacataaaacttctttcttttaatgagccagcgtacactatatacgataggctcttatactaggaacgcatgagatttagcgattcattggcacgcaccagaaccaaattttacagatggattccttgtttctctctacaggtaggcggccacggctgagcagcccaagcgtgtgtcgggcagtcttgactaggtgacgggtgttgtggagcgacctctcctcgggggcgaagataaaaatggcccggcactcggccttcttggccagcggcaccgtgtgcccaatgggcaggtgcggctagttgagggcccgcagaatctgactgtacagggacatggccaccggcctttttcgcgccagatccttcgccgtggcccagatcagcccgctgtgtttagccattcttgcgccggcg

SEQ ID NO: 82166 - DNA, 281 bp, Zea mays
  unsure (1)..(281): unsure at all n locations
  Clone ID: MRT4577_174950C.1
aaaacctaaaaaaaanaaacaaccagcacgcgacgacgcttgttcctattagcggccgcccttctttttttttttttctatttttttggacaaactgtgcggattaacttaaccggcatgcagttagcaaagatgaaactgtgttatatatgctaatttgtaagctactgctatagactaaaggatttcccgaaactctaagagttctgtagatgtacagcttacatgcttcaataactaaatgctctttgggtggatgcccatctcaatttccttaagct

SEQ ID NO: 82167 - DNA, 312 bp, Zea mays
  Clone ID: MRT4577_174951C.1
gcacgcagccggtccccgtctgcacaaacacccgccgcctccccaccgtcgctgctcctgaggcgtctcttcgacgagacccgacgggacgaggccaagcagctccagcagacccaacttagtatgaatcgtcattctaatagactatcaccatcgaggagaagttctttgacacaattagcaaccacaaagccaaaacccaggacaagatagggggggagattcacagtgacacgatcaagttagatgccaagcaagaagataacatacacatagtaccagacaacaacatgaatacagtcagcatcatcc

SEQ ID NO: 82168 - DNA, 353 bp, Zea mays
  unsure (1)..(353): unsure at all n locations
  Clone ID: MRT4577_174952C.1
ccgggaaaaaaaaaaaaaaaaaaaaaagttatccgacgngcccactccgncgctcgtcatatatccgcgctctaaacgcctangtctcttccatttcnnttcccctctcgcggcggccgcctttccccacaagacactttcgnnccgccggcanagaaatgggccgcnngtagattcgcgccctcagcgacaagggtnnggcggggtccnnngtgttcaagtcccanntacccatcaccgcaagnggcnncctgcccggttgggggggccgtcgacnnttcggcgagcgcaancgggtaccctgaaggngcgtggnncaccgacgnnnnatccacgacccgggccgngcgcgc

SEQ ID NO: 82169 - DNA, 437 bp, Zea mays
  Clone ID: MRT4577_174953C.1
aaaaaacccaaaccccttatgggaccccgggaacatttttttttaggggaaatcaacgggggaaagggggacattttattagacccctgccacccccctgggcttttactccccccataaaaaaaaaaaccccccccctgccccatttttcccgaaaacccaaaattgaaaacccacccccccccaaaccttttaaaaatggggttattaagggtttcgggacccccccccccccaattaagcttcggccgatcccccccccccccccccgaacccgtatgacttctgtcttctgggcggggggttttaggaaaaccccccccccccccggtaatttccttaaaaggaacaaagggccgggggggccccattggccccggcctttgataaacctaaacccccttttggggggggggggggccccccccttaaaaggg

SEQ ID NO: 82170 - DNA, 371 bp, Zea mays
  Clone ID: MRT4577_174954C.1
cgaaaaaaaaaaaaaaaacaaacaaaattatttaaaaaaaaaaaataaaaaaaaaaaacgaagaattaaaaaaaaaaaaaaaaaaaaaaaaaaaaaaaaaaaaaaaaaaaacaaaaaaaaaaggccgccccttctaaaggatcaaatctaactaacccttccttccaatgaataacttttactaaaatctcccctaaattaaattcactcccctttttttaaaaacttcttacctggaaaaaccttggctttaccaaactaaaaccccttcaaaaaaatccccctttaaccatctgcccaaataacaaaaagcccccaaccaatcccctttccaaaaaattccccaccctaaatgccaaatggaacccccc

SEQ ID NO: 82171 - DNA, 369 bp, Zea mays
  Clone ID: MRT4577_174955C.1
caattgctgggaacttgctctacgtttgccgcccacatgcccaacacttacacctcctcgctcgtcgtccaagctgatgcccacctggctggcctgtggcctgcatgtatatatataagatacgacgcatgtcgtccgtccaagtccaacgcaattaatccaaggcggagtcgacgatctcttcgatccacggcaacagtacgtacgtcaaattgagacatgttggagctgctggtgctgccgccggcgctggacctcctcctccacagctgcctcatcgtgtcggtgtcatctctactgatcatgctcgcgctccagccgctactgcccggcggcaccgacgtggcctcagcgagcaggggcgtgcgc

SEQ ID NO: 82172 - DNA, 116 bp, Zea mays
  Clone ID: MRT4577_174956C.1
acgatatagagctcatgatgaaaaccaacagggcgctgttcatcaacggcttggcggggaaactcttggcgatacataacgacatcgtctatcaaaacatgcacttttggacggga

SEQ ID NO: 82173 - DNA, 484 bp, Zea mays
  Clone ID: MRT4577_174957C.1
gcggccgggggggccccccgggaaatgccgggccggccccggggggcccaccattttcccttaagggggggctaaaaaaagcggggagaaataagggaaaaagttgtttccgggaaaaaattgttacccgccaaaaatcccaaaaaaaaaaccagccggaaaaaaaaaggaaaaagccgggggccccaaaggagggaaccaaccaaaattaatgggggggccccaaccgcccttttacaaggaaaaaaacctggcccgccagcttaaaaaaaaaaccccccaacccgcgggaaaaggcggtttgcttattggcccccagggggttttttttttccaccagggagacgggcaacagttggttgcccttaaccggctggccaaaaaaaagctgcaaaaagccccccccgctggttccccccaggagaaaaaaatcctgttggggggtggacaacgggggaaaaaaaaaggagctgtcttgggtatc

SEQ ID NO: 82174 - DNA, 257 bp, Zea mays
  Clone ID: MRT4577_174958C.1
ccggccggggaggtcctctatttctaggattgctctctcctagctcaggcttcctagcagtagtcgtacctatgtgtttatcagtcgaagcgaactaggttggtcgcaagtatactgcgggagcaggcctccgggctctacggccggctgatcctgatccctccagaccacatctgggcactggtaatcgagtgccaacaccaagaattggtccaggacaccaggctgatagacggtgacgaaacagaggacccccc

SEQ ID NO: 82175 - DNA, 544 bp, Zea mays
  Clone ID: MRT4577_174959C.1
aagcccgagagcaagtacttcatgaccaggaactcctccaccatcatagcttttgctgtagggggccagtacgttcctggcaatggcttcagcctcatcggggcccacacggacagcccctgcctccgggtgaaacgtcggtctcgccgcagccaggtgggcttccagcaagtcggtgtggagacctatggtggtgggatctggagcacctggtttgaccgtgacctgactctggctggacgcgtcattgtcaagtgccctacctcaggtcggctggagcagcagctggtgcacgtggagcggcccattcttcgcatcccacacctggccatccatctgcagcgaaatatcaacgagaactttgggcccaacacagagatgcatctagtccccattcttgccacagccatccaggaggagctggagaaggggactcctgagccagggcctctcaatgctgtggatgagcggcaccattcggtcctcatgtccctgctctgtgcccatctggggctgagccccaagacatagtggagatggagct

SEQ ID NO: 82176 - DNA, 766 bp, Zea mays
  Clone ID: MRT4577_17495C.1
gagcaggacgaaaggtctgaagacatggttccgtacatcccaccccgtcgctaagaatctacatgtcgaagagatcaatgttgaggagagtcaaccactgccggtcccctacaagaatgtgcttcgcggtcgccgccctcacgcccccccccccccccactgcccaccccccccccccccccccccccccccccccccccccctcctcaccccccccccccccccccccccccccccccccccccccccccccccccccccccccccccccccccccccccccccccccccccccccccccccccccccccccccccccccccccccccccccccccccctcccccccccccacccccccacccccctccacccccccccccccccccccccccccccccccccccccacccccccccccccccccgcccccacccccacccccccctcccccccccccccccccccacccccaccccccccccgcccccccccccccccccccccgccccccccccctcccccccccgcccccccccccccccccccccgccccccccccccccccccccccccccccccccccaccccccccccccccccccccccccccccccccccccctccccccgccccccccccccccccacccccccccccccccccccccccacccccctccccccccccccccccccccccccccccccccccccccccccccccccccccacccccccccccccccccccccccccacccccccc

SEQ ID NO: 82177 - DNA, 514 bp, Zea mays
  unsure (1)..(514): unsure at all n locations
  Clone ID: MRT4577_174960C.1
ttttttttttttttttttttttgtttattttttatttttttttttattctttttttttttttttttttttttttttttttttttttttgtttttttttttgggcagtggcataccgatctttgattctttcttggggggggggatgtcctttttaatcggttttatgctggggcgctgcctgtggggcttgattccttctccccctggggcacctctccttacggccgtttttgtttcttgagatgtttggcttcttctcctaggtttgggctttggtctccttgggggtccgcgtttgatttgnttggtttttcttttgccgcttgggcggggtgtttnnttccttggtttagcgcttctgttgacttgccggttcttgtgaagatccttggtgtcttgggctttgttgatgcgtcttctgtcgctctttctcccgccgtttcctggtgtattgccgctggctctttgttgcgcgcgcttgctttggtttggggtttccctgcgggacttcat

SEQ ID NO: 82178 - DNA, 269 bp, Zea mays
  Clone ID: MRT4577_174961C.1
tcgggacaggggacacacgcgcgaagggcgattggaacccacaggcgaagcacccatcccaatagcgtgcgagtagcaagcttgaccctcacgggcacgagcaaggatcgggagcgacgggggcggccggataggaatgcaggcggccaaggcggccgaggggagcgacggcatgcaggggggggctaagaacgaaccctacatgaacacagatgacatgagctacatgtacgagtttgagactgagaacgggcagtggaagcaccatg

SEQ ID NO: 82179 - DNA, 862 bp, Zea mays
  Clone ID: MRT4577_174962C.1
aattcggcacgagggcacggcctggcctgcctggtatcactgccaccgccaccgcacctcacctccttgcattggttattatctatttatttattatttcagttcacgcacagacacagtgcagtgcattcaatctcaaataaaaagccctgctacagtgctagcagtactcggatccacgaccttctccctccctccgctgctgctccgtcaaggaagggaggaaagaaagggcaggggaatggaggtggaggaagacggccgagccgcccgagtgctgctgagctgccagtgtctctgtctctgatgagatgactggacttatttgatgctctcgccgttctcgacttggggcgcgagccgatggatctcctccggatgaaacttctcctgccctccctcatcagctgccttcttctgatgcaggcagcactatgtgatggcgccgccgccaccaccaccaccaccggcgaaaacggaacggcaaactggacatgtgtgtgcgcagctcatcctctcggtgaaccagactccaacagcagcttgctgtccaattgctcttcctcctgccattgccaccgagatgagaacggcggcggcggcggcggcggcgcaggctcgtggaactgcacgtgtgcctctggtgatgagggccttcagaaggaagagcatgctgagctacgtggacgggagctgtttcacttcctgcaactgcacgtcgggtactggaacttcagaggaagggagaaagcgtgtctcaagcaaaacagtcatagctacgctcctggtctgcgtggttctcaccaccaccgctttcctcgtcaccaccgtatactacttcccgccaaaggacgccctctct

SEQ ID NO: 82180 - DNA, 2340 bp, Zea mays
  Clone ID: MRT4577_174963C.1
ccgtaagcaacatcggtgagtgaaggctggctggcgccctcgtaatgacgacggtctgatcctcacccgatgaacatgagtagattcaatatcataccatttgtttgtgtagggaatcgaaggctgtcgcgtaagacagttcggctaggccggatgacctgacggcttgacgaagagttggtgcagatccgatcccgtagcaacatcgagaaagagcgtgctgataacgtgttgagaactacgttaccacggatcaccagatccactcccgtccctcccatcagcagtagaggcacaagaagatgtagagaacccgtcccccttcacataagcacgacagaggaaacacatttttttttttatttagggttgggcctctggcctctttctgatctctgtcatatgaaggggtgtacaggttccttatatagagatgtgagacccctcaggggcaaagcaggtatttgcccacataaccctaactagggttacttaacaccaacttctaaaaattaccagaagccttctttctgcattgtaccagaaacagcttcctctcgttaagaaggaaaacagaagagtccagggcaaaaaggaaaaacaaacaaagcaactctacggcgaagaaatcctcttcctccctgtcgcgatgcgcaactcccacacgcaacctccaccatccatgattcgtccccaatcccatctccgcttgactttgtcttacatacaaattgctgctagacagagtactatggatggaattggatcagctgctggccgatggattagtagacaaggcccgggcggcggccggggctcggcggcgacagaggagacggagtcttcttcggcgggggctcgatggggcccacgtgggagcggaatcccgcggagaccaccgcgtcgcgcacgcaccagtggaacgccggctgccgcatggccgccgccgccgcctcgcactcggggcacggggacggtcgtcgcctcggggaccactgctgtgggtcctcgttatccggatgccccgccgccaccgacaagtgcaagtaggcggggtccagacccggacccgcacccgcggtgctcatcaagtaccagtcgcgctgccgctgcagctcccgcagccgcgcctcgtagtcgtcgtagagcacgagcggcccgggcgaggcaccggcactggcgcggggagggagagggagagggctgaccagagacgccagatccgtgggcgggaggcgcttcaggatggtcttctccacggccgcgccgttgactcccttcctgtcgcggcgggaccggccgccccggcgggagcggcggaacccagcgatgacgtagcacccggaaccctcccgcgcgacggcggcggcgaggtcggtggcgtcgtcgaggggcacatggcgggcgcggcggggccgcgccagggacgccgagatctggtgcggcgcggcgcccacgcggtctgccacgacggcctgaagccgcttcacgccgccaaacgacggctgcacggtcaccgtgcccaagtccacgctctgctcgccgtcgacgaagacaaccgccagcacgcgtgcgtcctccatgtccgacgcacgctccttcctgcttcagcggcggccggccacaagcctcgaattgaaacggccgccacccggaccgggtctatctgtttgggctgttgcgaattgggaatagaaggaagaagggtcgacaaggcggagggttttatagagaggcgccggggtgagttgaggcggttgggttgggcggccggcgagagagtcaaggagtaaaatttccgtgagaagcggggcggcggtggctttccttggcaaccaaggcggaagagatcctcgcgacctgcagcgtgggcccaacgcacccgtgccacacggggctgggcactggtccgccgaggcacacgtgggcgcccgtccacttgattatcgtgcttggtctcgggcaggtggcagcccagccgccggctcaaggtcgcgctcgccgagtgatccacgtgacgcggccatgggttttggtgtgacgattgccgccaccagccgtgacccggttccacgcatgaccagctccgcgagcagatatccccttctaataaaataaaataaaataaaatagaaaaatctactgcgtccatgcgatgtctaacgttagatacagatttttacgagcaccgcctgcactttgtttatagagtggggtatatagaagacgccaatatttatggcgttggattgtagatagtattttgcctatctatatggacgatctagtgaccttaattttcaatttttagatatccgtttggatcttcaatagattatt

SEQ ID NO: 82181 - DNA, 1736 bp, Zea mays
  unsure (1)..(1736): unsure at all n locations
  Clone ID: MRT4577_174964C.1
atgagccagaaaaggaaaaggaaaacttgaatgaaagaagcccagcccaccggctgtggaaggggggaaatcataggttctccgcgacgcggccacctccgccaccgccagcgccacctgctagggtcaacacccgctctctgcggactgcgtgagcgtgaagcaccagcggcggccaccgggcaggacgagccccctccccaaacagagagggccggggatcagtgcgtgcgctcctggtggagggcgtggaagagcttggcaggcggcaagcaggggtttgggaggatggtttcgctctcgacttggttccgctatgccgcacaaaagttcgagtactgcgtttccctctcgttgaagaaatataatgatgtgggccggatcagcagcacgcagctaactgatgtgttgaacaaaaatttattccaaggcaagctcacctacgtgtgtccgaccaaaggggaagaagccatggctcccatcgcatctccaactggaggagccgtccttgtcagaaaactcgcaaatttgagccccacgcaagtgtttgtcggggacgttgtgttgttaaaagacccagagaaatctgatgatttaattattcgacgactggctgccctggaaggctatgagatggtctctaatgatgagaaggatgagccgtttgtgcttgagaaagaccaatgctgggtcctggcagacaacctagcccttaagccaaaggaagctagagatagccgcttgtttggacctgtcccaatgactgacatccttggcagagttatttactctttaagaaccgctgttgatcacggtctagtcgagaacagcggcatggccatgaaacaggatggtccagtactggcagttgagcttgatgtggaagagatggcgaagaacattaagccctagacagttgatgttttggacatgctgcgctgtaactcaccgtcacaatggatctttttttgttgttgtttatgatctgttgcttcaagtagaactgcattggaatgttttttcacggtttgcctttggagcagtcaataatggtcttgacagataatccagaggccgctggaccgtgttcactcagaatggctgtttttagggtttttcttattcatgaagttgctgtgaatcttgtatctgcttgtgttcatggagccacgcccgacgggtaagctgctgctgcgtcttgtagcagataaaccgtcaagattgtttaggcctgaataaattttcgtccctgcgacatacctgagcatttccgaagggcggaaatcaaatgaacgtccttggggagagccgagtcttcctcctcctccttgctccaaacagtctcgcccgcatcaatgtgtttgacatgatctgggaagagatcgtccgtgcttcctggtctcctctcagagggtgtcttcatgcaccctttatcatgaagatgatcgaagtggtcacccagacccacttcgaaaaacccgtcaaacactcccgctacgtaccctactgggttgattcctccaacccagctgctcgtacgaagcgggctccctcacggtctggaggccctgcctcctccactgagccacctcgccagcctccccttcatccatcctcctctccccccgctgctgcctcgcgtccctctcctggccgcggatctcccatgccacgtgctcgtggtcgtggtcgaggtcgtggccgcgggatgggtgctcggttggtnccatgcccgg

SEQ ID NO: 82182 - DNA, 477 bp, Zea mays
  Clone ID: MRT4577_174965C.1
ggggggggggggggattttttttttttttttttttttttttttttttttttttttttttttttttttttttttttttttttttttttttggggggaaaaacgcaaaaaaaacgcctatagatctaatattaaatccccccccaaacggggggggggggggggggcggcatccccgtcgggaaaccccgaggaccttaaaaaaaaccccaggaccaggaaacccaggggaggagcgagcgaccatggataatggggggggcaattgacaggatcttatttactggaccccgctattatatttaaaccccttggggggggcctcctccttttaacttttgggcgccattgccgggccgggccaatttaattgcaactgcaaaaggaacaaccccaactggggccccacttgcagggggtggagtcccaacccccccccttggggggcgccttaaaacccccggggctggccttgggggt

SEQ ID NO: 82183 - DNA, 587 bp, Zea mays
  Clone ID: MRT4577_174966C.1
ccggagctgtatgagtcctctaagtccgggcgagccgcggtacatggcgtacgcctgttgcgattcccgcgagcgcccgtcatcgacacttgggcctgcagtcccgtgtgaggaagttaaccgtttcgcaacaaccctctccatggtccactcttacgataagagcaaatacgccgtgaccggttgcgacatcgagtactccgagtgcgcactcagagggcatgccatctgaccaattggccataattgttgccgtggcatcagggggctactgtcgctcactgactgagcgcccgataacttacacttcgacggatgactgtgtcacgatcggttaccctgcgcataccaatgtgaagaaagagctcgcatgggagcagagcgatgaccagatgctgcatcctgaaaaacgatggcgagagcgtgtggttacataccctacagagctaccatttcttctggaagggctggccgatgttacgctcaaactggttggaggacacgtacgactcttgctgagtcagcatgcacatgagagcctcctcaagaccgcgctgagcgctagacgagcggtgtccatctttgaa

SEQ ID NO: 82184 - DNA, 2511 bp, Zea mays
  Clone ID: MRT4577_174967C.1
gacccacgcgtccgcggacgcgtgggcggacgcgtgggtccgccgccgccgctccccgctctctcctctgcttgcggactgcgtggagcaccagcggcggccagcgggcaggaggagctccctccccaaacagagaggggtggggtatcagtgcgtgcgctcctggaggagggcgtggaagagcagagcaggcggcaagcaggggtttgggaggatggtttcgctctcgacttggttccgctatgccgcacacaagtttgattactgcatctccctctcgttgaagaaatataatgtgggccagatcagcagcacgcagctaactgatgtgatattcaaaaatttcttccatggcaagctcacctacgtgtgtcagaccaaaggggaagaagccatggctcccatcgtatctccaactggaggagccgtccttgtcagaaagctcgcaaatttgagccccacatccagtatcgctgggcaggtcaacctactcaacgctgtttcctgcagccatggatgccacgtccagcagttcccgtgcatgcgctcaagtgtcgactccgtgccctgcaggtggcctcctctcaagctctagatatcgggagttgttggagtaatagtattttgtttaggatttaaagttttagggacgtcccaatatctatatattgggagaaatatttttaggagatgttggagatgctctaaggatgtcttattttgcatagaatgtaaaataatagtaaactaatattgtcttgccatgccaatttcttattctgtttcctactgcaaaaactattataaaactaacccaggaactgcttagcctttgttttgcattttgatgctttatttgaatccatatatatttgctatttctagacggtaacaactaagcctaaaacagaaataatcaactaagcattggactttgttaatatccatctcattaactaagctaactatattgcacaagcacggtaaagactaaagatgcccctagctacaattcttacctagattcttatttgcatgtttgataatcaactaatgcagcgaaagggcctctagtgtaataatggttaaggcttccgggtagtatctctaggtcccgggtttgcgaattctagcttggttaaaaatatcctctcgttgtaccccgcccgctcccgggttacgtcctacgcgccaccctctggttgggctgttgcagagtgggcggtggcagcccgctagtgatgtggggctagggttcgaggattttctttgctaagaccatgtttcggtctcttcttaatataataccggaggaggacggtctttgcctccccggccgagtttttttttaataatcaactaatgcagtcaatgcataatatattccaacgttactgcattcctttcatttaatactctttaagaacagctgttaatcacagtccatctatttgtataatgtgacattattttcaaactgtggactatgtgaagtatagttaattctcacctgttggatctcacggaatagattttatttttgcattttagtgaaaactcattaaagcatcaacatgaaggaaacctggttggctggtttgtaaagcaacttcacctgatagccagagaccatttgacatcacctattgcttaagatgtttttaatagtctttagcgtgtaaaattttctccacagggaagtgtttgtcggggacgttgtcttgttaaaagacccagagaaatctggcaattttgttattcgacgactggctgccctggaaggctatgagatggtctctaatgatgagaaggatgagccgtttgtgctcgagaaagaccaatgctgggtcctggcagacaacctagtccttaagccaaaggaagctagagatagccgcttgtttggacctgtcccaatgactgacatccttggcagagtgatatactctttaagaaccgctgttgatcacggtctagtcgagaacagcggcatggccacgaaactggatggtccagtactggcagtggagcttgatgtggaagagttggcgaagaacaataaggcgtagacacttgatgttttcgacatgctgcgctataactcaccttaacaatggatgttttttttttgtttatgatctgctgctgcttcaagtagaagtgcattggaatgttttttcacggtttgcctgtggagcagtcaataatggtcttgacagataacccagaggccgctggaccgtgttcactcagaattctcagcaggatacatcgtgtgactgtaatggttgtttttagggtttcttattcatgaagttgccgtgaatcttgtatctgcttgtgttcatggagccacggtccacgggtaagctgctgctgctgcgtcttgtagcagataaaccgtcaagattgtttaggcctgaaagggatcaaaacgttatgctgatatattgatctgaagtggacataggtaaaaaatgtctgcataaaaaaaaaaaaaaaaaaaaaaaa

SEQ ID NO: 82185 - DNA, 675 bp, Zea mays
  unsure (1)..(675): unsure at all n locations
  Clone ID: MRT4577_174968C.1
gaggaggctaactaggagcatagacatagcagagagccactagcgcctatcttagcaccaatggcgaagccgggcatgttagggctactaaggggtaaaagatgtttaagaaagcgcgtgatgacctacaagtatctatctatcattaaaaggtngactagacaatacgctgctactccggacatcagccatcgtggattcaaagatcctgtaactattactagaacttnacatgattacaaagcaatgccatnccaaagacgatgcgatggttcataggtccattcagagactgagacccgtctccaacaacagaatagtgcctactcattcgctatacacgcgcatagcattcaatngacactcgtgtgactgctctcagaagcaatccgccgggcacagactaagctacagacacacagttgtctacaagacaattaatgaagttgctagaaggaaaccttgctgataaccttcagcagcaacagtggtcgcattcaatcaactaggttgagtgaaccctattctgtacttgcaggctcaacatctactaccatttaaccaactagagaagagcgcttatgtccttttactgcaacaacagcttctgccattccatctgcaagctgtggcaaacattgttgctttcttgagacaacaacatttgttgccatt

SEQ ID NO: 82186 - DNA, 1338 bp, Zea mays
  Clone ID: MRT4577_174969C.1
gaccagcgcactgcagcatcctttcttgccataaaaaaccccgcgactctggtcagagagggagagcgagctagaagcctagaaccggcaggaagccagacgagcggagccaccacgcgtgagctgcaacgtaggcggcgggggcatggcgggccggctggcggggcgaggcgggaggccgctgctaggcggaagtggcgggggcgggaagcggggcgggaggccgtcgatggcggtcgtggcggcgctgctgctggcgtgcgcggcgctgctcctgctcctggccctcggcgcgctatcgctgcccggggcctccgacggctccggaggacgcggtgcggggctctcgctctcgcgcccccgctcgcgcttccgcagatccgccttcgactcggggctagagacgcgtggggagaagggggagccgtggacggaggtgctgtcgtgggagccccgcgcgttcgtgtaccacaacttcctctccaaggaagaatgtgaccatttgatttcactggcaaagcctcatatgaagaagtcaacagtagttgattcagcaactggaggcagcaaggacagcagggtgcggacaagttcaggaatgtttcttagaagagggcaggacaaaattattcggacaattgagaaaaggatagcagattacaccttcatacctgtagagcagggtgagggtcttcaagttctccactatgaagttgggcagaagtatgaacctcactttgattacttccatgatgattacaacaccaagaatggaggccagcgtatagcaactcttcttatgtatctttcggatgttgaagatggtggcgagactgtgttcccttcgtcgacaacaaacagcagctcgtcaccattttataatgagctgtctgaatgtgcaaagggtggtctatctgttaaaccaaagatgggagatgcgcttctgttctggagcatgaagcctgatgggtccctagatcccacaagcctgcatggtggatgcccagttataaaaggcaacaaatggtcatcgacgaagtggatgcgtgttcatgagtacaaagtttagatacaaaaagacacagacctgaggtcatgcaccggttcaaatgcgtggacattttggcacatgtcgagagtttcgattttccatagaggattaatttacagttcatcttttctagctgttactctgaggcaatgtcttaggctccgtgttgtacattaacatgttaggctgatgaacataaacgataaacctgatgattcagagatggatgtgttgggtgtatgccattgcccttgttcgaatcaagataggatgtcttattgatgttg

SEQ ID NO: 82187 - DNA, 318 bp, Zea mays
  Clone ID: MRT4577_17496C.1
aaaaaaaaaaaaaatatcataaatagtttgaaaaaaaaacgggaaggcccaaaaaatcggcagttcatcgttttgagaaggatacaaaattaaaatccatgcaggaaaaatatttttaatttataaaaaagggttaagggtgggaaacgaaaattaaggccttgtaagccttggaaaaagaaaaagaagtttggcccttaaaaaaacaagttttctttggggaaaaaaaaccaaccttttggccagaaggggcatcacgggggacaggggaggtataaacaaggggcggggggtaaccttctgaaggaggatgctaaa

SEQ ID NO: 82188 - DNA, 289 bp, Zea mays
  Clone ID: MRT4577_174970C.1
ctacaattcgtcacgcccatggcggggtcccctccgacccgtaacttcgctccgcccatggccgtcgtcgcccaagcacggcctcccacggcctcgcctatttctccctccctcctcccacggaagccccatctattcatcacgcctgtcattggctctgccttcgggtgctgtagaatatgaccatgggaacccatggcgtcgccctgacactcctcacaacggtgcttttcgaggccaccattccagtgtcagcaggggatggccttgcttgggtcctgcaagaagc

SEQ ID NO: 82189 - DNA, 271 bp, Zea mays
  Clone ID: MRT4577_174971C.1
acgcccacgcatatgtacaattcgattcccatttttgtaattaatccaaattaacctgcacagtactattataaagggcatgtgctcttgaaaaacataaagtcatctcattaatcccccatatacaccatagtcattgaaaaaactctttctctactcatacccattgaattaaaatacacatttataaaatcaactatcatatcaactcatacaaaatatcaagatacacatactactcactaacgcctctctgaaaaccatttacatt

SEQ ID NO: 82190 - DNA, 336 bp, Zea mays
  Clone ID: MRT4577_174973C.1
cttccaaacgaacggttaaaataaaatgtataaccaaagaaaaatgaagaacacagtgtaatcatatctggcttatgtaacccgaccccgttcttaagggaacatatcacattcaaatctccaataacgatcccaaaccacataagatgtgttattaaaatccaattaatcgggactaaaaccaattcgagagaacaaacgaacgatgactcagtacccattaatctgtcttcctgttgttgccgatcctaccaaccgaaagaagggttgctgctgcgtttggttgttgcggtttttgttaaaactgttgctgcttccaattccagatttagggtc

SEQ ID NO: 82191 - DNA, 694 bp, Zea mays
  Clone ID: MRT4577_174974C.1
ttttttttttttttttttttagagcgcatgccatgtcttttgattaggtggcgctagcactgcatctctgttcgctttctttcttctttctttttagagtccgtgccacctctctgtgtgtacgtcatgctagctccgcacctccctccgcggccctgccgcccgcccttttcttaccgcccgtccacccggtacggtccacgcgcgtgcgtccgtccggcgaggtacgccctctccaccgaccctttgtgacgtcctactgagcgcgtcccgtgctcgctcccacgtacggtcgtcgtgctgcggcgccgcccgcgccacgaaagggacgtcgccactgccccgcacacgtgcggggccctggcgtgcgttcgtgctccagcgcggcgcgcttgtgggtatgcgttccgcgatgcactgctcccctctcctgatcaaagacacagggcctgcacacaacagtcaatgtttataccgatcgaccacactgagtgtactacaagctagctacgtacgtgcctctgtcgaccgaccttatctaacgaccaattgatcgggtacagtacacgcacgtacgtacgtacgtcgaggtacggctactccaaggacacgtagtacagagcacgacacatgattggttccatgtagagtaatcatgctgcagcgcggcgcgctcccaggatagagacgtcgc

SEQ ID NO: 82192 - DNA, 463 bp, Zea mays
  Clone ID: MRT4577_174975C.1
ccggccgggacccacacgcacatcattctaagaaaccggaccgcccgagacggtgcctcctcgccaagcagggccgcctagtgcctccatccgtacttgtaagcccgcacgctagcttgccgctgtttagcgccgaacggttgagcacacaccccagctcacctgtccacggacggcaacgtgatccaagctctgcgcacgctgatcatcacccccaatgtacgaaaccatatctgaagcgtatatcaaagagcacgacggggaccacttctactttaagctcaatgatgggcctacagacacccggacgatcgacatcaatgccccgctcatggaccccctctgcatccgctgtgctgtcaagctcggaggctaccgcatctacgacgacgtcatcctcgacgatatcaacgtcgtcaccgcctacaagatcacactcgccatccaatcagtctctggggat
